United States Patent Application Publication US 2026/0240958 A1 - sequence listing, part 11

SEQ ID NO: 10014 - RNA, 8787 nt, synthetic construct
  source 1..8787: mol_type = other RNA
aggaaataagagagaaaagaagagtaagaagaaatataagagccaccatggcccctaagaagaagcgtaaagtgagccggatgaaccacgaccaggagttcgacccccctaaggtgtaccctcccgtccccgccgagaagagaaagcccatccgggtcctgagcctgttcgatggcatcgccaccggtctgctggtgctgaaggacctgggcatccaggtggataggtacattgcctccgaggtgtgcgaggactccatcaccgtgggaatggtgcgtcatcagggcaagatcatgtacgtgggcgacgtgcggagcgtgacacagaagcatatccaggagtggggccctttcgacctggtgatcggcggcagcccttgcaatgacctgagcatcgtgaacccagcccggaagggcctgtacgagggaaccggcagactgttcttcgagttttacagactgctgcacgacgcccggcctaaggaaggcgacgaccggcccttcttttggctgttcgagaatgtggtggccatgggagtcagcgacaagcgggatattagccggttcctggagagcaaccccgtgatgatcgatgccaaggaagtgagcgccgcccaccgggccagatacttctggggcaatctgcctggcatgaacagacccctggccagcaccgtgaacgacaagctggagctgcaggagtgcctggagcacggccggatcgccaagttcagcaaggtgagaaccatcaccacccgaagcaacagcatcaaacaaggcaaggaccagcactttcctgtgttcatgaacgagaaggaggacatcctgtggtgtaccgagatggagagagtgttcgggttcccagtccactacacagatgtcagcaacatgtctagactggccagacagagactgctgggaagaagctggtccgtccctgtgatcagacacctgttcgcccctctgaaggagtacttcgcctgcgtgagcagcggcaacagcaacgccaacagccggggccccagcttctctagcggcctggtgccactgtccctgagagggagccacatgggccccatggagatctacaaaaccgtgagcgcctggaagcggcagcctgtgcgcgtgctgagcctgtttcggaatatcgataaagtcctgaaaagcctgggattcctggagagcggctctggctccggcggtggcaccctgaagtacgtggaggatgtgacaaacgtggtcagacgggatgtggagaagtggggccccttcgatctggtgtacggcagcacccaacccctgggcagctcttgtgaccggtgccctggctggtacatgtttcagttccaccggatcctgcagtacgccctgccgagacaggagtcccagcggccattcttttggattttcatggacaacttgctgctgaccgaggatgaccaggaaactaccactcggttcctgcagaccgaagccgtgaccctgcaggacgtgagaggccgggactaccagaacgccatgcgggtgtggtccaacatccctggactgaaaagcaagcacgcacctctgacccctaaagaagaggagtacctgcaggcccaggtgcggagcagaagcaagctggacgcccctaaggtggatctgctggtgaagaattgcctcctgcccctgagagagtacttcaagtatttcagccagaatagtctgcccctgggaggcagcggcggcggcagccacggccccctgagcttcgaggacgtggccgtggccttcaccaaggaggagtggcagcagctggaccccgcccagaggaccctgtacagggacgtgatgctggagaacttcagccacctggtgagcctgggccaccccgtgagcaagcccgacgtgatcagcaagctggagcagggcgaggagccctggatcatcaagagggacatccccaactggatctaccccgagagggagaacaggggcggcccaagcagcggcgcccctcctcccagcggcggcaggcggcccaagcagcggcgcccctcctcccagcggcggcagcccagccggctccccaacctctaccgaggagggcacctctgagtccgccacccccgagagcggccctggcacctccaccgagcccagcgagggcagcgcacccggcagccctgccggcagccccacctccacagaggagggaaccagcaccgagcccagcgaaggcagcgccccaggcaccagcaccgagcctagtgagcaggagattaaacggatcaacaagatcagaagaagacttgtgaaagacagcaacaccaagaaggccggcaagacaggccccatgaaaaccctgctggttagagtgatgacacccgatctgagagagcggctggaaaacctgagaaagaagcctgaaaatatcccccagcccatcagcaatacatctagagccaacctgaataagctgctgaccgattacaccgaaatgaagaaggcgatcctgcatgtgtactgggaagagttccagaaggaccctgtgggcctgatgagccgggtggcccagcctgccagcaagaagatcgatcagaacaagctgaaacctgagatggacgagaagggcaacctgaccaccgccggctttgcctgctctcagtgtggccagcccctgttcgtgtacaagctggagcaggtgtctgagaagggcaaggcttacaccaactacttcggacggtgcaatgtggccgagcacgaaaagctgatcctgctggcccagctgaagcccgagaaggatagcgacgaagccgtgacatatagcctgggaaagtttgggcagagggccctggatttctacagcattcatgtgaccaaggagtccacccaccccgtgaagcccctggcccagatcgccggaaacagatacgcctccggacctgtgggaaaggccctgagcgacgcatgtatgggcacaatcgcctccttcctgtctaagtaccaggacatcatcatcgaacaccagaaggtggtgaagggcaaccagaagagactggagagcctgcgggagctggccggcaaggaaaacctggaataccctagcgtgaccctgccacctcagcctcacaccaaggagggcgttgatgcctacaacgaagtgatcgcccgggtgcgaatgtgggtgaacctgaacctgtggcagaagctgaagctaagcagagatgatgccaagcctctgctgagactgaagggattcccttcctttcctctggtcgagagacaggccaacgaagtggactggtgggacatggtgtgtaacgtgaagaagctgatcaacgagaaaaaggaggatggcaaggtgttttggcagaatctggctggctacaagagacaggaagccctgagaccatacctgagcagcgaggaagatcggaagaagggaaagaaattcgctcggtaccagctgggcgacctgctgctgcacctggaaaagaagcacggcgaggactggggaaaggtgtacgacgaggcctgggagcggattgacaagaaagtggaaggcctgagcaagcacatcaagctggaagaggaacggagaagcgaggacgcccagagcaaggccgccctgaccgactggctgcgggctaaggccagcttcgtgatcgagggcctgaaggaggccgacaaggacgagttctgcagatgcgagctgaagctgcagaagtggtacggggacctgcggggaaagcccttcgccatcgaagccgagaacagcatcctggacatcagcggcttcagcaagcagtacaactgtgccttcatctggcagaaggacggcgtgaagaagctgaacctgtacctgatcatcaactacttcaagggcggcaagctgcggttcaagaagatcaaacctgaagccttcgaagccaacagattctacaccgtgatcaacaaaaagagcggcgagatcgtgcccatggaggtgaacttcaacttcgacgaccccaacctgatcatcctgcctctggcctttggcaagagacagggcagagaattcatctggaacgacctgctgtccctggaaaccggcagcctgaagctggccaacggaagagtgatcgagaagacactgtacaacagaagaacccggcaggatgagcctgccctgttcgtggccctgaccttcgagcggcgggaggtcctggactcctccaatatcaaaccaatgaacctgatcggcgtggcaagaggcgaaaacatccccgccgtgatcgccctgaccgaccccgagggctgcccactgagccggtttaaggatagcctgggaaacccaacccacatcctgagaatcggcgagagctataaggagaagcagcggaccatccaggccaagaaggaggtggagcagcggagagccggcggctacagccggaagtacgccagcaaagccaagaatctggcagacgatatggtgagaaacaccgctagagatctgctgtactacgccgtgacccaggatgccatgctgatcttcgccaacctgagccggggcttcggccggcagggcaagcggaccttcatggccgagagacagtacacacggatggaggactggctgaccgccaagctggcctacgagggcctgagcaagacctacctgtccaagacactggcccagtacacctccaagacatgcagcaactgtgggtttaccatcaccagcgccgactacgacagggtgctggagaagctgaagaagacagcaacaggctggatgaccacaattaacggcaaggagctgaaggtggagggccagattacctactacaacagatacaagagacagaacgtagtcaaggacctgtccgtcgagctggatagactgagcgaagaatctgtgaacaacgacatctcctcctggacaaagggcagaagcggagaagctctgagcctcctgaagaaaagattctcccatagacccgtgcaggagaagttcgtgtgcctgaactgcggcttcgagacacacgcagccgagcaagccgccctgaacatcgccagatcctggctgttcctgcggagccaggagtacaagaaataccagacaaacaagacaaccggcaacaccgataagagagccttcgtcgagacctggcagtccttttaccggaagaagcttaaggaggtgtggaaacctgccgtgcggtctggcggatctggcggaggctccaccagccccaagaaaaagagaaaagtctaagctgccttctgcggggcttgccttctggccatgcccttcttctctcccttgcacctgtacctcttggtctttgaataaagcctgagtaggaaggctagcaaaaaaaaaaaaaaaaaaaaaaaaaaaaaaaaaaaaaaaaaaaaaaaaaaaaaaaaaaaaaaaaaaaaaaaaaaaaaaaagcccagccggctccccaacctctaccgaggagggcacctctgagtccgccacccccgagagcggccctggcacctccaccgagcccagcgagggcagcgcacccggcagccctgccggcagccccacctccacagaggagggaaccagcaccgagcccagcgaaggcagcgccccaggcaccagcaccgagcctagtgagcaggagattaaacggatcaacaagatcagaagaagacttgtgaaagacagcaacaccaagaaggccggcaagacaggccccatgaaaaccctgctggttagagtgatgacacccgatctgagagagcggctggaaaacctgagaaagaagcctgaaaatatcccccagcccatcagcaatacatctagagccaacctgaataagctgctgaccgattacaccgaaatgaagaaggcgatcctgcatgtgtactgggaagagttccagaaggaccctgtgggcctgatgagccgggtggcccagcctgccagcaagaagatcgatcagaacaagctgaaacctgagatggacgagaagggcaacctgaccaccgccggctttgcctgctctcagtgtggccagcccctgttcgtgtacaagctggagcaggtgtctgagaagggcaaggcttacaccaactacttcggacggtgcaatgtggccgagcacgaaaagctgatcctgctggcccagctgaagcccgagaaggatagcgacgaagccgtgacatatagcctgggaaagtttgggcagagggccctggatttctacagcattcatgtgaccaaggagtccacccaccccgtgaagcccctggcccagatcgccggaaacagatacgcctccggacctgtgggaaaggccctgagcgacgcatgtatgggcacaatcgcctccttcctgtctaagtaccaggacatcatcatcgaacaccagaaggtggtgaagggcaaccagaagagactggagagcctgcgggagctggccggcaaggaaaacctggaataccctagcgtgaccctgccacctcagcctcacaccaaggagggcgttgatgcctacaacgaagtgatcgcccgggtgcgaatgtgggtgaacctgaacctgtggcagaagctgaagctaagcagagatgatgccaagcctctgctgagactgaagggattcccttcctttcctctggtcgagagacaggccaacgaagtggactggtgggacatggtgtgtaacgtgaagaagctgatcaacgagaaaaaggaggatggcaaggtgttttggcagaatctggctggctacaagagacaggaagccctgagaccatacctgagcagcgaggaagatcggaagaagggaaagaaattcgctcggtaccagctgggcgacctgctgctgcacctggaaaagaagcacggcgaggactggggaaaggtgtacgacgaggcctgggagcggattgacaagaaagtggaaggcctgagcaagcacatcaagctggaagaggaacggagaagcgaggacgcccagagcaaggccgccctgaccgactggctgcgggctaaggccagcttcgtgatcgagggcctgaaggaggccgacaaggacgagttctgcagatgcgagctgaagctgcagaagtggtacggggacctgcggggaaagcccttcgccatcgaagccgagaacagcatcctggacatcagcggcttcagcaagcagtacaactgtgccttcatctggcagaaggacggcgtgaagaagctgaacctgtacctgatcatcaactacttcaagggcggcaagctgcggttcaagaagatcaaacctgaagccttcgaagccaacagattctacaccgtgatcaacaaaaagagcggcgagatcgtgcccatggaggtgaacttcaacttcgacgaccccaacctgatcatcctgcctctggcctttggcaagagacagggcagagaattcatctggaacgacctgctgtccctggaaaccggcagcctgaagctggccaacggaagagtgatcgagaagacactgtacaacagaagaacccggcaggatgagcctgccctgttcgtggccctgaccttcgagcggcgggaggtcctggactcctccaatatcaaaccaatgaacctgatcggcgtggcaagaggcgaaaacatccccgccgtgatcgccctgaccgaccccgagggctgcccactgagccggtttaaggatagcctgggaaacccaacccacatcctgagaatcggcgagagctataaggagaagcagcggaccatccaggccaagaaggaggtggagcagcggagagccggcggctacagccggaagtacgccagcaaagccaagaatctggcagacgatatggtgagaaacaccgctagagatctgctgtactacgccgtgacccaggatgccatgctgatcttcgccaacctgagccggggcttcggccggcagggcaagcggaccttcatggccgagagacagtacacacggatggaggactggctgaccgccaagctggcctacgagggcctgagcaagacctacctgtccaagacactggcccagtacacctccaagacatgcagcaactgtgggtttaccatcaccagcgccgactacgacagggtgctggagaagctgaagaagacagcaacaggctggatgaccacaattaacggcaaggagctgaaggtggagggccagattacctactacaacagatacaagagacagaacgtagtcaaggacctgtccgtcgagctggatagactgagcgaagaatctgtgaacaacgacatctcctcctggacaaagggcagaagcggagaagctctgagcctcctgaagaaaagattctcccatagacccgtgcaggagaagttcgtgtgcctgaactgcggcttcgagacacacgcagccgagcaagccgccctgaacatcgccagatcctggctgttcctgcggagccaggagtacaagaaataccagacaaacaagacaaccggcaacaccgataagagagccttcgtcgagacctggcagtccttttaccggaagaagcttaaggaggtgtggaaacctgccgtgcggtctggcggatctggcggaggctccaccagccccaagaaaaagagaaaagtctaagctgccttctgcggggcttgccttctggccatgcccttcttctctcccttgcacctgtacctcttggtctttgaataaagcctgagtaggaaggctagcaaaaaaaaaaaaaaaaaaaaaaaaaaaaaaaaaaaaaaaaaaaaaaaaaaaaaaaaaaaaaaaaaaaaaaaaaaaaaaaa

SEQ ID NO: 10015 - RNA, 8787 nt, synthetic construct
  source 1..8787: mol_type = other RNA
aggaaataagagagaaaagaagagtaagaagaaatataagagccaccatggcccctaagaagaagcgtaaagtgagccggatgaaccacgaccaggagttcgacccccctaaggtgtaccctcccgtccccgccgagaagagaaagcccatccgggtcctgagcctgttcgatggcatcgccaccggtctgctggtgctgaaggacctgggcatccaggtggataggtacattgcctccgaggtgtgcgaggactccatcaccgtgggaatggtgcgtcatcagggcaagatcatgtacgtgggcgacgtgcggagcgtgacacagaagcatatccaggagtggggccctttcgacctggtgatcggcggcagcccttgcaatgacctgagcatcgtgaacccagcccggaagggcctgtacgagggaaccggcagactgttcttcgagttttacagactgctgcacgacgcccggcctaaggaaggcgacgaccggcccttcttttggctgttcgagaatgtggtggccatgggagtcagcgacaagcgggatattagccggttcctggagagcaaccccgtgatgatcgatgccaaggaagtgagcgccgcccaccgggccagatacttctggggcaatctgcctggcatgaacagacccctggccagcaccgtgaacgacaagctggagctgcaggagtgcctggagcacggccggatcgccaagttcagcaaggtgagaaccatcaccacccgaagcaacagcatcaaacaaggcaaggaccagcactttcctgtgttcatgaacgagaaggaggacatcctgtggtgtaccgagatggagagagtgttcgggttcccagtccactacacagatgtcagcaacatgtctagactggccagacagagactgctgggaagaagctggtccgtccctgtgatcagacacctgttcgcccctctgaaggagtacttcgcctgcgtgagcagcggcaacagcaacgccaacagccggggccccagcttctctagcggcctggtgccactgtccctgagagggagccacatgggccccatggagatctacaaaaccgtgagcgcctggaagcggcagcctgtgcgcgtgctgagcctgtttcggaatatcgataaagtcctgaaaagcctgggattcctggagagcggctctggctccggcggtggcaccctgaagtacgtggaggatgtgacaaacgtggtcagacgggatgtggagaagtggggccccttcgatctggtgtacggcagcacccaacccctgggcagctcttgtgaccggtgccctggctggtacatgtttcagttccaccggatcctgcagtacgccctgccgagacaggagtcccagcggccattcttttggattttcatggacaacttgctgctgaccgaggatgaccaggaaactaccactcggttcctgcagaccgaagccgtgaccctgcaggacgtgagaggccgggactaccagaacgccatgcgggtgtggtccaacatccctggactgaaaagcaagcacgcacctctgacccctaaagaagaggagtacctgcaggcccaggtgcggagcagaagcaagctggacgcccctaaggtggatctgctggtgaagaattgcctcctgcccctgagagagtacttcaagtatttcagccagaatagtctgcccctgggaggcagcggcggcggcgacctggtgacctacgacgacgtgcacgtgaacttcacccaggaggagtgggccctgctggaccccagccagaagaacctgtacaaggacgtgatgctggagacctacaggaacctgagcgccatcggctacatctgggaggtgcacaccagcgaggaccacttccagaccagcaggagccacggcaggcacgagaggagctgcaccgccgtgcagcccagcgagttcatccagtgcggcaagggcggcccaagcagcggcgcccctcctcccagcggcggcaggcggcccaagcagcggcgcccctcctcccagcggcggcagcccagccggctccccaacctctaccgaggagggcacctctgagtccgccacccccgagagcggccctggcacctccaccgagcccagcgagggcagcgcacccggcagccctgccggcagccccacctccacagaggagggaaccagcaccgagcccagcgaaggcagcgccccaggcaccagcaccgagcctagtgagcaggagattaaacggatcaacaagatcagaagaagacttgtgaaagacagcaacaccaagaaggccggcaagacaggccccatgaaaaccctgctggttagagtgatgacacccgatctgagagagcggctggaaaacctgagaaagaagcctgaaaatatcccccagcccatcagcaatacatctagagccaacctgaataagctgctgaccgattacaccgaaatgaagaaggcgatcctgcatgtgtactgggaagagttccagaaggaccctgtgggcctgatgagccgggtggcccagcctgccagcaagaagatcgatcagaacaagctgaaacctgagatggacgagaagggcaacctgaccaccgccggctttgcctgctctcagtgtggccagcccctgttcgtgtacaagctggagcaggtgtctgagaagggcaaggcttacaccaactacttcggacggtgcaatgtggccgagcacgaaaagctgatcctgctggcccagctgaagcccgagaaggatagcgacgaagccgtgacatatagcctgggaaagtttgggcagagggccctggatttctacagcattcatgtgaccaaggagtccacccaccccgtgaagcccctggcccagatcgccggaaacagatacgcctccggacctgtgggaaaggccctgagcgacgcatgtatgggcacaatcgcctccttcctgtctaagtaccaggacatcatcatcgaacaccagaaggtggtgaagggcaaccagaagagactggagagcctgcgggagctggccggcaaggaaaacctggaataccctagcgtgaccctgccacctcagcctcacaccaaggagggcgttgatgcctacaacgaagtgatcgcccgggtgcgaatgtgggtgaacctgaacctgtggcagaagctgaagctaagcagagatgatgccaagcctctgctgagactgaagggattcccttcctttcctctggtcgagagacaggccaacgaagtggactggtgggacatggtgtgtaacgtgaagaagctgatcaacgagaaaaaggaggatggcaaggtgttttggcagaatctggctggctacaagagacaggaagccctgagaccatacctgagcagcgaggaagatcggaagaagggaaagaaattcgctcggtaccagctgggcgacctgctgctgcacctggaaaagaagcacggcgaggactggggaaaggtgtacgacgaggcctgggagcggattgacaagaaagtggaaggcctgagcaagcacatcaagctggaagaggaacggagaagcgaggacgcccagagcaaggccgccctgaccgactggctgcgggctaaggccagcttcgtgatcgagggcctgaaggaggccgacaaggacgagttctgcagatgcgagctgaagctgcagaagtggtacggggacctgcggggaaagcccttcgccatcgaagccgagaacagcatcctggacatcagcggcttcagcaagcagtacaactgtgccttcatctggcagaaggacggcgtgaagaagctgaacctgtacctgatcatcaactacttcaagggcggcaagctgcggttcaagaagatcaaacctgaagccttcgaagccaacagattctacaccgtgatcaacaaaaagagcggcgagatcgtgcccatggaggtgaacttcaacttcgacgaccccaacctgatcatcctgcctctggcctttggcaagagacagggcagagaattcatctggaacgacctgctgtccctggaaaccggcagcctgaagctggccaacggaagagtgatcgagaagacactgtacaacagaagaacccggcaggatgagcctgccctgttcgtggccctgaccttcgagcggcgggaggtcctggactcctccaatatcaaaccaatgaacctgatcggcgtggcaagaggcgaaaacatccccgccgtgatcgccctgaccgaccccgagggctgcccactgagccggtttaaggatagcctgggaaacccaacccacatcctgagaatcggcgagagctataaggagaagcagcggaccatccaggccaagaaggaggtggagcagcggagagccggcggctacagccggaagtacgccagcaaagccaagaatctggcagacgatatggtgagaaacaccgctagagatctgctgtactacgccgtgacccaggatgccatgctgatcttcgccaacctgagccggggcttcggccggcagggcaagcggaccttcatggccgagagacagtacacacggatggaggactggctgaccgccaagctggcctacgagggcctgagcaagacctacctgtccaagacactggcccagtacacctccaagacatgcagcaactgtgggtttaccatcaccagcgccgactacgacagggtgctggagaagctgaagaagacagcaacaggctggatgaccacaattaacggcaaggagctgaaggtggagggccagattacctactacaacagatacaagagacagaacgtagtcaaggacctgtccgtcgagctggatagactgagcgaagaatctgtgaacaacgacatctcctcctggacaaagggcagaagcggagaagctctgagcctcctgaagaaaagattctcccatagacccgtgcaggagaagttcgtgtgcctgaactgcggcttcgagacacacgcagccgagcaagccgccctgaacatcgccagatcctggctgttcctgcggagccaggagtacaagaaataccagacaaacaagacaaccggcaacaccgataagagagccttcgtcgagacctggcagtccttttaccggaagaagcttaaggaggtgtggaaacctgccgtgcggtctggcggatctggcggaggctccaccagccccaagaaaaagagaaaagtctaagctgccttctgcggggcttgccttctggccatgcccttcttctctcccttgcacctgtacctcttggtctttgaataaagcctgagtaggaaggctagcaaaaaaaaaaaaaaaaaaaaaaaaaaaaaaaaaaaaaaaaaaaaaaaaaaaaaaaaaaaaaaaaaaaaaaaaaaaaaaaagcccagccggctccccaacctctaccgaggagggcacctctgagtccgccacccccgagagcggccctggcacctccaccgagcccagcgagggcagcgcacccggcagccctgccggcagccccacctccacagaggagggaaccagcaccgagcccagcgaaggcagcgccccaggcaccagcaccgagcctagtgagcaggagattaaacggatcaacaagatcagaagaagacttgtgaaagacagcaacaccaagaaggccggcaagacaggccccatgaaaaccctgctggttagagtgatgacacccgatctgagagagcggctggaaaacctgagaaagaagcctgaaaatatcccccagcccatcagcaatacatctagagccaacctgaataagctgctgaccgattacaccgaaatgaagaaggcgatcctgcatgtgtactgggaagagttccagaaggaccctgtgggcctgatgagccgggtggcccagcctgccagcaagaagatcgatcagaacaagctgaaacctgagatggacgagaagggcaacctgaccaccgccggctttgcctgctctcagtgtggccagcccctgttcgtgtacaagctggagcaggtgtctgagaagggcaaggcttacaccaactacttcggacggtgcaatgtggccgagcacgaaaagctgatcctgctggcccagctgaagcccgagaaggatagcgacgaagccgtgacatatagcctgggaaagtttgggcagagggccctggatttctacagcattcatgtgaccaaggagtccacccaccccgtgaagcccctggcccagatcgccggaaacagatacgcctccggacctgtgggaaaggccctgagcgacgcatgtatgggcacaatcgcctccttcctgtctaagtaccaggacatcatcatcgaacaccagaaggtggtgaagggcaaccagaagagactggagagcctgcgggagctggccggcaaggaaaacctggaataccctagcgtgaccctgccacctcagcctcacaccaaggagggcgttgatgcctacaacgaagtgatcgcccgggtgcgaatgtgggtgaacctgaacctgtggcagaagctgaagctaagcagagatgatgccaagcctctgctgagactgaagggattcccttcctttcctctggtcgagagacaggccaacgaagtggactggtgggacatggtgtgtaacgtgaagaagctgatcaacgagaaaaaggaggatggcaaggtgttttggcagaatctggctggctacaagagacaggaagccctgagaccatacctgagcagcgaggaagatcggaagaagggaaagaaattcgctcggtaccagctgggcgacctgctgctgcacctggaaaagaagcacggcgaggactggggaaaggtgtacgacgaggcctgggagcggattgacaagaaagtggaaggcctgagcaagcacatcaagctggaagaggaacggagaagcgaggacgcccagagcaaggccgccctgaccgactggctgcgggctaaggccagcttcgtgatcgagggcctgaaggaggccgacaaggacgagttctgcagatgcgagctgaagctgcagaagtggtacggggacctgcggggaaagcccttcgccatcgaagccgagaacagcatcctggacatcagcggcttcagcaagcagtacaactgtgccttcatctggcagaaggacggcgtgaagaagctgaacctgtacctgatcatcaactacttcaagggcggcaagctgcggttcaagaagatcaaacctgaagccttcgaagccaacagattctacaccgtgatcaacaaaaagagcggcgagatcgtgcccatggaggtgaacttcaacttcgacgaccccaacctgatcatcctgcctctggcctttggcaagagacagggcagagaattcatctggaacgacctgctgtccctggaaaccggcagcctgaagctggccaacggaagagtgatcgagaagacactgtacaacagaagaacccggcaggatgagcctgccctgttcgtggccctgaccttcgagcggcgggaggtcctggactcctccaatatcaaaccaatgaacctgatcggcgtggcaagaggcgaaaacatccccgccgtgatcgccctgaccgaccccgagggctgcccactgagccggtttaaggatagcctgggaaacccaacccacatcctgagaatcggcgagagctataaggagaagcagcggaccatccaggccaagaaggaggtggagcagcggagagccggcggctacagccggaagtacgccagcaaagccaagaatctggcagacgatatggtgagaaacaccgctagagatctgctgtactacgccgtgacccaggatgccatgctgatcttcgccaacctgagccggggcttcggccggcagggcaagcggaccttcatggccgagagacagtacacacggatggaggactggctgaccgccaagctggcctacgagggcctgagcaagacctacctgtccaagacactggcccagtacacctccaagacatgcagcaactgtgggtttaccatcaccagcgccgactacgacagggtgctggagaagctgaagaagacagcaacaggctggatgaccacaattaacggcaaggagctgaaggtggagggccagattacctactacaacagatacaagagacagaacgtagtcaaggacctgtccgtcgagctggatagactgagcgaagaatctgtgaacaacgacatctcctcctggacaaagggcagaagcggagaagctctgagcctcctgaagaaaagattctcccatagacccgtgcaggagaagttcgtgtgcctgaactgcggcttcgagacacacgcagccgagcaagccgccctgaacatcgccagatcctggctgttcctgcggagccaggagtacaagaaataccagacaaacaagacaaccggcaacaccgataagagagccttcgtcgagacctggcagtccttttaccggaagaagcttaaggaggtgtggaaacctgccgtgcggtctggcggatctggcggaggctccaccagccccaagaaaaagagaaaagtctaagctgccttctgcggggcttgccttctggccatgcccttcttctctcccttgcacctgtacctcttggtctttgaataaagcctgagtaggaaggctagcaaaaaaaaaaaaaaaaaaaaaaaaaaaaaaaaaaaaaaaaaaaaaaaaaaaaaaaaaaaaaaaaaaaaaaaaaaaaaaaa

SEQ ID NO: 10016 - RNA, 8787 nt, synthetic construct
  source 1..8787: mol_type = other RNA
aggaaataagagagaaaagaagagtaagaagaaatataagagccaccatggcccctaagaagaagcgtaaagtgagccggatgaaccacgaccaggagttcgacccccctaaggtgtaccctcccgtccccgccgagaagagaaagcccatccgggtcctgagcctgttcgatggcatcgccaccggtctgctggtgctgaaggacctgggcatccaggtggataggtacattgcctccgaggtgtgcgaggactccatcaccgtgggaatggtgcgtcatcagggcaagatcatgtacgtgggcgacgtgcggagcgtgacacagaagcatatccaggagtggggccctttcgacctggtgatcggcggcagcccttgcaatgacctgagcatcgtgaacccagcccggaagggcctgtacgagggaaccggcagactgttcttcgagttttacagactgctgcacgacgcccggcctaaggaaggcgacgaccggcccttcttttggctgttcgagaatgtggtggccatgggagtcagcgacaagcgggatattagccggttcctggagagcaaccccgtgatgatcgatgccaaggaagtgagcgccgcccaccgggccagatacttctggggcaatctgcctggcatgaacagacccctggccagcaccgtgaacgacaagctggagctgcaggagtgcctggagcacggccggatcgccaagttcagcaaggtgagaaccatcaccacccgaagcaacagcatcaaacaaggcaaggaccagcactttcctgtgttcatgaacgagaaggaggacatcctgtggtgtaccgagatggagagagtgttcgggttcccagtccactacacagatgtcagcaacatgtctagactggccagacagagactgctgggaagaagctggtccgtccctgtgatcagacacctgttcgcccctctgaaggagtacttcgcctgcgtgagcagcggcaacagcaacgccaacagccggggccccagcttctctagcggcctggtgccactgtccctgagagggagccacatgggccccatggagatctacaaaaccgtgagcgcctggaagcggcagcctgtgcgcgtgctgagcctgtttcggaatatcgataaagtcctgaaaagcctgggattcctggagagcggctctggctccggcggtggcaccctgaagtacgtggaggatgtgacaaacgtggtcagacgggatgtggagaagtggggccccttcgatctggtgtacggcagcacccaacccctgggcagctcttgtgaccggtgccctggctggtacatgtttcagttccaccggatcctgcagtacgccctgccgagacaggagtcccagcggccattcttttggattttcatggacaacttgctgctgaccgaggatgaccaggaaactaccactcggttcctgcagaccgaagccgtgaccctgcaggacgtgagaggccgggactaccagaacgccatgcgggtgtggtccaacatccctggactgaaaagcaagcacgcacctctgacccctaaagaagaggagtacctgcaggcccaggtgcggagcagaagcaagctggacgcccctaaggtggatctgctggtgaagaattgcctcctgcccctgagagagtacttcaagtatttcagccagaatagtctgcccctgggaggcagcggcggcggcatgccccagggcagcgtgagcttcaaggacgtgaccgtggacttcacccaggaggagtggcagcagctggacagcgcccagaaggccctgtacagggacgtgatgctggagaactactgccacttcgtgagcgtgggcttccacatgaccaagcccgacatgatccacaagctggagcagggcaaggagctgtggaccaccggcaggatcttccccagcaggagctacctgggcgagagcgtgggcggcccaagcagcggcgcccctcctcccagcggcggcaggcggcccaagcagcggcgcccctcctcccagcggcggcagcccagccggctccccaacctctaccgaggagggcacctctgagtccgccacccccgagagcggccctggcacctccaccgagcccagcgagggcagcgcacccggcagccctgccggcagccccacctccacagaggagggaaccagcaccgagcccagcgaaggcagcgccccaggcaccagcaccgagcctagtgagcaggagattaaacggatcaacaagatcagaagaagacttgtgaaagacagcaacaccaagaaggccggcaagacaggccccatgaaaaccctgctggttagagtgatgacacccgatctgagagagcggctggaaaacctgagaaagaagcctgaaaatatcccccagcccatcagcaatacatctagagccaacctgaataagctgctgaccgattacaccgaaatgaagaaggcgatcctgcatgtgtactgggaagagttccagaaggaccctgtgggcctgatgagccgggtggcccagcctgccagcaagaagatcgatcagaacaagctgaaacctgagatggacgagaagggcaacctgaccaccgccggctttgcctgctctcagtgtggccagcccctgttcgtgtacaagctggagcaggtgtctgagaagggcaaggcttacaccaactacttcggacggtgcaatgtggccgagcacgaaaagctgatcctgctggcccagctgaagcccgagaaggatagcgacgaagccgtgacatatagcctgggaaagtttgggcagagggccctggatttctacagcattcatgtgaccaaggagtccacccaccccgtgaagcccctggcccagatcgccggaaacagatacgcctccggacctgtgggaaaggccctgagcgacgcatgtatgggcacaatcgcctccttcctgtctaagtaccaggacatcatcatcgaacaccagaaggtggtgaagggcaaccagaagagactggagagcctgcgggagctggccggcaaggaaaacctggaataccctagcgtgaccctgccacctcagcctcacaccaaggagggcgttgatgcctacaacgaagtgatcgcccgggtgcgaatgtgggtgaacctgaacctgtggcagaagctgaagctaagcagagatgatgccaagcctctgctgagactgaagggattcccttcctttcctctggtcgagagacaggccaacgaagtggactggtgggacatggtgtgtaacgtgaagaagctgatcaacgagaaaaaggaggatggcaaggtgttttggcagaatctggctggctacaagagacaggaagccctgagaccatacctgagcagcgaggaagatcggaagaagggaaagaaattcgctcggtaccagctgggcgacctgctgctgcacctggaaaagaagcacggcgaggactggggaaaggtgtacgacgaggcctgggagcggattgacaagaaagtggaaggcctgagcaagcacatcaagctggaagaggaacggagaagcgaggacgcccagagcaaggccgccctgaccgactggctgcgggctaaggccagcttcgtgatcgagggcctgaaggaggccgacaaggacgagttctgcagatgcgagctgaagctgcagaagtggtacggggacctgcggggaaagcccttcgccatcgaagccgagaacagcatcctggacatcagcggcttcagcaagcagtacaactgtgccttcatctggcagaaggacggcgtgaagaagctgaacctgtacctgatcatcaactacttcaagggcggcaagctgcggttcaagaagatcaaacctgaagccttcgaagccaacagattctacaccgtgatcaacaaaaagagcggcgagatcgtgcccatggaggtgaacttcaacttcgacgaccccaacctgatcatcctgcctctggcctttggcaagagacagggcagagaattcatctggaacgacctgctgtccctggaaaccggcagcctgaagctggccaacggaagagtgatcgagaagacactgtacaacagaagaacccggcaggatgagcctgccctgttcgtggccctgaccttcgagcggcgggaggtcctggactcctccaatatcaaaccaatgaacctgatcggcgtggcaagaggcgaaaacatccccgccgtgatcgccctgaccgaccccgagggctgcccactgagccggtttaaggatagcctgggaaacccaacccacatcctgagaatcggcgagagctataaggagaagcagcggaccatccaggccaagaaggaggtggagcagcggagagccggcggctacagccggaagtacgccagcaaagccaagaatctggcagacgatatggtgagaaacaccgctagagatctgctgtactacgccgtgacccaggatgccatgctgatcttcgccaacctgagccggggcttcggccggcagggcaagcggaccttcatggccgagagacagtacacacggatggaggactggctgaccgccaagctggcctacgagggcctgagcaagacctacctgtccaagacactggcccagtacacctccaagacatgcagcaactgtgggtttaccatcaccagcgccgactacgacagggtgctggagaagctgaagaagacagcaacaggctggatgaccacaattaacggcaaggagctgaaggtggagggccagattacctactacaacagatacaagagacagaacgtagtcaaggacctgtccgtcgagctggatagactgagcgaagaatctgtgaacaacgacatctcctcctggacaaagggcagaagcggagaagctctgagcctcctgaagaaaagattctcccatagacccgtgcaggagaagttcgtgtgcctgaactgcggcttcgagacacacgcagccgagcaagccgccctgaacatcgccagatcctggctgttcctgcggagccaggagtacaagaaataccagacaaacaagacaaccggcaacaccgataagagagccttcgtcgagacctggcagtccttttaccggaagaagcttaaggaggtgtggaaacctgccgtgcggtctggcggatctggcggaggctccaccagccccaagaaaaagagaaaagtctaagctgccttctgcggggcttgccttctggccatgcccttcttctctcccttgcacctgtacctcttggtctttgaataaagcctgagtaggaaggctagcaaaaaaaaaaaaaaaaaaaaaaaaaaaaaaaaaaaaaaaaaaaaaaaaaaaaaaaaaaaaaaaaaaaaaaaaaaaaaaaagcccagccggctccccaacctctaccgaggagggcacctctgagtccgccacccccgagagcggccctggcacctccaccgagcccagcgagggcagcgcacccggcagccctgccggcagccccacctccacagaggagggaaccagcaccgagcccagcgaaggcagcgccccaggcaccagcaccgagcctagtgagcaggagattaaacggatcaacaagatcagaagaagacttgtgaaagacagcaacaccaagaaggccggcaagacaggccccatgaaaaccctgctggttagagtgatgacacccgatctgagagagcggctggaaaacctgagaaagaagcctgaaaatatcccccagcccatcagcaatacatctagagccaacctgaataagctgctgaccgattacaccgaaatgaagaaggcgatcctgcatgtgtactgggaagagttccagaaggaccctgtgggcctgatgagccgggtggcccagcctgccagcaagaagatcgatcagaacaagctgaaacctgagatggacgagaagggcaacctgaccaccgccggctttgcctgctctcagtgtggccagcccctgttcgtgtacaagctggagcaggtgtctgagaagggcaaggcttacaccaactacttcggacggtgcaatgtggccgagcacgaaaagctgatcctgctggcccagctgaagcccgagaaggatagcgacgaagccgtgacatatagcctgggaaagtttgggcagagggccctggatttctacagcattcatgtgaccaaggagtccacccaccccgtgaagcccctggcccagatcgccggaaacagatacgcctccggacctgtgggaaaggccctgagcgacgcatgtatgggcacaatcgcctccttcctgtctaagtaccaggacatcatcatcgaacaccagaaggtggtgaagggcaaccagaagagactggagagcctgcgggagctggccggcaaggaaaacctggaataccctagcgtgaccctgccacctcagcctcacaccaaggagggcgttgatgcctacaacgaagtgatcgcccgggtgcgaatgtgggtgaacctgaacctgtggcagaagctgaagctaagcagagatgatgccaagcctctgctgagactgaagggattcccttcctttcctctggtcgagagacaggccaacgaagtggactggtgggacatggtgtgtaacgtgaagaagctgatcaacgagaaaaaggaggatggcaaggtgttttggcagaatctggctggctacaagagacaggaagccctgagaccatacctgagcagcgaggaagatcggaagaagggaaagaaattcgctcggtaccagctgggcgacctgctgctgcacctggaaaagaagcacggcgaggactggggaaaggtgtacgacgaggcctgggagcggattgacaagaaagtggaaggcctgagcaagcacatcaagctggaagaggaacggagaagcgaggacgcccagagcaaggccgccctgaccgactggctgcgggctaaggccagcttcgtgatcgagggcctgaaggaggccgacaaggacgagttctgcagatgcgagctgaagctgcagaagtggtacggggacctgcggggaaagcccttcgccatcgaagccgagaacagcatcctggacatcagcggcttcagcaagcagtacaactgtgccttcatctggcagaaggacggcgtgaagaagctgaacctgtacctgatcatcaactacttcaagggcggcaagctgcggttcaagaagatcaaacctgaagccttcgaagccaacagattctacaccgtgatcaacaaaaagagcggcgagatcgtgcccatggaggtgaacttcaacttcgacgaccccaacctgatcatcctgcctctggcctttggcaagagacagggcagagaattcatctggaacgacctgctgtccctggaaaccggcagcctgaagctggccaacggaagagtgatcgagaagacactgtacaacagaagaacccggcaggatgagcctgccctgttcgtggccctgaccttcgagcggcgggaggtcctggactcctccaatatcaaaccaatgaacctgatcggcgtggcaagaggcgaaaacatccccgccgtgatcgccctgaccgaccccgagggctgcccactgagccggtttaaggatagcctgggaaacccaacccacatcctgagaatcggcgagagctataaggagaagcagcggaccatccaggccaagaaggaggtggagcagcggagagccggcggctacagccggaagtacgccagcaaagccaagaatctggcagacgatatggtgagaaacaccgctagagatctgctgtactacgccgtgacccaggatgccatgctgatcttcgccaacctgagccggggcttcggccggcagggcaagcggaccttcatggccgagagacagtacacacggatggaggactggctgaccgccaagctggcctacgagggcctgagcaagacctacctgtccaagacactggcccagtacacctccaagacatgcagcaactgtgggtttaccatcaccagcgccgactacgacagggtgctggagaagctgaagaagacagcaacaggctggatgaccacaattaacggcaaggagctgaaggtggagggccagattacctactacaacagatacaagagacagaacgtagtcaaggacctgtccgtcgagctggatagactgagcgaagaatctgtgaacaacgacatctcctcctggacaaagggcagaagcggagaagctctgagcctcctgaagaaaagattctcccatagacccgtgcaggagaagttcgtgtgcctgaactgcggcttcgagacacacgcagccgagcaagccgccctgaacatcgccagatcctggctgttcctgcggagccaggagtacaagaaataccagacaaacaagacaaccggcaacaccgataagagagccttcgtcgagacctggcagtccttttaccggaagaagcttaaggaggtgtggaaacctgccgtgcggtctggcggatctggcggaggctccaccagccccaagaaaaagagaaaagtctaagctgccttctgcggggcttgccttctggccatgcccttcttctctcccttgcacctgtacctcttggtctttgaataaagcctgagtaggaaggctagcaaaaaaaaaaaaaaaaaaaaaaaaaaaaaaaaaaaaaaaaaaaaaaaaaaaaaaaaaaaaaaaaaaaaaaaaaaaaaaaa

SEQ ID NO: 10017 - RNA, 8787 nt, synthetic construct
  source 1..8787: mol_type = other RNA
aggaaataagagagaaaagaagagtaagaagaaatataagagccaccatggcccctaagaagaagcgtaaagtgagccggatgaaccacgaccaggagttcgacccccctaaggtgtaccctcccgtccccgccgagaagagaaagcccatccgggtcctgagcctgttcgatggcatcgccaccggtctgctggtgctgaaggacctgggcatccaggtggataggtacattgcctccgaggtgtgcgaggactccatcaccgtgggaatggtgcgtcatcagggcaagatcatgtacgtgggcgacgtgcggagcgtgacacagaagcatatccaggagtggggccctttcgacctggtgatcggcggcagcccttgcaatgacctgagcatcgtgaacccagcccggaagggcctgtacgagggaaccggcagactgttcttcgagttttacagactgctgcacgacgcccggcctaaggaaggcgacgaccggcccttcttttggctgttcgagaatgtggtggccatgggagtcagcgacaagcgggatattagccggttcctggagagcaaccccgtgatgatcgatgccaaggaagtgagcgccgcccaccgggccagatacttctggggcaatctgcctggcatgaacagacccctggccagcaccgtgaacgacaagctggagctgcaggagtgcctggagcacggccggatcgccaagttcagcaaggtgagaaccatcaccacccgaagcaacagcatcaaacaaggcaaggaccagcactttcctgtgttcatgaacgagaaggaggacatcctgtggtgtaccgagatggagagagtgttcgggttcccagtccactacacagatgtcagcaacatgtctagactggccagacagagactgctgggaagaagctggtccgtccctgtgatcagacacctgttcgcccctctgaaggagtacttcgcctgcgtgagcagcggcaacagcaacgccaacagccggggccccagcttctctagcggcctggtgccactgtccctgagagggagccacatgggccccatggagatctacaaaaccgtgagcgcctggaagcggcagcctgtgcgcgtgctgagcctgtttcggaatatcgataaagtcctgaaaagcctgggattcctggagagcggctctggctccggcggtggcaccctgaagtacgtggaggatgtgacaaacgtggtcagacgggatgtggagaagtggggccccttcgatctggtgtacggcagcacccaacccctgggcagctcttgtgaccggtgccctggctggtacatgtttcagttccaccggatcctgcagtacgccctgccgagacaggagtcccagcggccattcttttggattttcatggacaacttgctgctgaccgaggatgaccaggaaactaccactcggttcctgcagaccgaagccgtgaccctgcaggacgtgagaggccgggactaccagaacgccatgcgggtgtggtccaacatccctggactgaaaagcaagcacgcacctctgacccctaaagaagaggagtacctgcaggcccaggtgcggagcagaagcaagctggacgcccctaaggtggatctgctggtgaagaattgcctcctgcccctgagagagtacttcaagtatttcagccagaatagtctgcccctgggaggcagcggcggcggcaaggagaagctggtgaccttcgaggacgtggccgtgtacttcacccaggccgagtgggacggcctgagccccgcccagaggaccctgtacagggacgtgatgctggagaactacggcaacgtggccagcctgggcttccccctgctgaagcccgccgtgatcagccagctggagggcggcggcgagctgggcggccccagccccctggccgccggcaccggcctgtggggcctgaggaccggcggcggcccaagcagcggcgcccctcctcccagcggcggcaggcggcccaagcagcggcgcccctcctcccagcggcggcagcccagccggctccccaacctctaccgaggagggcacctctgagtccgccacccccgagagcggccctggcacctccaccgagcccagcgagggcagcgcacccggcagccctgccggcagccccacctccacagaggagggaaccagcaccgagcccagcgaaggcagcgccccaggcaccagcaccgagcctagtgagcaggagattaaacggatcaacaagatcagaagaagacttgtgaaagacagcaacaccaagaaggccggcaagacaggccccatgaaaaccctgctggttagagtgatgacacccgatctgagagagcggctggaaaacctgagaaagaagcctgaaaatatcccccagcccatcagcaatacatctagagccaacctgaataagctgctgaccgattacaccgaaatgaagaaggcgatcctgcatgtgtactgggaagagttccagaaggaccctgtgggcctgatgagccgggtggcccagcctgccagcaagaagatcgatcagaacaagctgaaacctgagatggacgagaagggcaacctgaccaccgccggctttgcctgctctcagtgtggccagcccctgttcgtgtacaagctggagcaggtgtctgagaagggcaaggcttacaccaactacttcggacggtgcaatgtggccgagcacgaaaagctgatcctgctggcccagctgaagcccgagaaggatagcgacgaagccgtgacatatagcctgggaaagtttgggcagagggccctggatttctacagcattcatgtgaccaaggagtccacccaccccgtgaagcccctggcccagatcgccggaaacagatacgcctccggacctgtgggaaaggccctgagcgacgcatgtatgggcacaatcgcctccttcctgtctaagtaccaggacatcatcatcgaacaccagaaggtggtgaagggcaaccagaagagactggagagcctgcgggagctggccggcaaggaaaacctggaataccctagcgtgaccctgccacctcagcctcacaccaaggagggcgttgatgcctacaacgaagtgatcgcccgggtgcgaatgtgggtgaacctgaacctgtggcagaagctgaagctaagcagagatgatgccaagcctctgctgagactgaagggattcccttcctttcctctggtcgagagacaggccaacgaagtggactggtgggacatggtgtgtaacgtgaagaagctgatcaacgagaaaaaggaggatggcaaggtgttttggcagaatctggctggctacaagagacaggaagccctgagaccatacctgagcagcgaggaagatcggaagaagggaaagaaattcgctcggtaccagctgggcgacctgctgctgcacctggaaaagaagcacggcgaggactggggaaaggtgtacgacgaggcctgggagcggattgacaagaaagtggaaggcctgagcaagcacatcaagctggaagaggaacggagaagcgaggacgcccagagcaaggccgccctgaccgactggctgcgggctaaggccagcttcgtgatcgagggcctgaaggaggccgacaaggacgagttctgcagatgcgagctgaagctgcagaagtggtacggggacctgcggggaaagcccttcgccatcgaagccgagaacagcatcctggacatcagcggcttcagcaagcagtacaactgtgccttcatctggcagaaggacggcgtgaagaagctgaacctgtacctgatcatcaactacttcaagggcggcaagctgcggttcaagaagatcaaacctgaagccttcgaagccaacagattctacaccgtgatcaacaaaaagagcggcgagatcgtgcccatggaggtgaacttcaacttcgacgaccccaacctgatcatcctgcctctggcctttggcaagagacagggcagagaattcatctggaacgacctgctgtccctggaaaccggcagcctgaagctggccaacggaagagtgatcgagaagacactgtacaacagaagaacccggcaggatgagcctgccctgttcgtggccctgaccttcgagcggcgggaggtcctggactcctccaatatcaaaccaatgaacctgatcggcgtggcaagaggcgaaaacatccccgccgtgatcgccctgaccgaccccgagggctgcccactgagccggtttaaggatagcctgggaaacccaacccacatcctgagaatcggcgagagctataaggagaagcagcggaccatccaggccaagaaggaggtggagcagcggagagccggcggctacagccggaagtacgccagcaaagccaagaatctggcagacgatatggtgagaaacaccgctagagatctgctgtactacgccgtgacccaggatgccatgctgatcttcgccaacctgagccggggcttcggccggcagggcaagcggaccttcatggccgagagacagtacacacggatggaggactggctgaccgccaagctggcctacgagggcctgagcaagacctacctgtccaagacactggcccagtacacctccaagacatgcagcaactgtgggtttaccatcaccagcgccgactacgacagggtgctggagaagctgaagaagacagcaacaggctggatgaccacaattaacggcaaggagctgaaggtggagggccagattacctactacaacagatacaagagacagaacgtagtcaaggacctgtccgtcgagctggatagactgagcgaagaatctgtgaacaacgacatctcctcctggacaaagggcagaagcggagaagctctgagcctcctgaagaaaagattctcccatagacccgtgcaggagaagttcgtgtgcctgaactgcggcttcgagacacacgcagccgagcaagccgccctgaacatcgccagatcctggctgttcctgcggagccaggagtacaagaaataccagacaaacaagacaaccggcaacaccgataagagagccttcgtcgagacctggcagtccttttaccggaagaagcttaaggaggtgtggaaacctgccgtgcggtctggcggatctggcggaggctccaccagccccaagaaaaagagaaaagtctaagctgccttctgcggggcttgccttctggccatgcccttcttctctcccttgcacctgtacctcttggtctttgaataaagcctgagtaggaaggctagcaaaaaaaaaaaaaaaaaaaaaaaaaaaaaaaaaaaaaaaaaaaaaaaaaaaaaaaaaaaaaaaaaaaaaaaaaaaaaaaagcccagccggctccccaacctctaccgaggagggcacctctgagtccgccacccccgagagcggccctggcacctccaccgagcccagcgagggcagcgcacccggcagccctgccggcagccccacctccacagaggagggaaccagcaccgagcccagcgaaggcagcgccccaggcaccagcaccgagcctagtgagcaggagattaaacggatcaacaagatcagaagaagacttgtgaaagacagcaacaccaagaaggccggcaagacaggccccatgaaaaccctgctggttagagtgatgacacccgatctgagagagcggctggaaaacctgagaaagaagcctgaaaatatcccccagcccatcagcaatacatctagagccaacctgaataagctgctgaccgattacaccgaaatgaagaaggcgatcctgcatgtgtactgggaagagttccagaaggaccctgtgggcctgatgagccgggtggcccagcctgccagcaagaagatcgatcagaacaagctgaaacctgagatggacgagaagggcaacctgaccaccgccggctttgcctgctctcagtgtggccagcccctgttcgtgtacaagctggagcaggtgtctgagaagggcaaggcttacaccaactacttcggacggtgcaatgtggccgagcacgaaaagctgatcctgctggcccagctgaagcccgagaaggatagcgacgaagccgtgacatatagcctgggaaagtttgggcagagggccctggatttctacagcattcatgtgaccaaggagtccacccaccccgtgaagcccctggcccagatcgccggaaacagatacgcctccggacctgtgggaaaggccctgagcgacgcatgtatgggcacaatcgcctccttcctgtctaagtaccaggacatcatcatcgaacaccagaaggtggtgaagggcaaccagaagagactggagagcctgcgggagctggccggcaaggaaaacctggaataccctagcgtgaccctgccacctcagcctcacaccaaggagggcgttgatgcctacaacgaagtgatcgcccgggtgcgaatgtgggtgaacctgaacctgtggcagaagctgaagctaagcagagatgatgccaagcctctgctgagactgaagggattcccttcctttcctctggtcgagagacaggccaacgaagtggactggtgggacatggtgtgtaacgtgaagaagctgatcaacgagaaaaaggaggatggcaaggtgttttggcagaatctggctggctacaagagacaggaagccctgagaccatacctgagcagcgaggaagatcggaagaagggaaagaaattcgctcggtaccagctgggcgacctgctgctgcacctggaaaagaagcacggcgaggactggggaaaggtgtacgacgaggcctgggagcggattgacaagaaagtggaaggcctgagcaagcacatcaagctggaagaggaacggagaagcgaggacgcccagagcaaggccgccctgaccgactggctgcgggctaaggccagcttcgtgatcgagggcctgaaggaggccgacaaggacgagttctgcagatgcgagctgaagctgcagaagtggtacggggacctgcggggaaagcccttcgccatcgaagccgagaacagcatcctggacatcagcggcttcagcaagcagtacaactgtgccttcatctggcagaaggacggcgtgaagaagctgaacctgtacctgatcatcaactacttcaagggcggcaagctgcggttcaagaagatcaaacctgaagccttcgaagccaacagattctacaccgtgatcaacaaaaagagcggcgagatcgtgcccatggaggtgaacttcaacttcgacgaccccaacctgatcatcctgcctctggcctttggcaagagacagggcagagaattcatctggaacgacctgctgtccctggaaaccggcagcctgaagctggccaacggaagagtgatcgagaagacactgtacaacagaagaacccggcaggatgagcctgccctgttcgtggccctgaccttcgagcggcgggaggtcctggactcctccaatatcaaaccaatgaacctgatcggcgtggcaagaggcgaaaacatccccgccgtgatcgccctgaccgaccccgagggctgcccactgagccggtttaaggatagcctgggaaacccaacccacatcctgagaatcggcgagagctataaggagaagcagcggaccatccaggccaagaaggaggtggagcagcggagagccggcggctacagccggaagtacgccagcaaagccaagaatctggcagacgatatggtgagaaacaccgctagagatctgctgtactacgccgtgacccaggatgccatgctgatcttcgccaacctgagccggggcttcggccggcagggcaagcggaccttcatggccgagagacagtacacacggatggaggactggctgaccgccaagctggcctacgagggcctgagcaagacctacctgtccaagacactggcccagtacacctccaagacatgcagcaactgtgggtttaccatcaccagcgccgactacgacagggtgctggagaagctgaagaagacagcaacaggctggatgaccacaattaacggcaaggagctgaaggtggagggccagattacctactacaacagatacaagagacagaacgtagtcaaggacctgtccgtcgagctggatagactgagcgaagaatctgtgaacaacgacatctcctcctggacaaagggcagaagcggagaagctctgagcctcctgaagaaaagattctcccatagacccgtgcaggagaagttcgtgtgcctgaactgcggcttcgagacacacgcagccgagcaagccgccctgaacatcgccagatcctggctgttcctgcggagccaggagtacaagaaataccagacaaacaagacaaccggcaacaccgataagagagccttcgtcgagacctggcagtccttttaccggaagaagcttaaggaggtgtggaaacctgccgtgcggtctggcggatctggcggaggctccaccagccccaagaaaaagagaaaagtctaagctgccttctgcggggcttgccttctggccatgcccttcttctctcccttgcacctgtacctcttggtctttgaataaagcctgagtaggaaggctagcaaaaaaaaaaaaaaaaaaaaaaaaaaaaaaaaaaaaaaaaaaaaaaaaaaaaaaaaaaaaaaaaaaaaaaaaaaaaaaaa

SEQ ID NO: 10018 - RNA, 8787 nt, synthetic construct
  source 1..8787: mol_type = other RNA
aggaaataagagagaaaagaagagtaagaagaaatataagagccaccatggcccctaagaagaagcgtaaagtgagccggatgaaccacgaccaggagttcgacccccctaaggtgtaccctcccgtccccgccgagaagagaaagcccatccgggtcctgagcctgttcgatggcatcgccaccggtctgctggtgctgaaggacctgggcatccaggtggataggtacattgcctccgaggtgtgcgaggactccatcaccgtgggaatggtgcgtcatcagggcaagatcatgtacgtgggcgacgtgcggagcgtgacacagaagcatatccaggagtggggccctttcgacctggtgatcggcggcagcccttgcaatgacctgagcatcgtgaacccagcccggaagggcctgtacgagggaaccggcagactgttcttcgagttttacagactgctgcacgacgcccggcctaaggaaggcgacgaccggcccttcttttggctgttcgagaatgtggtggccatgggagtcagcgacaagcgggatattagccggttcctggagagcaaccccgtgatgatcgatgccaaggaagtgagcgccgcccaccgggccagatacttctggggcaatctgcctggcatgaacagacccctggccagcaccgtgaacgacaagctggagctgcaggagtgcctggagcacggccggatcgccaagttcagcaaggtgagaaccatcaccacccgaagcaacagcatcaaacaaggcaaggaccagcactttcctgtgttcatgaacgagaaggaggacatcctgtggtgtaccgagatggagagagtgttcgggttcccagtccactacacagatgtcagcaacatgtctagactggccagacagagactgctgggaagaagctggtccgtccctgtgatcagacacctgttcgcccctctgaaggagtacttcgcctgcgtgagcagcggcaacagcaacgccaacagccggggccccagcttctctagcggcctggtgccactgtccctgagagggagccacatgggccccatggagatctacaaaaccgtgagcgcctggaagcggcagcctgtgcgcgtgctgagcctgtttcggaatatcgataaagtcctgaaaagcctgggattcctggagagcggctctggctccggcggtggcaccctgaagtacgtggaggatgtgacaaacgtggtcagacgggatgtggagaagtggggccccttcgatctggtgtacggcagcacccaacccctgggcagctcttgtgaccggtgccctggctggtacatgtttcagttccaccggatcctgcagtacgccctgccgagacaggagtcccagcggccattcttttggattttcatggacaacttgctgctgaccgaggatgaccaggaaactaccactcggttcctgcagaccgaagccgtgaccctgcaggacgtgagaggccgggactaccagaacgccatgcgggtgtggtccaacatccctggactgaaaagcaagcacgcacctctgacccctaaagaagaggagtacctgcaggcccaggtgcggagcagaagcaagctggacgcccctaaggtggatctgctggtgaagaattgcctcctgcccctgagagagtacttcaagtatttcagccagaatagtctgcccctgggaggcagcggcggcggcaagcccggcgccctgagcttcgccgacgtggccgtgtacttcagcagcgaggagtggggctgcctgaggcccgcccagagggccctgtacagggacgtgatgagggagacctacggccacctgggcgccctgggctgcgccggccccaagcccgccctgatcagctggctggagaggaacaccgacgactgggagcccgccgccctggacccccaggagtgccccaggggcgtggccgtgcagggcggcccaagcagcggcgcccctcctcccagcggcggcaggcggcccaagcagcggcgcccctcctcccagcggcggcagcccagccggctccccaacctctaccgaggagggcacctctgagtccgccacccccgagagcggccctggcacctccaccgagcccagcgagggcagcgcacccggcagccctgccggcagccccacctccacagaggagggaaccagcaccgagcccagcgaaggcagcgccccaggcaccagcaccgagcctagtgagcaggagattaaacggatcaacaagatcagaagaagacttgtgaaagacagcaacaccaagaaggccggcaagacaggccccatgaaaaccctgctggttagagtgatgacacccgatctgagagagcggctggaaaacctgagaaagaagcctgaaaatatcccccagcccatcagcaatacatctagagccaacctgaataagctgctgaccgattacaccgaaatgaagaaggcgatcctgcatgtgtactgggaagagttccagaaggaccctgtgggcctgatgagccgggtggcccagcctgccagcaagaagatcgatcagaacaagctgaaacctgagatggacgagaagggcaacctgaccaccgccggctttgcctgctctcagtgtggccagcccctgttcgtgtacaagctggagcaggtgtctgagaagggcaaggcttacaccaactacttcggacggtgcaatgtggccgagcacgaaaagctgatcctgctggcccagctgaagcccgagaaggatagcgacgaagccgtgacatatagcctgggaaagtttgggcagagggccctggatttctacagcattcatgtgaccaaggagtccacccaccccgtgaagcccctggcccagatcgccggaaacagatacgcctccggacctgtgggaaaggccctgagcgacgcatgtatgggcacaatcgcctccttcctgtctaagtaccaggacatcatcatcgaacaccagaaggtggtgaagggcaaccagaagagactggagagcctgcgggagctggccggcaaggaaaacctggaataccctagcgtgaccctgccacctcagcctcacaccaaggagggcgttgatgcctacaacgaagtgatcgcccgggtgcgaatgtgggtgaacctgaacctgtggcagaagctgaagctaagcagagatgatgccaagcctctgctgagactgaagggattcccttcctttcctctggtcgagagacaggccaacgaagtggactggtgggacatggtgtgtaacgtgaagaagctgatcaacgagaaaaaggaggatggcaaggtgttttggcagaatctggctggctacaagagacaggaagccctgagaccatacctgagcagcgaggaagatcggaagaagggaaagaaattcgctcggtaccagctgggcgacctgctgctgcacctggaaaagaagcacggcgaggactggggaaaggtgtacgacgaggcctgggagcggattgacaagaaagtggaaggcctgagcaagcacatcaagctggaagaggaacggagaagcgaggacgcccagagcaaggccgccctgaccgactggctgcgggctaaggccagcttcgtgatcgagggcctgaaggaggccgacaaggacgagttctgcagatgcgagctgaagctgcagaagtggtacggggacctgcggggaaagcccttcgccatcgaagccgagaacagcatcctggacatcagcggcttcagcaagcagtacaactgtgccttcatctggcagaaggacggcgtgaagaagctgaacctgtacctgatcatcaactacttcaagggcggcaagctgcggttcaagaagatcaaacctgaagccttcgaagccaacagattctacaccgtgatcaacaaaaagagcggcgagatcgtgcccatggaggtgaacttcaacttcgacgaccccaacctgatcatcctgcctctggcctttggcaagagacagggcagagaattcatctggaacgacctgctgtccctggaaaccggcagcctgaagctggccaacggaagagtgatcgagaagacactgtacaacagaagaacccggcaggatgagcctgccctgttcgtggccctgaccttcgagcggcgggaggtcctggactcctccaatatcaaaccaatgaacctgatcggcgtggcaagaggcgaaaacatccccgccgtgatcgccctgaccgaccccgagggctgcccactgagccggtttaaggatagcctgggaaacccaacccacatcctgagaatcggcgagagctataaggagaagcagcggaccatccaggccaagaaggaggtggagcagcggagagccggcggctacagccggaagtacgccagcaaagccaagaatctggcagacgatatggtgagaaacaccgctagagatctgctgtactacgccgtgacccaggatgccatgctgatcttcgccaacctgagccggggcttcggccggcagggcaagcggaccttcatggccgagagacagtacacacggatggaggactggctgaccgccaagctggcctacgagggcctgagcaagacctacctgtccaagacactggcccagtacacctccaagacatgcagcaactgtgggtttaccatcaccagcgccgactacgacagggtgctggagaagctgaagaagacagcaacaggctggatgaccacaattaacggcaaggagctgaaggtggagggccagattacctactacaacagatacaagagacagaacgtagtcaaggacctgtccgtcgagctggatagactgagcgaagaatctgtgaacaacgacatctcctcctggacaaagggcagaagcggagaagctctgagcctcctgaagaaaagattctcccatagacccgtgcaggagaagttcgtgtgcctgaactgcggcttcgagacacacgcagccgagcaagccgccctgaacatcgccagatcctggctgttcctgcggagccaggagtacaagaaataccagacaaacaagacaaccggcaacaccgataagagagccttcgtcgagacctggcagtccttttaccggaagaagcttaaggaggtgtggaaacctgccgtgcggtctggcggatctggcggaggctccaccagccccaagaaaaagagaaaagtctaagctgccttctgcggggcttgccttctggccatgcccttcttctctcccttgcacctgtacctcttggtctttgaataaagcctgagtaggaaggctagcaaaaaaaaaaaaaaaaaaaaaaaaaaaaaaaaaaaaaaaaaaaaaaaaaaaaaaaaaaaaaaaaaaaaaaaaaaaaaaaagcccagccggctccccaacctctaccgaggagggcacctctgagtccgccacccccgagagcggccctggcacctccaccgagcccagcgagggcagcgcacccggcagccctgccggcagccccacctccacagaggagggaaccagcaccgagcccagcgaaggcagcgccccaggcaccagcaccgagcctagtgagcaggagattaaacggatcaacaagatcagaagaagacttgtgaaagacagcaacaccaagaaggccggcaagacaggccccatgaaaaccctgctggttagagtgatgacacccgatctgagagagcggctggaaaacctgagaaagaagcctgaaaatatcccccagcccatcagcaatacatctagagccaacctgaataagctgctgaccgattacaccgaaatgaagaaggcgatcctgcatgtgtactgggaagagttccagaaggaccctgtgggcctgatgagccgggtggcccagcctgccagcaagaagatcgatcagaacaagctgaaacctgagatggacgagaagggcaacctgaccaccgccggctttgcctgctctcagtgtggccagcccctgttcgtgtacaagctggagcaggtgtctgagaagggcaaggcttacaccaactacttcggacggtgcaatgtggccgagcacgaaaagctgatcctgctggcccagctgaagcccgagaaggatagcgacgaagccgtgacatatagcctgggaaagtttgggcagagggccctggatttctacagcattcatgtgaccaaggagtccacccaccccgtgaagcccctggcccagatcgccggaaacagatacgcctccggacctgtgggaaaggccctgagcgacgcatgtatgggcacaatcgcctccttcctgtctaagtaccaggacatcatcatcgaacaccagaaggtggtgaagggcaaccagaagagactggagagcctgcgggagctggccggcaaggaaaacctggaataccctagcgtgaccctgccacctcagcctcacaccaaggagggcgttgatgcctacaacgaagtgatcgcccgggtgcgaatgtgggtgaacctgaacctgtggcagaagctgaagctaagcagagatgatgccaagcctctgctgagactgaagggattcccttcctttcctctggtcgagagacaggccaacgaagtggactggtgggacatggtgtgtaacgtgaagaagctgatcaacgagaaaaaggaggatggcaaggtgttttggcagaatctggctggctacaagagacaggaagccctgagaccatacctgagcagcgaggaagatcggaagaagggaaagaaattcgctcggtaccagctgggcgacctgctgctgcacctggaaaagaagcacggcgaggactggggaaaggtgtacgacgaggcctgggagcggattgacaagaaagtggaaggcctgagcaagcacatcaagctggaagaggaacggagaagcgaggacgcccagagcaaggccgccctgaccgactggctgcgggctaaggccagcttcgtgatcgagggcctgaaggaggccgacaaggacgagttctgcagatgcgagctgaagctgcagaagtggtacggggacctgcggggaaagcccttcgccatcgaagccgagaacagcatcctggacatcagcggcttcagcaagcagtacaactgtgccttcatctggcagaaggacggcgtgaagaagctgaacctgtacctgatcatcaactacttcaagggcggcaagctgcggttcaagaagatcaaacctgaagccttcgaagccaacagattctacaccgtgatcaacaaaaagagcggcgagatcgtgcccatggaggtgaacttcaacttcgacgaccccaacctgatcatcctgcctctggcctttggcaagagacagggcagagaattcatctggaacgacctgctgtccctggaaaccggcagcctgaagctggccaacggaagagtgatcgagaagacactgtacaacagaagaacccggcaggatgagcctgccctgttcgtggccctgaccttcgagcggcgggaggtcctggactcctccaatatcaaaccaatgaacctgatcggcgtggcaagaggcgaaaacatccccgccgtgatcgccctgaccgaccccgagggctgcccactgagccggtttaaggatagcctgggaaacccaacccacatcctgagaatcggcgagagctataaggagaagcagcggaccatccaggccaagaaggaggtggagcagcggagagccggcggctacagccggaagtacgccagcaaagccaagaatctggcagacgatatggtgagaaacaccgctagagatctgctgtactacgccgtgacccaggatgccatgctgatcttcgccaacctgagccggggcttcggccggcagggcaagcggaccttcatggccgagagacagtacacacggatggaggactggctgaccgccaagctggcctacgagggcctgagcaagacctacctgtccaagacactggcccagtacacctccaagacatgcagcaactgtgggtttaccatcaccagcgccgactacgacagggtgctggagaagctgaagaagacagcaacaggctggatgaccacaattaacggcaaggagctgaaggtggagggccagattacctactacaacagatacaagagacagaacgtagtcaaggacctgtccgtcgagctggatagactgagcgaagaatctgtgaacaacgacatctcctcctggacaaagggcagaagcggagaagctctgagcctcctgaagaaaagattctcccatagacccgtgcaggagaagttcgtgtgcctgaactgcggcttcgagacacacgcagccgagcaagccgccctgaacatcgccagatcctggctgttcctgcggagccaggagtacaagaaataccagacaaacaagacaaccggcaacaccgataagagagccttcgtcgagacctggcagtccttttaccggaagaagcttaaggaggtgtggaaacctgccgtgcggtctggcggatctggcggaggctccaccagccccaagaaaaagagaaaagtctaagctgccttctgcggggcttgccttctggccatgcccttcttctctcccttgcacctgtacctcttggtctttgaataaagcctgagtaggaaggctagcaaaaaaaaaaaaaaaaaaaaaaaaaaaaaaaaaaaaaaaaaaaaaaaaaaaaaaaaaaaaaaaaaaaaaaaaaaaaaaaa

SEQ ID NO: 10019 - RNA, 8787 nt, synthetic construct
  source 1..8787: mol_type = other RNA
aggaaataagagagaaaagaagagtaagaagaaatataagagccaccatggcccctaagaagaagcgtaaagtgagccggatgaaccacgaccaggagttcgacccccctaaggtgtaccctcccgtccccgccgagaagagaaagcccatccgggtcctgagcctgttcgatggcatcgccaccggtctgctggtgctgaaggacctgggcatccaggtggataggtacattgcctccgaggtgtgcgaggactccatcaccgtgggaatggtgcgtcatcagggcaagatcatgtacgtgggcgacgtgcggagcgtgacacagaagcatatccaggagtggggccctttcgacctggtgatcggcggcagcccttgcaatgacctgagcatcgtgaacccagcccggaagggcctgtacgagggaaccggcagactgttcttcgagttttacagactgctgcacgacgcccggcctaaggaaggcgacgaccggcccttcttttggctgttcgagaatgtggtggccatgggagtcagcgacaagcgggatattagccggttcctggagagcaaccccgtgatgatcgatgccaaggaagtgagcgccgcccaccgggccagatacttctggggcaatctgcctggcatgaacagacccctggccagcaccgtgaacgacaagctggagctgcaggagtgcctggagcacggccggatcgccaagttcagcaaggtgagaaccatcaccacccgaagcaacagcatcaaacaaggcaaggaccagcactttcctgtgttcatgaacgagaaggaggacatcctgtggtgtaccgagatggagagagtgttcgggttcccagtccactacacagatgtcagcaacatgtctagactggccagacagagactgctgggaagaagctggtccgtccctgtgatcagacacctgttcgcccctctgaaggagtacttcgcctgcgtgagcagcggcaacagcaacgccaacagccggggccccagcttctctagcggcctggtgccactgtccctgagagggagccacatgggccccatggagatctacaaaaccgtgagcgcctggaagcggcagcctgtgcgcgtgctgagcctgtttcggaatatcgataaagtcctgaaaagcctgggattcctggagagcggctctggctccggcggtggcaccctgaagtacgtggaggatgtgacaaacgtggtcagacgggatgtggagaagtggggccccttcgatctggtgtacggcagcacccaacccctgggcagctcttgtgaccggtgccctggctggtacatgtttcagttccaccggatcctgcagtacgccctgccgagacaggagtcccagcggccattcttttggattttcatggacaacttgctgctgaccgaggatgaccaggaaactaccactcggttcctgcagaccgaagccgtgaccctgcaggacgtgagaggccgggactaccagaacgccatgcgggtgtggtccaacatccctggactgaaaagcaagcacgcacctctgacccctaaagaagaggagtacctgcaggcccaggtgcggagcagaagcaagctggacgcccctaaggtggatctgctggtgaagaattgcctcctgcccctgagagagtacttcaagtatttcagccagaatagtctgcccctgggaggcagcggcggcggcaagcccggcaccgtgagcttcgccgacgtggccgtgtacttcagccccgaggagtggaggtacctgaggcccgcccagagggccctgtacagggaggtgatgagggagacctacggcctgctgacctacctggacgtgggctgcgccaagcccgccctgatcagctgggtggaggaggagagcgaggtgtggggccccggcgcccaggaccccgaggtggccatgtgcaggaccgaggtgcacggcggcccaagcagcggcgcccctcctcccagcggcggcaggcggcccaagcagcggcgcccctcctcccagcggcggcagcccagccggctccccaacctctaccgaggagggcacctctgagtccgccacccccgagagcggccctggcacctccaccgagcccagcgagggcagcgcacccggcagccctgccggcagccccacctccacagaggagggaaccagcaccgagcccagcgaaggcagcgccccaggcaccagcaccgagcctagtgagcaggagattaaacggatcaacaagatcagaagaagacttgtgaaagacagcaacaccaagaaggccggcaagacaggccccatgaaaaccctgctggttagagtgatgacacccgatctgagagagcggctggaaaacctgagaaagaagcctgaaaatatcccccagcccatcagcaatacatctagagccaacctgaataagctgctgaccgattacaccgaaatgaagaaggcgatcctgcatgtgtactgggaagagttccagaaggaccctgtgggcctgatgagccgggtggcccagcctgccagcaagaagatcgatcagaacaagctgaaacctgagatggacgagaagggcaacctgaccaccgccggctttgcctgctctcagtgtggccagcccctgttcgtgtacaagctggagcaggtgtctgagaagggcaaggcttacaccaactacttcggacggtgcaatgtggccgagcacgaaaagctgatcctgctggcccagctgaagcccgagaaggatagcgacgaagccgtgacatatagcctgggaaagtttgggcagagggccctggatttctacagcattcatgtgaccaaggagtccacccaccccgtgaagcccctggcccagatcgccggaaacagatacgcctccggacctgtgggaaaggccctgagcgacgcatgtatgggcacaatcgcctccttcctgtctaagtaccaggacatcatcatcgaacaccagaaggtggtgaagggcaaccagaagagactggagagcctgcgggagctggccggcaaggaaaacctggaataccctagcgtgaccctgccacctcagcctcacaccaaggagggcgttgatgcctacaacgaagtgatcgcccgggtgcgaatgtgggtgaacctgaacctgtggcagaagctgaagctaagcagagatgatgccaagcctctgctgagactgaagggattcccttcctttcctctggtcgagagacaggccaacgaagtggactggtgggacatggtgtgtaacgtgaagaagctgatcaacgagaaaaaggaggatggcaaggtgttttggcagaatctggctggctacaagagacaggaagccctgagaccatacctgagcagcgaggaagatcggaagaagggaaagaaattcgctcggtaccagctgggcgacctgctgctgcacctggaaaagaagcacggcgaggactggggaaaggtgtacgacgaggcctgggagcggattgacaagaaagtggaaggcctgagcaagcacatcaagctggaagaggaacggagaagcgaggacgcccagagcaaggccgccctgaccgactggctgcgggctaaggccagcttcgtgatcgagggcctgaaggaggccgacaaggacgagttctgcagatgcgagctgaagctgcagaagtggtacggggacctgcggggaaagcccttcgccatcgaagccgagaacagcatcctggacatcagcggcttcagcaagcagtacaactgtgccttcatctggcagaaggacggcgtgaagaagctgaacctgtacctgatcatcaactacttcaagggcggcaagctgcggttcaagaagatcaaacctgaagccttcgaagccaacagattctacaccgtgatcaacaaaaagagcggcgagatcgtgcccatggaggtgaacttcaacttcgacgaccccaacctgatcatcctgcctctggcctttggcaagagacagggcagagaattcatctggaacgacctgctgtccctggaaaccggcagcctgaagctggccaacggaagagtgatcgagaagacactgtacaacagaagaacccggcaggatgagcctgccctgttcgtggccctgaccttcgagcggcgggaggtcctggactcctccaatatcaaaccaatgaacctgatcggcgtggcaagaggcgaaaacatccccgccgtgatcgccctgaccgaccccgagggctgcccactgagccggtttaaggatagcctgggaaacccaacccacatcctgagaatcggcgagagctataaggagaagcagcggaccatccaggccaagaaggaggtggagcagcggagagccggcggctacagccggaagtacgccagcaaagccaagaatctggcagacgatatggtgagaaacaccgctagagatctgctgtactacgccgtgacccaggatgccatgctgatcttcgccaacctgagccggggcttcggccggcagggcaagcggaccttcatggccgagagacagtacacacggatggaggactggctgaccgccaagctggcctacgagggcctgagcaagacctacctgtccaagacactggcccagtacacctccaagacatgcagcaactgtgggtttaccatcaccagcgccgactacgacagggtgctggagaagctgaagaagacagcaacaggctggatgaccacaattaacggcaaggagctgaaggtggagggccagattacctactacaacagatacaagagacagaacgtagtcaaggacctgtccgtcgagctggatagactgagcgaagaatctgtgaacaacgacatctcctcctggacaaagggcagaagcggagaagctctgagcctcctgaagaaaagattctcccatagacccgtgcaggagaagttcgtgtgcctgaactgcggcttcgagacacacgcagccgagcaagccgccctgaacatcgccagatcctggctgttcctgcggagccaggagtacaagaaataccagacaaacaagacaaccggcaacaccgataagagagccttcgtcgagacctggcagtccttttaccggaagaagcttaaggaggtgtggaaacctgccgtgcggtctggcggatctggcggaggctccaccagccccaagaaaaagagaaaagtctaagctgccttctgcggggcttgccttctggccatgcccttcttctctcccttgcacctgtacctcttggtctttgaataaagcctgagtaggaaggctagcaaaaaaaaaaaaaaaaaaaaaaaaaaaaaaaaaaaaaaaaaaaaaaaaaaaaaaaaaaaaaaaaaaaaaaaaaaaaaaaagcccagccggctccccaacctctaccgaggagggcacctctgagtccgccacccccgagagcggccctggcacctccaccgagcccagcgagggcagcgcacccggcagccctgccggcagccccacctccacagaggagggaaccagcaccgagcccagcgaaggcagcgccccaggcaccagcaccgagcctagtgagcaggagattaaacggatcaacaagatcagaagaagacttgtgaaagacagcaacaccaagaaggccggcaagacaggccccatgaaaaccctgctggttagagtgatgacacccgatctgagagagcggctggaaaacctgagaaagaagcctgaaaatatcccccagcccatcagcaatacatctagagccaacctgaataagctgctgaccgattacaccgaaatgaagaaggcgatcctgcatgtgtactgggaagagttccagaaggaccctgtgggcctgatgagccgggtggcccagcctgccagcaagaagatcgatcagaacaagctgaaacctgagatggacgagaagggcaacctgaccaccgccggctttgcctgctctcagtgtggccagcccctgttcgtgtacaagctggagcaggtgtctgagaagggcaaggcttacaccaactacttcggacggtgcaatgtggccgagcacgaaaagctgatcctgctggcccagctgaagcccgagaaggatagcgacgaagccgtgacatatagcctgggaaagtttgggcagagggccctggatttctacagcattcatgtgaccaaggagtccacccaccccgtgaagcccctggcccagatcgccggaaacagatacgcctccggacctgtgggaaaggccctgagcgacgcatgtatgggcacaatcgcctccttcctgtctaagtaccaggacatcatcatcgaacaccagaaggtggtgaagggcaaccagaagagactggagagcctgcgggagctggccggcaaggaaaacctggaataccctagcgtgaccctgccacctcagcctcacaccaaggagggcgttgatgcctacaacgaagtgatcgcccgggtgcgaatgtgggtgaacctgaacctgtggcagaagctgaagctaagcagagatgatgccaagcctctgctgagactgaagggattcccttcctttcctctggtcgagagacaggccaacgaagtggactggtgggacatggtgtgtaacgtgaagaagctgatcaacgagaaaaaggaggatggcaaggtgttttggcagaatctggctggctacaagagacaggaagccctgagaccatacctgagcagcgaggaagatcggaagaagggaaagaaattcgctcggtaccagctgggcgacctgctgctgcacctggaaaagaagcacggcgaggactggggaaaggtgtacgacgaggcctgggagcggattgacaagaaagtggaaggcctgagcaagcacatcaagctggaagaggaacggagaagcgaggacgcccagagcaaggccgccctgaccgactggctgcgggctaaggccagcttcgtgatcgagggcctgaaggaggccgacaaggacgagttctgcagatgcgagctgaagctgcagaagtggtacggggacctgcggggaaagcccttcgccatcgaagccgagaacagcatcctggacatcagcggcttcagcaagcagtacaactgtgccttcatctggcagaaggacggcgtgaagaagctgaacctgtacctgatcatcaactacttcaagggcggcaagctgcggttcaagaagatcaaacctgaagccttcgaagccaacagattctacaccgtgatcaacaaaaagagcggcgagatcgtgcccatggaggtgaacttcaacttcgacgaccccaacctgatcatcctgcctctggcctttggcaagagacagggcagagaattcatctggaacgacctgctgtccctggaaaccggcagcctgaagctggccaacggaagagtgatcgagaagacactgtacaacagaagaacccggcaggatgagcctgccctgttcgtggccctgaccttcgagcggcgggaggtcctggactcctccaatatcaaaccaatgaacctgatcggcgtggcaagaggcgaaaacatccccgccgtgatcgccctgaccgaccccgagggctgcccactgagccggtttaaggatagcctgggaaacccaacccacatcctgagaatcggcgagagctataaggagaagcagcggaccatccaggccaagaaggaggtggagcagcggagagccggcggctacagccggaagtacgccagcaaagccaagaatctggcagacgatatggtgagaaacaccgctagagatctgctgtactacgccgtgacccaggatgccatgctgatcttcgccaacctgagccggggcttcggccggcagggcaagcggaccttcatggccgagagacagtacacacggatggaggactggctgaccgccaagctggcctacgagggcctgagcaagacctacctgtccaagacactggcccagtacacctccaagacatgcagcaactgtgggtttaccatcaccagcgccgactacgacagggtgctggagaagctgaagaagacagcaacaggctggatgaccacaattaacggcaaggagctgaaggtggagggccagattacctactacaacagatacaagagacagaacgtagtcaaggacctgtccgtcgagctggatagactgagcgaagaatctgtgaacaacgacatctcctcctggacaaagggcagaagcggagaagctctgagcctcctgaagaaaagattctcccatagacccgtgcaggagaagttcgtgtgcctgaactgcggcttcgagacacacgcagccgagcaagccgccctgaacatcgccagatcctggctgttcctgcggagccaggagtacaagaaataccagacaaacaagacaaccggcaacaccgataagagagccttcgtcgagacctggcagtccttttaccggaagaagcttaaggaggtgtggaaacctgccgtgcggtctggcggatctggcggaggctccaccagccccaagaaaaagagaaaagtctaagctgccttctgcggggcttgccttctggccatgcccttcttctctcccttgcacctgtacctcttggtctttgaataaagcctgagtaggaaggctagcaaaaaaaaaaaaaaaaaaaaaaaaaaaaaaaaaaaaaaaaaaaaaaaaaaaaaaaaaaaaaaaaaaaaaaaaaaaaaaaa

SEQ ID NO: 10020 - RNA, 8787 nt, synthetic construct
  source 1..8787: mol_type = other RNA
aggaaataagagagaaaagaagagtaagaagaaatataagagccaccatggcccctaagaagaagcgtaaagtgagccggatgaaccacgaccaggagttcgacccccctaaggtgtaccctcccgtccccgccgagaagagaaagcccatccgggtcctgagcctgttcgatggcatcgccaccggtctgctggtgctgaaggacctgggcatccaggtggataggtacattgcctccgaggtgtgcgaggactccatcaccgtgggaatggtgcgtcatcagggcaagatcatgtacgtgggcgacgtgcggagcgtgacacagaagcatatccaggagtggggccctttcgacctggtgatcggcggcagcccttgcaatgacctgagcatcgtgaacccagcccggaagggcctgtacgagggaaccggcagactgttcttcgagttttacagactgctgcacgacgcccggcctaaggaaggcgacgaccggcccttcttttggctgttcgagaatgtggtggccatgggagtcagcgacaagcgggatattagccggttcctggagagcaaccccgtgatgatcgatgccaaggaagtgagcgccgcccaccgggccagatacttctggggcaatctgcctggcatgaacagacccctggccagcaccgtgaacgacaagctggagctgcaggagtgcctggagcacggccggatcgccaagttcagcaaggtgagaaccatcaccacccgaagcaacagcatcaaacaaggcaaggaccagcactttcctgtgttcatgaacgagaaggaggacatcctgtggtgtaccgagatggagagagtgttcgggttcccagtccactacacagatgtcagcaacatgtctagactggccagacagagactgctgggaagaagctggtccgtccctgtgatcagacacctgttcgcccctctgaaggagtacttcgcctgcgtgagcagcggcaacagcaacgccaacagccggggccccagcttctctagcggcctggtgccactgtccctgagagggagccacatgggccccatggagatctacaaaaccgtgagcgcctggaagcggcagcctgtgcgcgtgctgagcctgtttcggaatatcgataaagtcctgaaaagcctgggattcctggagagcggctctggctccggcggtggcaccctgaagtacgtggaggatgtgacaaacgtggtcagacgggatgtggagaagtggggccccttcgatctggtgtacggcagcacccaacccctgggcagctcttgtgaccggtgccctggctggtacatgtttcagttccaccggatcctgcagtacgccctgccgagacaggagtcccagcggccattcttttggattttcatggacaacttgctgctgaccgaggatgaccaggaaactaccactcggttcctgcagaccgaagccgtgaccctgcaggacgtgagaggccgggactaccagaacgccatgcgggtgtggtccaacatccctggactgaaaagcaagcacgcacctctgacccctaaagaagaggagtacctgcaggcccaggtgcggagcagaagcaagctggacgcccctaaggtggatctgctggtgaagaattgcctcctgcccctgagagagtacttcaagtatttcagccagaatagtctgcccctgggaggcagcggcggcggcccccagaagctggtgaccttcgaggacgtggccgtgtacttcacccagaccgagtgggacggcctgagcaccgcccagagggccctgtacagggacgtgatgctggagaactacggcaacgtggccagcctgggcttccccctgctgaagcccgccgtgatcagccagctggagggcggcggcgagctggagggccccagcagcctggccagcggcgccggcaccggcccccagggcctgtggggcggcccaagcagcggcgcccctcctcccagcggcggcaggcggcccaagcagcggcgcccctcctcccagcggcggcagcccagccggctccccaacctctaccgaggagggcacctctgagtccgccacccccgagagcggccctggcacctccaccgagcccagcgagggcagcgcacccggcagccctgccggcagccccacctccacagaggagggaaccagcaccgagcccagcgaaggcagcgccccaggcaccagcaccgagcctagtgagcaggagattaaacggatcaacaagatcagaagaagacttgtgaaagacagcaacaccaagaaggccggcaagacaggccccatgaaaaccctgctggttagagtgatgacacccgatctgagagagcggctggaaaacctgagaaagaagcctgaaaatatcccccagcccatcagcaatacatctagagccaacctgaataagctgctgaccgattacaccgaaatgaagaaggcgatcctgcatgtgtactgggaagagttccagaaggaccctgtgggcctgatgagccgggtggcccagcctgccagcaagaagatcgatcagaacaagctgaaacctgagatggacgagaagggcaacctgaccaccgccggctttgcctgctctcagtgtggccagcccctgttcgtgtacaagctggagcaggtgtctgagaagggcaaggcttacaccaactacttcggacggtgcaatgtggccgagcacgaaaagctgatcctgctggcccagctgaagcccgagaaggatagcgacgaagccgtgacatatagcctgggaaagtttgggcagagggccctggatttctacagcattcatgtgaccaaggagtccacccaccccgtgaagcccctggcccagatcgccggaaacagatacgcctccggacctgtgggaaaggccctgagcgacgcatgtatgggcacaatcgcctccttcctgtctaagtaccaggacatcatcatcgaacaccagaaggtggtgaagggcaaccagaagagactggagagcctgcgggagctggccggcaaggaaaacctggaataccctagcgtgaccctgccacctcagcctcacaccaaggagggcgttgatgcctacaacgaagtgatcgcccgggtgcgaatgtgggtgaacctgaacctgtggcagaagctgaagctaagcagagatgatgccaagcctctgctgagactgaagggattcccttcctttcctctggtcgagagacaggccaacgaagtggactggtgggacatggtgtgtaacgtgaagaagctgatcaacgagaaaaaggaggatggcaaggtgttttggcagaatctggctggctacaagagacaggaagccctgagaccatacctgagcagcgaggaagatcggaagaagggaaagaaattcgctcggtaccagctgggcgacctgctgctgcacctggaaaagaagcacggcgaggactggggaaaggtgtacgacgaggcctgggagcggattgacaagaaagtggaaggcctgagcaagcacatcaagctggaagaggaacggagaagcgaggacgcccagagcaaggccgccctgaccgactggctgcgggctaaggccagcttcgtgatcgagggcctgaaggaggccgacaaggacgagttctgcagatgcgagctgaagctgcagaagtggtacggggacctgcggggaaagcccttcgccatcgaagccgagaacagcatcctggacatcagcggcttcagcaagcagtacaactgtgccttcatctggcagaaggacggcgtgaagaagctgaacctgtacctgatcatcaactacttcaagggcggcaagctgcggttcaagaagatcaaacctgaagccttcgaagccaacagattctacaccgtgatcaacaaaaagagcggcgagatcgtgcccatggaggtgaacttcaacttcgacgaccccaacctgatcatcctgcctctggcctttggcaagagacagggcagagaattcatctggaacgacctgctgtccctggaaaccggcagcctgaagctggccaacggaagagtgatcgagaagacactgtacaacagaagaacccggcaggatgagcctgccctgttcgtggccctgaccttcgagcggcgggaggtcctggactcctccaatatcaaaccaatgaacctgatcggcgtggcaagaggcgaaaacatccccgccgtgatcgccctgaccgaccccgagggctgcccactgagccggtttaaggatagcctgggaaacccaacccacatcctgagaatcggcgagagctataaggagaagcagcggaccatccaggccaagaaggaggtggagcagcggagagccggcggctacagccggaagtacgccagcaaagccaagaatctggcagacgatatggtgagaaacaccgctagagatctgctgtactacgccgtgacccaggatgccatgctgatcttcgccaacctgagccggggcttcggccggcagggcaagcggaccttcatggccgagagacagtacacacggatggaggactggctgaccgccaagctggcctacgagggcctgagcaagacctacctgtccaagacactggcccagtacacctccaagacatgcagcaactgtgggtttaccatcaccagcgccgactacgacagggtgctggagaagctgaagaagacagcaacaggctggatgaccacaattaacggcaaggagctgaaggtggagggccagattacctactacaacagatacaagagacagaacgtagtcaaggacctgtccgtcgagctggatagactgagcgaagaatctgtgaacaacgacatctcctcctggacaaagggcagaagcggagaagctctgagcctcctgaagaaaagattctcccatagacccgtgcaggagaagttcgtgtgcctgaactgcggcttcgagacacacgcagccgagcaagccgccctgaacatcgccagatcctggctgttcctgcggagccaggagtacaagaaataccagacaaacaagacaaccggcaacaccgataagagagccttcgtcgagacctggcagtccttttaccggaagaagcttaaggaggtgtggaaacctgccgtgcggtctggcggatctggcggaggctccaccagccccaagaaaaagagaaaagtctaagctgccttctgcggggcttgccttctggccatgcccttcttctctcccttgcacctgtacctcttggtctttgaataaagcctgagtaggaaggctagcaaaaaaaaaaaaaaaaaaaaaaaaaaaaaaaaaaaaaaaaaaaaaaaaaaaaaaaaaaaaaaaaaaaaaaaaaaaaaaaagcccagccggctccccaacctctaccgaggagggcacctctgagtccgccacccccgagagcggccctggcacctccaccgagcccagcgagggcagcgcacccggcagccctgccggcagccccacctccacagaggagggaaccagcaccgagcccagcgaaggcagcgccccaggcaccagcaccgagcctagtgagcaggagattaaacggatcaacaagatcagaagaagacttgtgaaagacagcaacaccaagaaggccggcaagacaggccccatgaaaaccctgctggttagagtgatgacacccgatctgagagagcggctggaaaacctgagaaagaagcctgaaaatatcccccagcccatcagcaatacatctagagccaacctgaataagctgctgaccgattacaccgaaatgaagaaggcgatcctgcatgtgtactgggaagagttccagaaggaccctgtgggcctgatgagccgggtggcccagcctgccagcaagaagatcgatcagaacaagctgaaacctgagatggacgagaagggcaacctgaccaccgccggctttgcctgctctcagtgtggccagcccctgttcgtgtacaagctggagcaggtgtctgagaagggcaaggcttacaccaactacttcggacggtgcaatgtggccgagcacgaaaagctgatcctgctggcccagctgaagcccgagaaggatagcgacgaagccgtgacatatagcctgggaaagtttgggcagagggccctggatttctacagcattcatgtgaccaaggagtccacccaccccgtgaagcccctggcccagatcgccggaaacagatacgcctccggacctgtgggaaaggccctgagcgacgcatgtatgggcacaatcgcctccttcctgtctaagtaccaggacatcatcatcgaacaccagaaggtggtgaagggcaaccagaagagactggagagcctgcgggagctggccggcaaggaaaacctggaataccctagcgtgaccctgccacctcagcctcacaccaaggagggcgttgatgcctacaacgaagtgatcgcccgggtgcgaatgtgggtgaacctgaacctgtggcagaagctgaagctaagcagagatgatgccaagcctctgctgagactgaagggattcccttcctttcctctggtcgagagacaggccaacgaagtggactggtgggacatggtgtgtaacgtgaagaagctgatcaacgagaaaaaggaggatggcaaggtgttttggcagaatctggctggctacaagagacaggaagccctgagaccatacctgagcagcgaggaagatcggaagaagggaaagaaattcgctcggtaccagctgggcgacctgctgctgcacctggaaaagaagcacggcgaggactggggaaaggtgtacgacgaggcctgggagcggattgacaagaaagtggaaggcctgagcaagcacatcaagctggaagaggaacggagaagcgaggacgcccagagcaaggccgccctgaccgactggctgcgggctaaggccagcttcgtgatcgagggcctgaaggaggccgacaaggacgagttctgcagatgcgagctgaagctgcagaagtggtacggggacctgcggggaaagcccttcgccatcgaagccgagaacagcatcctggacatcagcggcttcagcaagcagtacaactgtgccttcatctggcagaaggacggcgtgaagaagctgaacctgtacctgatcatcaactacttcaagggcggcaagctgcggttcaagaagatcaaacctgaagccttcgaagccaacagattctacaccgtgatcaacaaaaagagcggcgagatcgtgcccatggaggtgaacttcaacttcgacgaccccaacctgatcatcctgcctctggcctttggcaagagacagggcagagaattcatctggaacgacctgctgtccctggaaaccggcagcctgaagctggccaacggaagagtgatcgagaagacactgtacaacagaagaacccggcaggatgagcctgccctgttcgtggccctgaccttcgagcggcgggaggtcctggactcctccaatatcaaaccaatgaacctgatcggcgtggcaagaggcgaaaacatccccgccgtgatcgccctgaccgaccccgagggctgcccactgagccggtttaaggatagcctgggaaacccaacccacatcctgagaatcggcgagagctataaggagaagcagcggaccatccaggccaagaaggaggtggagcagcggagagccggcggctacagccggaagtacgccagcaaagccaagaatctggcagacgatatggtgagaaacaccgctagagatctgctgtactacgccgtgacccaggatgccatgctgatcttcgccaacctgagccggggcttcggccggcagggcaagcggaccttcatggccgagagacagtacacacggatggaggactggctgaccgccaagctggcctacgagggcctgagcaagacctacctgtccaagacactggcccagtacacctccaagacatgcagcaactgtgggtttaccatcaccagcgccgactacgacagggtgctggagaagctgaagaagacagcaacaggctggatgaccacaattaacggcaaggagctgaaggtggagggccagattacctactacaacagatacaagagacagaacgtagtcaaggacctgtccgtcgagctggatagactgagcgaagaatctgtgaacaacgacatctcctcctggacaaagggcagaagcggagaagctctgagcctcctgaagaaaagattctcccatagacccgtgcaggagaagttcgtgtgcctgaactgcggcttcgagacacacgcagccgagcaagccgccctgaacatcgccagatcctggctgttcctgcggagccaggagtacaagaaataccagacaaacaagacaaccggcaacaccgataagagagccttcgtcgagacctggcagtccttttaccggaagaagcttaaggaggtgtggaaacctgccgtgcggtctggcggatctggcggaggctccaccagccccaagaaaaagagaaaagtctaagctgccttctgcggggcttgccttctggccatgcccttcttctctcccttgcacctgtacctcttggtctttgaataaagcctgagtaggaaggctagcaaaaaaaaaaaaaaaaaaaaaaaaaaaaaaaaaaaaaaaaaaaaaaaaaaaaaaaaaaaaaaaaaaaaaaaaaaaaaaaa

SEQ ID NO: 10021 - RNA, 8787 nt, synthetic construct
  source 1..8787: mol_type = other RNA
aggaaataagagagaaaagaagagtaagaagaaatataagagccaccatggcccctaagaagaagcgtaaagtgagccggatgaaccacgaccaggagttcgacccccctaaggtgtaccctcccgtccccgccgagaagagaaagcccatccgggtcctgagcctgttcgatggcatcgccaccggtctgctggtgctgaaggacctgggcatccaggtggataggtacattgcctccgaggtgtgcgaggactccatcaccgtgggaatggtgcgtcatcagggcaagatcatgtacgtgggcgacgtgcggagcgtgacacagaagcatatccaggagtggggccctttcgacctggtgatcggcggcagcccttgcaatgacctgagcatcgtgaacccagcccggaagggcctgtacgagggaaccggcagactgttcttcgagttttacagactgctgcacgacgcccggcctaaggaaggcgacgaccggcccttcttttggctgttcgagaatgtggtggccatgggagtcagcgacaagcgggatattagccggttcctggagagcaaccccgtgatgatcgatgccaaggaagtgagcgccgcccaccgggccagatacttctggggcaatctgcctggcatgaacagacccctggccagcaccgtgaacgacaagctggagctgcaggagtgcctggagcacggccggatcgccaagttcagcaaggtgagaaccatcaccacccgaagcaacagcatcaaacaaggcaaggaccagcactttcctgtgttcatgaacgagaaggaggacatcctgtggtgtaccgagatggagagagtgttcgggttcccagtccactacacagatgtcagcaacatgtctagactggccagacagagactgctgggaagaagctggtccgtccctgtgatcagacacctgttcgcccctctgaaggagtacttcgcctgcgtgagcagcggcaacagcaacgccaacagccggggccccagcttctctagcggcctggtgccactgtccctgagagggagccacatgggccccatggagatctacaaaaccgtgagcgcctggaagcggcagcctgtgcgcgtgctgagcctgtttcggaatatcgataaagtcctgaaaagcctgggattcctggagagcggctctggctccggcggtggcaccctgaagtacgtggaggatgtgacaaacgtggtcagacgggatgtggagaagtggggccccttcgatctggtgtacggcagcacccaacccctgggcagctcttgtgaccggtgccctggctggtacatgtttcagttccaccggatcctgcagtacgccctgccgagacaggagtcccagcggccattcttttggattttcatggacaacttgctgctgaccgaggatgaccaggaaactaccactcggttcctgcagaccgaagccgtgaccctgcaggacgtgagaggccgggactaccagaacgccatgcgggtgtggtccaacatccctggactgaaaagcaagcacgcacctctgacccctaaagaagaggagtacctgcaggcccaggtgcggagcagaagcaagctggacgcccctaaggtggatctgctggtgaagaattgcctcctgcccctgagagagtacttcaagtatttcagccagaatagtctgcccctgggaggcagcggcggcggcgcccaggagcccctgaccttccacgacgtggccgtggacttcacctgggaggagtggcagctgctggaccccgagcagaaggacctgtacagggacgtgatgctggagacctacagccacctggtgagcgtgggctacgaggccagcaagcccgacatcctgagcaagctggaccacggcgaggccccctggaccgtggccggcgagatccactgcggcacccacagcgagatctggaagaggggcggcccaagcagcggcgcccctcctcccagcggcggcaggcggcccaagcagcggcgcccctcctcccagcggcggcagcccagccggctccccaacctctaccgaggagggcacctctgagtccgccacccccgagagcggccctggcacctccaccgagcccagcgagggcagcgcacccggcagccctgccggcagccccacctccacagaggagggaaccagcaccgagcccagcgaaggcagcgccccaggcaccagcaccgagcctagtgagcaggagattaaacggatcaacaagatcagaagaagacttgtgaaagacagcaacaccaagaaggccggcaagacaggccccatgaaaaccctgctggttagagtgatgacacccgatctgagagagcggctggaaaacctgagaaagaagcctgaaaatatcccccagcccatcagcaatacatctagagccaacctgaataagctgctgaccgattacaccgaaatgaagaaggcgatcctgcatgtgtactgggaagagttccagaaggaccctgtgggcctgatgagccgggtggcccagcctgccagcaagaagatcgatcagaacaagctgaaacctgagatggacgagaagggcaacctgaccaccgccggctttgcctgctctcagtgtggccagcccctgttcgtgtacaagctggagcaggtgtctgagaagggcaaggcttacaccaactacttcggacggtgcaatgtggccgagcacgaaaagctgatcctgctggcccagctgaagcccgagaaggatagcgacgaagccgtgacatatagcctgggaaagtttgggcagagggccctggatttctacagcattcatgtgaccaaggagtccacccaccccgtgaagcccctggcccagatcgccggaaacagatacgcctccggacctgtgggaaaggccctgagcgacgcatgtatgggcacaatcgcctccttcctgtctaagtaccaggacatcatcatcgaacaccagaaggtggtgaagggcaaccagaagagactggagagcctgcgggagctggccggcaaggaaaacctggaataccctagcgtgaccctgccacctcagcctcacaccaaggagggcgttgatgcctacaacgaagtgatcgcccgggtgcgaatgtgggtgaacctgaacctgtggcagaagctgaagctaagcagagatgatgccaagcctctgctgagactgaagggattcccttcctttcctctggtcgagagacaggccaacgaagtggactggtgggacatggtgtgtaacgtgaagaagctgatcaacgagaaaaaggaggatggcaaggtgttttggcagaatctggctggctacaagagacaggaagccctgagaccatacctgagcagcgaggaagatcggaagaagggaaagaaattcgctcggtaccagctgggcgacctgctgctgcacctggaaaagaagcacggcgaggactggggaaaggtgtacgacgaggcctgggagcggattgacaagaaagtggaaggcctgagcaagcacatcaagctggaagaggaacggagaagcgaggacgcccagagcaaggccgccctgaccgactggctgcgggctaaggccagcttcgtgatcgagggcctgaaggaggccgacaaggacgagttctgcagatgcgagctgaagctgcagaagtggtacggggacctgcggggaaagcccttcgccatcgaagccgagaacagcatcctggacatcagcggcttcagcaagcagtacaactgtgccttcatctggcagaaggacggcgtgaagaagctgaacctgtacctgatcatcaactacttcaagggcggcaagctgcggttcaagaagatcaaacctgaagccttcgaagccaacagattctacaccgtgatcaacaaaaagagcggcgagatcgtgcccatggaggtgaacttcaacttcgacgaccccaacctgatcatcctgcctctggcctttggcaagagacagggcagagaattcatctggaacgacctgctgtccctggaaaccggcagcctgaagctggccaacggaagagtgatcgagaagacactgtacaacagaagaacccggcaggatgagcctgccctgttcgtggccctgaccttcgagcggcgggaggtcctggactcctccaatatcaaaccaatgaacctgatcggcgtggcaagaggcgaaaacatccccgccgtgatcgccctgaccgaccccgagggctgcccactgagccggtttaaggatagcctgggaaacccaacccacatcctgagaatcggcgagagctataaggagaagcagcggaccatccaggccaagaaggaggtggagcagcggagagccggcggctacagccggaagtacgccagcaaagccaagaatctggcagacgatatggtgagaaacaccgctagagatctgctgtactacgccgtgacccaggatgccatgctgatcttcgccaacctgagccggggcttcggccggcagggcaagcggaccttcatggccgagagacagtacacacggatggaggactggctgaccgccaagctggcctacgagggcctgagcaagacctacctgtccaagacactggcccagtacacctccaagacatgcagcaactgtgggtttaccatcaccagcgccgactacgacagggtgctggagaagctgaagaagacagcaacaggctggatgaccacaattaacggcaaggagctgaaggtggagggccagattacctactacaacagatacaagagacagaacgtagtcaaggacctgtccgtcgagctggatagactgagcgaagaatctgtgaacaacgacatctcctcctggacaaagggcagaagcggagaagctctgagcctcctgaagaaaagattctcccatagacccgtgcaggagaagttcgtgtgcctgaactgcggcttcgagacacacgcagccgagcaagccgccctgaacatcgccagatcctggctgttcctgcggagccaggagtacaagaaataccagacaaacaagacaaccggcaacaccgataagagagccttcgtcgagacctggcagtccttttaccggaagaagcttaaggaggtgtggaaacctgccgtgcggtctggcggatctggcggaggctccaccagccccaagaaaaagagaaaagtctaagctgccttctgcggggcttgccttctggccatgcccttcttctctcccttgcacctgtacctcttggtctttgaataaagcctgagtaggaaggctagcaaaaaaaaaaaaaaaaaaaaaaaaaaaaaaaaaaaaaaaaaaaaaaaaaaaaaaaaaaaaaaaaaaaaaaaaaaaaaaaagcccagccggctccccaacctctaccgaggagggcacctctgagtccgccacccccgagagcggccctggcacctccaccgagcccagcgagggcagcgcacccggcagccctgccggcagccccacctccacagaggagggaaccagcaccgagcccagcgaaggcagcgccccaggcaccagcaccgagcctagtgagcaggagattaaacggatcaacaagatcagaagaagacttgtgaaagacagcaacaccaagaaggccggcaagacaggccccatgaaaaccctgctggttagagtgatgacacccgatctgagagagcggctggaaaacctgagaaagaagcctgaaaatatcccccagcccatcagcaatacatctagagccaacctgaataagctgctgaccgattacaccgaaatgaagaaggcgatcctgcatgtgtactgggaagagttccagaaggaccctgtgggcctgatgagccgggtggcccagcctgccagcaagaagatcgatcagaacaagctgaaacctgagatggacgagaagggcaacctgaccaccgccggctttgcctgctctcagtgtggccagcccctgttcgtgtacaagctggagcaggtgtctgagaagggcaaggcttacaccaactacttcggacggtgcaatgtggccgagcacgaaaagctgatcctgctggcccagctgaagcccgagaaggatagcgacgaagccgtgacatatagcctgggaaagtttgggcagagggccctggatttctacagcattcatgtgaccaaggagtccacccaccccgtgaagcccctggcccagatcgccggaaacagatacgcctccggacctgtgggaaaggccctgagcgacgcatgtatgggcacaatcgcctccttcctgtctaagtaccaggacatcatcatcgaacaccagaaggtggtgaagggcaaccagaagagactggagagcctgcgggagctggccggcaaggaaaacctggaataccctagcgtgaccctgccacctcagcctcacaccaaggagggcgttgatgcctacaacgaagtgatcgcccgggtgcgaatgtgggtgaacctgaacctgtggcagaagctgaagctaagcagagatgatgccaagcctctgctgagactgaagggattcccttcctttcctctggtcgagagacaggccaacgaagtggactggtgggacatggtgtgtaacgtgaagaagctgatcaacgagaaaaaggaggatggcaaggtgttttggcagaatctggctggctacaagagacaggaagccctgagaccatacctgagcagcgaggaagatcggaagaagggaaagaaattcgctcggtaccagctgggcgacctgctgctgcacctggaaaagaagcacggcgaggactggggaaaggtgtacgacgaggcctgggagcggattgacaagaaagtggaaggcctgagcaagcacatcaagctggaagaggaacggagaagcgaggacgcccagagcaaggccgccctgaccgactggctgcgggctaaggccagcttcgtgatcgagggcctgaaggaggccgacaaggacgagttctgcagatgcgagctgaagctgcagaagtggtacggggacctgcggggaaagcccttcgccatcgaagccgagaacagcatcctggacatcagcggcttcagcaagcagtacaactgtgccttcatctggcagaaggacggcgtgaagaagctgaacctgtacctgatcatcaactacttcaagggcggcaagctgcggttcaagaagatcaaacctgaagccttcgaagccaacagattctacaccgtgatcaacaaaaagagcggcgagatcgtgcccatggaggtgaacttcaacttcgacgaccccaacctgatcatcctgcctctggcctttggcaagagacagggcagagaattcatctggaacgacctgctgtccctggaaaccggcagcctgaagctggccaacggaagagtgatcgagaagacactgtacaacagaagaacccggcaggatgagcctgccctgttcgtggccctgaccttcgagcggcgggaggtcctggactcctccaatatcaaaccaatgaacctgatcggcgtggcaagaggcgaaaacatccccgccgtgatcgccctgaccgaccccgagggctgcccactgagccggtttaaggatagcctgggaaacccaacccacatcctgagaatcggcgagagctataaggagaagcagcggaccatccaggccaagaaggaggtggagcagcggagagccggcggctacagccggaagtacgccagcaaagccaagaatctggcagacgatatggtgagaaacaccgctagagatctgctgtactacgccgtgacccaggatgccatgctgatcttcgccaacctgagccggggcttcggccggcagggcaagcggaccttcatggccgagagacagtacacacggatggaggactggctgaccgccaagctggcctacgagggcctgagcaagacctacctgtccaagacactggcccagtacacctccaagacatgcagcaactgtgggtttaccatcaccagcgccgactacgacagggtgctggagaagctgaagaagacagcaacaggctggatgaccacaattaacggcaaggagctgaaggtggagggccagattacctactacaacagatacaagagacagaacgtagtcaaggacctgtccgtcgagctggatagactgagcgaagaatctgtgaacaacgacatctcctcctggacaaagggcagaagcggagaagctctgagcctcctgaagaaaagattctcccatagacccgtgcaggagaagttcgtgtgcctgaactgcggcttcgagacacacgcagccgagcaagccgccctgaacatcgccagatcctggctgttcctgcggagccaggagtacaagaaataccagacaaacaagacaaccggcaacaccgataagagagccttcgtcgagacctggcagtccttttaccggaagaagcttaaggaggtgtggaaacctgccgtgcggtctggcggatctggcggaggctccaccagccccaagaaaaagagaaaagtctaagctgccttctgcggggcttgccttctggccatgcccttcttctctcccttgcacctgtacctcttggtctttgaataaagcctgagtaggaaggctagcaaaaaaaaaaaaaaaaaaaaaaaaaaaaaaaaaaaaaaaaaaaaaaaaaaaaaaaaaaaaaaaaaaaaaaaaaaaaaaaa

SEQ ID NO: 10022 - RNA, 8787 nt, synthetic construct
  source 1..8787: mol_type = other RNA
aggaaataagagagaaaagaagagtaagaagaaatataagagccaccatggcccctaagaagaagcgtaaagtgagccggatgaaccacgaccaggagttcgacccccctaaggtgtaccctcccgtccccgccgagaagagaaagcccatccgggtcctgagcctgttcgatggcatcgccaccggtctgctggtgctgaaggacctgggcatccaggtggataggtacattgcctccgaggtgtgcgaggactccatcaccgtgggaatggtgcgtcatcagggcaagatcatgtacgtgggcgacgtgcggagcgtgacacagaagcatatccaggagtggggccctttcgacctggtgatcggcggcagcccttgcaatgacctgagcatcgtgaacccagcccggaagggcctgtacgagggaaccggcagactgttcttcgagttttacagactgctgcacgacgcccggcctaaggaaggcgacgaccggcccttcttttggctgttcgagaatgtggtggccatgggagtcagcgacaagcgggatattagccggttcctggagagcaaccccgtgatgatcgatgccaaggaagtgagcgccgcccaccgggccagatacttctggggcaatctgcctggcatgaacagacccctggccagcaccgtgaacgacaagctggagctgcaggagtgcctggagcacggccggatcgccaagttcagcaaggtgagaaccatcaccacccgaagcaacagcatcaaacaaggcaaggaccagcactttcctgtgttcatgaacgagaaggaggacatcctgtggtgtaccgagatggagagagtgttcgggttcccagtccactacacagatgtcagcaacatgtctagactggccagacagagactgctgggaagaagctggtccgtccctgtgatcagacacctgttcgcccctctgaaggagtacttcgcctgcgtgagcagcggcaacagcaacgccaacagccggggccccagcttctctagcggcctggtgccactgtccctgagagggagccacatgggccccatggagatctacaaaaccgtgagcgcctggaagcggcagcctgtgcgcgtgctgagcctgtttcggaatatcgataaagtcctgaaaagcctgggattcctggagagcggctctggctccggcggtggcaccctgaagtacgtggaggatgtgacaaacgtggtcagacgggatgtggagaagtggggccccttcgatctggtgtacggcagcacccaacccctgggcagctcttgtgaccggtgccctggctggtacatgtttcagttccaccggatcctgcagtacgccctgccgagacaggagtcccagcggccattcttttggattttcatggacaacttgctgctgaccgaggatgaccaggaaactaccactcggttcctgcagaccgaagccgtgaccctgcaggacgtgagaggccgggactaccagaacgccatgcgggtgtggtccaacatccctggactgaaaagcaagcacgcacctctgacccctaaagaagaggagtacctgcaggcccaggtgcggagcagaagcaagctggacgcccctaaggtggatctgctggtgaagaattgcctcctgcccctgagagagtacttcaagtatttcagccagaatagtctgcccctgggaggcagcggcggcggcgccaggggcaagagcaagagcaaggcccccatcaccttcggcgacctggccatctacttcagccaggaggagtgggagtggctgagccccatccagaaggacctgtacgaggacgtgatgctggagaactacaggaacctggtgagcctgggcctgagcttcaggaggcccaacgtgatcaccctgctggagaagggcaaggccccctggatggtggagcccgtgaggaggaggagggcccccggcggcccaagcagcggcgcccctcctcccagcggcggcaggcggcccaagcagcggcgcccctcctcccagcggcggcagcccagccggctccccaacctctaccgaggagggcacctctgagtccgccacccccgagagcggccctggcacctccaccgagcccagcgagggcagcgcacccggcagccctgccggcagccccacctccacagaggagggaaccagcaccgagcccagcgaaggcagcgccccaggcaccagcaccgagcctagtgagcaggagattaaacggatcaacaagatcagaagaagacttgtgaaagacagcaacaccaagaaggccggcaagacaggccccatgaaaaccctgctggttagagtgatgacacccgatctgagagagcggctggaaaacctgagaaagaagcctgaaaatatcccccagcccatcagcaatacatctagagccaacctgaataagctgctgaccgattacaccgaaatgaagaaggcgatcctgcatgtgtactgggaagagttccagaaggaccctgtgggcctgatgagccgggtggcccagcctgccagcaagaagatcgatcagaacaagctgaaacctgagatggacgagaagggcaacctgaccaccgccggctttgcctgctctcagtgtggccagcccctgttcgtgtacaagctggagcaggtgtctgagaagggcaaggcttacaccaactacttcggacggtgcaatgtggccgagcacgaaaagctgatcctgctggcccagctgaagcccgagaaggatagcgacgaagccgtgacatatagcctgggaaagtttgggcagagggccctggatttctacagcattcatgtgaccaaggagtccacccaccccgtgaagcccctggcccagatcgccggaaacagatacgcctccggacctgtgggaaaggccctgagcgacgcatgtatgggcacaatcgcctccttcctgtctaagtaccaggacatcatcatcgaacaccagaaggtggtgaagggcaaccagaagagactggagagcctgcgggagctggccggcaaggaaaacctggaataccctagcgtgaccctgccacctcagcctcacaccaaggagggcgttgatgcctacaacgaagtgatcgcccgggtgcgaatgtgggtgaacctgaacctgtggcagaagctgaagctaagcagagatgatgccaagcctctgctgagactgaagggattcccttcctttcctctggtcgagagacaggccaacgaagtggactggtgggacatggtgtgtaacgtgaagaagctgatcaacgagaaaaaggaggatggcaaggtgttttggcagaatctggctggctacaagagacaggaagccctgagaccatacctgagcagcgaggaagatcggaagaagggaaagaaattcgctcggtaccagctgggcgacctgctgctgcacctggaaaagaagcacggcgaggactggggaaaggtgtacgacgaggcctgggagcggattgacaagaaagtggaaggcctgagcaagcacatcaagctggaagaggaacggagaagcgaggacgcccagagcaaggccgccctgaccgactggctgcgggctaaggccagcttcgtgatcgagggcctgaaggaggccgacaaggacgagttctgcagatgcgagctgaagctgcagaagtggtacggggacctgcggggaaagcccttcgccatcgaagccgagaacagcatcctggacatcagcggcttcagcaagcagtacaactgtgccttcatctggcagaaggacggcgtgaagaagctgaacctgtacctgatcatcaactacttcaagggcggcaagctgcggttcaagaagatcaaacctgaagccttcgaagccaacagattctacaccgtgatcaacaaaaagagcggcgagatcgtgcccatggaggtgaacttcaacttcgacgaccccaacctgatcatcctgcctctggcctttggcaagagacagggcagagaattcatctggaacgacctgctgtccctggaaaccggcagcctgaagctggccaacggaagagtgatcgagaagacactgtacaacagaagaacccggcaggatgagcctgccctgttcgtggccctgaccttcgagcggcgggaggtcctggactcctccaatatcaaaccaatgaacctgatcggcgtggcaagaggcgaaaacatccccgccgtgatcgccctgaccgaccccgagggctgcccactgagccggtttaaggatagcctgggaaacccaacccacatcctgagaatcggcgagagctataaggagaagcagcggaccatccaggccaagaaggaggtggagcagcggagagccggcggctacagccggaagtacgccagcaaagccaagaatctggcagacgatatggtgagaaacaccgctagagatctgctgtactacgccgtgacccaggatgccatgctgatcttcgccaacctgagccggggcttcggccggcagggcaagcggaccttcatggccgagagacagtacacacggatggaggactggctgaccgccaagctggcctacgagggcctgagcaagacctacctgtccaagacactggcccagtacacctccaagacatgcagcaactgtgggtttaccatcaccagcgccgactacgacagggtgctggagaagctgaagaagacagcaacaggctggatgaccacaattaacggcaaggagctgaaggtggagggccagattacctactacaacagatacaagagacagaacgtagtcaaggacctgtccgtcgagctggatagactgagcgaagaatctgtgaacaacgacatctcctcctggacaaagggcagaagcggagaagctctgagcctcctgaagaaaagattctcccatagacccgtgcaggagaagttcgtgtgcctgaactgcggcttcgagacacacgcagccgagcaagccgccctgaacatcgccagatcctggctgttcctgcggagccaggagtacaagaaataccagacaaacaagacaaccggcaacaccgataagagagccttcgtcgagacctggcagtccttttaccggaagaagcttaaggaggtgtggaaacctgccgtgcggtctggcggatctggcggaggctccaccagccccaagaaaaagagaaaagtctaagctgccttctgcggggcttgccttctggccatgcccttcttctctcccttgcacctgtacctcttggtctttgaataaagcctgagtaggaaggctagcaaaaaaaaaaaaaaaaaaaaaaaaaaaaaaaaaaaaaaaaaaaaaaaaaaaaaaaaaaaaaaaaaaaaaaaaaaaaaaaagcccagccggctccccaacctctaccgaggagggcacctctgagtccgccacccccgagagcggccctggcacctccaccgagcccagcgagggcagcgcacccggcagccctgccggcagccccacctccacagaggagggaaccagcaccgagcccagcgaaggcagcgccccaggcaccagcaccgagcctagtgagcaggagattaaacggatcaacaagatcagaagaagacttgtgaaagacagcaacaccaagaaggccggcaagacaggccccatgaaaaccctgctggttagagtgatgacacccgatctgagagagcggctggaaaacctgagaaagaagcctgaaaatatcccccagcccatcagcaatacatctagagccaacctgaataagctgctgaccgattacaccgaaatgaagaaggcgatcctgcatgtgtactgggaagagttccagaaggaccctgtgggcctgatgagccgggtggcccagcctgccagcaagaagatcgatcagaacaagctgaaacctgagatggacgagaagggcaacctgaccaccgccggctttgcctgctctcagtgtggccagcccctgttcgtgtacaagctggagcaggtgtctgagaagggcaaggcttacaccaactacttcggacggtgcaatgtggccgagcacgaaaagctgatcctgctggcccagctgaagcccgagaaggatagcgacgaagccgtgacatatagcctgggaaagtttgggcagagggccctggatttctacagcattcatgtgaccaaggagtccacccaccccgtgaagcccctggcccagatcgccggaaacagatacgcctccggacctgtgggaaaggccctgagcgacgcatgtatgggcacaatcgcctccttcctgtctaagtaccaggacatcatcatcgaacaccagaaggtggtgaagggcaaccagaagagactggagagcctgcgggagctggccggcaaggaaaacctggaataccctagcgtgaccctgccacctcagcctcacaccaaggagggcgttgatgcctacaacgaagtgatcgcccgggtgcgaatgtgggtgaacctgaacctgtggcagaagctgaagctaagcagagatgatgccaagcctctgctgagactgaagggattcccttcctttcctctggtcgagagacaggccaacgaagtggactggtgggacatggtgtgtaacgtgaagaagctgatcaacgagaaaaaggaggatggcaaggtgttttggcagaatctggctggctacaagagacaggaagccctgagaccatacctgagcagcgaggaagatcggaagaagggaaagaaattcgctcggtaccagctgggcgacctgctgctgcacctggaaaagaagcacggcgaggactggggaaaggtgtacgacgaggcctgggagcggattgacaagaaagtggaaggcctgagcaagcacatcaagctggaagaggaacggagaagcgaggacgcccagagcaaggccgccctgaccgactggctgcgggctaaggccagcttcgtgatcgagggcctgaaggaggccgacaaggacgagttctgcagatgcgagctgaagctgcagaagtggtacggggacctgcggggaaagcccttcgccatcgaagccgagaacagcatcctggacatcagcggcttcagcaagcagtacaactgtgccttcatctggcagaaggacggcgtgaagaagctgaacctgtacctgatcatcaactacttcaagggcggcaagctgcggttcaagaagatcaaacctgaagccttcgaagccaacagattctacaccgtgatcaacaaaaagagcggcgagatcgtgcccatggaggtgaacttcaacttcgacgaccccaacctgatcatcctgcctctggcctttggcaagagacagggcagagaattcatctggaacgacctgctgtccctggaaaccggcagcctgaagctggccaacggaagagtgatcgagaagacactgtacaacagaagaacccggcaggatgagcctgccctgttcgtggccctgaccttcgagcggcgggaggtcctggactcctccaatatcaaaccaatgaacctgatcggcgtggcaagaggcgaaaacatccccgccgtgatcgccctgaccgaccccgagggctgcccactgagccggtttaaggatagcctgggaaacccaacccacatcctgagaatcggcgagagctataaggagaagcagcggaccatccaggccaagaaggaggtggagcagcggagagccggcggctacagccggaagtacgccagcaaagccaagaatctggcagacgatatggtgagaaacaccgctagagatctgctgtactacgccgtgacccaggatgccatgctgatcttcgccaacctgagccggggcttcggccggcagggcaagcggaccttcatggccgagagacagtacacacggatggaggactggctgaccgccaagctggcctacgagggcctgagcaagacctacctgtccaagacactggcccagtacacctccaagacatgcagcaactgtgggtttaccatcaccagcgccgactacgacagggtgctggagaagctgaagaagacagcaacaggctggatgaccacaattaacggcaaggagctgaaggtggagggccagattacctactacaacagatacaagagacagaacgtagtcaaggacctgtccgtcgagctggatagactgagcgaagaatctgtgaacaacgacatctcctcctggacaaagggcagaagcggagaagctctgagcctcctgaagaaaagattctcccatagacccgtgcaggagaagttcgtgtgcctgaactgcggcttcgagacacacgcagccgagcaagccgccctgaacatcgccagatcctggctgttcctgcggagccaggagtacaagaaataccagacaaacaagacaaccggcaacaccgataagagagccttcgtcgagacctggcagtccttttaccggaagaagcttaaggaggtgtggaaacctgccgtgcggtctggcggatctggcggaggctccaccagccccaagaaaaagagaaaagtctaagctgccttctgcggggcttgccttctggccatgcccttcttctctcccttgcacctgtacctcttggtctttgaataaagcctgagtaggaaggctagcaaaaaaaaaaaaaaaaaaaaaaaaaaaaaaaaaaaaaaaaaaaaaaaaaaaaaaaaaaaaaaaaaaaaaaaaaaaaaaaa

SEQ ID NO: 10023 - RNA, 8787 nt, synthetic construct
  source 1..8787: mol_type = other RNA
aggaaataagagagaaaagaagagtaagaagaaatataagagccaccatggcccctaagaagaagcgtaaagtgagccggatgaaccacgaccaggagttcgacccccctaaggtgtaccctcccgtccccgccgagaagagaaagcccatccgggtcctgagcctgttcgatggcatcgccaccggtctgctggtgctgaaggacctgggcatccaggtggataggtacattgcctccgaggtgtgcgaggactccatcaccgtgggaatggtgcgtcatcagggcaagatcatgtacgtgggcgacgtgcggagcgtgacacagaagcatatccaggagtggggccctttcgacctggtgatcggcggcagcccttgcaatgacctgagcatcgtgaacccagcccggaagggcctgtacgagggaaccggcagactgttcttcgagttttacagactgctgcacgacgcccggcctaaggaaggcgacgaccggcccttcttttggctgttcgagaatgtggtggccatgggagtcagcgacaagcgggatattagccggttcctggagagcaaccccgtgatgatcgatgccaaggaagtgagcgccgcccaccgggccagatacttctggggcaatctgcctggcatgaacagacccctggccagcaccgtgaacgacaagctggagctgcaggagtgcctggagcacggccggatcgccaagttcagcaaggtgagaaccatcaccacccgaagcaacagcatcaaacaaggcaaggaccagcactttcctgtgttcatgaacgagaaggaggacatcctgtggtgtaccgagatggagagagtgttcgggttcccagtccactacacagatgtcagcaacatgtctagactggccagacagagactgctgggaagaagctggtccgtccctgtgatcagacacctgttcgcccctctgaaggagtacttcgcctgcgtgagcagcggcaacagcaacgccaacagccggggccccagcttctctagcggcctggtgccactgtccctgagagggagccacatgggccccatggagatctacaaaaccgtgagcgcctggaagcggcagcctgtgcgcgtgctgagcctgtttcggaatatcgataaagtcctgaaaagcctgggattcctggagagcggctctggctccggcggtggcaccctgaagtacgtggaggatgtgacaaacgtggtcagacgggatgtggagaagtggggccccttcgatctggtgtacggcagcacccaacccctgggcagctcttgtgaccggtgccctggctggtacatgtttcagttccaccggatcctgcagtacgccctgccgagacaggagtcccagcggccattcttttggattttcatggacaacttgctgctgaccgaggatgaccaggaaactaccactcggttcctgcagaccgaagccgtgaccctgcaggacgtgagaggccgggactaccagaacgccatgcgggtgtggtccaacatccctggactgaaaagcaagcacgcacctctgacccctaaagaagaggagtacctgcaggcccaggtgcggagcagaagcaagctggacgcccctaaggtggatctgctggtgaagaattgcctcctgcccctgagagagtacttcaagtatttcagccagaatagtctgcccctgggaggcagcggcggcggcggcctggtgagcttcgacgaggtgagcgtgcacttcaccaacgaggagtgggccctgctggaccccggccagagggccctgtacgaggaggtgatggaggagatcagggagatgatgaccagcgtgggcgacgtgagcgagttcctgaccgagggcgagcagagcgagcccagcagggagggcgccgaggagcagaaggagcagaggaagcagagggtgcaggtgggcacctacaggaaggagggcggcccaagcagcggcgcccctcctcccagcggcggcaggcggcccaagcagcggcgcccctcctcccagcggcggcagcccagccggctccccaacctctaccgaggagggcacctctgagtccgccacccccgagagcggccctggcacctccaccgagcccagcgagggcagcgcacccggcagccctgccggcagccccacctccacagaggagggaaccagcaccgagcccagcgaaggcagcgccccaggcaccagcaccgagcctagtgagcaggagattaaacggatcaacaagatcagaagaagacttgtgaaagacagcaacaccaagaaggccggcaagacaggccccatgaaaaccctgctggttagagtgatgacacccgatctgagagagcggctggaaaacctgagaaagaagcctgaaaatatcccccagcccatcagcaatacatctagagccaacctgaataagctgctgaccgattacaccgaaatgaagaaggcgatcctgcatgtgtactgggaagagttccagaaggaccctgtgggcctgatgagccgggtggcccagcctgccagcaagaagatcgatcagaacaagctgaaacctgagatggacgagaagggcaacctgaccaccgccggctttgcctgctctcagtgtggccagcccctgttcgtgtacaagctggagcaggtgtctgagaagggcaaggcttacaccaactacttcggacggtgcaatgtggccgagcacgaaaagctgatcctgctggcccagctgaagcccgagaaggatagcgacgaagccgtgacatatagcctgggaaagtttgggcagagggccctggatttctacagcattcatgtgaccaaggagtccacccaccccgtgaagcccctggcccagatcgccggaaacagatacgcctccggacctgtgggaaaggccctgagcgacgcatgtatgggcacaatcgcctccttcctgtctaagtaccaggacatcatcatcgaacaccagaaggtggtgaagggcaaccagaagagactggagagcctgcgggagctggccggcaaggaaaacctggaataccctagcgtgaccctgccacctcagcctcacaccaaggagggcgttgatgcctacaacgaagtgatcgcccgggtgcgaatgtgggtgaacctgaacctgtggcagaagctgaagctaagcagagatgatgccaagcctctgctgagactgaagggattcccttcctttcctctggtcgagagacaggccaacgaagtggactggtgggacatggtgtgtaacgtgaagaagctgatcaacgagaaaaaggaggatggcaaggtgttttggcagaatctggctggctacaagagacaggaagccctgagaccatacctgagcagcgaggaagatcggaagaagggaaagaaattcgctcggtaccagctgggcgacctgctgctgcacctggaaaagaagcacggcgaggactggggaaaggtgtacgacgaggcctgggagcggattgacaagaaagtggaaggcctgagcaagcacatcaagctggaagaggaacggagaagcgaggacgcccagagcaaggccgccctgaccgactggctgcgggctaaggccagcttcgtgatcgagggcctgaaggaggccgacaaggacgagttctgcagatgcgagctgaagctgcagaagtggtacggggacctgcggggaaagcccttcgccatcgaagccgagaacagcatcctggacatcagcggcttcagcaagcagtacaactgtgccttcatctggcagaaggacggcgtgaagaagctgaacctgtacctgatcatcaactacttcaagggcggcaagctgcggttcaagaagatcaaacctgaagccttcgaagccaacagattctacaccgtgatcaacaaaaagagcggcgagatcgtgcccatggaggtgaacttcaacttcgacgaccccaacctgatcatcctgcctctggcctttggcaagagacagggcagagaattcatctggaacgacctgctgtccctggaaaccggcagcctgaagctggccaacggaagagtgatcgagaagacactgtacaacagaagaacccggcaggatgagcctgccctgttcgtggccctgaccttcgagcggcgggaggtcctggactcctccaatatcaaaccaatgaacctgatcggcgtggcaagaggcgaaaacatccccgccgtgatcgccctgaccgaccccgagggctgcccactgagccggtttaaggatagcctgggaaacccaacccacatcctgagaatcggcgagagctataaggagaagcagcggaccatccaggccaagaaggaggtggagcagcggagagccggcggctacagccggaagtacgccagcaaagccaagaatctggcagacgatatggtgagaaacaccgctagagatctgctgtactacgccgtgacccaggatgccatgctgatcttcgccaacctgagccggggcttcggccggcagggcaagcggaccttcatggccgagagacagtacacacggatggaggactggctgaccgccaagctggcctacgagggcctgagcaagacctacctgtccaagacactggcccagtacacctccaagacatgcagcaactgtgggtttaccatcaccagcgccgactacgacagggtgctggagaagctgaagaagacagcaacaggctggatgaccacaattaacggcaaggagctgaaggtggagggccagattacctactacaacagatacaagagacagaacgtagtcaaggacctgtccgtcgagctggatagactgagcgaagaatctgtgaacaacgacatctcctcctggacaaagggcagaagcggagaagctctgagcctcctgaagaaaagattctcccatagacccgtgcaggagaagttcgtgtgcctgaactgcggcttcgagacacacgcagccgagcaagccgccctgaacatcgccagatcctggctgttcctgcggagccaggagtacaagaaataccagacaaacaagacaaccggcaacaccgataagagagccttcgtcgagacctggcagtccttttaccggaagaagcttaaggaggtgtggaaacctgccgtgcggtctggcggatctggcggaggctccaccagccccaagaaaaagagaaaagtctaagctgccttctgcggggcttgccttctggccatgcccttcttctctcccttgcacctgtacctcttggtctttgaataaagcctgagtaggaaggctagcaaaaaaaaaaaaaaaaaaaaaaaaaaaaaaaaaaaaaaaaaaaaaaaaaaaaaaaaaaaaaaaaaaaaaaaaaaaaaaaagcccagccggctccccaacctctaccgaggagggcacctctgagtccgccacccccgagagcggccctggcacctccaccgagcccagcgagggcagcgcacccggcagccctgccggcagccccacctccacagaggagggaaccagcaccgagcccagcgaaggcagcgccccaggcaccagcaccgagcctagtgagcaggagattaaacggatcaacaagatcagaagaagacttgtgaaagacagcaacaccaagaaggccggcaagacaggccccatgaaaaccctgctggttagagtgatgacacccgatctgagagagcggctggaaaacctgagaaagaagcctgaaaatatcccccagcccatcagcaatacatctagagccaacctgaataagctgctgaccgattacaccgaaatgaagaaggcgatcctgcatgtgtactgggaagagttccagaaggaccctgtgggcctgatgagccgggtggcccagcctgccagcaagaagatcgatcagaacaagctgaaacctgagatggacgagaagggcaacctgaccaccgccggctttgcctgctctcagtgtggccagcccctgttcgtgtacaagctggagcaggtgtctgagaagggcaaggcttacaccaactacttcggacggtgcaatgtggccgagcacgaaaagctgatcctgctggcccagctgaagcccgagaaggatagcgacgaagccgtgacatatagcctgggaaagtttgggcagagggccctggatttctacagcattcatgtgaccaaggagtccacccaccccgtgaagcccctggcccagatcgccggaaacagatacgcctccggacctgtgggaaaggccctgagcgacgcatgtatgggcacaatcgcctccttcctgtctaagtaccaggacatcatcatcgaacaccagaaggtggtgaagggcaaccagaagagactggagagcctgcgggagctggccggcaaggaaaacctggaataccctagcgtgaccctgccacctcagcctcacaccaaggagggcgttgatgcctacaacgaagtgatcgcccgggtgcgaatgtgggtgaacctgaacctgtggcagaagctgaagctaagcagagatgatgccaagcctctgctgagactgaagggattcccttcctttcctctggtcgagagacaggccaacgaagtggactggtgggacatggtgtgtaacgtgaagaagctgatcaacgagaaaaaggaggatggcaaggtgttttggcagaatctggctggctacaagagacaggaagccctgagaccatacctgagcagcgaggaagatcggaagaagggaaagaaattcgctcggtaccagctgggcgacctgctgctgcacctggaaaagaagcacggcgaggactggggaaaggtgtacgacgaggcctgggagcggattgacaagaaagtggaaggcctgagcaagcacatcaagctggaagaggaacggagaagcgaggacgcccagagcaaggccgccctgaccgactggctgcgggctaaggccagcttcgtgatcgagggcctgaaggaggccgacaaggacgagttctgcagatgcgagctgaagctgcagaagtggtacggggacctgcggggaaagcccttcgccatcgaagccgagaacagcatcctggacatcagcggcttcagcaagcagtacaactgtgccttcatctggcagaaggacggcgtgaagaagctgaacctgtacctgatcatcaactacttcaagggcggcaagctgcggttcaagaagatcaaacctgaagccttcgaagccaacagattctacaccgtgatcaacaaaaagagcggcgagatcgtgcccatggaggtgaacttcaacttcgacgaccccaacctgatcatcctgcctctggcctttggcaagagacagggcagagaattcatctggaacgacctgctgtccctggaaaccggcagcctgaagctggccaacggaagagtgatcgagaagacactgtacaacagaagaacccggcaggatgagcctgccctgttcgtggccctgaccttcgagcggcgggaggtcctggactcctccaatatcaaaccaatgaacctgatcggcgtggcaagaggcgaaaacatccccgccgtgatcgccctgaccgaccccgagggctgcccactgagccggtttaaggatagcctgggaaacccaacccacatcctgagaatcggcgagagctataaggagaagcagcggaccatccaggccaagaaggaggtggagcagcggagagccggcggctacagccggaagtacgccagcaaagccaagaatctggcagacgatatggtgagaaacaccgctagagatctgctgtactacgccgtgacccaggatgccatgctgatcttcgccaacctgagccggggcttcggccggcagggcaagcggaccttcatggccgagagacagtacacacggatggaggactggctgaccgccaagctggcctacgagggcctgagcaagacctacctgtccaagacactggcccagtacacctccaagacatgcagcaactgtgggtttaccatcaccagcgccgactacgacagggtgctggagaagctgaagaagacagcaacaggctggatgaccacaattaacggcaaggagctgaaggtggagggccagattacctactacaacagatacaagagacagaacgtagtcaaggacctgtccgtcgagctggatagactgagcgaagaatctgtgaacaacgacatctcctcctggacaaagggcagaagcggagaagctctgagcctcctgaagaaaagattctcccatagacccgtgcaggagaagttcgtgtgcctgaactgcggcttcgagacacacgcagccgagcaagccgccctgaacatcgccagatcctggctgttcctgcggagccaggagtacaagaaataccagacaaacaagacaaccggcaacaccgataagagagccttcgtcgagacctggcagtccttttaccggaagaagcttaaggaggtgtggaaacctgccgtgcggtctggcggatctggcggaggctccaccagccccaagaaaaagagaaaagtctaagctgccttctgcggggcttgccttctggccatgcccttcttctctcccttgcacctgtacctcttggtctttgaataaagcctgagtaggaaggctagcaaaaaaaaaaaaaaaaaaaaaaaaaaaaaaaaaaaaaaaaaaaaaaaaaaaaaaaaaaaaaaaaaaaaaaaaaaaaaaaa

SEQ ID NO: 10024 - RNA, 8787 nt, synthetic construct
  source 1..8787: mol_type = other RNA
aggaaataagagagaaaagaagagtaagaagaaatataagagccaccatggcccctaagaagaagcgtaaagtgagccggatgaaccacgaccaggagttcgacccccctaaggtgtaccctcccgtccccgccgagaagagaaagcccatccgggtcctgagcctgttcgatggcatcgccaccggtctgctggtgctgaaggacctgggcatccaggtggataggtacattgcctccgaggtgtgcgaggactccatcaccgtgggaatggtgcgtcatcagggcaagatcatgtacgtgggcgacgtgcggagcgtgacacagaagcatatccaggagtggggccctttcgacctggtgatcggcggcagcccttgcaatgacctgagcatcgtgaacccagcccggaagggcctgtacgagggaaccggcagactgttcttcgagttttacagactgctgcacgacgcccggcctaaggaaggcgacgaccggcccttcttttggctgttcgagaatgtggtggccatgggagtcagcgacaagcgggatattagccggttcctggagagcaaccccgtgatgatcgatgccaaggaagtgagcgccgcccaccgggccagatacttctggggcaatctgcctggcatgaacagacccctggccagcaccgtgaacgacaagctggagctgcaggagtgcctggagcacggccggatcgccaagttcagcaaggtgagaaccatcaccacccgaagcaacagcatcaaacaaggcaaggaccagcactttcctgtgttcatgaacgagaaggaggacatcctgtggtgtaccgagatggagagagtgttcgggttcccagtccactacacagatgtcagcaacatgtctagactggccagacagagactgctgggaagaagctggtccgtccctgtgatcagacacctgttcgcccctctgaaggagtacttcgcctgcgtgagcagcggcaacagcaacgccaacagccggggccccagcttctctagcggcctggtgccactgtccctgagagggagccacatgggccccatggagatctacaaaaccgtgagcgcctggaagcggcagcctgtgcgcgtgctgagcctgtttcggaatatcgataaagtcctgaaaagcctgggattcctggagagcggctctggctccggcggtggcaccctgaagtacgtggaggatgtgacaaacgtggtcagacgggatgtggagaagtggggccccttcgatctggtgtacggcagcacccaacccctgggcagctcttgtgaccggtgccctggctggtacatgtttcagttccaccggatcctgcagtacgccctgccgagacaggagtcccagcggccattcttttggattttcatggacaacttgctgctgaccgaggatgaccaggaaactaccactcggttcctgcagaccgaagccgtgaccctgcaggacgtgagaggccgggactaccagaacgccatgcgggtgtggtccaacatccctggactgaaaagcaagcacgcacctctgacccctaaagaagaggagtacctgcaggcccaggtgcggagcagaagcaagctggacgcccctaaggtggatctgctggtgaagaattgcctcctgcccctgagagagtacttcaagtatttcagccagaatagtctgcccctgggaggcagcggcggcggcgacagcatgagggtgaccttcgaggaggtggccgtgtacttcacccccggccagggcgccctgctgggccccgcccagagggccctgtacagggacgtgatgcaggagaactacgaggccgtgaccagcctgggcttccccgtgcccaagcccgagctgatcgccaggctggagaggggcgaggagccctgggtgcccgacctgcaggccagggaggagagggagatccccaggggcacctgcggcggcccaagcagcggcgcccctcctcccagcggcggcaggcggcccaagcagcggcgcccctcctcccagcggcggcagcccagccggctccccaacctctaccgaggagggcacctctgagtccgccacccccgagagcggccctggcacctccaccgagcccagcgagggcagcgcacccggcagccctgccggcagccccacctccacagaggagggaaccagcaccgagcccagcgaaggcagcgccccaggcaccagcaccgagcctagtgagcaggagattaaacggatcaacaagatcagaagaagacttgtgaaagacagcaacaccaagaaggccggcaagacaggccccatgaaaaccctgctggttagagtgatgacacccgatctgagagagcggctggaaaacctgagaaagaagcctgaaaatatcccccagcccatcagcaatacatctagagccaacctgaataagctgctgaccgattacaccgaaatgaagaaggcgatcctgcatgtgtactgggaagagttccagaaggaccctgtgggcctgatgagccgggtggcccagcctgccagcaagaagatcgatcagaacaagctgaaacctgagatggacgagaagggcaacctgaccaccgccggctttgcctgctctcagtgtggccagcccctgttcgtgtacaagctggagcaggtgtctgagaagggcaaggcttacaccaactacttcggacggtgcaatgtggccgagcacgaaaagctgatcctgctggcccagctgaagcccgagaaggatagcgacgaagccgtgacatatagcctgggaaagtttgggcagagggccctggatttctacagcattcatgtgaccaaggagtccacccaccccgtgaagcccctggcccagatcgccggaaacagatacgcctccggacctgtgggaaaggccctgagcgacgcatgtatgggcacaatcgcctccttcctgtctaagtaccaggacatcatcatcgaacaccagaaggtggtgaagggcaaccagaagagactggagagcctgcgggagctggccggcaaggaaaacctggaataccctagcgtgaccctgccacctcagcctcacaccaaggagggcgttgatgcctacaacgaagtgatcgcccgggtgcgaatgtgggtgaacctgaacctgtggcagaagctgaagctaagcagagatgatgccaagcctctgctgagactgaagggattcccttcctttcctctggtcgagagacaggccaacgaagtggactggtgggacatggtgtgtaacgtgaagaagctgatcaacgagaaaaaggaggatggcaaggtgttttggcagaatctggctggctacaagagacaggaagccctgagaccatacctgagcagcgaggaagatcggaagaagggaaagaaattcgctcggtaccagctgggcgacctgctgctgcacctggaaaagaagcacggcgaggactggggaaaggtgtacgacgaggcctgggagcggattgacaagaaagtggaaggcctgagcaagcacatcaagctggaagaggaacggagaagcgaggacgcccagagcaaggccgccctgaccgactggctgcgggctaaggccagcttcgtgatcgagggcctgaaggaggccgacaaggacgagttctgcagatgcgagctgaagctgcagaagtggtacggggacctgcggggaaagcccttcgccatcgaagccgagaacagcatcctggacatcagcggcttcagcaagcagtacaactgtgccttcatctggcagaaggacggcgtgaagaagctgaacctgtacctgatcatcaactacttcaagggcggcaagctgcggttcaagaagatcaaacctgaagccttcgaagccaacagattctacaccgtgatcaacaaaaagagcggcgagatcgtgcccatggaggtgaacttcaacttcgacgaccccaacctgatcatcctgcctctggcctttggcaagagacagggcagagaattcatctggaacgacctgctgtccctggaaaccggcagcctgaagctggccaacggaagagtgatcgagaagacactgtacaacagaagaacccggcaggatgagcctgccctgttcgtggccctgaccttcgagcggcgggaggtcctggactcctccaatatcaaaccaatgaacctgatcggcgtggcaagaggcgaaaacatccccgccgtgatcgccctgaccgaccccgagggctgcccactgagccggtttaaggatagcctgggaaacccaacccacatcctgagaatcggcgagagctataaggagaagcagcggaccatccaggccaagaaggaggtggagcagcggagagccggcggctacagccggaagtacgccagcaaagccaagaatctggcagacgatatggtgagaaacaccgctagagatctgctgtactacgccgtgacccaggatgccatgctgatcttcgccaacctgagccggggcttcggccggcagggcaagcggaccttcatggccgagagacagtacacacggatggaggactggctgaccgccaagctggcctacgagggcctgagcaagacctacctgtccaagacactggcccagtacacctccaagacatgcagcaactgtgggtttaccatcaccagcgccgactacgacagggtgctggagaagctgaagaagacagcaacaggctggatgaccacaattaacggcaaggagctgaaggtggagggccagattacctactacaacagatacaagagacagaacgtagtcaaggacctgtccgtcgagctggatagactgagcgaagaatctgtgaacaacgacatctcctcctggacaaagggcagaagcggagaagctctgagcctcctgaagaaaagattctcccatagacccgtgcaggagaagttcgtgtgcctgaactgcggcttcgagacacacgcagccgagcaagccgccctgaacatcgccagatcctggctgttcctgcggagccaggagtacaagaaataccagacaaacaagacaaccggcaacaccgataagagagccttcgtcgagacctggcagtccttttaccggaagaagcttaaggaggtgtggaaacctgccgtgcggtctggcggatctggcggaggctccaccagccccaagaaaaagagaaaagtctaagctgccttctgcggggcttgccttctggccatgcccttcttctctcccttgcacctgtacctcttggtctttgaataaagcctgagtaggaaggctagcaaaaaaaaaaaaaaaaaaaaaaaaaaaaaaaaaaaaaaaaaaaaaaaaaaaaaaaaaaaaaaaaaaaaaaaaaaaaaaaagcccagccggctccccaacctctaccgaggagggcacctctgagtccgccacccccgagagcggccctggcacctccaccgagcccagcgagggcagcgcacccggcagccctgccggcagccccacctccacagaggagggaaccagcaccgagcccagcgaaggcagcgccccaggcaccagcaccgagcctagtgagcaggagattaaacggatcaacaagatcagaagaagacttgtgaaagacagcaacaccaagaaggccggcaagacaggccccatgaaaaccctgctggttagagtgatgacacccgatctgagagagcggctggaaaacctgagaaagaagcctgaaaatatcccccagcccatcagcaatacatctagagccaacctgaataagctgctgaccgattacaccgaaatgaagaaggcgatcctgcatgtgtactgggaagagttccagaaggaccctgtgggcctgatgagccgggtggcccagcctgccagcaagaagatcgatcagaacaagctgaaacctgagatggacgagaagggcaacctgaccaccgccggctttgcctgctctcagtgtggccagcccctgttcgtgtacaagctggagcaggtgtctgagaagggcaaggcttacaccaactacttcggacggtgcaatgtggccgagcacgaaaagctgatcctgctggcccagctgaagcccgagaaggatagcgacgaagccgtgacatatagcctgggaaagtttgggcagagggccctggatttctacagcattcatgtgaccaaggagtccacccaccccgtgaagcccctggcccagatcgccggaaacagatacgcctccggacctgtgggaaaggccctgagcgacgcatgtatgggcacaatcgcctccttcctgtctaagtaccaggacatcatcatcgaacaccagaaggtggtgaagggcaaccagaagagactggagagcctgcgggagctggccggcaaggaaaacctggaataccctagcgtgaccctgccacctcagcctcacaccaaggagggcgttgatgcctacaacgaagtgatcgcccgggtgcgaatgtgggtgaacctgaacctgtggcagaagctgaagctaagcagagatgatgccaagcctctgctgagactgaagggattcccttcctttcctctggtcgagagacaggccaacgaagtggactggtgggacatggtgtgtaacgtgaagaagctgatcaacgagaaaaaggaggatggcaaggtgttttggcagaatctggctggctacaagagacaggaagccctgagaccatacctgagcagcgaggaagatcggaagaagggaaagaaattcgctcggtaccagctgggcgacctgctgctgcacctggaaaagaagcacggcgaggactggggaaaggtgtacgacgaggcctgggagcggattgacaagaaagtggaaggcctgagcaagcacatcaagctggaagaggaacggagaagcgaggacgcccagagcaaggccgccctgaccgactggctgcgggctaaggccagcttcgtgatcgagggcctgaaggaggccgacaaggacgagttctgcagatgcgagctgaagctgcagaagtggtacggggacctgcggggaaagcccttcgccatcgaagccgagaacagcatcctggacatcagcggcttcagcaagcagtacaactgtgccttcatctggcagaaggacggcgtgaagaagctgaacctgtacctgatcatcaactacttcaagggcggcaagctgcggttcaagaagatcaaacctgaagccttcgaagccaacagattctacaccgtgatcaacaaaaagagcggcgagatcgtgcccatggaggtgaacttcaacttcgacgaccccaacctgatcatcctgcctctggcctttggcaagagacagggcagagaattcatctggaacgacctgctgtccctggaaaccggcagcctgaagctggccaacggaagagtgatcgagaagacactgtacaacagaagaacccggcaggatgagcctgccctgttcgtggccctgaccttcgagcggcgggaggtcctggactcctccaatatcaaaccaatgaacctgatcggcgtggcaagaggcgaaaacatccccgccgtgatcgccctgaccgaccccgagggctgcccactgagccggtttaaggatagcctgggaaacccaacccacatcctgagaatcggcgagagctataaggagaagcagcggaccatccaggccaagaaggaggtggagcagcggagagccggcggctacagccggaagtacgccagcaaagccaagaatctggcagacgatatggtgagaaacaccgctagagatctgctgtactacgccgtgacccaggatgccatgctgatcttcgccaacctgagccggggcttcggccggcagggcaagcggaccttcatggccgagagacagtacacacggatggaggactggctgaccgccaagctggcctacgagggcctgagcaagacctacctgtccaagacactggcccagtacacctccaagacatgcagcaactgtgggtttaccatcaccagcgccgactacgacagggtgctggagaagctgaagaagacagcaacaggctggatgaccacaattaacggcaaggagctgaaggtggagggccagattacctactacaacagatacaagagacagaacgtagtcaaggacctgtccgtcgagctggatagactgagcgaagaatctgtgaacaacgacatctcctcctggacaaagggcagaagcggagaagctctgagcctcctgaagaaaagattctcccatagacccgtgcaggagaagttcgtgtgcctgaactgcggcttcgagacacacgcagccgagcaagccgccctgaacatcgccagatcctggctgttcctgcggagccaggagtacaagaaataccagacaaacaagacaaccggcaacaccgataagagagccttcgtcgagacctggcagtccttttaccggaagaagcttaaggaggtgtggaaacctgccgtgcggtctggcggatctggcggaggctccaccagccccaagaaaaagagaaaagtctaagctgccttctgcggggcttgccttctggccatgcccttcttctctcccttgcacctgtacctcttggtctttgaataaagcctgagtaggaaggctagcaaaaaaaaaaaaaaaaaaaaaaaaaaaaaaaaaaaaaaaaaaaaaaaaaaaaaaaaaaaaaaaaaaaaaaaaaaaaaaaa

SEQ ID NO: 10025 - RNA, 8787 nt, synthetic construct
  source 1..8787: mol_type = other RNA
aggaaataagagagaaaagaagagtaagaagaaatataagagccaccatggcccctaagaagaagcgtaaagtgagccggatgaaccacgaccaggagttcgacccccctaaggtgtaccctcccgtccccgccgagaagagaaagcccatccgggtcctgagcctgttcgatggcatcgccaccggtctgctggtgctgaaggacctgggcatccaggtggataggtacattgcctccgaggtgtgcgaggactccatcaccgtgggaatggtgcgtcatcagggcaagatcatgtacgtgggcgacgtgcggagcgtgacacagaagcatatccaggagtggggccctttcgacctggtgatcggcggcagcccttgcaatgacctgagcatcgtgaacccagcccggaagggcctgtacgagggaaccggcagactgttcttcgagttttacagactgctgcacgacgcccggcctaaggaaggcgacgaccggcccttcttttggctgttcgagaatgtggtggccatgggagtcagcgacaagcgggatattagccggttcctggagagcaaccccgtgatgatcgatgccaaggaagtgagcgccgcccaccgggccagatacttctggggcaatctgcctggcatgaacagacccctggccagcaccgtgaacgacaagctggagctgcaggagtgcctggagcacggccggatcgccaagttcagcaaggtgagaaccatcaccacccgaagcaacagcatcaaacaaggcaaggaccagcactttcctgtgttcatgaacgagaaggaggacatcctgtggtgtaccgagatggagagagtgttcgggttcccagtccactacacagatgtcagcaacatgtctagactggccagacagagactgctgggaagaagctggtccgtccctgtgatcagacacctgttcgcccctctgaaggagtacttcgcctgcgtgagcagcggcaacagcaacgccaacagccggggccccagcttctctagcggcctggtgccactgtccctgagagggagccacatgggccccatggagatctacaaaaccgtgagcgcctggaagcggcagcctgtgcgcgtgctgagcctgtttcggaatatcgataaagtcctgaaaagcctgggattcctggagagcggctctggctccggcggtggcaccctgaagtacgtggaggatgtgacaaacgtggtcagacgggatgtggagaagtggggccccttcgatctggtgtacggcagcacccaacccctgggcagctcttgtgaccggtgccctggctggtacatgtttcagttccaccggatcctgcagtacgccctgccgagacaggagtcccagcggccattcttttggattttcatggacaacttgctgctgaccgaggatgaccaggaaactaccactcggttcctgcagaccgaagccgtgaccctgcaggacgtgagaggccgggactaccagaacgccatgcgggtgtggtccaacatccctggactgaaaagcaagcacgcacctctgacccctaaagaagaggagtacctgcaggcccaggtgcggagcagaagcaagctggacgcccctaaggtggatctgctggtgaagaattgcctcctgcccctgagagagtacttcaagtatttcagccagaatagtctgcccctgggaggcagcggcggcggctgcttcagcggcgaggagaggatggccgccggccacccccccaggtggccccaggagctggtgaccttcgaggacgtgagcgtggacttcagccaggaggagtgggagctgctggaccccgcccagaaggagctgtacagggaggtgaccctggagaactacaggaacctggtgagcctggaggccctgaagaacccctgcgccgacgccggcatggaggagggccccttcagcaccgcccacggcggcccaagcagcggcgcccctcctcccagcggcggcaggcggcccaagcagcggcgcccctcctcccagcggcggcagcccagccggctccccaacctctaccgaggagggcacctctgagtccgccacccccgagagcggccctggcacctccaccgagcccagcgagggcagcgcacccggcagccctgccggcagccccacctccacagaggagggaaccagcaccgagcccagcgaaggcagcgccccaggcaccagcaccgagcctagtgagcaggagattaaacggatcaacaagatcagaagaagacttgtgaaagacagcaacaccaagaaggccggcaagacaggccccatgaaaaccctgctggttagagtgatgacacccgatctgagagagcggctggaaaacctgagaaagaagcctgaaaatatcccccagcccatcagcaatacatctagagccaacctgaataagctgctgaccgattacaccgaaatgaagaaggcgatcctgcatgtgtactgggaagagttccagaaggaccctgtgggcctgatgagccgggtggcccagcctgccagcaagaagatcgatcagaacaagctgaaacctgagatggacgagaagggcaacctgaccaccgccggctttgcctgctctcagtgtggccagcccctgttcgtgtacaagctggagcaggtgtctgagaagggcaaggcttacaccaactacttcggacggtgcaatgtggccgagcacgaaaagctgatcctgctggcccagctgaagcccgagaaggatagcgacgaagccgtgacatatagcctgggaaagtttgggcagagggccctggatttctacagcattcatgtgaccaaggagtccacccaccccgtgaagcccctggcccagatcgccggaaacagatacgcctccggacctgtgggaaaggccctgagcgacgcatgtatgggcacaatcgcctccttcctgtctaagtaccaggacatcatcatcgaacaccagaaggtggtgaagggcaaccagaagagactggagagcctgcgggagctggccggcaaggaaaacctggaataccctagcgtgaccctgccacctcagcctcacaccaaggagggcgttgatgcctacaacgaagtgatcgcccgggtgcgaatgtgggtgaacctgaacctgtggcagaagctgaagctaagcagagatgatgccaagcctctgctgagactgaagggattcccttcctttcctctggtcgagagacaggccaacgaagtggactggtgggacatggtgtgtaacgtgaagaagctgatcaacgagaaaaaggaggatggcaaggtgttttggcagaatctggctggctacaagagacaggaagccctgagaccatacctgagcagcgaggaagatcggaagaagggaaagaaattcgctcggtaccagctgggcgacctgctgctgcacctggaaaagaagcacggcgaggactggggaaaggtgtacgacgaggcctgggagcggattgacaagaaagtggaaggcctgagcaagcacatcaagctggaagaggaacggagaagcgaggacgcccagagcaaggccgccctgaccgactggctgcgggctaaggccagcttcgtgatcgagggcctgaaggaggccgacaaggacgagttctgcagatgcgagctgaagctgcagaagtggtacggggacctgcggggaaagcccttcgccatcgaagccgagaacagcatcctggacatcagcggcttcagcaagcagtacaactgtgccttcatctggcagaaggacggcgtgaagaagctgaacctgtacctgatcatcaactacttcaagggcggcaagctgcggttcaagaagatcaaacctgaagccttcgaagccaacagattctacaccgtgatcaacaaaaagagcggcgagatcgtgcccatggaggtgaacttcaacttcgacgaccccaacctgatcatcctgcctctggcctttggcaagagacagggcagagaattcatctggaacgacctgctgtccctggaaaccggcagcctgaagctggccaacggaagagtgatcgagaagacactgtacaacagaagaacccggcaggatgagcctgccctgttcgtggccctgaccttcgagcggcgggaggtcctggactcctccaatatcaaaccaatgaacctgatcggcgtggcaagaggcgaaaacatccccgccgtgatcgccctgaccgaccccgagggctgcccactgagccggtttaaggatagcctgggaaacccaacccacatcctgagaatcggcgagagctataaggagaagcagcggaccatccaggccaagaaggaggtggagcagcggagagccggcggctacagccggaagtacgccagcaaagccaagaatctggcagacgatatggtgagaaacaccgctagagatctgctgtactacgccgtgacccaggatgccatgctgatcttcgccaacctgagccggggcttcggccggcagggcaagcggaccttcatggccgagagacagtacacacggatggaggactggctgaccgccaagctggcctacgagggcctgagcaagacctacctgtccaagacactggcccagtacacctccaagacatgcagcaactgtgggtttaccatcaccagcgccgactacgacagggtgctggagaagctgaagaagacagcaacaggctggatgaccacaattaacggcaaggagctgaaggtggagggccagattacctactacaacagatacaagagacagaacgtagtcaaggacctgtccgtcgagctggatagactgagcgaagaatctgtgaacaacgacatctcctcctggacaaagggcagaagcggagaagctctgagcctcctgaagaaaagattctcccatagacccgtgcaggagaagttcgtgtgcctgaactgcggcttcgagacacacgcagccgagcaagccgccctgaacatcgccagatcctggctgttcctgcggagccaggagtacaagaaataccagacaaacaagacaaccggcaacaccgataagagagccttcgtcgagacctggcagtccttttaccggaagaagcttaaggaggtgtggaaacctgccgtgcggtctggcggatctggcggaggctccaccagccccaagaaaaagagaaaagtctaagctgccttctgcggggcttgccttctggccatgcccttcttctctcccttgcacctgtacctcttggtctttgaataaagcctgagtaggaaggctagcaaaaaaaaaaaaaaaaaaaaaaaaaaaaaaaaaaaaaaaaaaaaaaaaaaaaaaaaaaaaaaaaaaaaaaaaaaaaaaaagcccagccggctccccaacctctaccgaggagggcacctctgagtccgccacccccgagagcggccctggcacctccaccgagcccagcgagggcagcgcacccggcagccctgccggcagccccacctccacagaggagggaaccagcaccgagcccagcgaaggcagcgccccaggcaccagcaccgagcctagtgagcaggagattaaacggatcaacaagatcagaagaagacttgtgaaagacagcaacaccaagaaggccggcaagacaggccccatgaaaaccctgctggttagagtgatgacacccgatctgagagagcggctggaaaacctgagaaagaagcctgaaaatatcccccagcccatcagcaatacatctagagccaacctgaataagctgctgaccgattacaccgaaatgaagaaggcgatcctgcatgtgtactgggaagagttccagaaggaccctgtgggcctgatgagccgggtggcccagcctgccagcaagaagatcgatcagaacaagctgaaacctgagatggacgagaagggcaacctgaccaccgccggctttgcctgctctcagtgtggccagcccctgttcgtgtacaagctggagcaggtgtctgagaagggcaaggcttacaccaactacttcggacggtgcaatgtggccgagcacgaaaagctgatcctgctggcccagctgaagcccgagaaggatagcgacgaagccgtgacatatagcctgggaaagtttgggcagagggccctggatttctacagcattcatgtgaccaaggagtccacccaccccgtgaagcccctggcccagatcgccggaaacagatacgcctccggacctgtgggaaaggccctgagcgacgcatgtatgggcacaatcgcctccttcctgtctaagtaccaggacatcatcatcgaacaccagaaggtggtgaagggcaaccagaagagactggagagcctgcgggagctggccggcaaggaaaacctggaataccctagcgtgaccctgccacctcagcctcacaccaaggagggcgttgatgcctacaacgaagtgatcgcccgggtgcgaatgtgggtgaacctgaacctgtggcagaagctgaagctaagcagagatgatgccaagcctctgctgagactgaagggattcccttcctttcctctggtcgagagacaggccaacgaagtggactggtgggacatggtgtgtaacgtgaagaagctgatcaacgagaaaaaggaggatggcaaggtgttttggcagaatctggctggctacaagagacaggaagccctgagaccatacctgagcagcgaggaagatcggaagaagggaaagaaattcgctcggtaccagctgggcgacctgctgctgcacctggaaaagaagcacggcgaggactggggaaaggtgtacgacgaggcctgggagcggattgacaagaaagtggaaggcctgagcaagcacatcaagctggaagaggaacggagaagcgaggacgcccagagcaaggccgccctgaccgactggctgcgggctaaggccagcttcgtgatcgagggcctgaaggaggccgacaaggacgagttctgcagatgcgagctgaagctgcagaagtggtacggggacctgcggggaaagcccttcgccatcgaagccgagaacagcatcctggacatcagcggcttcagcaagcagtacaactgtgccttcatctggcagaaggacggcgtgaagaagctgaacctgtacctgatcatcaactacttcaagggcggcaagctgcggttcaagaagatcaaacctgaagccttcgaagccaacagattctacaccgtgatcaacaaaaagagcggcgagatcgtgcccatggaggtgaacttcaacttcgacgaccccaacctgatcatcctgcctctggcctttggcaagagacagggcagagaattcatctggaacgacctgctgtccctggaaaccggcagcctgaagctggccaacggaagagtgatcgagaagacactgtacaacagaagaacccggcaggatgagcctgccctgttcgtggccctgaccttcgagcggcgggaggtcctggactcctccaatatcaaaccaatgaacctgatcggcgtggcaagaggcgaaaacatccccgccgtgatcgccctgaccgaccccgagggctgcccactgagccggtttaaggatagcctgggaaacccaacccacatcctgagaatcggcgagagctataaggagaagcagcggaccatccaggccaagaaggaggtggagcagcggagagccggcggctacagccggaagtacgccagcaaagccaagaatctggcagacgatatggtgagaaacaccgctagagatctgctgtactacgccgtgacccaggatgccatgctgatcttcgccaacctgagccggggcttcggccggcagggcaagcggaccttcatggccgagagacagtacacacggatggaggactggctgaccgccaagctggcctacgagggcctgagcaagacctacctgtccaagacactggcccagtacacctccaagacatgcagcaactgtgggtttaccatcaccagcgccgactacgacagggtgctggagaagctgaagaagacagcaacaggctggatgaccacaattaacggcaaggagctgaaggtggagggccagattacctactacaacagatacaagagacagaacgtagtcaaggacctgtccgtcgagctggatagactgagcgaagaatctgtgaacaacgacatctcctcctggacaaagggcagaagcggagaagctctgagcctcctgaagaaaagattctcccatagacccgtgcaggagaagttcgtgtgcctgaactgcggcttcgagacacacgcagccgagcaagccgccctgaacatcgccagatcctggctgttcctgcggagccaggagtacaagaaataccagacaaacaagacaaccggcaacaccgataagagagccttcgtcgagacctggcagtccttttaccggaagaagcttaaggaggtgtggaaacctgccgtgcggtctggcggatctggcggaggctccaccagccccaagaaaaagagaaaagtctaagctgccttctgcggggcttgccttctggccatgcccttcttctctcccttgcacctgtacctcttggtctttgaataaagcctgagtaggaaggctagcaaaaaaaaaaaaaaaaaaaaaaaaaaaaaaaaaaaaaaaaaaaaaaaaaaaaaaaaaaaaaaaaaaaaaaaaaaaaaaaa

SEQ ID NO: 10026 - RNA, 8787 nt, synthetic construct
  source 1..8787: mol_type = other RNA
aggaaataagagagaaaagaagagtaagaagaaatataagagccaccatggcccctaagaagaagcgtaaagtgagccggatgaaccacgaccaggagttcgacccccctaaggtgtaccctcccgtccccgccgagaagagaaagcccatccgggtcctgagcctgttcgatggcatcgccaccggtctgctggtgctgaaggacctgggcatccaggtggataggtacattgcctccgaggtgtgcgaggactccatcaccgtgggaatggtgcgtcatcagggcaagatcatgtacgtgggcgacgtgcggagcgtgacacagaagcatatccaggagtggggccctttcgacctggtgatcggcggcagcccttgcaatgacctgagcatcgtgaacccagcccggaagggcctgtacgagggaaccggcagactgttcttcgagttttacagactgctgcacgacgcccggcctaaggaaggcgacgaccggcccttcttttggctgttcgagaatgtggtggccatgggagtcagcgacaagcgggatattagccggttcctggagagcaaccccgtgatgatcgatgccaaggaagtgagcgccgcccaccgggccagatacttctggggcaatctgcctggcatgaacagacccctggccagcaccgtgaacgacaagctggagctgcaggagtgcctggagcacggccggatcgccaagttcagcaaggtgagaaccatcaccacccgaagcaacagcatcaaacaaggcaaggaccagcactttcctgtgttcatgaacgagaaggaggacatcctgtggtgtaccgagatggagagagtgttcgggttcccagtccactacacagatgtcagcaacatgtctagactggccagacagagactgctgggaagaagctggtccgtccctgtgatcagacacctgttcgcccctctgaaggagtacttcgcctgcgtgagcagcggcaacagcaacgccaacagccggggccccagcttctctagcggcctggtgccactgtccctgagagggagccacatgggccccatggagatctacaaaaccgtgagcgcctggaagcggcagcctgtgcgcgtgctgagcctgtttcggaatatcgataaagtcctgaaaagcctgggattcctggagagcggctctggctccggcggtggcaccctgaagtacgtggaggatgtgacaaacgtggtcagacgggatgtggagaagtggggccccttcgatctggtgtacggcagcacccaacccctgggcagctcttgtgaccggtgccctggctggtacatgtttcagttccaccggatcctgcagtacgccctgccgagacaggagtcccagcggccattcttttggattttcatggacaacttgctgctgaccgaggatgaccaggaaactaccactcggttcctgcagaccgaagccgtgaccctgcaggacgtgagaggccgggactaccagaacgccatgcgggtgtggtccaacatccctggactgaaaagcaagcacgcacctctgacccctaaagaagaggagtacctgcaggcccaggtgcggagcagaagcaagctggacgcccctaaggtggatctgctggtgaagaattgcctcctgcccctgagagagtacttcaagtatttcagccagaatagtctgcccctgggaggcagcggcggcggcgagctggtgatgttcagggacgtggccatcgacgtgagccaggaggagtgggagtgcctgaaccccgcccagaggaacctgtacaaggaggtgatgctggagaactacagcaacctggtgagcctgggcctgagcgtgagcaagcccgccgtgatcagcagcctggagcagggcaaggagccctggatgttcgtgagggaggagaccggcaggtggtgcagcgacctggccagcagggacgagggcggcccaagcagcggcgcccctcctcccagcggcggcaggcggcccaagcagcggcgcccctcctcccagcggcggcagcccagccggctccccaacctctaccgaggagggcacctctgagtccgccacccccgagagcggccctggcacctccaccgagcccagcgagggcagcgcacccggcagccctgccggcagccccacctccacagaggagggaaccagcaccgagcccagcgaaggcagcgccccaggcaccagcaccgagcctagtgagcaggagattaaacggatcaacaagatcagaagaagacttgtgaaagacagcaacaccaagaaggccggcaagacaggccccatgaaaaccctgctggttagagtgatgacacccgatctgagagagcggctggaaaacctgagaaagaagcctgaaaatatcccccagcccatcagcaatacatctagagccaacctgaataagctgctgaccgattacaccgaaatgaagaaggcgatcctgcatgtgtactgggaagagttccagaaggaccctgtgggcctgatgagccgggtggcccagcctgccagcaagaagatcgatcagaacaagctgaaacctgagatggacgagaagggcaacctgaccaccgccggctttgcctgctctcagtgtggccagcccctgttcgtgtacaagctggagcaggtgtctgagaagggcaaggcttacaccaactacttcggacggtgcaatgtggccgagcacgaaaagctgatcctgctggcccagctgaagcccgagaaggatagcgacgaagccgtgacatatagcctgggaaagtttgggcagagggccctggatttctacagcattcatgtgaccaaggagtccacccaccccgtgaagcccctggcccagatcgccggaaacagatacgcctccggacctgtgggaaaggccctgagcgacgcatgtatgggcacaatcgcctccttcctgtctaagtaccaggacatcatcatcgaacaccagaaggtggtgaagggcaaccagaagagactggagagcctgcgggagctggccggcaaggaaaacctggaataccctagcgtgaccctgccacctcagcctcacaccaaggagggcgttgatgcctacaacgaagtgatcgcccgggtgcgaatgtgggtgaacctgaacctgtggcagaagctgaagctaagcagagatgatgccaagcctctgctgagactgaagggattcccttcctttcctctggtcgagagacaggccaacgaagtggactggtgggacatggtgtgtaacgtgaagaagctgatcaacgagaaaaaggaggatggcaaggtgttttggcagaatctggctggctacaagagacaggaagccctgagaccatacctgagcagcgaggaagatcggaagaagggaaagaaattcgctcggtaccagctgggcgacctgctgctgcacctggaaaagaagcacggcgaggactggggaaaggtgtacgacgaggcctgggagcggattgacaagaaagtggaaggcctgagcaagcacatcaagctggaagaggaacggagaagcgaggacgcccagagcaaggccgccctgaccgactggctgcgggctaaggccagcttcgtgatcgagggcctgaaggaggccgacaaggacgagttctgcagatgcgagctgaagctgcagaagtggtacggggacctgcggggaaagcccttcgccatcgaagccgagaacagcatcctggacatcagcggcttcagcaagcagtacaactgtgccttcatctggcagaaggacggcgtgaagaagctgaacctgtacctgatcatcaactacttcaagggcggcaagctgcggttcaagaagatcaaacctgaagccttcgaagccaacagattctacaccgtgatcaacaaaaagagcggcgagatcgtgcccatggaggtgaacttcaacttcgacgaccccaacctgatcatcctgcctctggcctttggcaagagacagggcagagaattcatctggaacgacctgctgtccctggaaaccggcagcctgaagctggccaacggaagagtgatcgagaagacactgtacaacagaagaacccggcaggatgagcctgccctgttcgtggccctgaccttcgagcggcgggaggtcctggactcctccaatatcaaaccaatgaacctgatcggcgtggcaagaggcgaaaacatccccgccgtgatcgccctgaccgaccccgagggctgcccactgagccggtttaaggatagcctgggaaacccaacccacatcctgagaatcggcgagagctataaggagaagcagcggaccatccaggccaagaaggaggtggagcagcggagagccggcggctacagccggaagtacgccagcaaagccaagaatctggcagacgatatggtgagaaacaccgctagagatctgctgtactacgccgtgacccaggatgccatgctgatcttcgccaacctgagccggggcttcggccggcagggcaagcggaccttcatggccgagagacagtacacacggatggaggactggctgaccgccaagctggcctacgagggcctgagcaagacctacctgtccaagacactggcccagtacacctccaagacatgcagcaactgtgggtttaccatcaccagcgccgactacgacagggtgctggagaagctgaagaagacagcaacaggctggatgaccacaattaacggcaaggagctgaaggtggagggccagattacctactacaacagatacaagagacagaacgtagtcaaggacctgtccgtcgagctggatagactgagcgaagaatctgtgaacaacgacatctcctcctggacaaagggcagaagcggagaagctctgagcctcctgaagaaaagattctcccatagacccgtgcaggagaagttcgtgtgcctgaactgcggcttcgagacacacgcagccgagcaagccgccctgaacatcgccagatcctggctgttcctgcggagccaggagtacaagaaataccagacaaacaagacaaccggcaacaccgataagagagccttcgtcgagacctggcagtccttttaccggaagaagcttaaggaggtgtggaaacctgccgtgcggtctggcggatctggcggaggctccaccagccccaagaaaaagagaaaagtctaagctgccttctgcggggcttgccttctggccatgcccttcttctctcccttgcacctgtacctcttggtctttgaataaagcctgagtaggaaggctagcaaaaaaaaaaaaaaaaaaaaaaaaaaaaaaaaaaaaaaaaaaaaaaaaaaaaaaaaaaaaaaaaaaaaaaaaaaaaaaaagcccagccggctccccaacctctaccgaggagggcacctctgagtccgccacccccgagagcggccctggcacctccaccgagcccagcgagggcagcgcacccggcagccctgccggcagccccacctccacagaggagggaaccagcaccgagcccagcgaaggcagcgccccaggcaccagcaccgagcctagtgagcaggagattaaacggatcaacaagatcagaagaagacttgtgaaagacagcaacaccaagaaggccggcaagacaggccccatgaaaaccctgctggttagagtgatgacacccgatctgagagagcggctggaaaacctgagaaagaagcctgaaaatatcccccagcccatcagcaatacatctagagccaacctgaataagctgctgaccgattacaccgaaatgaagaaggcgatcctgcatgtgtactgggaagagttccagaaggaccctgtgggcctgatgagccgggtggcccagcctgccagcaagaagatcgatcagaacaagctgaaacctgagatggacgagaagggcaacctgaccaccgccggctttgcctgctctcagtgtggccagcccctgttcgtgtacaagctggagcaggtgtctgagaagggcaaggcttacaccaactacttcggacggtgcaatgtggccgagcacgaaaagctgatcctgctggcccagctgaagcccgagaaggatagcgacgaagccgtgacatatagcctgggaaagtttgggcagagggccctggatttctacagcattcatgtgaccaaggagtccacccaccccgtgaagcccctggcccagatcgccggaaacagatacgcctccggacctgtgggaaaggccctgagcgacgcatgtatgggcacaatcgcctccttcctgtctaagtaccaggacatcatcatcgaacaccagaaggtggtgaagggcaaccagaagagactggagagcctgcgggagctggccggcaaggaaaacctggaataccctagcgtgaccctgccacctcagcctcacaccaaggagggcgttgatgcctacaacgaagtgatcgcccgggtgcgaatgtgggtgaacctgaacctgtggcagaagctgaagctaagcagagatgatgccaagcctctgctgagactgaagggattcccttcctttcctctggtcgagagacaggccaacgaagtggactggtgggacatggtgtgtaacgtgaagaagctgatcaacgagaaaaaggaggatggcaaggtgttttggcagaatctggctggctacaagagacaggaagccctgagaccatacctgagcagcgaggaagatcggaagaagggaaagaaattcgctcggtaccagctgggcgacctgctgctgcacctggaaaagaagcacggcgaggactggggaaaggtgtacgacgaggcctgggagcggattgacaagaaagtggaaggcctgagcaagcacatcaagctggaagaggaacggagaagcgaggacgcccagagcaaggccgccctgaccgactggctgcgggctaaggccagcttcgtgatcgagggcctgaaggaggccgacaaggacgagttctgcagatgcgagctgaagctgcagaagtggtacggggacctgcggggaaagcccttcgccatcgaagccgagaacagcatcctggacatcagcggcttcagcaagcagtacaactgtgccttcatctggcagaaggacggcgtgaagaagctgaacctgtacctgatcatcaactacttcaagggcggcaagctgcggttcaagaagatcaaacctgaagccttcgaagccaacagattctacaccgtgatcaacaaaaagagcggcgagatcgtgcccatggaggtgaacttcaacttcgacgaccccaacctgatcatcctgcctctggcctttggcaagagacagggcagagaattcatctggaacgacctgctgtccctggaaaccggcagcctgaagctggccaacggaagagtgatcgagaagacactgtacaacagaagaacccggcaggatgagcctgccctgttcgtggccctgaccttcgagcggcgggaggtcctggactcctccaatatcaaaccaatgaacctgatcggcgtggcaagaggcgaaaacatccccgccgtgatcgccctgaccgaccccgagggctgcccactgagccggtttaaggatagcctgggaaacccaacccacatcctgagaatcggcgagagctataaggagaagcagcggaccatccaggccaagaaggaggtggagcagcggagagccggcggctacagccggaagtacgccagcaaagccaagaatctggcagacgatatggtgagaaacaccgctagagatctgctgtactacgccgtgacccaggatgccatgctgatcttcgccaacctgagccggggcttcggccggcagggcaagcggaccttcatggccgagagacagtacacacggatggaggactggctgaccgccaagctggcctacgagggcctgagcaagacctacctgtccaagacactggcccagtacacctccaagacatgcagcaactgtgggtttaccatcaccagcgccgactacgacagggtgctggagaagctgaagaagacagcaacaggctggatgaccacaattaacggcaaggagctgaaggtggagggccagattacctactacaacagatacaagagacagaacgtagtcaaggacctgtccgtcgagctggatagactgagcgaagaatctgtgaacaacgacatctcctcctggacaaagggcagaagcggagaagctctgagcctcctgaagaaaagattctcccatagacccgtgcaggagaagttcgtgtgcctgaactgcggcttcgagacacacgcagccgagcaagccgccctgaacatcgccagatcctggctgttcctgcggagccaggagtacaagaaataccagacaaacaagacaaccggcaacaccgataagagagccttcgtcgagacctggcagtccttttaccggaagaagcttaaggaggtgtggaaacctgccgtgcggtctggcggatctggcggaggctccaccagccccaagaaaaagagaaaagtctaagctgccttctgcggggcttgccttctggccatgcccttcttctctcccttgcacctgtacctcttggtctttgaataaagcctgagtaggaaggctagcaaaaaaaaaaaaaaaaaaaaaaaaaaaaaaaaaaaaaaaaaaaaaaaaaaaaaaaaaaaaaaaaaaaaaaaaaaaaaaaa

SEQ ID NO: 10027 - RNA, 8787 nt, synthetic construct
  source 1..8787: mol_type = other RNA
aggaaataagagagaaaagaagagtaagaagaaatataagagccaccatggcccctaagaagaagcgtaaagtgagccggatgaaccacgaccaggagttcgacccccctaaggtgtaccctcccgtccccgccgagaagagaaagcccatccgggtcctgagcctgttcgatggcatcgccaccggtctgctggtgctgaaggacctgggcatccaggtggataggtacattgcctccgaggtgtgcgaggactccatcaccgtgggaatggtgcgtcatcagggcaagatcatgtacgtgggcgacgtgcggagcgtgacacagaagcatatccaggagtggggccctttcgacctggtgatcggcggcagcccttgcaatgacctgagcatcgtgaacccagcccggaagggcctgtacgagggaaccggcagactgttcttcgagttttacagactgctgcacgacgcccggcctaaggaaggcgacgaccggcccttcttttggctgttcgagaatgtggtggccatgggagtcagcgacaagcgggatattagccggttcctggagagcaaccccgtgatgatcgatgccaaggaagtgagcgccgcccaccgggccagatacttctggggcaatctgcctggcatgaacagacccctggccagcaccgtgaacgacaagctggagctgcaggagtgcctggagcacggccggatcgccaagttcagcaaggtgagaaccatcaccacccgaagcaacagcatcaaacaaggcaaggaccagcactttcctgtgttcatgaacgagaaggaggacatcctgtggtgtaccgagatggagagagtgttcgggttcccagtccactacacagatgtcagcaacatgtctagactggccagacagagactgctgggaagaagctggtccgtccctgtgatcagacacctgttcgcccctctgaaggagtacttcgcctgcgtgagcagcggcaacagcaacgccaacagccggggccccagcttctctagcggcctggtgccactgtccctgagagggagccacatgggccccatggagatctacaaaaccgtgagcgcctggaagcggcagcctgtgcgcgtgctgagcctgtttcggaatatcgataaagtcctgaaaagcctgggattcctggagagcggctctggctccggcggtggcaccctgaagtacgtggaggatgtgacaaacgtggtcagacgggatgtggagaagtggggccccttcgatctggtgtacggcagcacccaacccctgggcagctcttgtgaccggtgccctggctggtacatgtttcagttccaccggatcctgcagtacgccctgccgagacaggagtcccagcggccattcttttggattttcatggacaacttgctgctgaccgaggatgaccaggaaactaccactcggttcctgcagaccgaagccgtgaccctgcaggacgtgagaggccgggactaccagaacgccatgcgggtgtggtccaacatccctggactgaaaagcaagcacgcacctctgacccctaaagaagaggagtacctgcaggcccaggtgcggagcagaagcaagctggacgcccctaaggtggatctgctggtgaagaattgcctcctgcccctgagagagtacttcaagtatttcagccagaatagtctgcccctgggaggcagcggcggcggcaccagccagagccccctgaccttcggcgacgtggccgtggagttcagcggcgaggagtgggcctggctggacagcgcccagaggagcctgcacaggagcgtgatgctggagaactacaggaacctggccagcctgggcaaggtgagcaagcccgagatgatcagcagcctggagcagaggaaggagccctgggccgtgaccaggaagaccaccggcggcgagtgcgccgacagccagaccctgggcggcccaagcagcggcgcccctcctcccagcggcggcaggcggcccaagcagcggcgcccctcctcccagcggcggcagcccagccggctccccaacctctaccgaggagggcacctctgagtccgccacccccgagagcggccctggcacctccaccgagcccagcgagggcagcgcacccggcagccctgccggcagccccacctccacagaggagggaaccagcaccgagcccagcgaaggcagcgccccaggcaccagcaccgagcctagtgagcaggagattaaacggatcaacaagatcagaagaagacttgtgaaagacagcaacaccaagaaggccggcaagacaggccccatgaaaaccctgctggttagagtgatgacacccgatctgagagagcggctggaaaacctgagaaagaagcctgaaaatatcccccagcccatcagcaatacatctagagccaacctgaataagctgctgaccgattacaccgaaatgaagaaggcgatcctgcatgtgtactgggaagagttccagaaggaccctgtgggcctgatgagccgggtggcccagcctgccagcaagaagatcgatcagaacaagctgaaacctgagatggacgagaagggcaacctgaccaccgccggctttgcctgctctcagtgtggccagcccctgttcgtgtacaagctggagcaggtgtctgagaagggcaaggcttacaccaactacttcggacggtgcaatgtggccgagcacgaaaagctgatcctgctggcccagctgaagcccgagaaggatagcgacgaagccgtgacatatagcctgggaaagtttgggcagagggccctggatttctacagcattcatgtgaccaaggagtccacccaccccgtgaagcccctggcccagatcgccggaaacagatacgcctccggacctgtgggaaaggccctgagcgacgcatgtatgggcacaatcgcctccttcctgtctaagtaccaggacatcatcatcgaacaccagaaggtggtgaagggcaaccagaagagactggagagcctgcgggagctggccggcaaggaaaacctggaataccctagcgtgaccctgccacctcagcctcacaccaaggagggcgttgatgcctacaacgaagtgatcgcccgggtgcgaatgtgggtgaacctgaacctgtggcagaagctgaagctaagcagagatgatgccaagcctctgctgagactgaagggattcccttcctttcctctggtcgagagacaggccaacgaagtggactggtgggacatggtgtgtaacgtgaagaagctgatcaacgagaaaaaggaggatggcaaggtgttttggcagaatctggctggctacaagagacaggaagccctgagaccatacctgagcagcgaggaagatcggaagaagggaaagaaattcgctcggtaccagctgggcgacctgctgctgcacctggaaaagaagcacggcgaggactggggaaaggtgtacgacgaggcctgggagcggattgacaagaaagtggaaggcctgagcaagcacatcaagctggaagaggaacggagaagcgaggacgcccagagcaaggccgccctgaccgactggctgcgggctaaggccagcttcgtgatcgagggcctgaaggaggccgacaaggacgagttctgcagatgcgagctgaagctgcagaagtggtacggggacctgcggggaaagcccttcgccatcgaagccgagaacagcatcctggacatcagcggcttcagcaagcagtacaactgtgccttcatctggcagaaggacggcgtgaagaagctgaacctgtacctgatcatcaactacttcaagggcggcaagctgcggttcaagaagatcaaacctgaagccttcgaagccaacagattctacaccgtgatcaacaaaaagagcggcgagatcgtgcccatggaggtgaacttcaacttcgacgaccccaacctgatcatcctgcctctggcctttggcaagagacagggcagagaattcatctggaacgacctgctgtccctggaaaccggcagcctgaagctggccaacggaagagtgatcgagaagacactgtacaacagaagaacccggcaggatgagcctgccctgttcgtggccctgaccttcgagcggcgggaggtcctggactcctccaatatcaaaccaatgaacctgatcggcgtggcaagaggcgaaaacatccccgccgtgatcgccctgaccgaccccgagggctgcccactgagccggtttaaggatagcctgggaaacccaacccacatcctgagaatcggcgagagctataaggagaagcagcggaccatccaggccaagaaggaggtggagcagcggagagccggcggctacagccggaagtacgccagcaaagccaagaatctggcagacgatatggtgagaaacaccgctagagatctgctgtactacgccgtgacccaggatgccatgctgatcttcgccaacctgagccggggcttcggccggcagggcaagcggaccttcatggccgagagacagtacacacggatggaggactggctgaccgccaagctggcctacgagggcctgagcaagacctacctgtccaagacactggcccagtacacctccaagacatgcagcaactgtgggtttaccatcaccagcgccgactacgacagggtgctggagaagctgaagaagacagcaacaggctggatgaccacaattaacggcaaggagctgaaggtggagggccagattacctactacaacagatacaagagacagaacgtagtcaaggacctgtccgtcgagctggatagactgagcgaagaatctgtgaacaacgacatctcctcctggacaaagggcagaagcggagaagctctgagcctcctgaagaaaagattctcccatagacccgtgcaggagaagttcgtgtgcctgaactgcggcttcgagacacacgcagccgagcaagccgccctgaacatcgccagatcctggctgttcctgcggagccaggagtacaagaaataccagacaaacaagacaaccggcaacaccgataagagagccttcgtcgagacctggcagtccttttaccggaagaagcttaaggaggtgtggaaacctgccgtgcggtctggcggatctggcggaggctccaccagccccaagaaaaagagaaaagtctaagctgccttctgcggggcttgccttctggccatgcccttcttctctcccttgcacctgtacctcttggtctttgaataaagcctgagtaggaaggctagcaaaaaaaaaaaaaaaaaaaaaaaaaaaaaaaaaaaaaaaaaaaaaaaaaaaaaaaaaaaaaaaaaaaaaaaaaaaaaaaagcccagccggctccccaacctctaccgaggagggcacctctgagtccgccacccccgagagcggccctggcacctccaccgagcccagcgagggcagcgcacccggcagccctgccggcagccccacctccacagaggagggaaccagcaccgagcccagcgaaggcagcgccccaggcaccagcaccgagcctagtgagcaggagattaaacggatcaacaagatcagaagaagacttgtgaaagacagcaacaccaagaaggccggcaagacaggccccatgaaaaccctgctggttagagtgatgacacccgatctgagagagcggctggaaaacctgagaaagaagcctgaaaatatcccccagcccatcagcaatacatctagagccaacctgaataagctgctgaccgattacaccgaaatgaagaaggcgatcctgcatgtgtactgggaagagttccagaaggaccctgtgggcctgatgagccgggtggcccagcctgccagcaagaagatcgatcagaacaagctgaaacctgagatggacgagaagggcaacctgaccaccgccggctttgcctgctctcagtgtggccagcccctgttcgtgtacaagctggagcaggtgtctgagaagggcaaggcttacaccaactacttcggacggtgcaatgtggccgagcacgaaaagctgatcctgctggcccagctgaagcccgagaaggatagcgacgaagccgtgacatatagcctgggaaagtttgggcagagggccctggatttctacagcattcatgtgaccaaggagtccacccaccccgtgaagcccctggcccagatcgccggaaacagatacgcctccggacctgtgggaaaggccctgagcgacgcatgtatgggcacaatcgcctccttcctgtctaagtaccaggacatcatcatcgaacaccagaaggtggtgaagggcaaccagaagagactggagagcctgcgggagctggccggcaaggaaaacctggaataccctagcgtgaccctgccacctcagcctcacaccaaggagggcgttgatgcctacaacgaagtgatcgcccgggtgcgaatgtgggtgaacctgaacctgtggcagaagctgaagctaagcagagatgatgccaagcctctgctgagactgaagggattcccttcctttcctctggtcgagagacaggccaacgaagtggactggtgggacatggtgtgtaacgtgaagaagctgatcaacgagaaaaaggaggatggcaaggtgttttggcagaatctggctggctacaagagacaggaagccctgagaccatacctgagcagcgaggaagatcggaagaagggaaagaaattcgctcggtaccagctgggcgacctgctgctgcacctggaaaagaagcacggcgaggactggggaaaggtgtacgacgaggcctgggagcggattgacaagaaagtggaaggcctgagcaagcacatcaagctggaagaggaacggagaagcgaggacgcccagagcaaggccgccctgaccgactggctgcgggctaaggccagcttcgtgatcgagggcctgaaggaggccgacaaggacgagttctgcagatgcgagctgaagctgcagaagtggtacggggacctgcggggaaagcccttcgccatcgaagccgagaacagcatcctggacatcagcggcttcagcaagcagtacaactgtgccttcatctggcagaaggacggcgtgaagaagctgaacctgtacctgatcatcaactacttcaagggcggcaagctgcggttcaagaagatcaaacctgaagccttcgaagccaacagattctacaccgtgatcaacaaaaagagcggcgagatcgtgcccatggaggtgaacttcaacttcgacgaccccaacctgatcatcctgcctctggcctttggcaagagacagggcagagaattcatctggaacgacctgctgtccctggaaaccggcagcctgaagctggccaacggaagagtgatcgagaagacactgtacaacagaagaacccggcaggatgagcctgccctgttcgtggccctgaccttcgagcggcgggaggtcctggactcctccaatatcaaaccaatgaacctgatcggcgtggcaagaggcgaaaacatccccgccgtgatcgccctgaccgaccccgagggctgcccactgagccggtttaaggatagcctgggaaacccaacccacatcctgagaatcggcgagagctataaggagaagcagcggaccatccaggccaagaaggaggtggagcagcggagagccggcggctacagccggaagtacgccagcaaagccaagaatctggcagacgatatggtgagaaacaccgctagagatctgctgtactacgccgtgacccaggatgccatgctgatcttcgccaacctgagccggggcttcggccggcagggcaagcggaccttcatggccgagagacagtacacacggatggaggactggctgaccgccaagctggcctacgagggcctgagcaagacctacctgtccaagacactggcccagtacacctccaagacatgcagcaactgtgggtttaccatcaccagcgccgactacgacagggtgctggagaagctgaagaagacagcaacaggctggatgaccacaattaacggcaaggagctgaaggtggagggccagattacctactacaacagatacaagagacagaacgtagtcaaggacctgtccgtcgagctggatagactgagcgaagaatctgtgaacaacgacatctcctcctggacaaagggcagaagcggagaagctctgagcctcctgaagaaaagattctcccatagacccgtgcaggagaagttcgtgtgcctgaactgcggcttcgagacacacgcagccgagcaagccgccctgaacatcgccagatcctggctgttcctgcggagccaggagtacaagaaataccagacaaacaagacaaccggcaacaccgataagagagccttcgtcgagacctggcagtccttttaccggaagaagcttaaggaggtgtggaaacctgccgtgcggtctggcggatctggcggaggctccaccagccccaagaaaaagagaaaagtctaagctgccttctgcggggcttgccttctggccatgcccttcttctctcccttgcacctgtacctcttggtctttgaataaagcctgagtaggaaggctagcaaaaaaaaaaaaaaaaaaaaaaaaaaaaaaaaaaaaaaaaaaaaaaaaaaaaaaaaaaaaaaaaaaaaaaaaaaaaaaaa

SEQ ID NO: 10028 - RNA, 8787 nt, synthetic construct
  source 1..8787: mol_type = other RNA
aggaaataagagagaaaagaagagtaagaagaaatataagagccaccatggcccctaagaagaagcgtaaagtgagccggatgaaccacgaccaggagttcgacccccctaaggtgtaccctcccgtccccgccgagaagagaaagcccatccgggtcctgagcctgttcgatggcatcgccaccggtctgctggtgctgaaggacctgggcatccaggtggataggtacattgcctccgaggtgtgcgaggactccatcaccgtgggaatggtgcgtcatcagggcaagatcatgtacgtgggcgacgtgcggagcgtgacacagaagcatatccaggagtggggccctttcgacctggtgatcggcggcagcccttgcaatgacctgagcatcgtgaacccagcccggaagggcctgtacgagggaaccggcagactgttcttcgagttttacagactgctgcacgacgcccggcctaaggaaggcgacgaccggcccttcttttggctgttcgagaatgtggtggccatgggagtcagcgacaagcgggatattagccggttcctggagagcaaccccgtgatgatcgatgccaaggaagtgagcgccgcccaccgggccagatacttctggggcaatctgcctggcatgaacagacccctggccagcaccgtgaacgacaagctggagctgcaggagtgcctggagcacggccggatcgccaagttcagcaaggtgagaaccatcaccacccgaagcaacagcatcaaacaaggcaaggaccagcactttcctgtgttcatgaacgagaaggaggacatcctgtggtgtaccgagatggagagagtgttcgggttcccagtccactacacagatgtcagcaacatgtctagactggccagacagagactgctgggaagaagctggtccgtccctgtgatcagacacctgttcgcccctctgaaggagtacttcgcctgcgtgagcagcggcaacagcaacgccaacagccggggccccagcttctctagcggcctggtgccactgtccctgagagggagccacatgggccccatggagatctacaaaaccgtgagcgcctggaagcggcagcctgtgcgcgtgctgagcctgtttcggaatatcgataaagtcctgaaaagcctgggattcctggagagcggctctggctccggcggtggcaccctgaagtacgtggaggatgtgacaaacgtggtcagacgggatgtggagaagtggggccccttcgatctggtgtacggcagcacccaacccctgggcagctcttgtgaccggtgccctggctggtacatgtttcagttccaccggatcctgcagtacgccctgccgagacaggagtcccagcggccattcttttggattttcatggacaacttgctgctgaccgaggatgaccaggaaactaccactcggttcctgcagaccgaagccgtgaccctgcaggacgtgagaggccgggactaccagaacgccatgcgggtgtggtccaacatccctggactgaaaagcaagcacgcacctctgacccctaaagaagaggagtacctgcaggcccaggtgcggagcagaagcaagctggacgcccctaaggtggatctgctggtgaagaattgcctcctgcccctgagagagtacttcaagtatttcagccagaatagtctgcccctgggaggcagcggcggcggccaggagcccgtgaccttcgccgacgtggccgtgctgttcacccccgaggagtggatgttcctggacagcgcccagaggagcctgtacagggacgtgatgctggagaactacaggaacctggccagcgtgggcgccggcgaccagctgggcaagcccagcatgctgagcctgagcgagcccggcgaggagctgtgggcccccgagaggaggaccttccccggcaccaggcccgagccccagcacggcggcccaagcagcggcgcccctcctcccagcggcggcaggcggcccaagcagcggcgcccctcctcccagcggcggcagcccagccggctccccaacctctaccgaggagggcacctctgagtccgccacccccgagagcggccctggcacctccaccgagcccagcgagggcagcgcacccggcagccctgccggcagccccacctccacagaggagggaaccagcaccgagcccagcgaaggcagcgccccaggcaccagcaccgagcctagtgagcaggagattaaacggatcaacaagatcagaagaagacttgtgaaagacagcaacaccaagaaggccggcaagacaggccccatgaaaaccctgctggttagagtgatgacacccgatctgagagagcggctggaaaacctgagaaagaagcctgaaaatatcccccagcccatcagcaatacatctagagccaacctgaataagctgctgaccgattacaccgaaatgaagaaggcgatcctgcatgtgtactgggaagagttccagaaggaccctgtgggcctgatgagccgggtggcccagcctgccagcaagaagatcgatcagaacaagctgaaacctgagatggacgagaagggcaacctgaccaccgccggctttgcctgctctcagtgtggccagcccctgttcgtgtacaagctggagcaggtgtctgagaagggcaaggcttacaccaactacttcggacggtgcaatgtggccgagcacgaaaagctgatcctgctggcccagctgaagcccgagaaggatagcgacgaagccgtgacatatagcctgggaaagtttgggcagagggccctggatttctacagcattcatgtgaccaaggagtccacccaccccgtgaagcccctggcccagatcgccggaaacagatacgcctccggacctgtgggaaaggccctgagcgacgcatgtatgggcacaatcgcctccttcctgtctaagtaccaggacatcatcatcgaacaccagaaggtggtgaagggcaaccagaagagactggagagcctgcgggagctggccggcaaggaaaacctggaataccctagcgtgaccctgccacctcagcctcacaccaaggagggcgttgatgcctacaacgaagtgatcgcccgggtgcgaatgtgggtgaacctgaacctgtggcagaagctgaagctaagcagagatgatgccaagcctctgctgagactgaagggattcccttcctttcctctggtcgagagacaggccaacgaagtggactggtgggacatggtgtgtaacgtgaagaagctgatcaacgagaaaaaggaggatggcaaggtgttttggcagaatctggctggctacaagagacaggaagccctgagaccatacctgagcagcgaggaagatcggaagaagggaaagaaattcgctcggtaccagctgggcgacctgctgctgcacctggaaaagaagcacggcgaggactggggaaaggtgtacgacgaggcctgggagcggattgacaagaaagtggaaggcctgagcaagcacatcaagctggaagaggaacggagaagcgaggacgcccagagcaaggccgccctgaccgactggctgcgggctaaggccagcttcgtgatcgagggcctgaaggaggccgacaaggacgagttctgcagatgcgagctgaagctgcagaagtggtacggggacctgcggggaaagcccttcgccatcgaagccgagaacagcatcctggacatcagcggcttcagcaagcagtacaactgtgccttcatctggcagaaggacggcgtgaagaagctgaacctgtacctgatcatcaactacttcaagggcggcaagctgcggttcaagaagatcaaacctgaagccttcgaagccaacagattctacaccgtgatcaacaaaaagagcggcgagatcgtgcccatggaggtgaacttcaacttcgacgaccccaacctgatcatcctgcctctggcctttggcaagagacagggcagagaattcatctggaacgacctgctgtccctggaaaccggcagcctgaagctggccaacggaagagtgatcgagaagacactgtacaacagaagaacccggcaggatgagcctgccctgttcgtggccctgaccttcgagcggcgggaggtcctggactcctccaatatcaaaccaatgaacctgatcggcgtggcaagaggcgaaaacatccccgccgtgatcgccctgaccgaccccgagggctgcccactgagccggtttaaggatagcctgggaaacccaacccacatcctgagaatcggcgagagctataaggagaagcagcggaccatccaggccaagaaggaggtggagcagcggagagccggcggctacagccggaagtacgccagcaaagccaagaatctggcagacgatatggtgagaaacaccgctagagatctgctgtactacgccgtgacccaggatgccatgctgatcttcgccaacctgagccggggcttcggccggcagggcaagcggaccttcatggccgagagacagtacacacggatggaggactggctgaccgccaagctggcctacgagggcctgagcaagacctacctgtccaagacactggcccagtacacctccaagacatgcagcaactgtgggtttaccatcaccagcgccgactacgacagggtgctggagaagctgaagaagacagcaacaggctggatgaccacaattaacggcaaggagctgaaggtggagggccagattacctactacaacagatacaagagacagaacgtagtcaaggacctgtccgtcgagctggatagactgagcgaagaatctgtgaacaacgacatctcctcctggacaaagggcagaagcggagaagctctgagcctcctgaagaaaagattctcccatagacccgtgcaggagaagttcgtgtgcctgaactgcggcttcgagacacacgcagccgagcaagccgccctgaacatcgccagatcctggctgttcctgcggagccaggagtacaagaaataccagacaaacaagacaaccggcaacaccgataagagagccttcgtcgagacctggcagtccttttaccggaagaagcttaaggaggtgtggaaacctgccgtgcggtctggcggatctggcggaggctccaccagccccaagaaaaagagaaaagtctaagctgccttctgcggggcttgccttctggccatgcccttcttctctcccttgcacctgtacctcttggtctttgaataaagcctgagtaggaaggctagcaaaaaaaaaaaaaaaaaaaaaaaaaaaaaaaaaaaaaaaaaaaaaaaaaaaaaaaaaaaaaaaaaaaaaaaaaaaaaaaagcccagccggctccccaacctctaccgaggagggcacctctgagtccgccacccccgagagcggccctggcacctccaccgagcccagcgagggcagcgcacccggcagccctgccggcagccccacctccacagaggagggaaccagcaccgagcccagcgaaggcagcgccccaggcaccagcaccgagcctagtgagcaggagattaaacggatcaacaagatcagaagaagacttgtgaaagacagcaacaccaagaaggccggcaagacaggccccatgaaaaccctgctggttagagtgatgacacccgatctgagagagcggctggaaaacctgagaaagaagcctgaaaatatcccccagcccatcagcaatacatctagagccaacctgaataagctgctgaccgattacaccgaaatgaagaaggcgatcctgcatgtgtactgggaagagttccagaaggaccctgtgggcctgatgagccgggtggcccagcctgccagcaagaagatcgatcagaacaagctgaaacctgagatggacgagaagggcaacctgaccaccgccggctttgcctgctctcagtgtggccagcccctgttcgtgtacaagctggagcaggtgtctgagaagggcaaggcttacaccaactacttcggacggtgcaatgtggccgagcacgaaaagctgatcctgctggcccagctgaagcccgagaaggatagcgacgaagccgtgacatatagcctgggaaagtttgggcagagggccctggatttctacagcattcatgtgaccaaggagtccacccaccccgtgaagcccctggcccagatcgccggaaacagatacgcctccggacctgtgggaaaggccctgagcgacgcatgtatgggcacaatcgcctccttcctgtctaagtaccaggacatcatcatcgaacaccagaaggtggtgaagggcaaccagaagagactggagagcctgcgggagctggccggcaaggaaaacctggaataccctagcgtgaccctgccacctcagcctcacaccaaggagggcgttgatgcctacaacgaagtgatcgcccgggtgcgaatgtgggtgaacctgaacctgtggcagaagctgaagctaagcagagatgatgccaagcctctgctgagactgaagggattcccttcctttcctctggtcgagagacaggccaacgaagtggactggtgggacatggtgtgtaacgtgaagaagctgatcaacgagaaaaaggaggatggcaaggtgttttggcagaatctggctggctacaagagacaggaagccctgagaccatacctgagcagcgaggaagatcggaagaagggaaagaaattcgctcggtaccagctgggcgacctgctgctgcacctggaaaagaagcacggcgaggactggggaaaggtgtacgacgaggcctgggagcggattgacaagaaagtggaaggcctgagcaagcacatcaagctggaagaggaacggagaagcgaggacgcccagagcaaggccgccctgaccgactggctgcgggctaaggccagcttcgtgatcgagggcctgaaggaggccgacaaggacgagttctgcagatgcgagctgaagctgcagaagtggtacggggacctgcggggaaagcccttcgccatcgaagccgagaacagcatcctggacatcagcggcttcagcaagcagtacaactgtgccttcatctggcagaaggacggcgtgaagaagctgaacctgtacctgatcatcaactacttcaagggcggcaagctgcggttcaagaagatcaaacctgaagccttcgaagccaacagattctacaccgtgatcaacaaaaagagcggcgagatcgtgcccatggaggtgaacttcaacttcgacgaccccaacctgatcatcctgcctctggcctttggcaagagacagggcagagaattcatctggaacgacctgctgtccctggaaaccggcagcctgaagctggccaacggaagagtgatcgagaagacactgtacaacagaagaacccggcaggatgagcctgccctgttcgtggccctgaccttcgagcggcgggaggtcctggactcctccaatatcaaaccaatgaacctgatcggcgtggcaagaggcgaaaacatccccgccgtgatcgccctgaccgaccccgagggctgcccactgagccggtttaaggatagcctgggaaacccaacccacatcctgagaatcggcgagagctataaggagaagcagcggaccatccaggccaagaaggaggtggagcagcggagagccggcggctacagccggaagtacgccagcaaagccaagaatctggcagacgatatggtgagaaacaccgctagagatctgctgtactacgccgtgacccaggatgccatgctgatcttcgccaacctgagccggggcttcggccggcagggcaagcggaccttcatggccgagagacagtacacacggatggaggactggctgaccgccaagctggcctacgagggcctgagcaagacctacctgtccaagacactggcccagtacacctccaagacatgcagcaactgtgggtttaccatcaccagcgccgactacgacagggtgctggagaagctgaagaagacagcaacaggctggatgaccacaattaacggcaaggagctgaaggtggagggccagattacctactacaacagatacaagagacagaacgtagtcaaggacctgtccgtcgagctggatagactgagcgaagaatctgtgaacaacgacatctcctcctggacaaagggcagaagcggagaagctctgagcctcctgaagaaaagattctcccatagacccgtgcaggagaagttcgtgtgcctgaactgcggcttcgagacacacgcagccgagcaagccgccctgaacatcgccagatcctggctgttcctgcggagccaggagtacaagaaataccagacaaacaagacaaccggcaacaccgataagagagccttcgtcgagacctggcagtccttttaccggaagaagcttaaggaggtgtggaaacctgccgtgcggtctggcggatctggcggaggctccaccagccccaagaaaaagagaaaagtctaagctgccttctgcggggcttgccttctggccatgcccttcttctctcccttgcacctgtacctcttggtctttgaataaagcctgagtaggaaggctagcaaaaaaaaaaaaaaaaaaaaaaaaaaaaaaaaaaaaaaaaaaaaaaaaaaaaaaaaaaaaaaaaaaaaaaaaaaaaaaaa

SEQ ID NO: 10029 - RNA, 8787 nt, synthetic construct
  source 1..8787: mol_type = other RNA
aggaaataagagagaaaagaagagtaagaagaaatataagagccaccatggcccctaagaagaagcgtaaagtgagccggatgaaccacgaccaggagttcgacccccctaaggtgtaccctcccgtccccgccgagaagagaaagcccatccgggtcctgagcctgttcgatggcatcgccaccggtctgctggtgctgaaggacctgggcatccaggtggataggtacattgcctccgaggtgtgcgaggactccatcaccgtgggaatggtgcgtcatcagggcaagatcatgtacgtgggcgacgtgcggagcgtgacacagaagcatatccaggagtggggccctttcgacctggtgatcggcggcagcccttgcaatgacctgagcatcgtgaacccagcccggaagggcctgtacgagggaaccggcagactgttcttcgagttttacagactgctgcacgacgcccggcctaaggaaggcgacgaccggcccttcttttggctgttcgagaatgtggtggccatgggagtcagcgacaagcgggatattagccggttcctggagagcaaccccgtgatgatcgatgccaaggaagtgagcgccgcccaccgggccagatacttctggggcaatctgcctggcatgaacagacccctggccagcaccgtgaacgacaagctggagctgcaggagtgcctggagcacggccggatcgccaagttcagcaaggtgagaaccatcaccacccgaagcaacagcatcaaacaaggcaaggaccagcactttcctgtgttcatgaacgagaaggaggacatcctgtggtgtaccgagatggagagagtgttcgggttcccagtccactacacagatgtcagcaacatgtctagactggccagacagagactgctgggaagaagctggtccgtccctgtgatcagacacctgttcgcccctctgaaggagtacttcgcctgcgtgagcagcggcaacagcaacgccaacagccggggccccagcttctctagcggcctggtgccactgtccctgagagggagccacatgggccccatggagatctacaaaaccgtgagcgcctggaagcggcagcctgtgcgcgtgctgagcctgtttcggaatatcgataaagtcctgaaaagcctgggattcctggagagcggctctggctccggcggtggcaccctgaagtacgtggaggatgtgacaaacgtggtcagacgggatgtggagaagtggggccccttcgatctggtgtacggcagcacccaacccctgggcagctcttgtgaccggtgccctggctggtacatgtttcagttccaccggatcctgcagtacgccctgccgagacaggagtcccagcggccattcttttggattttcatggacaacttgctgctgaccgaggatgaccaggaaactaccactcggttcctgcagaccgaagccgtgaccctgcaggacgtgagaggccgggactaccagaacgccatgcgggtgtggtccaacatccctggactgaaaagcaagcacgcacctctgacccctaaagaagaggagtacctgcaggcccaggtgcggagcagaagcaagctggacgcccctaaggtggatctgctggtgaagaattgcctcctgcccctgagagagtacttcaagtatttcagccagaatagtctgcccctgggaggcagcggcggcggcatggcccagtgcctggtgaccttcgccgacgtggccatcgacttcagccaggaggagtgggcctgcctgaacagcgcccagagggacctgtactgggacgtgatgctggagaactacagcaacctggtgagcctggacctggagagcgcctacgagaacaagagcctgcccaccgagaagaacatccacgagatcagggccagcaagaggaacagcgacaggaggagcaagagcctgggcaggggcggcccaagcagcggcgcccctcctcccagcggcggcaggcggcccaagcagcggcgcccctcctcccagcggcggcagcccagccggctccccaacctctaccgaggagggcacctctgagtccgccacccccgagagcggccctggcacctccaccgagcccagcgagggcagcgcacccggcagccctgccggcagccccacctccacagaggagggaaccagcaccgagcccagcgaaggcagcgccccaggcaccagcaccgagcctagtgagcaggagattaaacggatcaacaagatcagaagaagacttgtgaaagacagcaacaccaagaaggccggcaagacaggccccatgaaaaccctgctggttagagtgatgacacccgatctgagagagcggctggaaaacctgagaaagaagcctgaaaatatcccccagcccatcagcaatacatctagagccaacctgaataagctgctgaccgattacaccgaaatgaagaaggcgatcctgcatgtgtactgggaagagttccagaaggaccctgtgggcctgatgagccgggtggcccagcctgccagcaagaagatcgatcagaacaagctgaaacctgagatggacgagaagggcaacctgaccaccgccggctttgcctgctctcagtgtggccagcccctgttcgtgtacaagctggagcaggtgtctgagaagggcaaggcttacaccaactacttcggacggtgcaatgtggccgagcacgaaaagctgatcctgctggcccagctgaagcccgagaaggatagcgacgaagccgtgacatatagcctgggaaagtttgggcagagggccctggatttctacagcattcatgtgaccaaggagtccacccaccccgtgaagcccctggcccagatcgccggaaacagatacgcctccggacctgtgggaaaggccctgagcgacgcatgtatgggcacaatcgcctccttcctgtctaagtaccaggacatcatcatcgaacaccagaaggtggtgaagggcaaccagaagagactggagagcctgcgggagctggccggcaaggaaaacctggaataccctagcgtgaccctgccacctcagcctcacaccaaggagggcgttgatgcctacaacgaagtgatcgcccgggtgcgaatgtgggtgaacctgaacctgtggcagaagctgaagctaagcagagatgatgccaagcctctgctgagactgaagggattcccttcctttcctctggtcgagagacaggccaacgaagtggactggtgggacatggtgtgtaacgtgaagaagctgatcaacgagaaaaaggaggatggcaaggtgttttggcagaatctggctggctacaagagacaggaagccctgagaccatacctgagcagcgaggaagatcggaagaagggaaagaaattcgctcggtaccagctgggcgacctgctgctgcacctggaaaagaagcacggcgaggactggggaaaggtgtacgacgaggcctgggagcggattgacaagaaagtggaaggcctgagcaagcacatcaagctggaagaggaacggagaagcgaggacgcccagagcaaggccgccctgaccgactggctgcgggctaaggccagcttcgtgatcgagggcctgaaggaggccgacaaggacgagttctgcagatgcgagctgaagctgcagaagtggtacggggacctgcggggaaagcccttcgccatcgaagccgagaacagcatcctggacatcagcggcttcagcaagcagtacaactgtgccttcatctggcagaaggacggcgtgaagaagctgaacctgtacctgatcatcaactacttcaagggcggcaagctgcggttcaagaagatcaaacctgaagccttcgaagccaacagattctacaccgtgatcaacaaaaagagcggcgagatcgtgcccatggaggtgaacttcaacttcgacgaccccaacctgatcatcctgcctctggcctttggcaagagacagggcagagaattcatctggaacgacctgctgtccctggaaaccggcagcctgaagctggccaacggaagagtgatcgagaagacactgtacaacagaagaacccggcaggatgagcctgccctgttcgtggccctgaccttcgagcggcgggaggtcctggactcctccaatatcaaaccaatgaacctgatcggcgtggcaagaggcgaaaacatccccgccgtgatcgccctgaccgaccccgagggctgcccactgagccggtttaaggatagcctgggaaacccaacccacatcctgagaatcggcgagagctataaggagaagcagcggaccatccaggccaagaaggaggtggagcagcggagagccggcggctacagccggaagtacgccagcaaagccaagaatctggcagacgatatggtgagaaacaccgctagagatctgctgtactacgccgtgacccaggatgccatgctgatcttcgccaacctgagccggggcttcggccggcagggcaagcggaccttcatggccgagagacagtacacacggatggaggactggctgaccgccaagctggcctacgagggcctgagcaagacctacctgtccaagacactggcccagtacacctccaagacatgcagcaactgtgggtttaccatcaccagcgccgactacgacagggtgctggagaagctgaagaagacagcaacaggctggatgaccacaattaacggcaaggagctgaaggtggagggccagattacctactacaacagatacaagagacagaacgtagtcaaggacctgtccgtcgagctggatagactgagcgaagaatctgtgaacaacgacatctcctcctggacaaagggcagaagcggagaagctctgagcctcctgaagaaaagattctcccatagacccgtgcaggagaagttcgtgtgcctgaactgcggcttcgagacacacgcagccgagcaagccgccctgaacatcgccagatcctggctgttcctgcggagccaggagtacaagaaataccagacaaacaagacaaccggcaacaccgataagagagccttcgtcgagacctggcagtccttttaccggaagaagcttaaggaggtgtggaaacctgccgtgcggtctggcggatctggcggaggctccaccagccccaagaaaaagagaaaagtctaagctgccttctgcggggcttgccttctggccatgcccttcttctctcccttgcacctgtacctcttggtctttgaataaagcctgagtaggaaggctagcaaaaaaaaaaaaaaaaaaaaaaaaaaaaaaaaaaaaaaaaaaaaaaaaaaaaaaaaaaaaaaaaaaaaaaaaaaaaaaaagcccagccggctccccaacctctaccgaggagggcacctctgagtccgccacccccgagagcggccctggcacctccaccgagcccagcgagggcagcgcacccggcagccctgccggcagccccacctccacagaggagggaaccagcaccgagcccagcgaaggcagcgccccaggcaccagcaccgagcctagtgagcaggagattaaacggatcaacaagatcagaagaagacttgtgaaagacagcaacaccaagaaggccggcaagacaggccccatgaaaaccctgctggttagagtgatgacacccgatctgagagagcggctggaaaacctgagaaagaagcctgaaaatatcccccagcccatcagcaatacatctagagccaacctgaataagctgctgaccgattacaccgaaatgaagaaggcgatcctgcatgtgtactgggaagagttccagaaggaccctgtgggcctgatgagccgggtggcccagcctgccagcaagaagatcgatcagaacaagctgaaacctgagatggacgagaagggcaacctgaccaccgccggctttgcctgctctcagtgtggccagcccctgttcgtgtacaagctggagcaggtgtctgagaagggcaaggcttacaccaactacttcggacggtgcaatgtggccgagcacgaaaagctgatcctgctggcccagctgaagcccgagaaggatagcgacgaagccgtgacatatagcctgggaaagtttgggcagagggccctggatttctacagcattcatgtgaccaaggagtccacccaccccgtgaagcccctggcccagatcgccggaaacagatacgcctccggacctgtgggaaaggccctgagcgacgcatgtatgggcacaatcgcctccttcctgtctaagtaccaggacatcatcatcgaacaccagaaggtggtgaagggcaaccagaagagactggagagcctgcgggagctggccggcaaggaaaacctggaataccctagcgtgaccctgccacctcagcctcacaccaaggagggcgttgatgcctacaacgaagtgatcgcccgggtgcgaatgtgggtgaacctgaacctgtggcagaagctgaagctaagcagagatgatgccaagcctctgctgagactgaagggattcccttcctttcctctggtcgagagacaggccaacgaagtggactggtgggacatggtgtgtaacgtgaagaagctgatcaacgagaaaaaggaggatggcaaggtgttttggcagaatctggctggctacaagagacaggaagccctgagaccatacctgagcagcgaggaagatcggaagaagggaaagaaattcgctcggtaccagctgggcgacctgctgctgcacctggaaaagaagcacggcgaggactggggaaaggtgtacgacgaggcctgggagcggattgacaagaaagtggaaggcctgagcaagcacatcaagctggaagaggaacggagaagcgaggacgcccagagcaaggccgccctgaccgactggctgcgggctaaggccagcttcgtgatcgagggcctgaaggaggccgacaaggacgagttctgcagatgcgagctgaagctgcagaagtggtacggggacctgcggggaaagcccttcgccatcgaagccgagaacagcatcctggacatcagcggcttcagcaagcagtacaactgtgccttcatctggcagaaggacggcgtgaagaagctgaacctgtacctgatcatcaactacttcaagggcggcaagctgcggttcaagaagatcaaacctgaagccttcgaagccaacagattctacaccgtgatcaacaaaaagagcggcgagatcgtgcccatggaggtgaacttcaacttcgacgaccccaacctgatcatcctgcctctggcctttggcaagagacagggcagagaattcatctggaacgacctgctgtccctggaaaccggcagcctgaagctggccaacggaagagtgatcgagaagacactgtacaacagaagaacccggcaggatgagcctgccctgttcgtggccctgaccttcgagcggcgggaggtcctggactcctccaatatcaaaccaatgaacctgatcggcgtggcaagaggcgaaaacatccccgccgtgatcgccctgaccgaccccgagggctgcccactgagccggtttaaggatagcctgggaaacccaacccacatcctgagaatcggcgagagctataaggagaagcagcggaccatccaggccaagaaggaggtggagcagcggagagccggcggctacagccggaagtacgccagcaaagccaagaatctggcagacgatatggtgagaaacaccgctagagatctgctgtactacgccgtgacccaggatgccatgctgatcttcgccaacctgagccggggcttcggccggcagggcaagcggaccttcatggccgagagacagtacacacggatggaggactggctgaccgccaagctggcctacgagggcctgagcaagacctacctgtccaagacactggcccagtacacctccaagacatgcagcaactgtgggtttaccatcaccagcgccgactacgacagggtgctggagaagctgaagaagacagcaacaggctggatgaccacaattaacggcaaggagctgaaggtggagggccagattacctactacaacagatacaagagacagaacgtagtcaaggacctgtccgtcgagctggatagactgagcgaagaatctgtgaacaacgacatctcctcctggacaaagggcagaagcggagaagctctgagcctcctgaagaaaagattctcccatagacccgtgcaggagaagttcgtgtgcctgaactgcggcttcgagacacacgcagccgagcaagccgccctgaacatcgccagatcctggctgttcctgcggagccaggagtacaagaaataccagacaaacaagacaaccggcaacaccgataagagagccttcgtcgagacctggcagtccttttaccggaagaagcttaaggaggtgtggaaacctgccgtgcggtctggcggatctggcggaggctccaccagccccaagaaaaagagaaaagtctaagctgccttctgcggggcttgccttctggccatgcccttcttctctcccttgcacctgtacctcttggtctttgaataaagcctgagtaggaaggctagcaaaaaaaaaaaaaaaaaaaaaaaaaaaaaaaaaaaaaaaaaaaaaaaaaaaaaaaaaaaaaaaaaaaaaaaaaaaaaaaa

SEQ ID NO: 10030 - RNA, 8787 nt, synthetic construct
  source 1..8787: mol_type = other RNA
aggaaataagagagaaaagaagagtaagaagaaatataagagccaccatggcccctaagaagaagcgtaaagtgagccggatgaaccacgaccaggagttcgacccccctaaggtgtaccctcccgtccccgccgagaagagaaagcccatccgggtcctgagcctgttcgatggcatcgccaccggtctgctggtgctgaaggacctgggcatccaggtggataggtacattgcctccgaggtgtgcgaggactccatcaccgtgggaatggtgcgtcatcagggcaagatcatgtacgtgggcgacgtgcggagcgtgacacagaagcatatccaggagtggggccctttcgacctggtgatcggcggcagcccttgcaatgacctgagcatcgtgaacccagcccggaagggcctgtacgagggaaccggcagactgttcttcgagttttacagactgctgcacgacgcccggcctaaggaaggcgacgaccggcccttcttttggctgttcgagaatgtggtggccatgggagtcagcgacaagcgggatattagccggttcctggagagcaaccccgtgatgatcgatgccaaggaagtgagcgccgcccaccgggccagatacttctggggcaatctgcctggcatgaacagacccctggccagcaccgtgaacgacaagctggagctgcaggagtgcctggagcacggccggatcgccaagttcagcaaggtgagaaccatcaccacccgaagcaacagcatcaaacaaggcaaggaccagcactttcctgtgttcatgaacgagaaggaggacatcctgtggtgtaccgagatggagagagtgttcgggttcccagtccactacacagatgtcagcaacatgtctagactggccagacagagactgctgggaagaagctggtccgtccctgtgatcagacacctgttcgcccctctgaaggagtacttcgcctgcgtgagcagcggcaacagcaacgccaacagccggggccccagcttctctagcggcctggtgccactgtccctgagagggagccacatgggccccatggagatctacaaaaccgtgagcgcctggaagcggcagcctgtgcgcgtgctgagcctgtttcggaatatcgataaagtcctgaaaagcctgggattcctggagagcggctctggctccggcggtggcaccctgaagtacgtggaggatgtgacaaacgtggtcagacgggatgtggagaagtggggccccttcgatctggtgtacggcagcacccaacccctgggcagctcttgtgaccggtgccctggctggtacatgtttcagttccaccggatcctgcagtacgccctgccgagacaggagtcccagcggccattcttttggattttcatggacaacttgctgctgaccgaggatgaccaggaaactaccactcggttcctgcagaccgaagccgtgaccctgcaggacgtgagaggccgggactaccagaacgccatgcgggtgtggtccaacatccctggactgaaaagcaagcacgcacctctgacccctaaagaagaggagtacctgcaggcccaggtgcggagcagaagcaagctggacgcccctaaggtggatctgctggtgaagaattgcctcctgcccctgagagagtacttcaagtatttcagccagaatagtctgcccctgggaggcagcggcggcggcgcccaggtgctggtgaccttcaaggacgtggccgtgaccttcaccagggaggagtggggccagctggacctggaccagaaggccctgtaccaggaggtgatgctggagacctacggcctgctggtgagcctgggccaccccgtgcccaagcccgagctgacccacctgctggagtgcggccaggagctgtggaagggcaagaggggcctgagccacagcacctgcagcggcgacgacaccaagggcggcccaagcagcggcgcccctcctcccagcggcggcaggcggcccaagcagcggcgcccctcctcccagcggcggcagcccagccggctccccaacctctaccgaggagggcacctctgagtccgccacccccgagagcggccctggcacctccaccgagcccagcgagggcagcgcacccggcagccctgccggcagccccacctccacagaggagggaaccagcaccgagcccagcgaaggcagcgccccaggcaccagcaccgagcctagtgagcaggagattaaacggatcaacaagatcagaagaagacttgtgaaagacagcaacaccaagaaggccggcaagacaggccccatgaaaaccctgctggttagagtgatgacacccgatctgagagagcggctggaaaacctgagaaagaagcctgaaaatatcccccagcccatcagcaatacatctagagccaacctgaataagctgctgaccgattacaccgaaatgaagaaggcgatcctgcatgtgtactgggaagagttccagaaggaccctgtgggcctgatgagccgggtggcccagcctgccagcaagaagatcgatcagaacaagctgaaacctgagatggacgagaagggcaacctgaccaccgccggctttgcctgctctcagtgtggccagcccctgttcgtgtacaagctggagcaggtgtctgagaagggcaaggcttacaccaactacttcggacggtgcaatgtggccgagcacgaaaagctgatcctgctggcccagctgaagcccgagaaggatagcgacgaagccgtgacatatagcctgggaaagtttgggcagagggccctggatttctacagcattcatgtgaccaaggagtccacccaccccgtgaagcccctggcccagatcgccggaaacagatacgcctccggacctgtgggaaaggccctgagcgacgcatgtatgggcacaatcgcctccttcctgtctaagtaccaggacatcatcatcgaacaccagaaggtggtgaagggcaaccagaagagactggagagcctgcgggagctggccggcaaggaaaacctggaataccctagcgtgaccctgccacctcagcctcacaccaaggagggcgttgatgcctacaacgaagtgatcgcccgggtgcgaatgtgggtgaacctgaacctgtggcagaagctgaagctaagcagagatgatgccaagcctctgctgagactgaagggattcccttcctttcctctggtcgagagacaggccaacgaagtggactggtgggacatggtgtgtaacgtgaagaagctgatcaacgagaaaaaggaggatggcaaggtgttttggcagaatctggctggctacaagagacaggaagccctgagaccatacctgagcagcgaggaagatcggaagaagggaaagaaattcgctcggtaccagctgggcgacctgctgctgcacctggaaaagaagcacggcgaggactggggaaaggtgtacgacgaggcctgggagcggattgacaagaaagtggaaggcctgagcaagcacatcaagctggaagaggaacggagaagcgaggacgcccagagcaaggccgccctgaccgactggctgcgggctaaggccagcttcgtgatcgagggcctgaaggaggccgacaaggacgagttctgcagatgcgagctgaagctgcagaagtggtacggggacctgcggggaaagcccttcgccatcgaagccgagaacagcatcctggacatcagcggcttcagcaagcagtacaactgtgccttcatctggcagaaggacggcgtgaagaagctgaacctgtacctgatcatcaactacttcaagggcggcaagctgcggttcaagaagatcaaacctgaagccttcgaagccaacagattctacaccgtgatcaacaaaaagagcggcgagatcgtgcccatggaggtgaacttcaacttcgacgaccccaacctgatcatcctgcctctggcctttggcaagagacagggcagagaattcatctggaacgacctgctgtccctggaaaccggcagcctgaagctggccaacggaagagtgatcgagaagacactgtacaacagaagaacccggcaggatgagcctgccctgttcgtggccctgaccttcgagcggcgggaggtcctggactcctccaatatcaaaccaatgaacctgatcggcgtggcaagaggcgaaaacatccccgccgtgatcgccctgaccgaccccgagggctgcccactgagccggtttaaggatagcctgggaaacccaacccacatcctgagaatcggcgagagctataaggagaagcagcggaccatccaggccaagaaggaggtggagcagcggagagccggcggctacagccggaagtacgccagcaaagccaagaatctggcagacgatatggtgagaaacaccgctagagatctgctgtactacgccgtgacccaggatgccatgctgatcttcgccaacctgagccggggcttcggccggcagggcaagcggaccttcatggccgagagacagtacacacggatggaggactggctgaccgccaagctggcctacgagggcctgagcaagacctacctgtccaagacactggcccagtacacctccaagacatgcagcaactgtgggtttaccatcaccagcgccgactacgacagggtgctggagaagctgaagaagacagcaacaggctggatgaccacaattaacggcaaggagctgaaggtggagggccagattacctactacaacagatacaagagacagaacgtagtcaaggacctgtccgtcgagctggatagactgagcgaagaatctgtgaacaacgacatctcctcctggacaaagggcagaagcggagaagctctgagcctcctgaagaaaagattctcccatagacccgtgcaggagaagttcgtgtgcctgaactgcggcttcgagacacacgcagccgagcaagccgccctgaacatcgccagatcctggctgttcctgcggagccaggagtacaagaaataccagacaaacaagacaaccggcaacaccgataagagagccttcgtcgagacctggcagtccttttaccggaagaagcttaaggaggtgtggaaacctgccgtgcggtctggcggatctggcggaggctccaccagccccaagaaaaagagaaaagtctaagctgccttctgcggggcttgccttctggccatgcccttcttctctcccttgcacctgtacctcttggtctttgaataaagcctgagtaggaaggctagcaaaaaaaaaaaaaaaaaaaaaaaaaaaaaaaaaaaaaaaaaaaaaaaaaaaaaaaaaaaaaaaaaaaaaaaaaaaaaaaagcccagccggctccccaacctctaccgaggagggcacctctgagtccgccacccccgagagcggccctggcacctccaccgagcccagcgagggcagcgcacccggcagccctgccggcagccccacctccacagaggagggaaccagcaccgagcccagcgaaggcagcgccccaggcaccagcaccgagcctagtgagcaggagattaaacggatcaacaagatcagaagaagacttgtgaaagacagcaacaccaagaaggccggcaagacaggccccatgaaaaccctgctggttagagtgatgacacccgatctgagagagcggctggaaaacctgagaaagaagcctgaaaatatcccccagcccatcagcaatacatctagagccaacctgaataagctgctgaccgattacaccgaaatgaagaaggcgatcctgcatgtgtactgggaagagttccagaaggaccctgtgggcctgatgagccgggtggcccagcctgccagcaagaagatcgatcagaacaagctgaaacctgagatggacgagaagggcaacctgaccaccgccggctttgcctgctctcagtgtggccagcccctgttcgtgtacaagctggagcaggtgtctgagaagggcaaggcttacaccaactacttcggacggtgcaatgtggccgagcacgaaaagctgatcctgctggcccagctgaagcccgagaaggatagcgacgaagccgtgacatatagcctgggaaagtttgggcagagggccctggatttctacagcattcatgtgaccaaggagtccacccaccccgtgaagcccctggcccagatcgccggaaacagatacgcctccggacctgtgggaaaggccctgagcgacgcatgtatgggcacaatcgcctccttcctgtctaagtaccaggacatcatcatcgaacaccagaaggtggtgaagggcaaccagaagagactggagagcctgcgggagctggccggcaaggaaaacctggaataccctagcgtgaccctgccacctcagcctcacaccaaggagggcgttgatgcctacaacgaagtgatcgcccgggtgcgaatgtgggtgaacctgaacctgtggcagaagctgaagctaagcagagatgatgccaagcctctgctgagactgaagggattcccttcctttcctctggtcgagagacaggccaacgaagtggactggtgggacatggtgtgtaacgtgaagaagctgatcaacgagaaaaaggaggatggcaaggtgttttggcagaatctggctggctacaagagacaggaagccctgagaccatacctgagcagcgaggaagatcggaagaagggaaagaaattcgctcggtaccagctgggcgacctgctgctgcacctggaaaagaagcacggcgaggactggggaaaggtgtacgacgaggcctgggagcggattgacaagaaagtggaaggcctgagcaagcacatcaagctggaagaggaacggagaagcgaggacgcccagagcaaggccgccctgaccgactggctgcgggctaaggccagcttcgtgatcgagggcctgaaggaggccgacaaggacgagttctgcagatgcgagctgaagctgcagaagtggtacggggacctgcggggaaagcccttcgccatcgaagccgagaacagcatcctggacatcagcggcttcagcaagcagtacaactgtgccttcatctggcagaaggacggcgtgaagaagctgaacctgtacctgatcatcaactacttcaagggcggcaagctgcggttcaagaagatcaaacctgaagccttcgaagccaacagattctacaccgtgatcaacaaaaagagcggcgagatcgtgcccatggaggtgaacttcaacttcgacgaccccaacctgatcatcctgcctctggcctttggcaagagacagggcagagaattcatctggaacgacctgctgtccctggaaaccggcagcctgaagctggccaacggaagagtgatcgagaagacactgtacaacagaagaacccggcaggatgagcctgccctgttcgtggccctgaccttcgagcggcgggaggtcctggactcctccaatatcaaaccaatgaacctgatcggcgtggcaagaggcgaaaacatccccgccgtgatcgccctgaccgaccccgagggctgcccactgagccggtttaaggatagcctgggaaacccaacccacatcctgagaatcggcgagagctataaggagaagcagcggaccatccaggccaagaaggaggtggagcagcggagagccggcggctacagccggaagtacgccagcaaagccaagaatctggcagacgatatggtgagaaacaccgctagagatctgctgtactacgccgtgacccaggatgccatgctgatcttcgccaacctgagccggggcttcggccggcagggcaagcggaccttcatggccgagagacagtacacacggatggaggactggctgaccgccaagctggcctacgagggcctgagcaagacctacctgtccaagacactggcccagtacacctccaagacatgcagcaactgtgggtttaccatcaccagcgccgactacgacagggtgctggagaagctgaagaagacagcaacaggctggatgaccacaattaacggcaaggagctgaaggtggagggccagattacctactacaacagatacaagagacagaacgtagtcaaggacctgtccgtcgagctggatagactgagcgaagaatctgtgaacaacgacatctcctcctggacaaagggcagaagcggagaagctctgagcctcctgaagaaaagattctcccatagacccgtgcaggagaagttcgtgtgcctgaactgcggcttcgagacacacgcagccgagcaagccgccctgaacatcgccagatcctggctgttcctgcggagccaggagtacaagaaataccagacaaacaagacaaccggcaacaccgataagagagccttcgtcgagacctggcagtccttttaccggaagaagcttaaggaggtgtggaaacctgccgtgcggtctggcggatctggcggaggctccaccagccccaagaaaaagagaaaagtctaagctgccttctgcggggcttgccttctggccatgcccttcttctctcccttgcacctgtacctcttggtctttgaataaagcctgagtaggaaggctagcaaaaaaaaaaaaaaaaaaaaaaaaaaaaaaaaaaaaaaaaaaaaaaaaaaaaaaaaaaaaaaaaaaaaaaaaaaaaaaaa

SEQ ID NO: 10031 - RNA, 8787 nt, synthetic construct
  source 1..8787: mol_type = other RNA
aggaaataagagagaaaagaagagtaagaagaaatataagagccaccatggcccctaagaagaagcgtaaagtgagccggatgaaccacgaccaggagttcgacccccctaaggtgtaccctcccgtccccgccgagaagagaaagcccatccgggtcctgagcctgttcgatggcatcgccaccggtctgctggtgctgaaggacctgggcatccaggtggataggtacattgcctccgaggtgtgcgaggactccatcaccgtgggaatggtgcgtcatcagggcaagatcatgtacgtgggcgacgtgcggagcgtgacacagaagcatatccaggagtggggccctttcgacctggtgatcggcggcagcccttgcaatgacctgagcatcgtgaacccagcccggaagggcctgtacgagggaaccggcagactgttcttcgagttttacagactgctgcacgacgcccggcctaaggaaggcgacgaccggcccttcttttggctgttcgagaatgtggtggccatgggagtcagcgacaagcgggatattagccggttcctggagagcaaccccgtgatgatcgatgccaaggaagtgagcgccgcccaccgggccagatacttctggggcaatctgcctggcatgaacagacccctggccagcaccgtgaacgacaagctggagctgcaggagtgcctggagcacggccggatcgccaagttcagcaaggtgagaaccatcaccacccgaagcaacagcatcaaacaaggcaaggaccagcactttcctgtgttcatgaacgagaaggaggacatcctgtggtgtaccgagatggagagagtgttcgggttcccagtccactacacagatgtcagcaacatgtctagactggccagacagagactgctgggaagaagctggtccgtccctgtgatcagacacctgttcgcccctctgaaggagtacttcgcctgcgtgagcagcggcaacagcaacgccaacagccggggccccagcttctctagcggcctggtgccactgtccctgagagggagccacatgggccccatggagatctacaaaaccgtgagcgcctggaagcggcagcctgtgcgcgtgctgagcctgtttcggaatatcgataaagtcctgaaaagcctgggattcctggagagcggctctggctccggcggtggcaccctgaagtacgtggaggatgtgacaaacgtggtcagacgggatgtggagaagtggggccccttcgatctggtgtacggcagcacccaacccctgggcagctcttgtgaccggtgccctggctggtacatgtttcagttccaccggatcctgcagtacgccctgccgagacaggagtcccagcggccattcttttggattttcatggacaacttgctgctgaccgaggatgaccaggaaactaccactcggttcctgcagaccgaagccgtgaccctgcaggacgtgagaggccgggactaccagaacgccatgcgggtgtggtccaacatccctggactgaaaagcaagcacgcacctctgacccctaaagaagaggagtacctgcaggcccaggtgcggagcagaagcaagctggacgcccctaaggtggatctgctggtgaagaattgcctcctgcccctgagagagtacttcaagtatttcagccagaatagtctgcccctgggaggcagcggcggcggcagcctgggccccgtgagcttcaaggacgtggccgtgggcttcacccaggaggagtggaggcagctggagcccgcccagaggaggacctacagggaggtgatgctggagaactacagccacctggtggccgtgggctgccacttcatcaagcccgacgtgatcaccaagctggagaggggcgaggagccctggatcgagggcggcttcctgccccagggctgcgccggcgacgaggtgtggcagggcggcccaagcagcggcgcccctcctcccagcggcggcaggcggcccaagcagcggcgcccctcctcccagcggcggcagcccagccggctccccaacctctaccgaggagggcacctctgagtccgccacccccgagagcggccctggcacctccaccgagcccagcgagggcagcgcacccggcagccctgccggcagccccacctccacagaggagggaaccagcaccgagcccagcgaaggcagcgccccaggcaccagcaccgagcctagtgagcaggagattaaacggatcaacaagatcagaagaagacttgtgaaagacagcaacaccaagaaggccggcaagacaggccccatgaaaaccctgctggttagagtgatgacacccgatctgagagagcggctggaaaacctgagaaagaagcctgaaaatatcccccagcccatcagcaatacatctagagccaacctgaataagctgctgaccgattacaccgaaatgaagaaggcgatcctgcatgtgtactgggaagagttccagaaggaccctgtgggcctgatgagccgggtggcccagcctgccagcaagaagatcgatcagaacaagctgaaacctgagatggacgagaagggcaacctgaccaccgccggctttgcctgctctcagtgtggccagcccctgttcgtgtacaagctggagcaggtgtctgagaagggcaaggcttacaccaactacttcggacggtgcaatgtggccgagcacgaaaagctgatcctgctggcccagctgaagcccgagaaggatagcgacgaagccgtgacatatagcctgggaaagtttgggcagagggccctggatttctacagcattcatgtgaccaaggagtccacccaccccgtgaagcccctggcccagatcgccggaaacagatacgcctccggacctgtgggaaaggccctgagcgacgcatgtatgggcacaatcgcctccttcctgtctaagtaccaggacatcatcatcgaacaccagaaggtggtgaagggcaaccagaagagactggagagcctgcgggagctggccggcaaggaaaacctggaataccctagcgtgaccctgccacctcagcctcacaccaaggagggcgttgatgcctacaacgaagtgatcgcccgggtgcgaatgtgggtgaacctgaacctgtggcagaagctgaagctaagcagagatgatgccaagcctctgctgagactgaagggattcccttcctttcctctggtcgagagacaggccaacgaagtggactggtgggacatggtgtgtaacgtgaagaagctgatcaacgagaaaaaggaggatggcaaggtgttttggcagaatctggctggctacaagagacaggaagccctgagaccatacctgagcagcgaggaagatcggaagaagggaaagaaattcgctcggtaccagctgggcgacctgctgctgcacctggaaaagaagcacggcgaggactggggaaaggtgtacgacgaggcctgggagcggattgacaagaaagtggaaggcctgagcaagcacatcaagctggaagaggaacggagaagcgaggacgcccagagcaaggccgccctgaccgactggctgcgggctaaggccagcttcgtgatcgagggcctgaaggaggccgacaaggacgagttctgcagatgcgagctgaagctgcagaagtggtacggggacctgcggggaaagcccttcgccatcgaagccgagaacagcatcctggacatcagcggcttcagcaagcagtacaactgtgccttcatctggcagaaggacggcgtgaagaagctgaacctgtacctgatcatcaactacttcaagggcggcaagctgcggttcaagaagatcaaacctgaagccttcgaagccaacagattctacaccgtgatcaacaaaaagagcggcgagatcgtgcccatggaggtgaacttcaacttcgacgaccccaacctgatcatcctgcctctggcctttggcaagagacagggcagagaattcatctggaacgacctgctgtccctggaaaccggcagcctgaagctggccaacggaagagtgatcgagaagacactgtacaacagaagaacccggcaggatgagcctgccctgttcgtggccctgaccttcgagcggcgggaggtcctggactcctccaatatcaaaccaatgaacctgatcggcgtggcaagaggcgaaaacatccccgccgtgatcgccctgaccgaccccgagggctgcccactgagccggtttaaggatagcctgggaaacccaacccacatcctgagaatcggcgagagctataaggagaagcagcggaccatccaggccaagaaggaggtggagcagcggagagccggcggctacagccggaagtacgccagcaaagccaagaatctggcagacgatatggtgagaaacaccgctagagatctgctgtactacgccgtgacccaggatgccatgctgatcttcgccaacctgagccggggcttcggccggcagggcaagcggaccttcatggccgagagacagtacacacggatggaggactggctgaccgccaagctggcctacgagggcctgagcaagacctacctgtccaagacactggcccagtacacctccaagacatgcagcaactgtgggtttaccatcaccagcgccgactacgacagggtgctggagaagctgaagaagacagcaacaggctggatgaccacaattaacggcaaggagctgaaggtggagggccagattacctactacaacagatacaagagacagaacgtagtcaaggacctgtccgtcgagctggatagactgagcgaagaatctgtgaacaacgacatctcctcctggacaaagggcagaagcggagaagctctgagcctcctgaagaaaagattctcccatagacccgtgcaggagaagttcgtgtgcctgaactgcggcttcgagacacacgcagccgagcaagccgccctgaacatcgccagatcctggctgttcctgcggagccaggagtacaagaaataccagacaaacaagacaaccggcaacaccgataagagagccttcgtcgagacctggcagtccttttaccggaagaagcttaaggaggtgtggaaacctgccgtgcggtctggcggatctggcggaggctccaccagccccaagaaaaagagaaaagtctaagctgccttctgcggggcttgccttctggccatgcccttcttctctcccttgcacctgtacctcttggtctttgaataaagcctgagtaggaaggctagcaaaaaaaaaaaaaaaaaaaaaaaaaaaaaaaaaaaaaaaaaaaaaaaaaaaaaaaaaaaaaaaaaaaaaaaaaaaaaaaagcccagccggctccccaacctctaccgaggagggcacctctgagtccgccacccccgagagcggccctggcacctccaccgagcccagcgagggcagcgcacccggcagccctgccggcagccccacctccacagaggagggaaccagcaccgagcccagcgaaggcagcgccccaggcaccagcaccgagcctagtgagcaggagattaaacggatcaacaagatcagaagaagacttgtgaaagacagcaacaccaagaaggccggcaagacaggccccatgaaaaccctgctggttagagtgatgacacccgatctgagagagcggctggaaaacctgagaaagaagcctgaaaatatcccccagcccatcagcaatacatctagagccaacctgaataagctgctgaccgattacaccgaaatgaagaaggcgatcctgcatgtgtactgggaagagttccagaaggaccctgtgggcctgatgagccgggtggcccagcctgccagcaagaagatcgatcagaacaagctgaaacctgagatggacgagaagggcaacctgaccaccgccggctttgcctgctctcagtgtggccagcccctgttcgtgtacaagctggagcaggtgtctgagaagggcaaggcttacaccaactacttcggacggtgcaatgtggccgagcacgaaaagctgatcctgctggcccagctgaagcccgagaaggatagcgacgaagccgtgacatatagcctgggaaagtttgggcagagggccctggatttctacagcattcatgtgaccaaggagtccacccaccccgtgaagcccctggcccagatcgccggaaacagatacgcctccggacctgtgggaaaggccctgagcgacgcatgtatgggcacaatcgcctccttcctgtctaagtaccaggacatcatcatcgaacaccagaaggtggtgaagggcaaccagaagagactggagagcctgcgggagctggccggcaaggaaaacctggaataccctagcgtgaccctgccacctcagcctcacaccaaggagggcgttgatgcctacaacgaagtgatcgcccgggtgcgaatgtgggtgaacctgaacctgtggcagaagctgaagctaagcagagatgatgccaagcctctgctgagactgaagggattcccttcctttcctctggtcgagagacaggccaacgaagtggactggtgggacatggtgtgtaacgtgaagaagctgatcaacgagaaaaaggaggatggcaaggtgttttggcagaatctggctggctacaagagacaggaagccctgagaccatacctgagcagcgaggaagatcggaagaagggaaagaaattcgctcggtaccagctgggcgacctgctgctgcacctggaaaagaagcacggcgaggactggggaaaggtgtacgacgaggcctgggagcggattgacaagaaagtggaaggcctgagcaagcacatcaagctggaagaggaacggagaagcgaggacgcccagagcaaggccgccctgaccgactggctgcgggctaaggccagcttcgtgatcgagggcctgaaggaggccgacaaggacgagttctgcagatgcgagctgaagctgcagaagtggtacggggacctgcggggaaagcccttcgccatcgaagccgagaacagcatcctggacatcagcggcttcagcaagcagtacaactgtgccttcatctggcagaaggacggcgtgaagaagctgaacctgtacctgatcatcaactacttcaagggcggcaagctgcggttcaagaagatcaaacctgaagccttcgaagccaacagattctacaccgtgatcaacaaaaagagcggcgagatcgtgcccatggaggtgaacttcaacttcgacgaccccaacctgatcatcctgcctctggcctttggcaagagacagggcagagaattcatctggaacgacctgctgtccctggaaaccggcagcctgaagctggccaacggaagagtgatcgagaagacactgtacaacagaagaacccggcaggatgagcctgccctgttcgtggccctgaccttcgagcggcgggaggtcctggactcctccaatatcaaaccaatgaacctgatcggcgtggcaagaggcgaaaacatccccgccgtgatcgccctgaccgaccccgagggctgcccactgagccggtttaaggatagcctgggaaacccaacccacatcctgagaatcggcgagagctataaggagaagcagcggaccatccaggccaagaaggaggtggagcagcggagagccggcggctacagccggaagtacgccagcaaagccaagaatctggcagacgatatggtgagaaacaccgctagagatctgctgtactacgccgtgacccaggatgccatgctgatcttcgccaacctgagccggggcttcggccggcagggcaagcggaccttcatggccgagagacagtacacacggatggaggactggctgaccgccaagctggcctacgagggcctgagcaagacctacctgtccaagacactggcccagtacacctccaagacatgcagcaactgtgggtttaccatcaccagcgccgactacgacagggtgctggagaagctgaagaagacagcaacaggctggatgaccacaattaacggcaaggagctgaaggtggagggccagattacctactacaacagatacaagagacagaacgtagtcaaggacctgtccgtcgagctggatagactgagcgaagaatctgtgaacaacgacatctcctcctggacaaagggcagaagcggagaagctctgagcctcctgaagaaaagattctcccatagacccgtgcaggagaagttcgtgtgcctgaactgcggcttcgagacacacgcagccgagcaagccgccctgaacatcgccagatcctggctgttcctgcggagccaggagtacaagaaataccagacaaacaagacaaccggcaacaccgataagagagccttcgtcgagacctggcagtccttttaccggaagaagcttaaggaggtgtggaaacctgccgtgcggtctggcggatctggcggaggctccaccagccccaagaaaaagagaaaagtctaagctgccttctgcggggcttgccttctggccatgcccttcttctctcccttgcacctgtacctcttggtctttgaataaagcctgagtaggaaggctagcaaaaaaaaaaaaaaaaaaaaaaaaaaaaaaaaaaaaaaaaaaaaaaaaaaaaaaaaaaaaaaaaaaaaaaaaaaaaaaaa

SEQ ID NO: 10032 - RNA, 8787 nt, synthetic construct
  source 1..8787: mol_type = other RNA
aggaaataagagagaaaagaagagtaagaagaaatataagagccaccatggcccctaagaagaagcgtaaagtgagccggatgaaccacgaccaggagttcgacccccctaaggtgtaccctcccgtccccgccgagaagagaaagcccatccgggtcctgagcctgttcgatggcatcgccaccggtctgctggtgctgaaggacctgggcatccaggtggataggtacattgcctccgaggtgtgcgaggactccatcaccgtgggaatggtgcgtcatcagggcaagatcatgtacgtgggcgacgtgcggagcgtgacacagaagcatatccaggagtggggccctttcgacctggtgatcggcggcagcccttgcaatgacctgagcatcgtgaacccagcccggaagggcctgtacgagggaaccggcagactgttcttcgagttttacagactgctgcacgacgcccggcctaaggaaggcgacgaccggcccttcttttggctgttcgagaatgtggtggccatgggagtcagcgacaagcgggatattagccggttcctggagagcaaccccgtgatgatcgatgccaaggaagtgagcgccgcccaccgggccagatacttctggggcaatctgcctggcatgaacagacccctggccagcaccgtgaacgacaagctggagctgcaggagtgcctggagcacggccggatcgccaagttcagcaaggtgagaaccatcaccacccgaagcaacagcatcaaacaaggcaaggaccagcactttcctgtgttcatgaacgagaaggaggacatcctgtggtgtaccgagatggagagagtgttcgggttcccagtccactacacagatgtcagcaacatgtctagactggccagacagagactgctgggaagaagctggtccgtccctgtgatcagacacctgttcgcccctctgaaggagtacttcgcctgcgtgagcagcggcaacagcaacgccaacagccggggccccagcttctctagcggcctggtgccactgtccctgagagggagccacatgggccccatggagatctacaaaaccgtgagcgcctggaagcggcagcctgtgcgcgtgctgagcctgtttcggaatatcgataaagtcctgaaaagcctgggattcctggagagcggctctggctccggcggtggcaccctgaagtacgtggaggatgtgacaaacgtggtcagacgggatgtggagaagtggggccccttcgatctggtgtacggcagcacccaacccctgggcagctcttgtgaccggtgccctggctggtacatgtttcagttccaccggatcctgcagtacgccctgccgagacaggagtcccagcggccattcttttggattttcatggacaacttgctgctgaccgaggatgaccaggaaactaccactcggttcctgcagaccgaagccgtgaccctgcaggacgtgagaggccgggactaccagaacgccatgcgggtgtggtccaacatccctggactgaaaagcaagcacgcacctctgacccctaaagaagaggagtacctgcaggcccaggtgcggagcagaagcaagctggacgcccctaaggtggatctgctggtgaagaattgcctcctgcccctgagagagtacttcaagtatttcagccagaatagtctgcccctgggaggcagcggcggcggcgagcagggcctggtgagcttcgaggacgtggccgtggacttcacctggcaggagtggcaggagctggacgccgcccagaggaccctgtacagggacgtgatgctggagaactacagcagcctggtgagcctgggccactgcgtgaccaagcccgagctgatcttcaggctggagcacggcttcggcccctggagcatcggcgagaccagcctgtggaacctgcccggcgtgctggaggtgcccggcggcccaagcagcggcgcccctcctcccagcggcggcaggcggcccaagcagcggcgcccctcctcccagcggcggcagcccagccggctccccaacctctaccgaggagggcacctctgagtccgccacccccgagagcggccctggcacctccaccgagcccagcgagggcagcgcacccggcagccctgccggcagccccacctccacagaggagggaaccagcaccgagcccagcgaaggcagcgccccaggcaccagcaccgagcctagtgagcaggagattaaacggatcaacaagatcagaagaagacttgtgaaagacagcaacaccaagaaggccggcaagacaggccccatgaaaaccctgctggttagagtgatgacacccgatctgagagagcggctggaaaacctgagaaagaagcctgaaaatatcccccagcccatcagcaatacatctagagccaacctgaataagctgctgaccgattacaccgaaatgaagaaggcgatcctgcatgtgtactgggaagagttccagaaggaccctgtgggcctgatgagccgggtggcccagcctgccagcaagaagatcgatcagaacaagctgaaacctgagatggacgagaagggcaacctgaccaccgccggctttgcctgctctcagtgtggccagcccctgttcgtgtacaagctggagcaggtgtctgagaagggcaaggcttacaccaactacttcggacggtgcaatgtggccgagcacgaaaagctgatcctgctggcccagctgaagcccgagaaggatagcgacgaagccgtgacatatagcctgggaaagtttgggcagagggccctggatttctacagcattcatgtgaccaaggagtccacccaccccgtgaagcccctggcccagatcgccggaaacagatacgcctccggacctgtgggaaaggccctgagcgacgcatgtatgggcacaatcgcctccttcctgtctaagtaccaggacatcatcatcgaacaccagaaggtggtgaagggcaaccagaagagactggagagcctgcgggagctggccggcaaggaaaacctggaataccctagcgtgaccctgccacctcagcctcacaccaaggagggcgttgatgcctacaacgaagtgatcgcccgggtgcgaatgtgggtgaacctgaacctgtggcagaagctgaagctaagcagagatgatgccaagcctctgctgagactgaagggattcccttcctttcctctggtcgagagacaggccaacgaagtggactggtgggacatggtgtgtaacgtgaagaagctgatcaacgagaaaaaggaggatggcaaggtgttttggcagaatctggctggctacaagagacaggaagccctgagaccatacctgagcagcgaggaagatcggaagaagggaaagaaattcgctcggtaccagctgggcgacctgctgctgcacctggaaaagaagcacggcgaggactggggaaaggtgtacgacgaggcctgggagcggattgacaagaaagtggaaggcctgagcaagcacatcaagctggaagaggaacggagaagcgaggacgcccagagcaaggccgccctgaccgactggctgcgggctaaggccagcttcgtgatcgagggcctgaaggaggccgacaaggacgagttctgcagatgcgagctgaagctgcagaagtggtacggggacctgcggggaaagcccttcgccatcgaagccgagaacagcatcctggacatcagcggcttcagcaagcagtacaactgtgccttcatctggcagaaggacggcgtgaagaagctgaacctgtacctgatcatcaactacttcaagggcggcaagctgcggttcaagaagatcaaacctgaagccttcgaagccaacagattctacaccgtgatcaacaaaaagagcggcgagatcgtgcccatggaggtgaacttcaacttcgacgaccccaacctgatcatcctgcctctggcctttggcaagagacagggcagagaattcatctggaacgacctgctgtccctggaaaccggcagcctgaagctggccaacggaagagtgatcgagaagacactgtacaacagaagaacccggcaggatgagcctgccctgttcgtggccctgaccttcgagcggcgggaggtcctggactcctccaatatcaaaccaatgaacctgatcggcgtggcaagaggcgaaaacatccccgccgtgatcgccctgaccgaccccgagggctgcccactgagccggtttaaggatagcctgggaaacccaacccacatcctgagaatcggcgagagctataaggagaagcagcggaccatccaggccaagaaggaggtggagcagcggagagccggcggctacagccggaagtacgccagcaaagccaagaatctggcagacgatatggtgagaaacaccgctagagatctgctgtactacgccgtgacccaggatgccatgctgatcttcgccaacctgagccggggcttcggccggcagggcaagcggaccttcatggccgagagacagtacacacggatggaggactggctgaccgccaagctggcctacgagggcctgagcaagacctacctgtccaagacactggcccagtacacctccaagacatgcagcaactgtgggtttaccatcaccagcgccgactacgacagggtgctggagaagctgaagaagacagcaacaggctggatgaccacaattaacggcaaggagctgaaggtggagggccagattacctactacaacagatacaagagacagaacgtagtcaaggacctgtccgtcgagctggatagactgagcgaagaatctgtgaacaacgacatctcctcctggacaaagggcagaagcggagaagctctgagcctcctgaagaaaagattctcccatagacccgtgcaggagaagttcgtgtgcctgaactgcggcttcgagacacacgcagccgagcaagccgccctgaacatcgccagatcctggctgttcctgcggagccaggagtacaagaaataccagacaaacaagacaaccggcaacaccgataagagagccttcgtcgagacctggcagtccttttaccggaagaagcttaaggaggtgtggaaacctgccgtgcggtctggcggatctggcggaggctccaccagccccaagaaaaagagaaaagtctaagctgccttctgcggggcttgccttctggccatgcccttcttctctcccttgcacctgtacctcttggtctttgaataaagcctgagtaggaaggctagcaaaaaaaaaaaaaaaaaaaaaaaaaaaaaaaaaaaaaaaaaaaaaaaaaaaaaaaaaaaaaaaaaaaaaaaaaaaaaaaagcccagccggctccccaacctctaccgaggagggcacctctgagtccgccacccccgagagcggccctggcacctccaccgagcccagcgagggcagcgcacccggcagccctgccggcagccccacctccacagaggagggaaccagcaccgagcccagcgaaggcagcgccccaggcaccagcaccgagcctagtgagcaggagattaaacggatcaacaagatcagaagaagacttgtgaaagacagcaacaccaagaaggccggcaagacaggccccatgaaaaccctgctggttagagtgatgacacccgatctgagagagcggctggaaaacctgagaaagaagcctgaaaatatcccccagcccatcagcaatacatctagagccaacctgaataagctgctgaccgattacaccgaaatgaagaaggcgatcctgcatgtgtactgggaagagttccagaaggaccctgtgggcctgatgagccgggtggcccagcctgccagcaagaagatcgatcagaacaagctgaaacctgagatggacgagaagggcaacctgaccaccgccggctttgcctgctctcagtgtggccagcccctgttcgtgtacaagctggagcaggtgtctgagaagggcaaggcttacaccaactacttcggacggtgcaatgtggccgagcacgaaaagctgatcctgctggcccagctgaagcccgagaaggatagcgacgaagccgtgacatatagcctgggaaagtttgggcagagggccctggatttctacagcattcatgtgaccaaggagtccacccaccccgtgaagcccctggcccagatcgccggaaacagatacgcctccggacctgtgggaaaggccctgagcgacgcatgtatgggcacaatcgcctccttcctgtctaagtaccaggacatcatcatcgaacaccagaaggtggtgaagggcaaccagaagagactggagagcctgcgggagctggccggcaaggaaaacctggaataccctagcgtgaccctgccacctcagcctcacaccaaggagggcgttgatgcctacaacgaagtgatcgcccgggtgcgaatgtgggtgaacctgaacctgtggcagaagctgaagctaagcagagatgatgccaagcctctgctgagactgaagggattcccttcctttcctctggtcgagagacaggccaacgaagtggactggtgggacatggtgtgtaacgtgaagaagctgatcaacgagaaaaaggaggatggcaaggtgttttggcagaatctggctggctacaagagacaggaagccctgagaccatacctgagcagcgaggaagatcggaagaagggaaagaaattcgctcggtaccagctgggcgacctgctgctgcacctggaaaagaagcacggcgaggactggggaaaggtgtacgacgaggcctgggagcggattgacaagaaagtggaaggcctgagcaagcacatcaagctggaagaggaacggagaagcgaggacgcccagagcaaggccgccctgaccgactggctgcgggctaaggccagcttcgtgatcgagggcctgaaggaggccgacaaggacgagttctgcagatgcgagctgaagctgcagaagtggtacggggacctgcggggaaagcccttcgccatcgaagccgagaacagcatcctggacatcagcggcttcagcaagcagtacaactgtgccttcatctggcagaaggacggcgtgaagaagctgaacctgtacctgatcatcaactacttcaagggcggcaagctgcggttcaagaagatcaaacctgaagccttcgaagccaacagattctacaccgtgatcaacaaaaagagcggcgagatcgtgcccatggaggtgaacttcaacttcgacgaccccaacctgatcatcctgcctctggcctttggcaagagacagggcagagaattcatctggaacgacctgctgtccctggaaaccggcagcctgaagctggccaacggaagagtgatcgagaagacactgtacaacagaagaacccggcaggatgagcctgccctgttcgtggccctgaccttcgagcggcgggaggtcctggactcctccaatatcaaaccaatgaacctgatcggcgtggcaagaggcgaaaacatccccgccgtgatcgccctgaccgaccccgagggctgcccactgagccggtttaaggatagcctgggaaacccaacccacatcctgagaatcggcgagagctataaggagaagcagcggaccatccaggccaagaaggaggtggagcagcggagagccggcggctacagccggaagtacgccagcaaagccaagaatctggcagacgatatggtgagaaacaccgctagagatctgctgtactacgccgtgacccaggatgccatgctgatcttcgccaacctgagccggggcttcggccggcagggcaagcggaccttcatggccgagagacagtacacacggatggaggactggctgaccgccaagctggcctacgagggcctgagcaagacctacctgtccaagacactggcccagtacacctccaagacatgcagcaactgtgggtttaccatcaccagcgccgactacgacagggtgctggagaagctgaagaagacagcaacaggctggatgaccacaattaacggcaaggagctgaaggtggagggccagattacctactacaacagatacaagagacagaacgtagtcaaggacctgtccgtcgagctggatagactgagcgaagaatctgtgaacaacgacatctcctcctggacaaagggcagaagcggagaagctctgagcctcctgaagaaaagattctcccatagacccgtgcaggagaagttcgtgtgcctgaactgcggcttcgagacacacgcagccgagcaagccgccctgaacatcgccagatcctggctgttcctgcggagccaggagtacaagaaataccagacaaacaagacaaccggcaacaccgataagagagccttcgtcgagacctggcagtccttttaccggaagaagcttaaggaggtgtggaaacctgccgtgcggtctggcggatctggcggaggctccaccagccccaagaaaaagagaaaagtctaagctgccttctgcggggcttgccttctggccatgcccttcttctctcccttgcacctgtacctcttggtctttgaataaagcctgagtaggaaggctagcaaaaaaaaaaaaaaaaaaaaaaaaaaaaaaaaaaaaaaaaaaaaaaaaaaaaaaaaaaaaaaaaaaaaaaaaaaaaaaaa

SEQ ID NO: 10033 - RNA, 8787 nt, synthetic construct
  source 1..8787: mol_type = other RNA
aggaaataagagagaaaagaagagtaagaagaaatataagagccaccatggcccctaagaagaagcgtaaagtgagccggatgaaccacgaccaggagttcgacccccctaaggtgtaccctcccgtccccgccgagaagagaaagcccatccgggtcctgagcctgttcgatggcatcgccaccggtctgctggtgctgaaggacctgggcatccaggtggataggtacattgcctccgaggtgtgcgaggactccatcaccgtgggaatggtgcgtcatcagggcaagatcatgtacgtgggcgacgtgcggagcgtgacacagaagcatatccaggagtggggccctttcgacctggtgatcggcggcagcccttgcaatgacctgagcatcgtgaacccagcccggaagggcctgtacgagggaaccggcagactgttcttcgagttttacagactgctgcacgacgcccggcctaaggaaggcgacgaccggcccttcttttggctgttcgagaatgtggtggccatgggagtcagcgacaagcgggatattagccggttcctggagagcaaccccgtgatgatcgatgccaaggaagtgagcgccgcccaccgggccagatacttctggggcaatctgcctggcatgaacagacccctggccagcaccgtgaacgacaagctggagctgcaggagtgcctggagcacggccggatcgccaagttcagcaaggtgagaaccatcaccacccgaagcaacagcatcaaacaaggcaaggaccagcactttcctgtgttcatgaacgagaaggaggacatcctgtggtgtaccgagatggagagagtgttcgggttcccagtccactacacagatgtcagcaacatgtctagactggccagacagagactgctgggaagaagctggtccgtccctgtgatcagacacctgttcgcccctctgaaggagtacttcgcctgcgtgagcagcggcaacagcaacgccaacagccggggccccagcttctctagcggcctggtgccactgtccctgagagggagccacatgggccccatggagatctacaaaaccgtgagcgcctggaagcggcagcctgtgcgcgtgctgagcctgtttcggaatatcgataaagtcctgaaaagcctgggattcctggagagcggctctggctccggcggtggcaccctgaagtacgtggaggatgtgacaaacgtggtcagacgggatgtggagaagtggggccccttcgatctggtgtacggcagcacccaacccctgggcagctcttgtgaccggtgccctggctggtacatgtttcagttccaccggatcctgcagtacgccctgccgagacaggagtcccagcggccattcttttggattttcatggacaacttgctgctgaccgaggatgaccaggaaactaccactcggttcctgcagaccgaagccgtgaccctgcaggacgtgagaggccgggactaccagaacgccatgcgggtgtggtccaacatccctggactgaaaagcaagcacgcacctctgacccctaaagaagaggagtacctgcaggcccaggtgcggagcagaagcaagctggacgcccctaaggtggatctgctggtgaagaattgcctcctgcccctgagagagtacttcaagtatttcagccagaatagtctgcccctgggaggcagcggcggcggcgcccacggcagcgtgatgttcagcgacgtgagcatcgtgttcagccaggaggagtgggagtacctggacctgaagcagagggacctgtacagggacgtgatgctggagaactacagcaacctggtgagcctgggctgcttcatcagcaagcccgacgtgatcagcctgctggagcagggcaaggagccctggaaggtgatgaggaagggcaggggcaggtaccccgacctggagaccaggtacggcggcccaagcagcggcgcccctcctcccagcggcggcaggcggcccaagcagcggcgcccctcctcccagcggcggcagcccagccggctccccaacctctaccgaggagggcacctctgagtccgccacccccgagagcggccctggcacctccaccgagcccagcgagggcagcgcacccggcagccctgccggcagccccacctccacagaggagggaaccagcaccgagcccagcgaaggcagcgccccaggcaccagcaccgagcctagtgagcaggagattaaacggatcaacaagatcagaagaagacttgtgaaagacagcaacaccaagaaggccggcaagacaggccccatgaaaaccctgctggttagagtgatgacacccgatctgagagagcggctggaaaacctgagaaagaagcctgaaaatatcccccagcccatcagcaatacatctagagccaacctgaataagctgctgaccgattacaccgaaatgaagaaggcgatcctgcatgtgtactgggaagagttccagaaggaccctgtgggcctgatgagccgggtggcccagcctgccagcaagaagatcgatcagaacaagctgaaacctgagatggacgagaagggcaacctgaccaccgccggctttgcctgctctcagtgtggccagcccctgttcgtgtacaagctggagcaggtgtctgagaagggcaaggcttacaccaactacttcggacggtgcaatgtggccgagcacgaaaagctgatcctgctggcccagctgaagcccgagaaggatagcgacgaagccgtgacatatagcctgggaaagtttgggcagagggccctggatttctacagcattcatgtgaccaaggagtccacccaccccgtgaagcccctggcccagatcgccggaaacagatacgcctccggacctgtgggaaaggccctgagcgacgcatgtatgggcacaatcgcctccttcctgtctaagtaccaggacatcatcatcgaacaccagaaggtggtgaagggcaaccagaagagactggagagcctgcgggagctggccggcaaggaaaacctggaataccctagcgtgaccctgccacctcagcctcacaccaaggagggcgttgatgcctacaacgaagtgatcgcccgggtgcgaatgtgggtgaacctgaacctgtggcagaagctgaagctaagcagagatgatgccaagcctctgctgagactgaagggattcccttcctttcctctggtcgagagacaggccaacgaagtggactggtgggacatggtgtgtaacgtgaagaagctgatcaacgagaaaaaggaggatggcaaggtgttttggcagaatctggctggctacaagagacaggaagccctgagaccatacctgagcagcgaggaagatcggaagaagggaaagaaattcgctcggtaccagctgggcgacctgctgctgcacctggaaaagaagcacggcgaggactggggaaaggtgtacgacgaggcctgggagcggattgacaagaaagtggaaggcctgagcaagcacatcaagctggaagaggaacggagaagcgaggacgcccagagcaaggccgccctgaccgactggctgcgggctaaggccagcttcgtgatcgagggcctgaaggaggccgacaaggacgagttctgcagatgcgagctgaagctgcagaagtggtacggggacctgcggggaaagcccttcgccatcgaagccgagaacagcatcctggacatcagcggcttcagcaagcagtacaactgtgccttcatctggcagaaggacggcgtgaagaagctgaacctgtacctgatcatcaactacttcaagggcggcaagctgcggttcaagaagatcaaacctgaagccttcgaagccaacagattctacaccgtgatcaacaaaaagagcggcgagatcgtgcccatggaggtgaacttcaacttcgacgaccccaacctgatcatcctgcctctggcctttggcaagagacagggcagagaattcatctggaacgacctgctgtccctggaaaccggcagcctgaagctggccaacggaagagtgatcgagaagacactgtacaacagaagaacccggcaggatgagcctgccctgttcgtggccctgaccttcgagcggcgggaggtcctggactcctccaatatcaaaccaatgaacctgatcggcgtggcaagaggcgaaaacatccccgccgtgatcgccctgaccgaccccgagggctgcccactgagccggtttaaggatagcctgggaaacccaacccacatcctgagaatcggcgagagctataaggagaagcagcggaccatccaggccaagaaggaggtggagcagcggagagccggcggctacagccggaagtacgccagcaaagccaagaatctggcagacgatatggtgagaaacaccgctagagatctgctgtactacgccgtgacccaggatgccatgctgatcttcgccaacctgagccggggcttcggccggcagggcaagcggaccttcatggccgagagacagtacacacggatggaggactggctgaccgccaagctggcctacgagggcctgagcaagacctacctgtccaagacactggcccagtacacctccaagacatgcagcaactgtgggtttaccatcaccagcgccgactacgacagggtgctggagaagctgaagaagacagcaacaggctggatgaccacaattaacggcaaggagctgaaggtggagggccagattacctactacaacagatacaagagacagaacgtagtcaaggacctgtccgtcgagctggatagactgagcgaagaatctgtgaacaacgacatctcctcctggacaaagggcagaagcggagaagctctgagcctcctgaagaaaagattctcccatagacccgtgcaggagaagttcgtgtgcctgaactgcggcttcgagacacacgcagccgagcaagccgccctgaacatcgccagatcctggctgttcctgcggagccaggagtacaagaaataccagacaaacaagacaaccggcaacaccgataagagagccttcgtcgagacctggcagtccttttaccggaagaagcttaaggaggtgtggaaacctgccgtgcggtctggcggatctggcggaggctccaccagccccaagaaaaagagaaaagtctaagctgccttctgcggggcttgccttctggccatgcccttcttctctcccttgcacctgtacctcttggtctttgaataaagcctgagtaggaaggctagcaaaaaaaaaaaaaaaaaaaaaaaaaaaaaaaaaaaaaaaaaaaaaaaaaaaaaaaaaaaaaaaaaaaaaaaaaaaaaaaagcccagccggctccccaacctctaccgaggagggcacctctgagtccgccacccccgagagcggccctggcacctccaccgagcccagcgagggcagcgcacccggcagccctgccggcagccccacctccacagaggagggaaccagcaccgagcccagcgaaggcagcgccccaggcaccagcaccgagcctagtgagcaggagattaaacggatcaacaagatcagaagaagacttgtgaaagacagcaacaccaagaaggccggcaagacaggccccatgaaaaccctgctggttagagtgatgacacccgatctgagagagcggctggaaaacctgagaaagaagcctgaaaatatcccccagcccatcagcaatacatctagagccaacctgaataagctgctgaccgattacaccgaaatgaagaaggcgatcctgcatgtgtactgggaagagttccagaaggaccctgtgggcctgatgagccgggtggcccagcctgccagcaagaagatcgatcagaacaagctgaaacctgagatggacgagaagggcaacctgaccaccgccggctttgcctgctctcagtgtggccagcccctgttcgtgtacaagctggagcaggtgtctgagaagggcaaggcttacaccaactacttcggacggtgcaatgtggccgagcacgaaaagctgatcctgctggcccagctgaagcccgagaaggatagcgacgaagccgtgacatatagcctgggaaagtttgggcagagggccctggatttctacagcattcatgtgaccaaggagtccacccaccccgtgaagcccctggcccagatcgccggaaacagatacgcctccggacctgtgggaaaggccctgagcgacgcatgtatgggcacaatcgcctccttcctgtctaagtaccaggacatcatcatcgaacaccagaaggtggtgaagggcaaccagaagagactggagagcctgcgggagctggccggcaaggaaaacctggaataccctagcgtgaccctgccacctcagcctcacaccaaggagggcgttgatgcctacaacgaagtgatcgcccgggtgcgaatgtgggtgaacctgaacctgtggcagaagctgaagctaagcagagatgatgccaagcctctgctgagactgaagggattcccttcctttcctctggtcgagagacaggccaacgaagtggactggtgggacatggtgtgtaacgtgaagaagctgatcaacgagaaaaaggaggatggcaaggtgttttggcagaatctggctggctacaagagacaggaagccctgagaccatacctgagcagcgaggaagatcggaagaagggaaagaaattcgctcggtaccagctgggcgacctgctgctgcacctggaaaagaagcacggcgaggactggggaaaggtgtacgacgaggcctgggagcggattgacaagaaagtggaaggcctgagcaagcacatcaagctggaagaggaacggagaagcgaggacgcccagagcaaggccgccctgaccgactggctgcgggctaaggccagcttcgtgatcgagggcctgaaggaggccgacaaggacgagttctgcagatgcgagctgaagctgcagaagtggtacggggacctgcggggaaagcccttcgccatcgaagccgagaacagcatcctggacatcagcggcttcagcaagcagtacaactgtgccttcatctggcagaaggacggcgtgaagaagctgaacctgtacctgatcatcaactacttcaagggcggcaagctgcggttcaagaagatcaaacctgaagccttcgaagccaacagattctacaccgtgatcaacaaaaagagcggcgagatcgtgcccatggaggtgaacttcaacttcgacgaccccaacctgatcatcctgcctctggcctttggcaagagacagggcagagaattcatctggaacgacctgctgtccctggaaaccggcagcctgaagctggccaacggaagagtgatcgagaagacactgtacaacagaagaacccggcaggatgagcctgccctgttcgtggccctgaccttcgagcggcgggaggtcctggactcctccaatatcaaaccaatgaacctgatcggcgtggcaagaggcgaaaacatccccgccgtgatcgccctgaccgaccccgagggctgcccactgagccggtttaaggatagcctgggaaacccaacccacatcctgagaatcggcgagagctataaggagaagcagcggaccatccaggccaagaaggaggtggagcagcggagagccggcggctacagccggaagtacgccagcaaagccaagaatctggcagacgatatggtgagaaacaccgctagagatctgctgtactacgccgtgacccaggatgccatgctgatcttcgccaacctgagccggggcttcggccggcagggcaagcggaccttcatggccgagagacagtacacacggatggaggactggctgaccgccaagctggcctacgagggcctgagcaagacctacctgtccaagacactggcccagtacacctccaagacatgcagcaactgtgggtttaccatcaccagcgccgactacgacagggtgctggagaagctgaagaagacagcaacaggctggatgaccacaattaacggcaaggagctgaaggtggagggccagattacctactacaacagatacaagagacagaacgtagtcaaggacctgtccgtcgagctggatagactgagcgaagaatctgtgaacaacgacatctcctcctggacaaagggcagaagcggagaagctctgagcctcctgaagaaaagattctcccatagacccgtgcaggagaagttcgtgtgcctgaactgcggcttcgagacacacgcagccgagcaagccgccctgaacatcgccagatcctggctgttcctgcggagccaggagtacaagaaataccagacaaacaagacaaccggcaacaccgataagagagccttcgtcgagacctggcagtccttttaccggaagaagcttaaggaggtgtggaaacctgccgtgcggtctggcggatctggcggaggctccaccagccccaagaaaaagagaaaagtctaagctgccttctgcggggcttgccttctggccatgcccttcttctctcccttgcacctgtacctcttggtctttgaataaagcctgagtaggaaggctagcaaaaaaaaaaaaaaaaaaaaaaaaaaaaaaaaaaaaaaaaaaaaaaaaaaaaaaaaaaaaaaaaaaaaaaaaaaaaaaaa

SEQ ID NO: 10034 - RNA, 8787 nt, synthetic construct
  source 1..8787: mol_type = other RNA
aggaaataagagagaaaagaagagtaagaagaaatataagagccaccatggcccctaagaagaagcgtaaagtgagccggatgaaccacgaccaggagttcgacccccctaaggtgtaccctcccgtccccgccgagaagagaaagcccatccgggtcctgagcctgttcgatggcatcgccaccggtctgctggtgctgaaggacctgggcatccaggtggataggtacattgcctccgaggtgtgcgaggactccatcaccgtgggaatggtgcgtcatcagggcaagatcatgtacgtgggcgacgtgcggagcgtgacacagaagcatatccaggagtggggccctttcgacctggtgatcggcggcagcccttgcaatgacctgagcatcgtgaacccagcccggaagggcctgtacgagggaaccggcagactgttcttcgagttttacagactgctgcacgacgcccggcctaaggaaggcgacgaccggcccttcttttggctgttcgagaatgtggtggccatgggagtcagcgacaagcgggatattagccggttcctggagagcaaccccgtgatgatcgatgccaaggaagtgagcgccgcccaccgggccagatacttctggggcaatctgcctggcatgaacagacccctggccagcaccgtgaacgacaagctggagctgcaggagtgcctggagcacggccggatcgccaagttcagcaaggtgagaaccatcaccacccgaagcaacagcatcaaacaaggcaaggaccagcactttcctgtgttcatgaacgagaaggaggacatcctgtggtgtaccgagatggagagagtgttcgggttcccagtccactacacagatgtcagcaacatgtctagactggccagacagagactgctgggaagaagctggtccgtccctgtgatcagacacctgttcgcccctctgaaggagtacttcgcctgcgtgagcagcggcaacagcaacgccaacagccggggccccagcttctctagcggcctggtgccactgtccctgagagggagccacatgggccccatggagatctacaaaaccgtgagcgcctggaagcggcagcctgtgcgcgtgctgagcctgtttcggaatatcgataaagtcctgaaaagcctgggattcctggagagcggctctggctccggcggtggcaccctgaagtacgtggaggatgtgacaaacgtggtcagacgggatgtggagaagtggggccccttcgatctggtgtacggcagcacccaacccctgggcagctcttgtgaccggtgccctggctggtacatgtttcagttccaccggatcctgcagtacgccctgccgagacaggagtcccagcggccattcttttggattttcatggacaacttgctgctgaccgaggatgaccaggaaactaccactcggttcctgcagaccgaagccgtgaccctgcaggacgtgagaggccgggactaccagaacgccatgcgggtgtggtccaacatccctggactgaaaagcaagcacgcacctctgacccctaaagaagaggagtacctgcaggcccaggtgcggagcagaagcaagctggacgcccctaaggtggatctgctggtgaagaattgcctcctgcccctgagagagtacttcaagtatttcagccagaatagtctgcccctgggaggcagcggcggcggcccccaggagagcgtggccttcgaggacgtggccgtgtacttcaccaccaaggagtgggccatcatgatgcccgccgagagggccctgtacagggacgtgatgctggagaactacgaggccgtggccttcgtggtgccccccaccagcaagcccgccctggtgagccacctggagcagggcaaggagagctgcttcatccagccccagggcgtgctgagcaggagcgactggagggccggcctgggcggcccaagcagcggcgcccctcctcccagcggcggcaggcggcccaagcagcggcgcccctcctcccagcggcggcagcccagccggctccccaacctctaccgaggagggcacctctgagtccgccacccccgagagcggccctggcacctccaccgagcccagcgagggcagcgcacccggcagccctgccggcagccccacctccacagaggagggaaccagcaccgagcccagcgaaggcagcgccccaggcaccagcaccgagcctagtgagcaggagattaaacggatcaacaagatcagaagaagacttgtgaaagacagcaacaccaagaaggccggcaagacaggccccatgaaaaccctgctggttagagtgatgacacccgatctgagagagcggctggaaaacctgagaaagaagcctgaaaatatcccccagcccatcagcaatacatctagagccaacctgaataagctgctgaccgattacaccgaaatgaagaaggcgatcctgcatgtgtactgggaagagttccagaaggaccctgtgggcctgatgagccgggtggcccagcctgccagcaagaagatcgatcagaacaagctgaaacctgagatggacgagaagggcaacctgaccaccgccggctttgcctgctctcagtgtggccagcccctgttcgtgtacaagctggagcaggtgtctgagaagggcaaggcttacaccaactacttcggacggtgcaatgtggccgagcacgaaaagctgatcctgctggcccagctgaagcccgagaaggatagcgacgaagccgtgacatatagcctgggaaagtttgggcagagggccctggatttctacagcattcatgtgaccaaggagtccacccaccccgtgaagcccctggcccagatcgccggaaacagatacgcctccggacctgtgggaaaggccctgagcgacgcatgtatgggcacaatcgcctccttcctgtctaagtaccaggacatcatcatcgaacaccagaaggtggtgaagggcaaccagaagagactggagagcctgcgggagctggccggcaaggaaaacctggaataccctagcgtgaccctgccacctcagcctcacaccaaggagggcgttgatgcctacaacgaagtgatcgcccgggtgcgaatgtgggtgaacctgaacctgtggcagaagctgaagctaagcagagatgatgccaagcctctgctgagactgaagggattcccttcctttcctctggtcgagagacaggccaacgaagtggactggtgggacatggtgtgtaacgtgaagaagctgatcaacgagaaaaaggaggatggcaaggtgttttggcagaatctggctggctacaagagacaggaagccctgagaccatacctgagcagcgaggaagatcggaagaagggaaagaaattcgctcggtaccagctgggcgacctgctgctgcacctggaaaagaagcacggcgaggactggggaaaggtgtacgacgaggcctgggagcggattgacaagaaagtggaaggcctgagcaagcacatcaagctggaagaggaacggagaagcgaggacgcccagagcaaggccgccctgaccgactggctgcgggctaaggccagcttcgtgatcgagggcctgaaggaggccgacaaggacgagttctgcagatgcgagctgaagctgcagaagtggtacggggacctgcggggaaagcccttcgccatcgaagccgagaacagcatcctggacatcagcggcttcagcaagcagtacaactgtgccttcatctggcagaaggacggcgtgaagaagctgaacctgtacctgatcatcaactacttcaagggcggcaagctgcggttcaagaagatcaaacctgaagccttcgaagccaacagattctacaccgtgatcaacaaaaagagcggcgagatcgtgcccatggaggtgaacttcaacttcgacgaccccaacctgatcatcctgcctctggcctttggcaagagacagggcagagaattcatctggaacgacctgctgtccctggaaaccggcagcctgaagctggccaacggaagagtgatcgagaagacactgtacaacagaagaacccggcaggatgagcctgccctgttcgtggccctgaccttcgagcggcgggaggtcctggactcctccaatatcaaaccaatgaacctgatcggcgtggcaagaggcgaaaacatccccgccgtgatcgccctgaccgaccccgagggctgcccactgagccggtttaaggatagcctgggaaacccaacccacatcctgagaatcggcgagagctataaggagaagcagcggaccatccaggccaagaaggaggtggagcagcggagagccggcggctacagccggaagtacgccagcaaagccaagaatctggcagacgatatggtgagaaacaccgctagagatctgctgtactacgccgtgacccaggatgccatgctgatcttcgccaacctgagccggggcttcggccggcagggcaagcggaccttcatggccgagagacagtacacacggatggaggactggctgaccgccaagctggcctacgagggcctgagcaagacctacctgtccaagacactggcccagtacacctccaagacatgcagcaactgtgggtttaccatcaccagcgccgactacgacagggtgctggagaagctgaagaagacagcaacaggctggatgaccacaattaacggcaaggagctgaaggtggagggccagattacctactacaacagatacaagagacagaacgtagtcaaggacctgtccgtcgagctggatagactgagcgaagaatctgtgaacaacgacatctcctcctggacaaagggcagaagcggagaagctctgagcctcctgaagaaaagattctcccatagacccgtgcaggagaagttcgtgtgcctgaactgcggcttcgagacacacgcagccgagcaagccgccctgaacatcgccagatcctggctgttcctgcggagccaggagtacaagaaataccagacaaacaagacaaccggcaacaccgataagagagccttcgtcgagacctggcagtccttttaccggaagaagcttaaggaggtgtggaaacctgccgtgcggtctggcggatctggcggaggctccaccagccccaagaaaaagagaaaagtctaagctgccttctgcggggcttgccttctggccatgcccttcttctctcccttgcacctgtacctcttggtctttgaataaagcctgagtaggaaggctagcaaaaaaaaaaaaaaaaaaaaaaaaaaaaaaaaaaaaaaaaaaaaaaaaaaaaaaaaaaaaaaaaaaaaaaaaaaaaaaaagcccagccggctccccaacctctaccgaggagggcacctctgagtccgccacccccgagagcggccctggcacctccaccgagcccagcgagggcagcgcacccggcagccctgccggcagccccacctccacagaggagggaaccagcaccgagcccagcgaaggcagcgccccaggcaccagcaccgagcctagtgagcaggagattaaacggatcaacaagatcagaagaagacttgtgaaagacagcaacaccaagaaggccggcaagacaggccccatgaaaaccctgctggttagagtgatgacacccgatctgagagagcggctggaaaacctgagaaagaagcctgaaaatatcccccagcccatcagcaatacatctagagccaacctgaataagctgctgaccgattacaccgaaatgaagaaggcgatcctgcatgtgtactgggaagagttccagaaggaccctgtgggcctgatgagccgggtggcccagcctgccagcaagaagatcgatcagaacaagctgaaacctgagatggacgagaagggcaacctgaccaccgccggctttgcctgctctcagtgtggccagcccctgttcgtgtacaagctggagcaggtgtctgagaagggcaaggcttacaccaactacttcggacggtgcaatgtggccgagcacgaaaagctgatcctgctggcccagctgaagcccgagaaggatagcgacgaagccgtgacatatagcctgggaaagtttgggcagagggccctggatttctacagcattcatgtgaccaaggagtccacccaccccgtgaagcccctggcccagatcgccggaaacagatacgcctccggacctgtgggaaaggccctgagcgacgcatgtatgggcacaatcgcctccttcctgtctaagtaccaggacatcatcatcgaacaccagaaggtggtgaagggcaaccagaagagactggagagcctgcgggagctggccggcaaggaaaacctggaataccctagcgtgaccctgccacctcagcctcacaccaaggagggcgttgatgcctacaacgaagtgatcgcccgggtgcgaatgtgggtgaacctgaacctgtggcagaagctgaagctaagcagagatgatgccaagcctctgctgagactgaagggattcccttcctttcctctggtcgagagacaggccaacgaagtggactggtgggacatggtgtgtaacgtgaagaagctgatcaacgagaaaaaggaggatggcaaggtgttttggcagaatctggctggctacaagagacaggaagccctgagaccatacctgagcagcgaggaagatcggaagaagggaaagaaattcgctcggtaccagctgggcgacctgctgctgcacctggaaaagaagcacggcgaggactggggaaaggtgtacgacgaggcctgggagcggattgacaagaaagtggaaggcctgagcaagcacatcaagctggaagaggaacggagaagcgaggacgcccagagcaaggccgccctgaccgactggctgcgggctaaggccagcttcgtgatcgagggcctgaaggaggccgacaaggacgagttctgcagatgcgagctgaagctgcagaagtggtacggggacctgcggggaaagcccttcgccatcgaagccgagaacagcatcctggacatcagcggcttcagcaagcagtacaactgtgccttcatctggcagaaggacggcgtgaagaagctgaacctgtacctgatcatcaactacttcaagggcggcaagctgcggttcaagaagatcaaacctgaagccttcgaagccaacagattctacaccgtgatcaacaaaaagagcggcgagatcgtgcccatggaggtgaacttcaacttcgacgaccccaacctgatcatcctgcctctggcctttggcaagagacagggcagagaattcatctggaacgacctgctgtccctggaaaccggcagcctgaagctggccaacggaagagtgatcgagaagacactgtacaacagaagaacccggcaggatgagcctgccctgttcgtggccctgaccttcgagcggcgggaggtcctggactcctccaatatcaaaccaatgaacctgatcggcgtggcaagaggcgaaaacatccccgccgtgatcgccctgaccgaccccgagggctgcccactgagccggtttaaggatagcctgggaaacccaacccacatcctgagaatcggcgagagctataaggagaagcagcggaccatccaggccaagaaggaggtggagcagcggagagccggcggctacagccggaagtacgccagcaaagccaagaatctggcagacgatatggtgagaaacaccgctagagatctgctgtactacgccgtgacccaggatgccatgctgatcttcgccaacctgagccggggcttcggccggcagggcaagcggaccttcatggccgagagacagtacacacggatggaggactggctgaccgccaagctggcctacgagggcctgagcaagacctacctgtccaagacactggcccagtacacctccaagacatgcagcaactgtgggtttaccatcaccagcgccgactacgacagggtgctggagaagctgaagaagacagcaacaggctggatgaccacaattaacggcaaggagctgaaggtggagggccagattacctactacaacagatacaagagacagaacgtagtcaaggacctgtccgtcgagctggatagactgagcgaagaatctgtgaacaacgacatctcctcctggacaaagggcagaagcggagaagctctgagcctcctgaagaaaagattctcccatagacccgtgcaggagaagttcgtgtgcctgaactgcggcttcgagacacacgcagccgagcaagccgccctgaacatcgccagatcctggctgttcctgcggagccaggagtacaagaaataccagacaaacaagacaaccggcaacaccgataagagagccttcgtcgagacctggcagtccttttaccggaagaagcttaaggaggtgtggaaacctgccgtgcggtctggcggatctggcggaggctccaccagccccaagaaaaagagaaaagtctaagctgccttctgcggggcttgccttctggccatgcccttcttctctcccttgcacctgtacctcttggtctttgaataaagcctgagtaggaaggctagcaaaaaaaaaaaaaaaaaaaaaaaaaaaaaaaaaaaaaaaaaaaaaaaaaaaaaaaaaaaaaaaaaaaaaaaaaaaaaaaa

SEQ ID NO: 10035 - RNA, 8787 nt, synthetic construct
  source 1..8787: mol_type = other RNA
aggaaataagagagaaaagaagagtaagaagaaatataagagccaccatggcccctaagaagaagcgtaaagtgagccggatgaaccacgaccaggagttcgacccccctaaggtgtaccctcccgtccccgccgagaagagaaagcccatccgggtcctgagcctgttcgatggcatcgccaccggtctgctggtgctgaaggacctgggcatccaggtggataggtacattgcctccgaggtgtgcgaggactccatcaccgtgggaatggtgcgtcatcagggcaagatcatgtacgtgggcgacgtgcggagcgtgacacagaagcatatccaggagtggggccctttcgacctggtgatcggcggcagcccttgcaatgacctgagcatcgtgaacccagcccggaagggcctgtacgagggaaccggcagactgttcttcgagttttacagactgctgcacgacgcccggcctaaggaaggcgacgaccggcccttcttttggctgttcgagaatgtggtggccatgggagtcagcgacaagcgggatattagccggttcctggagagcaaccccgtgatgatcgatgccaaggaagtgagcgccgcccaccgggccagatacttctggggcaatctgcctggcatgaacagacccctggccagcaccgtgaacgacaagctggagctgcaggagtgcctggagcacggccggatcgccaagttcagcaaggtgagaaccatcaccacccgaagcaacagcatcaaacaaggcaaggaccagcactttcctgtgttcatgaacgagaaggaggacatcctgtggtgtaccgagatggagagagtgttcgggttcccagtccactacacagatgtcagcaacatgtctagactggccagacagagactgctgggaagaagctggtccgtccctgtgatcagacacctgttcgcccctctgaaggagtacttcgcctgcgtgagcagcggcaacagcaacgccaacagccggggccccagcttctctagcggcctggtgccactgtccctgagagggagccacatgggccccatggagatctacaaaaccgtgagcgcctggaagcggcagcctgtgcgcgtgctgagcctgtttcggaatatcgataaagtcctgaaaagcctgggattcctggagagcggctctggctccggcggtggcaccctgaagtacgtggaggatgtgacaaacgtggtcagacgggatgtggagaagtggggccccttcgatctggtgtacggcagcacccaacccctgggcagctcttgtgaccggtgccctggctggtacatgtttcagttccaccggatcctgcagtacgccctgccgagacaggagtcccagcggccattcttttggattttcatggacaacttgctgctgaccgaggatgaccaggaaactaccactcggttcctgcagaccgaagccgtgaccctgcaggacgtgagaggccgggactaccagaacgccatgcgggtgtggtccaacatccctggactgaaaagcaagcacgcacctctgacccctaaagaagaggagtacctgcaggcccaggtgcggagcagaagcaagctggacgcccctaaggtggatctgctggtgaagaattgcctcctgcccctgagagagtacttcaagtatttcagccagaatagtctgcccctgggaggcagcggcggcggcacccaggacagcgtgaccttcaaggacgtggccgtggacttcaccagggaggagtgggagaggctgaacagcacccagagggacctgtacagggacgtgatgctggagaactacaggaacctggtgagcctgggcctggccgtgagcaagcccgacatcatcttccagctggagcaggagaaggagctgtggatgctgaagaggaaggtgctgaggagcaccaggcccgcccagaagaccgagggcggcccaagcagcggcgcccctcctcccagcggcggcaggcggcccaagcagcggcgcccctcctcccagcggcggcagcccagccggctccccaacctctaccgaggagggcacctctgagtccgccacccccgagagcggccctggcacctccaccgagcccagcgagggcagcgcacccggcagccctgccggcagccccacctccacagaggagggaaccagcaccgagcccagcgaaggcagcgccccaggcaccagcaccgagcctagtgagcaggagattaaacggatcaacaagatcagaagaagacttgtgaaagacagcaacaccaagaaggccggcaagacaggccccatgaaaaccctgctggttagagtgatgacacccgatctgagagagcggctggaaaacctgagaaagaagcctgaaaatatcccccagcccatcagcaatacatctagagccaacctgaataagctgctgaccgattacaccgaaatgaagaaggcgatcctgcatgtgtactgggaagagttccagaaggaccctgtgggcctgatgagccgggtggcccagcctgccagcaagaagatcgatcagaacaagctgaaacctgagatggacgagaagggcaacctgaccaccgccggctttgcctgctctcagtgtggccagcccctgttcgtgtacaagctggagcaggtgtctgagaagggcaaggcttacaccaactacttcggacggtgcaatgtggccgagcacgaaaagctgatcctgctggcccagctgaagcccgagaaggatagcgacgaagccgtgacatatagcctgggaaagtttgggcagagggccctggatttctacagcattcatgtgaccaaggagtccacccaccccgtgaagcccctggcccagatcgccggaaacagatacgcctccggacctgtgggaaaggccctgagcgacgcatgtatgggcacaatcgcctccttcctgtctaagtaccaggacatcatcatcgaacaccagaaggtggtgaagggcaaccagaagagactggagagcctgcgggagctggccggcaaggaaaacctggaataccctagcgtgaccctgccacctcagcctcacaccaaggagggcgttgatgcctacaacgaagtgatcgcccgggtgcgaatgtgggtgaacctgaacctgtggcagaagctgaagctaagcagagatgatgccaagcctctgctgagactgaagggattcccttcctttcctctggtcgagagacaggccaacgaagtggactggtgggacatggtgtgtaacgtgaagaagctgatcaacgagaaaaaggaggatggcaaggtgttttggcagaatctggctggctacaagagacaggaagccctgagaccatacctgagcagcgaggaagatcggaagaagggaaagaaattcgctcggtaccagctgggcgacctgctgctgcacctggaaaagaagcacggcgaggactggggaaaggtgtacgacgaggcctgggagcggattgacaagaaagtggaaggcctgagcaagcacatcaagctggaagaggaacggagaagcgaggacgcccagagcaaggccgccctgaccgactggctgcgggctaaggccagcttcgtgatcgagggcctgaaggaggccgacaaggacgagttctgcagatgcgagctgaagctgcagaagtggtacggggacctgcggggaaagcccttcgccatcgaagccgagaacagcatcctggacatcagcggcttcagcaagcagtacaactgtgccttcatctggcagaaggacggcgtgaagaagctgaacctgtacctgatcatcaactacttcaagggcggcaagctgcggttcaagaagatcaaacctgaagccttcgaagccaacagattctacaccgtgatcaacaaaaagagcggcgagatcgtgcccatggaggtgaacttcaacttcgacgaccccaacctgatcatcctgcctctggcctttggcaagagacagggcagagaattcatctggaacgacctgctgtccctggaaaccggcagcctgaagctggccaacggaagagtgatcgagaagacactgtacaacagaagaacccggcaggatgagcctgccctgttcgtggccctgaccttcgagcggcgggaggtcctggactcctccaatatcaaaccaatgaacctgatcggcgtggcaagaggcgaaaacatccccgccgtgatcgccctgaccgaccccgagggctgcccactgagccggtttaaggatagcctgggaaacccaacccacatcctgagaatcggcgagagctataaggagaagcagcggaccatccaggccaagaaggaggtggagcagcggagagccggcggctacagccggaagtacgccagcaaagccaagaatctggcagacgatatggtgagaaacaccgctagagatctgctgtactacgccgtgacccaggatgccatgctgatcttcgccaacctgagccggggcttcggccggcagggcaagcggaccttcatggccgagagacagtacacacggatggaggactggctgaccgccaagctggcctacgagggcctgagcaagacctacctgtccaagacactggcccagtacacctccaagacatgcagcaactgtgggtttaccatcaccagcgccgactacgacagggtgctggagaagctgaagaagacagcaacaggctggatgaccacaattaacggcaaggagctgaaggtggagggccagattacctactacaacagatacaagagacagaacgtagtcaaggacctgtccgtcgagctggatagactgagcgaagaatctgtgaacaacgacatctcctcctggacaaagggcagaagcggagaagctctgagcctcctgaagaaaagattctcccatagacccgtgcaggagaagttcgtgtgcctgaactgcggcttcgagacacacgcagccgagcaagccgccctgaacatcgccagatcctggctgttcctgcggagccaggagtacaagaaataccagacaaacaagacaaccggcaacaccgataagagagccttcgtcgagacctggcagtccttttaccggaagaagcttaaggaggtgtggaaacctgccgtgcggtctggcggatctggcggaggctccaccagccccaagaaaaagagaaaagtctaagctgccttctgcggggcttgccttctggccatgcccttcttctctcccttgcacctgtacctcttggtctttgaataaagcctgagtaggaaggctagcaaaaaaaaaaaaaaaaaaaaaaaaaaaaaaaaaaaaaaaaaaaaaaaaaaaaaaaaaaaaaaaaaaaaaaaaaaaaaaaagcccagccggctccccaacctctaccgaggagggcacctctgagtccgccacccccgagagcggccctggcacctccaccgagcccagcgagggcagcgcacccggcagccctgccggcagccccacctccacagaggagggaaccagcaccgagcccagcgaaggcagcgccccaggcaccagcaccgagcctagtgagcaggagattaaacggatcaacaagatcagaagaagacttgtgaaagacagcaacaccaagaaggccggcaagacaggccccatgaaaaccctgctggttagagtgatgacacccgatctgagagagcggctggaaaacctgagaaagaagcctgaaaatatcccccagcccatcagcaatacatctagagccaacctgaataagctgctgaccgattacaccgaaatgaagaaggcgatcctgcatgtgtactgggaagagttccagaaggaccctgtgggcctgatgagccgggtggcccagcctgccagcaagaagatcgatcagaacaagctgaaacctgagatggacgagaagggcaacctgaccaccgccggctttgcctgctctcagtgtggccagcccctgttcgtgtacaagctggagcaggtgtctgagaagggcaaggcttacaccaactacttcggacggtgcaatgtggccgagcacgaaaagctgatcctgctggcccagctgaagcccgagaaggatagcgacgaagccgtgacatatagcctgggaaagtttgggcagagggccctggatttctacagcattcatgtgaccaaggagtccacccaccccgtgaagcccctggcccagatcgccggaaacagatacgcctccggacctgtgggaaaggccctgagcgacgcatgtatgggcacaatcgcctccttcctgtctaagtaccaggacatcatcatcgaacaccagaaggtggtgaagggcaaccagaagagactggagagcctgcgggagctggccggcaaggaaaacctggaataccctagcgtgaccctgccacctcagcctcacaccaaggagggcgttgatgcctacaacgaagtgatcgcccgggtgcgaatgtgggtgaacctgaacctgtggcagaagctgaagctaagcagagatgatgccaagcctctgctgagactgaagggattcccttcctttcctctggtcgagagacaggccaacgaagtggactggtgggacatggtgtgtaacgtgaagaagctgatcaacgagaaaaaggaggatggcaaggtgttttggcagaatctggctggctacaagagacaggaagccctgagaccatacctgagcagcgaggaagatcggaagaagggaaagaaattcgctcggtaccagctgggcgacctgctgctgcacctggaaaagaagcacggcgaggactggggaaaggtgtacgacgaggcctgggagcggattgacaagaaagtggaaggcctgagcaagcacatcaagctggaagaggaacggagaagcgaggacgcccagagcaaggccgccctgaccgactggctgcgggctaaggccagcttcgtgatcgagggcctgaaggaggccgacaaggacgagttctgcagatgcgagctgaagctgcagaagtggtacggggacctgcggggaaagcccttcgccatcgaagccgagaacagcatcctggacatcagcggcttcagcaagcagtacaactgtgccttcatctggcagaaggacggcgtgaagaagctgaacctgtacctgatcatcaactacttcaagggcggcaagctgcggttcaagaagatcaaacctgaagccttcgaagccaacagattctacaccgtgatcaacaaaaagagcggcgagatcgtgcccatggaggtgaacttcaacttcgacgaccccaacctgatcatcctgcctctggcctttggcaagagacagggcagagaattcatctggaacgacctgctgtccctggaaaccggcagcctgaagctggccaacggaagagtgatcgagaagacactgtacaacagaagaacccggcaggatgagcctgccctgttcgtggccctgaccttcgagcggcgggaggtcctggactcctccaatatcaaaccaatgaacctgatcggcgtggcaagaggcgaaaacatccccgccgtgatcgccctgaccgaccccgagggctgcccactgagccggtttaaggatagcctgggaaacccaacccacatcctgagaatcggcgagagctataaggagaagcagcggaccatccaggccaagaaggaggtggagcagcggagagccggcggctacagccggaagtacgccagcaaagccaagaatctggcagacgatatggtgagaaacaccgctagagatctgctgtactacgccgtgacccaggatgccatgctgatcttcgccaacctgagccggggcttcggccggcagggcaagcggaccttcatggccgagagacagtacacacggatggaggactggctgaccgccaagctggcctacgagggcctgagcaagacctacctgtccaagacactggcccagtacacctccaagacatgcagcaactgtgggtttaccatcaccagcgccgactacgacagggtgctggagaagctgaagaagacagcaacaggctggatgaccacaattaacggcaaggagctgaaggtggagggccagattacctactacaacagatacaagagacagaacgtagtcaaggacctgtccgtcgagctggatagactgagcgaagaatctgtgaacaacgacatctcctcctggacaaagggcagaagcggagaagctctgagcctcctgaagaaaagattctcccatagacccgtgcaggagaagttcgtgtgcctgaactgcggcttcgagacacacgcagccgagcaagccgccctgaacatcgccagatcctggctgttcctgcggagccaggagtacaagaaataccagacaaacaagacaaccggcaacaccgataagagagccttcgtcgagacctggcagtccttttaccggaagaagcttaaggaggtgtggaaacctgccgtgcggtctggcggatctggcggaggctccaccagccccaagaaaaagagaaaagtctaagctgccttctgcggggcttgccttctggccatgcccttcttctctcccttgcacctgtacctcttggtctttgaataaagcctgagtaggaaggctagcaaaaaaaaaaaaaaaaaaaaaaaaaaaaaaaaaaaaaaaaaaaaaaaaaaaaaaaaaaaaaaaaaaaaaaaaaaaaaaaa

SEQ ID NO: 10036 - RNA, 8787 nt, synthetic construct
  source 1..8787: mol_type = other RNA
aggaaataagagagaaaagaagagtaagaagaaatataagagccaccatggcccctaagaagaagcgtaaagtgagccggatgaaccacgaccaggagttcgacccccctaaggtgtaccctcccgtccccgccgagaagagaaagcccatccgggtcctgagcctgttcgatggcatcgccaccggtctgctggtgctgaaggacctgggcatccaggtggataggtacattgcctccgaggtgtgcgaggactccatcaccgtgggaatggtgcgtcatcagggcaagatcatgtacgtgggcgacgtgcggagcgtgacacagaagcatatccaggagtggggccctttcgacctggtgatcggcggcagcccttgcaatgacctgagcatcgtgaacccagcccggaagggcctgtacgagggaaccggcagactgttcttcgagttttacagactgctgcacgacgcccggcctaaggaaggcgacgaccggcccttcttttggctgttcgagaatgtggtggccatgggagtcagcgacaagcgggatattagccggttcctggagagcaaccccgtgatgatcgatgccaaggaagtgagcgccgcccaccgggccagatacttctggggcaatctgcctggcatgaacagacccctggccagcaccgtgaacgacaagctggagctgcaggagtgcctggagcacggccggatcgccaagttcagcaaggtgagaaccatcaccacccgaagcaacagcatcaaacaaggcaaggaccagcactttcctgtgttcatgaacgagaaggaggacatcctgtggtgtaccgagatggagagagtgttcgggttcccagtccactacacagatgtcagcaacatgtctagactggccagacagagactgctgggaagaagctggtccgtccctgtgatcagacacctgttcgcccctctgaaggagtacttcgcctgcgtgagcagcggcaacagcaacgccaacagccggggccccagcttctctagcggcctggtgccactgtccctgagagggagccacatgggccccatggagatctacaaaaccgtgagcgcctggaagcggcagcctgtgcgcgtgctgagcctgtttcggaatatcgataaagtcctgaaaagcctgggattcctggagagcggctctggctccggcggtggcaccctgaagtacgtggaggatgtgacaaacgtggtcagacgggatgtggagaagtggggccccttcgatctggtgtacggcagcacccaacccctgggcagctcttgtgaccggtgccctggctggtacatgtttcagttccaccggatcctgcagtacgccctgccgagacaggagtcccagcggccattcttttggattttcatggacaacttgctgctgaccgaggatgaccaggaaactaccactcggttcctgcagaccgaagccgtgaccctgcaggacgtgagaggccgggactaccagaacgccatgcgggtgtggtccaacatccctggactgaaaagcaagcacgcacctctgacccctaaagaagaggagtacctgcaggcccaggtgcggagcagaagcaagctggacgcccctaaggtggatctgctggtgaagaattgcctcctgcccctgagagagtacttcaagtatttcagccagaatagtctgcccctgggaggcagcggcggcggcaggcaggagcccgtgaccttcgaggacgtggccgtgtacttcacccagaacgagtgggtgatcctggaccccgcccagagggccctgtacagggaggtgatgctggagaactacgccaacgtggccagcctggccttcagcttcaccaggcccgtgctggtgagccagctggagaggggcgagctgccccccggcctggacccctgggagagggccagccccgaggccctgaggggcatctgcggcggcccaagcagcggcgcccctcctcccagcggcggcaggcggcccaagcagcggcgcccctcctcccagcggcggcagcccagccggctccccaacctctaccgaggagggcacctctgagtccgccacccccgagagcggccctggcacctccaccgagcccagcgagggcagcgcacccggcagccctgccggcagccccacctccacagaggagggaaccagcaccgagcccagcgaaggcagcgccccaggcaccagcaccgagcctagtgagcaggagattaaacggatcaacaagatcagaagaagacttgtgaaagacagcaacaccaagaaggccggcaagacaggccccatgaaaaccctgctggttagagtgatgacacccgatctgagagagcggctggaaaacctgagaaagaagcctgaaaatatcccccagcccatcagcaatacatctagagccaacctgaataagctgctgaccgattacaccgaaatgaagaaggcgatcctgcatgtgtactgggaagagttccagaaggaccctgtgggcctgatgagccgggtggcccagcctgccagcaagaagatcgatcagaacaagctgaaacctgagatggacgagaagggcaacctgaccaccgccggctttgcctgctctcagtgtggccagcccctgttcgtgtacaagctggagcaggtgtctgagaagggcaaggcttacaccaactacttcggacggtgcaatgtggccgagcacgaaaagctgatcctgctggcccagctgaagcccgagaaggatagcgacgaagccgtgacatatagcctgggaaagtttgggcagagggccctggatttctacagcattcatgtgaccaaggagtccacccaccccgtgaagcccctggcccagatcgccggaaacagatacgcctccggacctgtgggaaaggccctgagcgacgcatgtatgggcacaatcgcctccttcctgtctaagtaccaggacatcatcatcgaacaccagaaggtggtgaagggcaaccagaagagactggagagcctgcgggagctggccggcaaggaaaacctggaataccctagcgtgaccctgccacctcagcctcacaccaaggagggcgttgatgcctacaacgaagtgatcgcccgggtgcgaatgtgggtgaacctgaacctgtggcagaagctgaagctaagcagagatgatgccaagcctctgctgagactgaagggattcccttcctttcctctggtcgagagacaggccaacgaagtggactggtgggacatggtgtgtaacgtgaagaagctgatcaacgagaaaaaggaggatggcaaggtgttttggcagaatctggctggctacaagagacaggaagccctgagaccatacctgagcagcgaggaagatcggaagaagggaaagaaattcgctcggtaccagctgggcgacctgctgctgcacctggaaaagaagcacggcgaggactggggaaaggtgtacgacgaggcctgggagcggattgacaagaaagtggaaggcctgagcaagcacatcaagctggaagaggaacggagaagcgaggacgcccagagcaaggccgccctgaccgactggctgcgggctaaggccagcttcgtgatcgagggcctgaaggaggccgacaaggacgagttctgcagatgcgagctgaagctgcagaagtggtacggggacctgcggggaaagcccttcgccatcgaagccgagaacagcatcctggacatcagcggcttcagcaagcagtacaactgtgccttcatctggcagaaggacggcgtgaagaagctgaacctgtacctgatcatcaactacttcaagggcggcaagctgcggttcaagaagatcaaacctgaagccttcgaagccaacagattctacaccgtgatcaacaaaaagagcggcgagatcgtgcccatggaggtgaacttcaacttcgacgaccccaacctgatcatcctgcctctggcctttggcaagagacagggcagagaattcatctggaacgacctgctgtccctggaaaccggcagcctgaagctggccaacggaagagtgatcgagaagacactgtacaacagaagaacccggcaggatgagcctgccctgttcgtggccctgaccttcgagcggcgggaggtcctggactcctccaatatcaaaccaatgaacctgatcggcgtggcaagaggcgaaaacatccccgccgtgatcgccctgaccgaccccgagggctgcccactgagccggtttaaggatagcctgggaaacccaacccacatcctgagaatcggcgagagctataaggagaagcagcggaccatccaggccaagaaggaggtggagcagcggagagccggcggctacagccggaagtacgccagcaaagccaagaatctggcagacgatatggtgagaaacaccgctagagatctgctgtactacgccgtgacccaggatgccatgctgatcttcgccaacctgagccggggcttcggccggcagggcaagcggaccttcatggccgagagacagtacacacggatggaggactggctgaccgccaagctggcctacgagggcctgagcaagacctacctgtccaagacactggcccagtacacctccaagacatgcagcaactgtgggtttaccatcaccagcgccgactacgacagggtgctggagaagctgaagaagacagcaacaggctggatgaccacaattaacggcaaggagctgaaggtggagggccagattacctactacaacagatacaagagacagaacgtagtcaaggacctgtccgtcgagctggatagactgagcgaagaatctgtgaacaacgacatctcctcctggacaaagggcagaagcggagaagctctgagcctcctgaagaaaagattctcccatagacccgtgcaggagaagttcgtgtgcctgaactgcggcttcgagacacacgcagccgagcaagccgccctgaacatcgccagatcctggctgttcctgcggagccaggagtacaagaaataccagacaaacaagacaaccggcaacaccgataagagagccttcgtcgagacctggcagtccttttaccggaagaagcttaaggaggtgtggaaacctgccgtgcggtctggcggatctggcggaggctccaccagccccaagaaaaagagaaaagtctaagctgccttctgcggggcttgccttctggccatgcccttcttctctcccttgcacctgtacctcttggtctttgaataaagcctgagtaggaaggctagcaaaaaaaaaaaaaaaaaaaaaaaaaaaaaaaaaaaaaaaaaaaaaaaaaaaaaaaaaaaaaaaaaaaaaaaaaaaaaaaagcccagccggctccccaacctctaccgaggagggcacctctgagtccgccacccccgagagcggccctggcacctccaccgagcccagcgagggcagcgcacccggcagccctgccggcagccccacctccacagaggagggaaccagcaccgagcccagcgaaggcagcgccccaggcaccagcaccgagcctagtgagcaggagattaaacggatcaacaagatcagaagaagacttgtgaaagacagcaacaccaagaaggccggcaagacaggccccatgaaaaccctgctggttagagtgatgacacccgatctgagagagcggctggaaaacctgagaaagaagcctgaaaatatcccccagcccatcagcaatacatctagagccaacctgaataagctgctgaccgattacaccgaaatgaagaaggcgatcctgcatgtgtactgggaagagttccagaaggaccctgtgggcctgatgagccgggtggcccagcctgccagcaagaagatcgatcagaacaagctgaaacctgagatggacgagaagggcaacctgaccaccgccggctttgcctgctctcagtgtggccagcccctgttcgtgtacaagctggagcaggtgtctgagaagggcaaggcttacaccaactacttcggacggtgcaatgtggccgagcacgaaaagctgatcctgctggcccagctgaagcccgagaaggatagcgacgaagccgtgacatatagcctgggaaagtttgggcagagggccctggatttctacagcattcatgtgaccaaggagtccacccaccccgtgaagcccctggcccagatcgccggaaacagatacgcctccggacctgtgggaaaggccctgagcgacgcatgtatgggcacaatcgcctccttcctgtctaagtaccaggacatcatcatcgaacaccagaaggtggtgaagggcaaccagaagagactggagagcctgcgggagctggccggcaaggaaaacctggaataccctagcgtgaccctgccacctcagcctcacaccaaggagggcgttgatgcctacaacgaagtgatcgcccgggtgcgaatgtgggtgaacctgaacctgtggcagaagctgaagctaagcagagatgatgccaagcctctgctgagactgaagggattcccttcctttcctctggtcgagagacaggccaacgaagtggactggtgggacatggtgtgtaacgtgaagaagctgatcaacgagaaaaaggaggatggcaaggtgttttggcagaatctggctggctacaagagacaggaagccctgagaccatacctgagcagcgaggaagatcggaagaagggaaagaaattcgctcggtaccagctgggcgacctgctgctgcacctggaaaagaagcacggcgaggactggggaaaggtgtacgacgaggcctgggagcggattgacaagaaagtggaaggcctgagcaagcacatcaagctggaagaggaacggagaagcgaggacgcccagagcaaggccgccctgaccgactggctgcgggctaaggccagcttcgtgatcgagggcctgaaggaggccgacaaggacgagttctgcagatgcgagctgaagctgcagaagtggtacggggacctgcggggaaagcccttcgccatcgaagccgagaacagcatcctggacatcagcggcttcagcaagcagtacaactgtgccttcatctggcagaaggacggcgtgaagaagctgaacctgtacctgatcatcaactacttcaagggcggcaagctgcggttcaagaagatcaaacctgaagccttcgaagccaacagattctacaccgtgatcaacaaaaagagcggcgagatcgtgcccatggaggtgaacttcaacttcgacgaccccaacctgatcatcctgcctctggcctttggcaagagacagggcagagaattcatctggaacgacctgctgtccctggaaaccggcagcctgaagctggccaacggaagagtgatcgagaagacactgtacaacagaagaacccggcaggatgagcctgccctgttcgtggccctgaccttcgagcggcgggaggtcctggactcctccaatatcaaaccaatgaacctgatcggcgtggcaagaggcgaaaacatccccgccgtgatcgccctgaccgaccccgagggctgcccactgagccggtttaaggatagcctgggaaacccaacccacatcctgagaatcggcgagagctataaggagaagcagcggaccatccaggccaagaaggaggtggagcagcggagagccggcggctacagccggaagtacgccagcaaagccaagaatctggcagacgatatggtgagaaacaccgctagagatctgctgtactacgccgtgacccaggatgccatgctgatcttcgccaacctgagccggggcttcggccggcagggcaagcggaccttcatggccgagagacagtacacacggatggaggactggctgaccgccaagctggcctacgagggcctgagcaagacctacctgtccaagacactggcccagtacacctccaagacatgcagcaactgtgggtttaccatcaccagcgccgactacgacagggtgctggagaagctgaagaagacagcaacaggctggatgaccacaattaacggcaaggagctgaaggtggagggccagattacctactacaacagatacaagagacagaacgtagtcaaggacctgtccgtcgagctggatagactgagcgaagaatctgtgaacaacgacatctcctcctggacaaagggcagaagcggagaagctctgagcctcctgaagaaaagattctcccatagacccgtgcaggagaagttcgtgtgcctgaactgcggcttcgagacacacgcagccgagcaagccgccctgaacatcgccagatcctggctgttcctgcggagccaggagtacaagaaataccagacaaacaagacaaccggcaacaccgataagagagccttcgtcgagacctggcagtccttttaccggaagaagcttaaggaggtgtggaaacctgccgtgcggtctggcggatctggcggaggctccaccagccccaagaaaaagagaaaagtctaagctgccttctgcggggcttgccttctggccatgcccttcttctctcccttgcacctgtacctcttggtctttgaataaagcctgagtaggaaggctagcaaaaaaaaaaaaaaaaaaaaaaaaaaaaaaaaaaaaaaaaaaaaaaaaaaaaaaaaaaaaaaaaaaaaaaaaaaaaaaaa

SEQ ID NO: 10037 - RNA, 8787 nt, synthetic construct
  source 1..8787: mol_type = other RNA
aggaaataagagagaaaagaagagtaagaagaaatataagagccaccatggcccctaagaagaagcgtaaagtgagccggatgaaccacgaccaggagttcgacccccctaaggtgtaccctcccgtccccgccgagaagagaaagcccatccgggtcctgagcctgttcgatggcatcgccaccggtctgctggtgctgaaggacctgggcatccaggtggataggtacattgcctccgaggtgtgcgaggactccatcaccgtgggaatggtgcgtcatcagggcaagatcatgtacgtgggcgacgtgcggagcgtgacacagaagcatatccaggagtggggccctttcgacctggtgatcggcggcagcccttgcaatgacctgagcatcgtgaacccagcccggaagggcctgtacgagggaaccggcagactgttcttcgagttttacagactgctgcacgacgcccggcctaaggaaggcgacgaccggcccttcttttggctgttcgagaatgtggtggccatgggagtcagcgacaagcgggatattagccggttcctggagagcaaccccgtgatgatcgatgccaaggaagtgagcgccgcccaccgggccagatacttctggggcaatctgcctggcatgaacagacccctggccagcaccgtgaacgacaagctggagctgcaggagtgcctggagcacggccggatcgccaagttcagcaaggtgagaaccatcaccacccgaagcaacagcatcaaacaaggcaaggaccagcactttcctgtgttcatgaacgagaaggaggacatcctgtggtgtaccgagatggagagagtgttcgggttcccagtccactacacagatgtcagcaacatgtctagactggccagacagagactgctgggaagaagctggtccgtccctgtgatcagacacctgttcgcccctctgaaggagtacttcgcctgcgtgagcagcggcaacagcaacgccaacagccggggccccagcttctctagcggcctggtgccactgtccctgagagggagccacatgggccccatggagatctacaaaaccgtgagcgcctggaagcggcagcctgtgcgcgtgctgagcctgtttcggaatatcgataaagtcctgaaaagcctgggattcctggagagcggctctggctccggcggtggcaccctgaagtacgtggaggatgtgacaaacgtggtcagacgggatgtggagaagtggggccccttcgatctggtgtacggcagcacccaacccctgggcagctcttgtgaccggtgccctggctggtacatgtttcagttccaccggatcctgcagtacgccctgccgagacaggagtcccagcggccattcttttggattttcatggacaacttgctgctgaccgaggatgaccaggaaactaccactcggttcctgcagaccgaagccgtgaccctgcaggacgtgagaggccgggactaccagaacgccatgcgggtgtggtccaacatccctggactgaaaagcaagcacgcacctctgacccctaaagaagaggagtacctgcaggcccaggtgcggagcagaagcaagctggacgcccctaaggtggatctgctggtgaagaattgcctcctgcccctgagagagtacttcaagtatttcagccagaatagtctgcccctgggaggcagcggcggcggcaagcccgagctggtgagcttcgccgacgtggccgtgtacttcagcccccaggagtggggctgcctgaggcccgcccagagggccctgtacagggaggtgatgagggagacctacggcctgctgggcgccctgggcttccccggccccaagcccgccctgatcagctggatggagcaggagagcgaggcctggagccccgccgcccaggaccccgaggagggcgagagcctgggcggcgcccccggcggcccaagcagcggcgcccctcctcccagcggcggcaggcggcccaagcagcggcgcccctcctcccagcggcggcagcccagccggctccccaacctctaccgaggagggcacctctgagtccgccacccccgagagcggccctggcacctccaccgagcccagcgagggcagcgcacccggcagccctgccggcagccccacctccacagaggagggaaccagcaccgagcccagcgaaggcagcgccccaggcaccagcaccgagcctagtgagcaggagattaaacggatcaacaagatcagaagaagacttgtgaaagacagcaacaccaagaaggccggcaagacaggccccatgaaaaccctgctggttagagtgatgacacccgatctgagagagcggctggaaaacctgagaaagaagcctgaaaatatcccccagcccatcagcaatacatctagagccaacctgaataagctgctgaccgattacaccgaaatgaagaaggcgatcctgcatgtgtactgggaagagttccagaaggaccctgtgggcctgatgagccgggtggcccagcctgccagcaagaagatcgatcagaacaagctgaaacctgagatggacgagaagggcaacctgaccaccgccggctttgcctgctctcagtgtggccagcccctgttcgtgtacaagctggagcaggtgtctgagaagggcaaggcttacaccaactacttcggacggtgcaatgtggccgagcacgaaaagctgatcctgctggcccagctgaagcccgagaaggatagcgacgaagccgtgacatatagcctgggaaagtttgggcagagggccctggatttctacagcattcatgtgaccaaggagtccacccaccccgtgaagcccctggcccagatcgccggaaacagatacgcctccggacctgtgggaaaggccctgagcgacgcatgtatgggcacaatcgcctccttcctgtctaagtaccaggacatcatcatcgaacaccagaaggtggtgaagggcaaccagaagagactggagagcctgcgggagctggccggcaaggaaaacctggaataccctagcgtgaccctgccacctcagcctcacaccaaggagggcgttgatgcctacaacgaagtgatcgcccgggtgcgaatgtgggtgaacctgaacctgtggcagaagctgaagctaagcagagatgatgccaagcctctgctgagactgaagggattcccttcctttcctctggtcgagagacaggccaacgaagtggactggtgggacatggtgtgtaacgtgaagaagctgatcaacgagaaaaaggaggatggcaaggtgttttggcagaatctggctggctacaagagacaggaagccctgagaccatacctgagcagcgaggaagatcggaagaagggaaagaaattcgctcggtaccagctgggcgacctgctgctgcacctggaaaagaagcacggcgaggactggggaaaggtgtacgacgaggcctgggagcggattgacaagaaagtggaaggcctgagcaagcacatcaagctggaagaggaacggagaagcgaggacgcccagagcaaggccgccctgaccgactggctgcgggctaaggccagcttcgtgatcgagggcctgaaggaggccgacaaggacgagttctgcagatgcgagctgaagctgcagaagtggtacggggacctgcggggaaagcccttcgccatcgaagccgagaacagcatcctggacatcagcggcttcagcaagcagtacaactgtgccttcatctggcagaaggacggcgtgaagaagctgaacctgtacctgatcatcaactacttcaagggcggcaagctgcggttcaagaagatcaaacctgaagccttcgaagccaacagattctacaccgtgatcaacaaaaagagcggcgagatcgtgcccatggaggtgaacttcaacttcgacgaccccaacctgatcatcctgcctctggcctttggcaagagacagggcagagaattcatctggaacgacctgctgtccctggaaaccggcagcctgaagctggccaacggaagagtgatcgagaagacactgtacaacagaagaacccggcaggatgagcctgccctgttcgtggccctgaccttcgagcggcgggaggtcctggactcctccaatatcaaaccaatgaacctgatcggcgtggcaagaggcgaaaacatccccgccgtgatcgccctgaccgaccccgagggctgcccactgagccggtttaaggatagcctgggaaacccaacccacatcctgagaatcggcgagagctataaggagaagcagcggaccatccaggccaagaaggaggtggagcagcggagagccggcggctacagccggaagtacgccagcaaagccaagaatctggcagacgatatggtgagaaacaccgctagagatctgctgtactacgccgtgacccaggatgccatgctgatcttcgccaacctgagccggggcttcggccggcagggcaagcggaccttcatggccgagagacagtacacacggatggaggactggctgaccgccaagctggcctacgagggcctgagcaagacctacctgtccaagacactggcccagtacacctccaagacatgcagcaactgtgggtttaccatcaccagcgccgactacgacagggtgctggagaagctgaagaagacagcaacaggctggatgaccacaattaacggcaaggagctgaaggtggagggccagattacctactacaacagatacaagagacagaacgtagtcaaggacctgtccgtcgagctggatagactgagcgaagaatctgtgaacaacgacatctcctcctggacaaagggcagaagcggagaagctctgagcctcctgaagaaaagattctcccatagacccgtgcaggagaagttcgtgtgcctgaactgcggcttcgagacacacgcagccgagcaagccgccctgaacatcgccagatcctggctgttcctgcggagccaggagtacaagaaataccagacaaacaagacaaccggcaacaccgataagagagccttcgtcgagacctggcagtccttttaccggaagaagcttaaggaggtgtggaaacctgccgtgcggtctggcggatctggcggaggctccaccagccccaagaaaaagagaaaagtctaagctgccttctgcggggcttgccttctggccatgcccttcttctctcccttgcacctgtacctcttggtctttgaataaagcctgagtaggaaggctagcaaaaaaaaaaaaaaaaaaaaaaaaaaaaaaaaaaaaaaaaaaaaaaaaaaaaaaaaaaaaaaaaaaaaaaaaaaaaaaaagcccagccggctccccaacctctaccgaggagggcacctctgagtccgccacccccgagagcggccctggcacctccaccgagcccagcgagggcagcgcacccggcagccctgccggcagccccacctccacagaggagggaaccagcaccgagcccagcgaaggcagcgccccaggcaccagcaccgagcctagtgagcaggagattaaacggatcaacaagatcagaagaagacttgtgaaagacagcaacaccaagaaggccggcaagacaggccccatgaaaaccctgctggttagagtgatgacacccgatctgagagagcggctggaaaacctgagaaagaagcctgaaaatatcccccagcccatcagcaatacatctagagccaacctgaataagctgctgaccgattacaccgaaatgaagaaggcgatcctgcatgtgtactgggaagagttccagaaggaccctgtgggcctgatgagccgggtggcccagcctgccagcaagaagatcgatcagaacaagctgaaacctgagatggacgagaagggcaacctgaccaccgccggctttgcctgctctcagtgtggccagcccctgttcgtgtacaagctggagcaggtgtctgagaagggcaaggcttacaccaactacttcggacggtgcaatgtggccgagcacgaaaagctgatcctgctggcccagctgaagcccgagaaggatagcgacgaagccgtgacatatagcctgggaaagtttgggcagagggccctggatttctacagcattcatgtgaccaaggagtccacccaccccgtgaagcccctggcccagatcgccggaaacagatacgcctccggacctgtgggaaaggccctgagcgacgcatgtatgggcacaatcgcctccttcctgtctaagtaccaggacatcatcatcgaacaccagaaggtggtgaagggcaaccagaagagactggagagcctgcgggagctggccggcaaggaaaacctggaataccctagcgtgaccctgccacctcagcctcacaccaaggagggcgttgatgcctacaacgaagtgatcgcccgggtgcgaatgtgggtgaacctgaacctgtggcagaagctgaagctaagcagagatgatgccaagcctctgctgagactgaagggattcccttcctttcctctggtcgagagacaggccaacgaagtggactggtgggacatggtgtgtaacgtgaagaagctgatcaacgagaaaaaggaggatggcaaggtgttttggcagaatctggctggctacaagagacaggaagccctgagaccatacctgagcagcgaggaagatcggaagaagggaaagaaattcgctcggtaccagctgggcgacctgctgctgcacctggaaaagaagcacggcgaggactggggaaaggtgtacgacgaggcctgggagcggattgacaagaaagtggaaggcctgagcaagcacatcaagctggaagaggaacggagaagcgaggacgcccagagcaaggccgccctgaccgactggctgcgggctaaggccagcttcgtgatcgagggcctgaaggaggccgacaaggacgagttctgcagatgcgagctgaagctgcagaagtggtacggggacctgcggggaaagcccttcgccatcgaagccgagaacagcatcctggacatcagcggcttcagcaagcagtacaactgtgccttcatctggcagaaggacggcgtgaagaagctgaacctgtacctgatcatcaactacttcaagggcggcaagctgcggttcaagaagatcaaacctgaagccttcgaagccaacagattctacaccgtgatcaacaaaaagagcggcgagatcgtgcccatggaggtgaacttcaacttcgacgaccccaacctgatcatcctgcctctggcctttggcaagagacagggcagagaattcatctggaacgacctgctgtccctggaaaccggcagcctgaagctggccaacggaagagtgatcgagaagacactgtacaacagaagaacccggcaggatgagcctgccctgttcgtggccctgaccttcgagcggcgggaggtcctggactcctccaatatcaaaccaatgaacctgatcggcgtggcaagaggcgaaaacatccccgccgtgatcgccctgaccgaccccgagggctgcccactgagccggtttaaggatagcctgggaaacccaacccacatcctgagaatcggcgagagctataaggagaagcagcggaccatccaggccaagaaggaggtggagcagcggagagccggcggctacagccggaagtacgccagcaaagccaagaatctggcagacgatatggtgagaaacaccgctagagatctgctgtactacgccgtgacccaggatgccatgctgatcttcgccaacctgagccggggcttcggccggcagggcaagcggaccttcatggccgagagacagtacacacggatggaggactggctgaccgccaagctggcctacgagggcctgagcaagacctacctgtccaagacactggcccagtacacctccaagacatgcagcaactgtgggtttaccatcaccagcgccgactacgacagggtgctggagaagctgaagaagacagcaacaggctggatgaccacaattaacggcaaggagctgaaggtggagggccagattacctactacaacagatacaagagacagaacgtagtcaaggacctgtccgtcgagctggatagactgagcgaagaatctgtgaacaacgacatctcctcctggacaaagggcagaagcggagaagctctgagcctcctgaagaaaagattctcccatagacccgtgcaggagaagttcgtgtgcctgaactgcggcttcgagacacacgcagccgagcaagccgccctgaacatcgccagatcctggctgttcctgcggagccaggagtacaagaaataccagacaaacaagacaaccggcaacaccgataagagagccttcgtcgagacctggcagtccttttaccggaagaagcttaaggaggtgtggaaacctgccgtgcggtctggcggatctggcggaggctccaccagccccaagaaaaagagaaaagtctaagctgccttctgcggggcttgccttctggccatgcccttcttctctcccttgcacctgtacctcttggtctttgaataaagcctgagtaggaaggctagcaaaaaaaaaaaaaaaaaaaaaaaaaaaaaaaaaaaaaaaaaaaaaaaaaaaaaaaaaaaaaaaaaaaaaaaaaaaaaaaa

SEQ ID NO: 10038 - RNA, 8787 nt, synthetic construct
  source 1..8787: mol_type = other RNA
aggaaataagagagaaaagaagagtaagaagaaatataagagccaccatggcccctaagaagaagcgtaaagtgagccggatgaaccacgaccaggagttcgacccccctaaggtgtaccctcccgtccccgccgagaagagaaagcccatccgggtcctgagcctgttcgatggcatcgccaccggtctgctggtgctgaaggacctgggcatccaggtggataggtacattgcctccgaggtgtgcgaggactccatcaccgtgggaatggtgcgtcatcagggcaagatcatgtacgtgggcgacgtgcggagcgtgacacagaagcatatccaggagtggggccctttcgacctggtgatcggcggcagcccttgcaatgacctgagcatcgtgaacccagcccggaagggcctgtacgagggaaccggcagactgttcttcgagttttacagactgctgcacgacgcccggcctaaggaaggcgacgaccggcccttcttttggctgttcgagaatgtggtggccatgggagtcagcgacaagcgggatattagccggttcctggagagcaaccccgtgatgatcgatgccaaggaagtgagcgccgcccaccgggccagatacttctggggcaatctgcctggcatgaacagacccctggccagcaccgtgaacgacaagctggagctgcaggagtgcctggagcacggccggatcgccaagttcagcaaggtgagaaccatcaccacccgaagcaacagcatcaaacaaggcaaggaccagcactttcctgtgttcatgaacgagaaggaggacatcctgtggtgtaccgagatggagagagtgttcgggttcccagtccactacacagatgtcagcaacatgtctagactggccagacagagactgctgggaagaagctggtccgtccctgtgatcagacacctgttcgcccctctgaaggagtacttcgcctgcgtgagcagcggcaacagcaacgccaacagccggggccccagcttctctagcggcctggtgccactgtccctgagagggagccacatgggccccatggagatctacaaaaccgtgagcgcctggaagcggcagcctgtgcgcgtgctgagcctgtttcggaatatcgataaagtcctgaaaagcctgggattcctggagagcggctctggctccggcggtggcaccctgaagtacgtggaggatgtgacaaacgtggtcagacgggatgtggagaagtggggccccttcgatctggtgtacggcagcacccaacccctgggcagctcttgtgaccggtgccctggctggtacatgtttcagttccaccggatcctgcagtacgccctgccgagacaggagtcccagcggccattcttttggattttcatggacaacttgctgctgaccgaggatgaccaggaaactaccactcggttcctgcagaccgaagccgtgaccctgcaggacgtgagaggccgggactaccagaacgccatgcgggtgtggtccaacatccctggactgaaaagcaagcacgcacctctgacccctaaagaagaggagtacctgcaggcccaggtgcggagcagaagcaagctggacgcccctaaggtggatctgctggtgaagaattgcctcctgcccctgagagagtacttcaagtatttcagccagaatagtctgcccctgggaggcagcggcggcggcatccagggccaggtgaacttcgaggacgtgttcgtgtacttcagccaggaggagtgggtgctgctggacgaggcccagaggctgctgtacagggacgtgatgctggagaacttcgccctgatggccagcctgggccacaccagcttcaccagccacaccgtggccagcctggtgatgggccccgactgggtggacgtgacccccgccgtggccaccggcaccctgagcggcagcggccccggcggcggcccaagcagcggcgcccctcctcccagcggcggcaggcggcccaagcagcggcgcccctcctcccagcggcggcagcccagccggctccccaacctctaccgaggagggcacctctgagtccgccacccccgagagcggccctggcacctccaccgagcccagcgagggcagcgcacccggcagccctgccggcagccccacctccacagaggagggaaccagcaccgagcccagcgaaggcagcgccccaggcaccagcaccgagcctagtgagcaggagattaaacggatcaacaagatcagaagaagacttgtgaaagacagcaacaccaagaaggccggcaagacaggccccatgaaaaccctgctggttagagtgatgacacccgatctgagagagcggctggaaaacctgagaaagaagcctgaaaatatcccccagcccatcagcaatacatctagagccaacctgaataagctgctgaccgattacaccgaaatgaagaaggcgatcctgcatgtgtactgggaagagttccagaaggaccctgtgggcctgatgagccgggtggcccagcctgccagcaagaagatcgatcagaacaagctgaaacctgagatggacgagaagggcaacctgaccaccgccggctttgcctgctctcagtgtggccagcccctgttcgtgtacaagctggagcaggtgtctgagaagggcaaggcttacaccaactacttcggacggtgcaatgtggccgagcacgaaaagctgatcctgctggcccagctgaagcccgagaaggatagcgacgaagccgtgacatatagcctgggaaagtttgggcagagggccctggatttctacagcattcatgtgaccaaggagtccacccaccccgtgaagcccctggcccagatcgccggaaacagatacgcctccggacctgtgggaaaggccctgagcgacgcatgtatgggcacaatcgcctccttcctgtctaagtaccaggacatcatcatcgaacaccagaaggtggtgaagggcaaccagaagagactggagagcctgcgggagctggccggcaaggaaaacctggaataccctagcgtgaccctgccacctcagcctcacaccaaggagggcgttgatgcctacaacgaagtgatcgcccgggtgcgaatgtgggtgaacctgaacctgtggcagaagctgaagctaagcagagatgatgccaagcctctgctgagactgaagggattcccttcctttcctctggtcgagagacaggccaacgaagtggactggtgggacatggtgtgtaacgtgaagaagctgatcaacgagaaaaaggaggatggcaaggtgttttggcagaatctggctggctacaagagacaggaagccctgagaccatacctgagcagcgaggaagatcggaagaagggaaagaaattcgctcggtaccagctgggcgacctgctgctgcacctggaaaagaagcacggcgaggactggggaaaggtgtacgacgaggcctgggagcggattgacaagaaagtggaaggcctgagcaagcacatcaagctggaagaggaacggagaagcgaggacgcccagagcaaggccgccctgaccgactggctgcgggctaaggccagcttcgtgatcgagggcctgaaggaggccgacaaggacgagttctgcagatgcgagctgaagctgcagaagtggtacggggacctgcggggaaagcccttcgccatcgaagccgagaacagcatcctggacatcagcggcttcagcaagcagtacaactgtgccttcatctggcagaaggacggcgtgaagaagctgaacctgtacctgatcatcaactacttcaagggcggcaagctgcggttcaagaagatcaaacctgaagccttcgaagccaacagattctacaccgtgatcaacaaaaagagcggcgagatcgtgcccatggaggtgaacttcaacttcgacgaccccaacctgatcatcctgcctctggcctttggcaagagacagggcagagaattcatctggaacgacctgctgtccctggaaaccggcagcctgaagctggccaacggaagagtgatcgagaagacactgtacaacagaagaacccggcaggatgagcctgccctgttcgtggccctgaccttcgagcggcgggaggtcctggactcctccaatatcaaaccaatgaacctgatcggcgtggcaagaggcgaaaacatccccgccgtgatcgccctgaccgaccccgagggctgcccactgagccggtttaaggatagcctgggaaacccaacccacatcctgagaatcggcgagagctataaggagaagcagcggaccatccaggccaagaaggaggtggagcagcggagagccggcggctacagccggaagtacgccagcaaagccaagaatctggcagacgatatggtgagaaacaccgctagagatctgctgtactacgccgtgacccaggatgccatgctgatcttcgccaacctgagccggggcttcggccggcagggcaagcggaccttcatggccgagagacagtacacacggatggaggactggctgaccgccaagctggcctacgagggcctgagcaagacctacctgtccaagacactggcccagtacacctccaagacatgcagcaactgtgggtttaccatcaccagcgccgactacgacagggtgctggagaagctgaagaagacagcaacaggctggatgaccacaattaacggcaaggagctgaaggtggagggccagattacctactacaacagatacaagagacagaacgtagtcaaggacctgtccgtcgagctggatagactgagcgaagaatctgtgaacaacgacatctcctcctggacaaagggcagaagcggagaagctctgagcctcctgaagaaaagattctcccatagacccgtgcaggagaagttcgtgtgcctgaactgcggcttcgagacacacgcagccgagcaagccgccctgaacatcgccagatcctggctgttcctgcggagccaggagtacaagaaataccagacaaacaagacaaccggcaacaccgataagagagccttcgtcgagacctggcagtccttttaccggaagaagcttaaggaggtgtggaaacctgccgtgcggtctggcggatctggcggaggctccaccagccccaagaaaaagagaaaagtctaagctgccttctgcggggcttgccttctggccatgcccttcttctctcccttgcacctgtacctcttggtctttgaataaagcctgagtaggaaggctagcaaaaaaaaaaaaaaaaaaaaaaaaaaaaaaaaaaaaaaaaaaaaaaaaaaaaaaaaaaaaaaaaaaaaaaaaaaaaaaaagcccagccggctccccaacctctaccgaggagggcacctctgagtccgccacccccgagagcggccctggcacctccaccgagcccagcgagggcagcgcacccggcagccctgccggcagccccacctccacagaggagggaaccagcaccgagcccagcgaaggcagcgccccaggcaccagcaccgagcctagtgagcaggagattaaacggatcaacaagatcagaagaagacttgtgaaagacagcaacaccaagaaggccggcaagacaggccccatgaaaaccctgctggttagagtgatgacacccgatctgagagagcggctggaaaacctgagaaagaagcctgaaaatatcccccagcccatcagcaatacatctagagccaacctgaataagctgctgaccgattacaccgaaatgaagaaggcgatcctgcatgtgtactgggaagagttccagaaggaccctgtgggcctgatgagccgggtggcccagcctgccagcaagaagatcgatcagaacaagctgaaacctgagatggacgagaagggcaacctgaccaccgccggctttgcctgctctcagtgtggccagcccctgttcgtgtacaagctggagcaggtgtctgagaagggcaaggcttacaccaactacttcggacggtgcaatgtggccgagcacgaaaagctgatcctgctggcccagctgaagcccgagaaggatagcgacgaagccgtgacatatagcctgggaaagtttgggcagagggccctggatttctacagcattcatgtgaccaaggagtccacccaccccgtgaagcccctggcccagatcgccggaaacagatacgcctccggacctgtgggaaaggccctgagcgacgcatgtatgggcacaatcgcctccttcctgtctaagtaccaggacatcatcatcgaacaccagaaggtggtgaagggcaaccagaagagactggagagcctgcgggagctggccggcaaggaaaacctggaataccctagcgtgaccctgccacctcagcctcacaccaaggagggcgttgatgcctacaacgaagtgatcgcccgggtgcgaatgtgggtgaacctgaacctgtggcagaagctgaagctaagcagagatgatgccaagcctctgctgagactgaagggattcccttcctttcctctggtcgagagacaggccaacgaagtggactggtgggacatggtgtgtaacgtgaagaagctgatcaacgagaaaaaggaggatggcaaggtgttttggcagaatctggctggctacaagagacaggaagccctgagaccatacctgagcagcgaggaagatcggaagaagggaaagaaattcgctcggtaccagctgggcgacctgctgctgcacctggaaaagaagcacggcgaggactggggaaaggtgtacgacgaggcctgggagcggattgacaagaaagtggaaggcctgagcaagcacatcaagctggaagaggaacggagaagcgaggacgcccagagcaaggccgccctgaccgactggctgcgggctaaggccagcttcgtgatcgagggcctgaaggaggccgacaaggacgagttctgcagatgcgagctgaagctgcagaagtggtacggggacctgcggggaaagcccttcgccatcgaagccgagaacagcatcctggacatcagcggcttcagcaagcagtacaactgtgccttcatctggcagaaggacggcgtgaagaagctgaacctgtacctgatcatcaactacttcaagggcggcaagctgcggttcaagaagatcaaacctgaagccttcgaagccaacagattctacaccgtgatcaacaaaaagagcggcgagatcgtgcccatggaggtgaacttcaacttcgacgaccccaacctgatcatcctgcctctggcctttggcaagagacagggcagagaattcatctggaacgacctgctgtccctggaaaccggcagcctgaagctggccaacggaagagtgatcgagaagacactgtacaacagaagaacccggcaggatgagcctgccctgttcgtggccctgaccttcgagcggcgggaggtcctggactcctccaatatcaaaccaatgaacctgatcggcgtggcaagaggcgaaaacatccccgccgtgatcgccctgaccgaccccgagggctgcccactgagccggtttaaggatagcctgggaaacccaacccacatcctgagaatcggcgagagctataaggagaagcagcggaccatccaggccaagaaggaggtggagcagcggagagccggcggctacagccggaagtacgccagcaaagccaagaatctggcagacgatatggtgagaaacaccgctagagatctgctgtactacgccgtgacccaggatgccatgctgatcttcgccaacctgagccggggcttcggccggcagggcaagcggaccttcatggccgagagacagtacacacggatggaggactggctgaccgccaagctggcctacgagggcctgagcaagacctacctgtccaagacactggcccagtacacctccaagacatgcagcaactgtgggtttaccatcaccagcgccgactacgacagggtgctggagaagctgaagaagacagcaacaggctggatgaccacaattaacggcaaggagctgaaggtggagggccagattacctactacaacagatacaagagacagaacgtagtcaaggacctgtccgtcgagctggatagactgagcgaagaatctgtgaacaacgacatctcctcctggacaaagggcagaagcggagaagctctgagcctcctgaagaaaagattctcccatagacccgtgcaggagaagttcgtgtgcctgaactgcggcttcgagacacacgcagccgagcaagccgccctgaacatcgccagatcctggctgttcctgcggagccaggagtacaagaaataccagacaaacaagacaaccggcaacaccgataagagagccttcgtcgagacctggcagtccttttaccggaagaagcttaaggaggtgtggaaacctgccgtgcggtctggcggatctggcggaggctccaccagccccaagaaaaagagaaaagtctaagctgccttctgcggggcttgccttctggccatgcccttcttctctcccttgcacctgtacctcttggtctttgaataaagcctgagtaggaaggctagcaaaaaaaaaaaaaaaaaaaaaaaaaaaaaaaaaaaaaaaaaaaaaaaaaaaaaaaaaaaaaaaaaaaaaaaaaaaaaaaa

SEQ ID NO: 10039 - RNA, 8787 nt, synthetic construct
  source 1..8787: mol_type = other RNA
aggaaataagagagaaaagaagagtaagaagaaatataagagccaccatggcccctaagaagaagcgtaaagtgagccggatgaaccacgaccaggagttcgacccccctaaggtgtaccctcccgtccccgccgagaagagaaagcccatccgggtcctgagcctgttcgatggcatcgccaccggtctgctggtgctgaaggacctgggcatccaggtggataggtacattgcctccgaggtgtgcgaggactccatcaccgtgggaatggtgcgtcatcagggcaagatcatgtacgtgggcgacgtgcggagcgtgacacagaagcatatccaggagtggggccctttcgacctggtgatcggcggcagcccttgcaatgacctgagcatcgtgaacccagcccggaagggcctgtacgagggaaccggcagactgttcttcgagttttacagactgctgcacgacgcccggcctaaggaaggcgacgaccggcccttcttttggctgttcgagaatgtggtggccatgggagtcagcgacaagcgggatattagccggttcctggagagcaaccccgtgatgatcgatgccaaggaagtgagcgccgcccaccgggccagatacttctggggcaatctgcctggcatgaacagacccctggccagcaccgtgaacgacaagctggagctgcaggagtgcctggagcacggccggatcgccaagttcagcaaggtgagaaccatcaccacccgaagcaacagcatcaaacaaggcaaggaccagcactttcctgtgttcatgaacgagaaggaggacatcctgtggtgtaccgagatggagagagtgttcgggttcccagtccactacacagatgtcagcaacatgtctagactggccagacagagactgctgggaagaagctggtccgtccctgtgatcagacacctgttcgcccctctgaaggagtacttcgcctgcgtgagcagcggcaacagcaacgccaacagccggggccccagcttctctagcggcctggtgccactgtccctgagagggagccacatgggccccatggagatctacaaaaccgtgagcgcctggaagcggcagcctgtgcgcgtgctgagcctgtttcggaatatcgataaagtcctgaaaagcctgggattcctggagagcggctctggctccggcggtggcaccctgaagtacgtggaggatgtgacaaacgtggtcagacgggatgtggagaagtggggccccttcgatctggtgtacggcagcacccaacccctgggcagctcttgtgaccggtgccctggctggtacatgtttcagttccaccggatcctgcagtacgccctgccgagacaggagtcccagcggccattcttttggattttcatggacaacttgctgctgaccgaggatgaccaggaaactaccactcggttcctgcagaccgaagccgtgaccctgcaggacgtgagaggccgggactaccagaacgccatgcgggtgtggtccaacatccctggactgaaaagcaagcacgcacctctgacccctaaagaagaggagtacctgcaggcccaggtgcggagcagaagcaagctggacgcccctaaggtggatctgctggtgaagaattgcctcctgcccctgagagagtacttcaagtatttcagccagaatagtctgcccctgggaggcagcggcggcggcgaggccctgcccgtggtgttcgaggacgtggccgtgtacttcaccagggaggagtggggcatgctggacaagaggcagaaggagctgtacagggacgtgatgaggatgaactacgagctgctggccagcctgggccccgccgccgccaagcccgacctgatcagcaagctggagaggaggaccgccccctggatcaaggaccccaacggccccaagctgggcaagggctgcccccccggcaagggcggcccaagcagcggcgcccctcctcccagcggcggcaggcggcccaagcagcggcgcccctcctcccagcggcggcagcccagccggctccccaacctctaccgaggagggcacctctgagtccgccacccccgagagcggccctggcacctccaccgagcccagcgagggcagcgcacccggcagccctgccggcagccccacctccacagaggagggaaccagcaccgagcccagcgaaggcagcgccccaggcaccagcaccgagcctagtgagcaggagattaaacggatcaacaagatcagaagaagacttgtgaaagacagcaacaccaagaaggccggcaagacaggccccatgaaaaccctgctggttagagtgatgacacccgatctgagagagcggctggaaaacctgagaaagaagcctgaaaatatcccccagcccatcagcaatacatctagagccaacctgaataagctgctgaccgattacaccgaaatgaagaaggcgatcctgcatgtgtactgggaagagttccagaaggaccctgtgggcctgatgagccgggtggcccagcctgccagcaagaagatcgatcagaacaagctgaaacctgagatggacgagaagggcaacctgaccaccgccggctttgcctgctctcagtgtggccagcccctgttcgtgtacaagctggagcaggtgtctgagaagggcaaggcttacaccaactacttcggacggtgcaatgtggccgagcacgaaaagctgatcctgctggcccagctgaagcccgagaaggatagcgacgaagccgtgacatatagcctgggaaagtttgggcagagggccctggatttctacagcattcatgtgaccaaggagtccacccaccccgtgaagcccctggcccagatcgccggaaacagatacgcctccggacctgtgggaaaggccctgagcgacgcatgtatgggcacaatcgcctccttcctgtctaagtaccaggacatcatcatcgaacaccagaaggtggtgaagggcaaccagaagagactggagagcctgcgggagctggccggcaaggaaaacctggaataccctagcgtgaccctgccacctcagcctcacaccaaggagggcgttgatgcctacaacgaagtgatcgcccgggtgcgaatgtgggtgaacctgaacctgtggcagaagctgaagctaagcagagatgatgccaagcctctgctgagactgaagggattcccttcctttcctctggtcgagagacaggccaacgaagtggactggtgggacatggtgtgtaacgtgaagaagctgatcaacgagaaaaaggaggatggcaaggtgttttggcagaatctggctggctacaagagacaggaagccctgagaccatacctgagcagcgaggaagatcggaagaagggaaagaaattcgctcggtaccagctgggcgacctgctgctgcacctggaaaagaagcacggcgaggactggggaaaggtgtacgacgaggcctgggagcggattgacaagaaagtggaaggcctgagcaagcacatcaagctggaagaggaacggagaagcgaggacgcccagagcaaggccgccctgaccgactggctgcgggctaaggccagcttcgtgatcgagggcctgaaggaggccgacaaggacgagttctgcagatgcgagctgaagctgcagaagtggtacggggacctgcggggaaagcccttcgccatcgaagccgagaacagcatcctggacatcagcggcttcagcaagcagtacaactgtgccttcatctggcagaaggacggcgtgaagaagctgaacctgtacctgatcatcaactacttcaagggcggcaagctgcggttcaagaagatcaaacctgaagccttcgaagccaacagattctacaccgtgatcaacaaaaagagcggcgagatcgtgcccatggaggtgaacttcaacttcgacgaccccaacctgatcatcctgcctctggcctttggcaagagacagggcagagaattcatctggaacgacctgctgtccctggaaaccggcagcctgaagctggccaacggaagagtgatcgagaagacactgtacaacagaagaacccggcaggatgagcctgccctgttcgtggccctgaccttcgagcggcgggaggtcctggactcctccaatatcaaaccaatgaacctgatcggcgtggcaagaggcgaaaacatccccgccgtgatcgccctgaccgaccccgagggctgcccactgagccggtttaaggatagcctgggaaacccaacccacatcctgagaatcggcgagagctataaggagaagcagcggaccatccaggccaagaaggaggtggagcagcggagagccggcggctacagccggaagtacgccagcaaagccaagaatctggcagacgatatggtgagaaacaccgctagagatctgctgtactacgccgtgacccaggatgccatgctgatcttcgccaacctgagccggggcttcggccggcagggcaagcggaccttcatggccgagagacagtacacacggatggaggactggctgaccgccaagctggcctacgagggcctgagcaagacctacctgtccaagacactggcccagtacacctccaagacatgcagcaactgtgggtttaccatcaccagcgccgactacgacagggtgctggagaagctgaagaagacagcaacaggctggatgaccacaattaacggcaaggagctgaaggtggagggccagattacctactacaacagatacaagagacagaacgtagtcaaggacctgtccgtcgagctggatagactgagcgaagaatctgtgaacaacgacatctcctcctggacaaagggcagaagcggagaagctctgagcctcctgaagaaaagattctcccatagacccgtgcaggagaagttcgtgtgcctgaactgcggcttcgagacacacgcagccgagcaagccgccctgaacatcgccagatcctggctgttcctgcggagccaggagtacaagaaataccagacaaacaagacaaccggcaacaccgataagagagccttcgtcgagacctggcagtccttttaccggaagaagcttaaggaggtgtggaaacctgccgtgcggtctggcggatctggcggaggctccaccagccccaagaaaaagagaaaagtctaagctgccttctgcggggcttgccttctggccatgcccttcttctctcccttgcacctgtacctcttggtctttgaataaagcctgagtaggaaggctagcaaaaaaaaaaaaaaaaaaaaaaaaaaaaaaaaaaaaaaaaaaaaaaaaaaaaaaaaaaaaaaaaaaaaaaaaaaaaaaaagcccagccggctccccaacctctaccgaggagggcacctctgagtccgccacccccgagagcggccctggcacctccaccgagcccagcgagggcagcgcacccggcagccctgccggcagccccacctccacagaggagggaaccagcaccgagcccagcgaaggcagcgccccaggcaccagcaccgagcctagtgagcaggagattaaacggatcaacaagatcagaagaagacttgtgaaagacagcaacaccaagaaggccggcaagacaggccccatgaaaaccctgctggttagagtgatgacacccgatctgagagagcggctggaaaacctgagaaagaagcctgaaaatatcccccagcccatcagcaatacatctagagccaacctgaataagctgctgaccgattacaccgaaatgaagaaggcgatcctgcatgtgtactgggaagagttccagaaggaccctgtgggcctgatgagccgggtggcccagcctgccagcaagaagatcgatcagaacaagctgaaacctgagatggacgagaagggcaacctgaccaccgccggctttgcctgctctcagtgtggccagcccctgttcgtgtacaagctggagcaggtgtctgagaagggcaaggcttacaccaactacttcggacggtgcaatgtggccgagcacgaaaagctgatcctgctggcccagctgaagcccgagaaggatagcgacgaagccgtgacatatagcctgggaaagtttgggcagagggccctggatttctacagcattcatgtgaccaaggagtccacccaccccgtgaagcccctggcccagatcgccggaaacagatacgcctccggacctgtgggaaaggccctgagcgacgcatgtatgggcacaatcgcctccttcctgtctaagtaccaggacatcatcatcgaacaccagaaggtggtgaagggcaaccagaagagactggagagcctgcgggagctggccggcaaggaaaacctggaataccctagcgtgaccctgccacctcagcctcacaccaaggagggcgttgatgcctacaacgaagtgatcgcccgggtgcgaatgtgggtgaacctgaacctgtggcagaagctgaagctaagcagagatgatgccaagcctctgctgagactgaagggattcccttcctttcctctggtcgagagacaggccaacgaagtggactggtgggacatggtgtgtaacgtgaagaagctgatcaacgagaaaaaggaggatggcaaggtgttttggcagaatctggctggctacaagagacaggaagccctgagaccatacctgagcagcgaggaagatcggaagaagggaaagaaattcgctcggtaccagctgggcgacctgctgctgcacctggaaaagaagcacggcgaggactggggaaaggtgtacgacgaggcctgggagcggattgacaagaaagtggaaggcctgagcaagcacatcaagctggaagaggaacggagaagcgaggacgcccagagcaaggccgccctgaccgactggctgcgggctaaggccagcttcgtgatcgagggcctgaaggaggccgacaaggacgagttctgcagatgcgagctgaagctgcagaagtggtacggggacctgcggggaaagcccttcgccatcgaagccgagaacagcatcctggacatcagcggcttcagcaagcagtacaactgtgccttcatctggcagaaggacggcgtgaagaagctgaacctgtacctgatcatcaactacttcaagggcggcaagctgcggttcaagaagatcaaacctgaagccttcgaagccaacagattctacaccgtgatcaacaaaaagagcggcgagatcgtgcccatggaggtgaacttcaacttcgacgaccccaacctgatcatcctgcctctggcctttggcaagagacagggcagagaattcatctggaacgacctgctgtccctggaaaccggcagcctgaagctggccaacggaagagtgatcgagaagacactgtacaacagaagaacccggcaggatgagcctgccctgttcgtggccctgaccttcgagcggcgggaggtcctggactcctccaatatcaaaccaatgaacctgatcggcgtggcaagaggcgaaaacatccccgccgtgatcgccctgaccgaccccgagggctgcccactgagccggtttaaggatagcctgggaaacccaacccacatcctgagaatcggcgagagctataaggagaagcagcggaccatccaggccaagaaggaggtggagcagcggagagccggcggctacagccggaagtacgccagcaaagccaagaatctggcagacgatatggtgagaaacaccgctagagatctgctgtactacgccgtgacccaggatgccatgctgatcttcgccaacctgagccggggcttcggccggcagggcaagcggaccttcatggccgagagacagtacacacggatggaggactggctgaccgccaagctggcctacgagggcctgagcaagacctacctgtccaagacactggcccagtacacctccaagacatgcagcaactgtgggtttaccatcaccagcgccgactacgacagggtgctggagaagctgaagaagacagcaacaggctggatgaccacaattaacggcaaggagctgaaggtggagggccagattacctactacaacagatacaagagacagaacgtagtcaaggacctgtccgtcgagctggatagactgagcgaagaatctgtgaacaacgacatctcctcctggacaaagggcagaagcggagaagctctgagcctcctgaagaaaagattctcccatagacccgtgcaggagaagttcgtgtgcctgaactgcggcttcgagacacacgcagccgagcaagccgccctgaacatcgccagatcctggctgttcctgcggagccaggagtacaagaaataccagacaaacaagacaaccggcaacaccgataagagagccttcgtcgagacctggcagtccttttaccggaagaagcttaaggaggtgtggaaacctgccgtgcggtctggcggatctggcggaggctccaccagccccaagaaaaagagaaaagtctaagctgccttctgcggggcttgccttctggccatgcccttcttctctcccttgcacctgtacctcttggtctttgaataaagcctgagtaggaaggctagcaaaaaaaaaaaaaaaaaaaaaaaaaaaaaaaaaaaaaaaaaaaaaaaaaaaaaaaaaaaaaaaaaaaaaaaaaaaaaaaa

SEQ ID NO: 10040 - RNA, 8787 nt, synthetic construct
  source 1..8787: mol_type = other RNA
aggaaataagagagaaaagaagagtaagaagaaatataagagccaccatggcccctaagaagaagcgtaaagtgagccggatgaaccacgaccaggagttcgacccccctaaggtgtaccctcccgtccccgccgagaagagaaagcccatccgggtcctgagcctgttcgatggcatcgccaccggtctgctggtgctgaaggacctgggcatccaggtggataggtacattgcctccgaggtgtgcgaggactccatcaccgtgggaatggtgcgtcatcagggcaagatcatgtacgtgggcgacgtgcggagcgtgacacagaagcatatccaggagtggggccctttcgacctggtgatcggcggcagcccttgcaatgacctgagcatcgtgaacccagcccggaagggcctgtacgagggaaccggcagactgttcttcgagttttacagactgctgcacgacgcccggcctaaggaaggcgacgaccggcccttcttttggctgttcgagaatgtggtggccatgggagtcagcgacaagcgggatattagccggttcctggagagcaaccccgtgatgatcgatgccaaggaagtgagcgccgcccaccgggccagatacttctggggcaatctgcctggcatgaacagacccctggccagcaccgtgaacgacaagctggagctgcaggagtgcctggagcacggccggatcgccaagttcagcaaggtgagaaccatcaccacccgaagcaacagcatcaaacaaggcaaggaccagcactttcctgtgttcatgaacgagaaggaggacatcctgtggtgtaccgagatggagagagtgttcgggttcccagtccactacacagatgtcagcaacatgtctagactggccagacagagactgctgggaagaagctggtccgtccctgtgatcagacacctgttcgcccctctgaaggagtacttcgcctgcgtgagcagcggcaacagcaacgccaacagccggggccccagcttctctagcggcctggtgccactgtccctgagagggagccacatgggccccatggagatctacaaaaccgtgagcgcctggaagcggcagcctgtgcgcgtgctgagcctgtttcggaatatcgataaagtcctgaaaagcctgggattcctggagagcggctctggctccggcggtggcaccctgaagtacgtggaggatgtgacaaacgtggtcagacgggatgtggagaagtggggccccttcgatctggtgtacggcagcacccaacccctgggcagctcttgtgaccggtgccctggctggtacatgtttcagttccaccggatcctgcagtacgccctgccgagacaggagtcccagcggccattcttttggattttcatggacaacttgctgctgaccgaggatgaccaggaaactaccactcggttcctgcagaccgaagccgtgaccctgcaggacgtgagaggccgggactaccagaacgccatgcgggtgtggtccaacatccctggactgaaaagcaagcacgcacctctgacccctaaagaagaggagtacctgcaggcccaggtgcggagcagaagcaagctggacgcccctaaggtggatctgctggtgaagaattgcctcctgcccctgagagagtacttcaagtatttcagccagaatagtctgcccctgggaggcagcggcggcggcaagcaggtgagcatcagcttcgaggacgtgaccgtggacttcagcagggaggagtggcagcacctggaccccgcccagaggtgcctgtacagggacgtgaccctggagaactacagccacctgctgagcgtgggctaccaggtgcccaagcccgagatcatcttccagctggagcagggcgagggcccctggatgctggagagggagaccccccaccagagctgcagcgacgaggacatcggcggcggcccaagcagcggcgcccctcctcccagcggcggcaggcggcccaagcagcggcgcccctcctcccagcggcggcagcccagccggctccccaacctctaccgaggagggcacctctgagtccgccacccccgagagcggccctggcacctccaccgagcccagcgagggcagcgcacccggcagccctgccggcagccccacctccacagaggagggaaccagcaccgagcccagcgaaggcagcgccccaggcaccagcaccgagcctagtgagcaggagattaaacggatcaacaagatcagaagaagacttgtgaaagacagcaacaccaagaaggccggcaagacaggccccatgaaaaccctgctggttagagtgatgacacccgatctgagagagcggctggaaaacctgagaaagaagcctgaaaatatcccccagcccatcagcaatacatctagagccaacctgaataagctgctgaccgattacaccgaaatgaagaaggcgatcctgcatgtgtactgggaagagttccagaaggaccctgtgggcctgatgagccgggtggcccagcctgccagcaagaagatcgatcagaacaagctgaaacctgagatggacgagaagggcaacctgaccaccgccggctttgcctgctctcagtgtggccagcccctgttcgtgtacaagctggagcaggtgtctgagaagggcaaggcttacaccaactacttcggacggtgcaatgtggccgagcacgaaaagctgatcctgctggcccagctgaagcccgagaaggatagcgacgaagccgtgacatatagcctgggaaagtttgggcagagggccctggatttctacagcattcatgtgaccaaggagtccacccaccccgtgaagcccctggcccagatcgccggaaacagatacgcctccggacctgtgggaaaggccctgagcgacgcatgtatgggcacaatcgcctccttcctgtctaagtaccaggacatcatcatcgaacaccagaaggtggtgaagggcaaccagaagagactggagagcctgcgggagctggccggcaaggaaaacctggaataccctagcgtgaccctgccacctcagcctcacaccaaggagggcgttgatgcctacaacgaagtgatcgcccgggtgcgaatgtgggtgaacctgaacctgtggcagaagctgaagctaagcagagatgatgccaagcctctgctgagactgaagggattcccttcctttcctctggtcgagagacaggccaacgaagtggactggtgggacatggtgtgtaacgtgaagaagctgatcaacgagaaaaaggaggatggcaaggtgttttggcagaatctggctggctacaagagacaggaagccctgagaccatacctgagcagcgaggaagatcggaagaagggaaagaaattcgctcggtaccagctgggcgacctgctgctgcacctggaaaagaagcacggcgaggactggggaaaggtgtacgacgaggcctgggagcggattgacaagaaagtggaaggcctgagcaagcacatcaagctggaagaggaacggagaagcgaggacgcccagagcaaggccgccctgaccgactggctgcgggctaaggccagcttcgtgatcgagggcctgaaggaggccgacaaggacgagttctgcagatgcgagctgaagctgcagaagtggtacggggacctgcggggaaagcccttcgccatcgaagccgagaacagcatcctggacatcagcggcttcagcaagcagtacaactgtgccttcatctggcagaaggacggcgtgaagaagctgaacctgtacctgatcatcaactacttcaagggcggcaagctgcggttcaagaagatcaaacctgaagccttcgaagccaacagattctacaccgtgatcaacaaaaagagcggcgagatcgtgcccatggaggtgaacttcaacttcgacgaccccaacctgatcatcctgcctctggcctttggcaagagacagggcagagaattcatctggaacgacctgctgtccctggaaaccggcagcctgaagctggccaacggaagagtgatcgagaagacactgtacaacagaagaacccggcaggatgagcctgccctgttcgtggccctgaccttcgagcggcgggaggtcctggactcctccaatatcaaaccaatgaacctgatcggcgtggcaagaggcgaaaacatccccgccgtgatcgccctgaccgaccccgagggctgcccactgagccggtttaaggatagcctgggaaacccaacccacatcctgagaatcggcgagagctataaggagaagcagcggaccatccaggccaagaaggaggtggagcagcggagagccggcggctacagccggaagtacgccagcaaagccaagaatctggcagacgatatggtgagaaacaccgctagagatctgctgtactacgccgtgacccaggatgccatgctgatcttcgccaacctgagccggggcttcggccggcagggcaagcggaccttcatggccgagagacagtacacacggatggaggactggctgaccgccaagctggcctacgagggcctgagcaagacctacctgtccaagacactggcccagtacacctccaagacatgcagcaactgtgggtttaccatcaccagcgccgactacgacagggtgctggagaagctgaagaagacagcaacaggctggatgaccacaattaacggcaaggagctgaaggtggagggccagattacctactacaacagatacaagagacagaacgtagtcaaggacctgtccgtcgagctggatagactgagcgaagaatctgtgaacaacgacatctcctcctggacaaagggcagaagcggagaagctctgagcctcctgaagaaaagattctcccatagacccgtgcaggagaagttcgtgtgcctgaactgcggcttcgagacacacgcagccgagcaagccgccctgaacatcgccagatcctggctgttcctgcggagccaggagtacaagaaataccagacaaacaagacaaccggcaacaccgataagagagccttcgtcgagacctggcagtccttttaccggaagaagcttaaggaggtgtggaaacctgccgtgcggtctggcggatctggcggaggctccaccagccccaagaaaaagagaaaagtctaagctgccttctgcggggcttgccttctggccatgcccttcttctctcccttgcacctgtacctcttggtctttgaataaagcctgagtaggaaggctagcaaaaaaaaaaaaaaaaaaaaaaaaaaaaaaaaaaaaaaaaaaaaaaaaaaaaaaaaaaaaaaaaaaaaaaaaaaaaaaaagcccagccggctccccaacctctaccgaggagggcacctctgagtccgccacccccgagagcggccctggcacctccaccgagcccagcgagggcagcgcacccggcagccctgccggcagccccacctccacagaggagggaaccagcaccgagcccagcgaaggcagcgccccaggcaccagcaccgagcctagtgagcaggagattaaacggatcaacaagatcagaagaagacttgtgaaagacagcaacaccaagaaggccggcaagacaggccccatgaaaaccctgctggttagagtgatgacacccgatctgagagagcggctggaaaacctgagaaagaagcctgaaaatatcccccagcccatcagcaatacatctagagccaacctgaataagctgctgaccgattacaccgaaatgaagaaggcgatcctgcatgtgtactgggaagagttccagaaggaccctgtgggcctgatgagccgggtggcccagcctgccagcaagaagatcgatcagaacaagctgaaacctgagatggacgagaagggcaacctgaccaccgccggctttgcctgctctcagtgtggccagcccctgttcgtgtacaagctggagcaggtgtctgagaagggcaaggcttacaccaactacttcggacggtgcaatgtggccgagcacgaaaagctgatcctgctggcccagctgaagcccgagaaggatagcgacgaagccgtgacatatagcctgggaaagtttgggcagagggccctggatttctacagcattcatgtgaccaaggagtccacccaccccgtgaagcccctggcccagatcgccggaaacagatacgcctccggacctgtgggaaaggccctgagcgacgcatgtatgggcacaatcgcctccttcctgtctaagtaccaggacatcatcatcgaacaccagaaggtggtgaagggcaaccagaagagactggagagcctgcgggagctggccggcaaggaaaacctggaataccctagcgtgaccctgccacctcagcctcacaccaaggagggcgttgatgcctacaacgaagtgatcgcccgggtgcgaatgtgggtgaacctgaacctgtggcagaagctgaagctaagcagagatgatgccaagcctctgctgagactgaagggattcccttcctttcctctggtcgagagacaggccaacgaagtggactggtgggacatggtgtgtaacgtgaagaagctgatcaacgagaaaaaggaggatggcaaggtgttttggcagaatctggctggctacaagagacaggaagccctgagaccatacctgagcagcgaggaagatcggaagaagggaaagaaattcgctcggtaccagctgggcgacctgctgctgcacctggaaaagaagcacggcgaggactggggaaaggtgtacgacgaggcctgggagcggattgacaagaaagtggaaggcctgagcaagcacatcaagctggaagaggaacggagaagcgaggacgcccagagcaaggccgccctgaccgactggctgcgggctaaggccagcttcgtgatcgagggcctgaaggaggccgacaaggacgagttctgcagatgcgagctgaagctgcagaagtggtacggggacctgcggggaaagcccttcgccatcgaagccgagaacagcatcctggacatcagcggcttcagcaagcagtacaactgtgccttcatctggcagaaggacggcgtgaagaagctgaacctgtacctgatcatcaactacttcaagggcggcaagctgcggttcaagaagatcaaacctgaagccttcgaagccaacagattctacaccgtgatcaacaaaaagagcggcgagatcgtgcccatggaggtgaacttcaacttcgacgaccccaacctgatcatcctgcctctggcctttggcaagagacagggcagagaattcatctggaacgacctgctgtccctggaaaccggcagcctgaagctggccaacggaagagtgatcgagaagacactgtacaacagaagaacccggcaggatgagcctgccctgttcgtggccctgaccttcgagcggcgggaggtcctggactcctccaatatcaaaccaatgaacctgatcggcgtggcaagaggcgaaaacatccccgccgtgatcgccctgaccgaccccgagggctgcccactgagccggtttaaggatagcctgggaaacccaacccacatcctgagaatcggcgagagctataaggagaagcagcggaccatccaggccaagaaggaggtggagcagcggagagccggcggctacagccggaagtacgccagcaaagccaagaatctggcagacgatatggtgagaaacaccgctagagatctgctgtactacgccgtgacccaggatgccatgctgatcttcgccaacctgagccggggcttcggccggcagggcaagcggaccttcatggccgagagacagtacacacggatggaggactggctgaccgccaagctggcctacgagggcctgagcaagacctacctgtccaagacactggcccagtacacctccaagacatgcagcaactgtgggtttaccatcaccagcgccgactacgacagggtgctggagaagctgaagaagacagcaacaggctggatgaccacaattaacggcaaggagctgaaggtggagggccagattacctactacaacagatacaagagacagaacgtagtcaaggacctgtccgtcgagctggatagactgagcgaagaatctgtgaacaacgacatctcctcctggacaaagggcagaagcggagaagctctgagcctcctgaagaaaagattctcccatagacccgtgcaggagaagttcgtgtgcctgaactgcggcttcgagacacacgcagccgagcaagccgccctgaacatcgccagatcctggctgttcctgcggagccaggagtacaagaaataccagacaaacaagacaaccggcaacaccgataagagagccttcgtcgagacctggcagtccttttaccggaagaagcttaaggaggtgtggaaacctgccgtgcggtctggcggatctggcggaggctccaccagccccaagaaaaagagaaaagtctaagctgccttctgcggggcttgccttctggccatgcccttcttctctcccttgcacctgtacctcttggtctttgaataaagcctgagtaggaaggctagcaaaaaaaaaaaaaaaaaaaaaaaaaaaaaaaaaaaaaaaaaaaaaaaaaaaaaaaaaaaaaaaaaaaaaaaaaaaaaaaa

SEQ ID NO: 10041 - RNA, 8787 nt, synthetic construct
  source 1..8787: mol_type = other RNA
aggaaataagagagaaaagaagagtaagaagaaatataagagccaccatggcccctaagaagaagcgtaaagtgagccggatgaaccacgaccaggagttcgacccccctaaggtgtaccctcccgtccccgccgagaagagaaagcccatccgggtcctgagcctgttcgatggcatcgccaccggtctgctggtgctgaaggacctgggcatccaggtggataggtacattgcctccgaggtgtgcgaggactccatcaccgtgggaatggtgcgtcatcagggcaagatcatgtacgtgggcgacgtgcggagcgtgacacagaagcatatccaggagtggggccctttcgacctggtgatcggcggcagcccttgcaatgacctgagcatcgtgaacccagcccggaagggcctgtacgagggaaccggcagactgttcttcgagttttacagactgctgcacgacgcccggcctaaggaaggcgacgaccggcccttcttttggctgttcgagaatgtggtggccatgggagtcagcgacaagcgggatattagccggttcctggagagcaaccccgtgatgatcgatgccaaggaagtgagcgccgcccaccgggccagatacttctggggcaatctgcctggcatgaacagacccctggccagcaccgtgaacgacaagctggagctgcaggagtgcctggagcacggccggatcgccaagttcagcaaggtgagaaccatcaccacccgaagcaacagcatcaaacaaggcaaggaccagcactttcctgtgttcatgaacgagaaggaggacatcctgtggtgtaccgagatggagagagtgttcgggttcccagtccactacacagatgtcagcaacatgtctagactggccagacagagactgctgggaagaagctggtccgtccctgtgatcagacacctgttcgcccctctgaaggagtacttcgcctgcgtgagcagcggcaacagcaacgccaacagccggggccccagcttctctagcggcctggtgccactgtccctgagagggagccacatgggccccatggagatctacaaaaccgtgagcgcctggaagcggcagcctgtgcgcgtgctgagcctgtttcggaatatcgataaagtcctgaaaagcctgggattcctggagagcggctctggctccggcggtggcaccctgaagtacgtggaggatgtgacaaacgtggtcagacgggatgtggagaagtggggccccttcgatctggtgtacggcagcacccaacccctgggcagctcttgtgaccggtgccctggctggtacatgtttcagttccaccggatcctgcagtacgccctgccgagacaggagtcccagcggccattcttttggattttcatggacaacttgctgctgaccgaggatgaccaggaaactaccactcggttcctgcagaccgaagccgtgaccctgcaggacgtgagaggccgggactaccagaacgccatgcgggtgtggtccaacatccctggactgaaaagcaagcacgcacctctgacccctaaagaagaggagtacctgcaggcccaggtgcggagcagaagcaagctggacgcccctaaggtggatctgctggtgaagaattgcctcctgcccctgagagagtacttcaagtatttcagccagaatagtctgcccctgggaggcagcggcggcggcagccagtgcctgctgaccttcggcgacgtgagcgtggacttcagccaggaggagtgggagtgcctggacagcgcccagagggccctgtacatcgacgtgatgctggagaactacagcaacctggtgagcgtggagaactacagcacctgcgacaccgtgcaccagcacgtgaacaccggcaaggagagctgccagaggaacaacctgggcgagatgctgaggaaccccagccacgacgccctgggcggcccaagcagcggcgcccctcctcccagcggcggcaggcggcccaagcagcggcgcccctcctcccagcggcggcagcccagccggctccccaacctctaccgaggagggcacctctgagtccgccacccccgagagcggccctggcacctccaccgagcccagcgagggcagcgcacccggcagccctgccggcagccccacctccacagaggagggaaccagcaccgagcccagcgaaggcagcgccccaggcaccagcaccgagcctagtgagcaggagattaaacggatcaacaagatcagaagaagacttgtgaaagacagcaacaccaagaaggccggcaagacaggccccatgaaaaccctgctggttagagtgatgacacccgatctgagagagcggctggaaaacctgagaaagaagcctgaaaatatcccccagcccatcagcaatacatctagagccaacctgaataagctgctgaccgattacaccgaaatgaagaaggcgatcctgcatgtgtactgggaagagttccagaaggaccctgtgggcctgatgagccgggtggcccagcctgccagcaagaagatcgatcagaacaagctgaaacctgagatggacgagaagggcaacctgaccaccgccggctttgcctgctctcagtgtggccagcccctgttcgtgtacaagctggagcaggtgtctgagaagggcaaggcttacaccaactacttcggacggtgcaatgtggccgagcacgaaaagctgatcctgctggcccagctgaagcccgagaaggatagcgacgaagccgtgacatatagcctgggaaagtttgggcagagggccctggatttctacagcattcatgtgaccaaggagtccacccaccccgtgaagcccctggcccagatcgccggaaacagatacgcctccggacctgtgggaaaggccctgagcgacgcatgtatgggcacaatcgcctccttcctgtctaagtaccaggacatcatcatcgaacaccagaaggtggtgaagggcaaccagaagagactggagagcctgcgggagctggccggcaaggaaaacctggaataccctagcgtgaccctgccacctcagcctcacaccaaggagggcgttgatgcctacaacgaagtgatcgcccgggtgcgaatgtgggtgaacctgaacctgtggcagaagctgaagctaagcagagatgatgccaagcctctgctgagactgaagggattcccttcctttcctctggtcgagagacaggccaacgaagtggactggtgggacatggtgtgtaacgtgaagaagctgatcaacgagaaaaaggaggatggcaaggtgttttggcagaatctggctggctacaagagacaggaagccctgagaccatacctgagcagcgaggaagatcggaagaagggaaagaaattcgctcggtaccagctgggcgacctgctgctgcacctggaaaagaagcacggcgaggactggggaaaggtgtacgacgaggcctgggagcggattgacaagaaagtggaaggcctgagcaagcacatcaagctggaagaggaacggagaagcgaggacgcccagagcaaggccgccctgaccgactggctgcgggctaaggccagcttcgtgatcgagggcctgaaggaggccgacaaggacgagttctgcagatgcgagctgaagctgcagaagtggtacggggacctgcggggaaagcccttcgccatcgaagccgagaacagcatcctggacatcagcggcttcagcaagcagtacaactgtgccttcatctggcagaaggacggcgtgaagaagctgaacctgtacctgatcatcaactacttcaagggcggcaagctgcggttcaagaagatcaaacctgaagccttcgaagccaacagattctacaccgtgatcaacaaaaagagcggcgagatcgtgcccatggaggtgaacttcaacttcgacgaccccaacctgatcatcctgcctctggcctttggcaagagacagggcagagaattcatctggaacgacctgctgtccctggaaaccggcagcctgaagctggccaacggaagagtgatcgagaagacactgtacaacagaagaacccggcaggatgagcctgccctgttcgtggccctgaccttcgagcggcgggaggtcctggactcctccaatatcaaaccaatgaacctgatcggcgtggcaagaggcgaaaacatccccgccgtgatcgccctgaccgaccccgagggctgcccactgagccggtttaaggatagcctgggaaacccaacccacatcctgagaatcggcgagagctataaggagaagcagcggaccatccaggccaagaaggaggtggagcagcggagagccggcggctacagccggaagtacgccagcaaagccaagaatctggcagacgatatggtgagaaacaccgctagagatctgctgtactacgccgtgacccaggatgccatgctgatcttcgccaacctgagccggggcttcggccggcagggcaagcggaccttcatggccgagagacagtacacacggatggaggactggctgaccgccaagctggcctacgagggcctgagcaagacctacctgtccaagacactggcccagtacacctccaagacatgcagcaactgtgggtttaccatcaccagcgccgactacgacagggtgctggagaagctgaagaagacagcaacaggctggatgaccacaattaacggcaaggagctgaaggtggagggccagattacctactacaacagatacaagagacagaacgtagtcaaggacctgtccgtcgagctggatagactgagcgaagaatctgtgaacaacgacatctcctcctggacaaagggcagaagcggagaagctctgagcctcctgaagaaaagattctcccatagacccgtgcaggagaagttcgtgtgcctgaactgcggcttcgagacacacgcagccgagcaagccgccctgaacatcgccagatcctggctgttcctgcggagccaggagtacaagaaataccagacaaacaagacaaccggcaacaccgataagagagccttcgtcgagacctggcagtccttttaccggaagaagcttaaggaggtgtggaaacctgccgtgcggtctggcggatctggcggaggctccaccagccccaagaaaaagagaaaagtctaagctgccttctgcggggcttgccttctggccatgcccttcttctctcccttgcacctgtacctcttggtctttgaataaagcctgagtaggaaggctagcaaaaaaaaaaaaaaaaaaaaaaaaaaaaaaaaaaaaaaaaaaaaaaaaaaaaaaaaaaaaaaaaaaaaaaaaaaaaaaaagcccagccggctccccaacctctaccgaggagggcacctctgagtccgccacccccgagagcggccctggcacctccaccgagcccagcgagggcagcgcacccggcagccctgccggcagccccacctccacagaggagggaaccagcaccgagcccagcgaaggcagcgccccaggcaccagcaccgagcctagtgagcaggagattaaacggatcaacaagatcagaagaagacttgtgaaagacagcaacaccaagaaggccggcaagacaggccccatgaaaaccctgctggttagagtgatgacacccgatctgagagagcggctggaaaacctgagaaagaagcctgaaaatatcccccagcccatcagcaatacatctagagccaacctgaataagctgctgaccgattacaccgaaatgaagaaggcgatcctgcatgtgtactgggaagagttccagaaggaccctgtgggcctgatgagccgggtggcccagcctgccagcaagaagatcgatcagaacaagctgaaacctgagatggacgagaagggcaacctgaccaccgccggctttgcctgctctcagtgtggccagcccctgttcgtgtacaagctggagcaggtgtctgagaagggcaaggcttacaccaactacttcggacggtgcaatgtggccgagcacgaaaagctgatcctgctggcccagctgaagcccgagaaggatagcgacgaagccgtgacatatagcctgggaaagtttgggcagagggccctggatttctacagcattcatgtgaccaaggagtccacccaccccgtgaagcccctggcccagatcgccggaaacagatacgcctccggacctgtgggaaaggccctgagcgacgcatgtatgggcacaatcgcctccttcctgtctaagtaccaggacatcatcatcgaacaccagaaggtggtgaagggcaaccagaagagactggagagcctgcgggagctggccggcaaggaaaacctggaataccctagcgtgaccctgccacctcagcctcacaccaaggagggcgttgatgcctacaacgaagtgatcgcccgggtgcgaatgtgggtgaacctgaacctgtggcagaagctgaagctaagcagagatgatgccaagcctctgctgagactgaagggattcccttcctttcctctggtcgagagacaggccaacgaagtggactggtgggacatggtgtgtaacgtgaagaagctgatcaacgagaaaaaggaggatggcaaggtgttttggcagaatctggctggctacaagagacaggaagccctgagaccatacctgagcagcgaggaagatcggaagaagggaaagaaattcgctcggtaccagctgggcgacctgctgctgcacctggaaaagaagcacggcgaggactggggaaaggtgtacgacgaggcctgggagcggattgacaagaaagtggaaggcctgagcaagcacatcaagctggaagaggaacggagaagcgaggacgcccagagcaaggccgccctgaccgactggctgcgggctaaggccagcttcgtgatcgagggcctgaaggaggccgacaaggacgagttctgcagatgcgagctgaagctgcagaagtggtacggggacctgcggggaaagcccttcgccatcgaagccgagaacagcatcctggacatcagcggcttcagcaagcagtacaactgtgccttcatctggcagaaggacggcgtgaagaagctgaacctgtacctgatcatcaactacttcaagggcggcaagctgcggttcaagaagatcaaacctgaagccttcgaagccaacagattctacaccgtgatcaacaaaaagagcggcgagatcgtgcccatggaggtgaacttcaacttcgacgaccccaacctgatcatcctgcctctggcctttggcaagagacagggcagagaattcatctggaacgacctgctgtccctggaaaccggcagcctgaagctggccaacggaagagtgatcgagaagacactgtacaacagaagaacccggcaggatgagcctgccctgttcgtggccctgaccttcgagcggcgggaggtcctggactcctccaatatcaaaccaatgaacctgatcggcgtggcaagaggcgaaaacatccccgccgtgatcgccctgaccgaccccgagggctgcccactgagccggtttaaggatagcctgggaaacccaacccacatcctgagaatcggcgagagctataaggagaagcagcggaccatccaggccaagaaggaggtggagcagcggagagccggcggctacagccggaagtacgccagcaaagccaagaatctggcagacgatatggtgagaaacaccgctagagatctgctgtactacgccgtgacccaggatgccatgctgatcttcgccaacctgagccggggcttcggccggcagggcaagcggaccttcatggccgagagacagtacacacggatggaggactggctgaccgccaagctggcctacgagggcctgagcaagacctacctgtccaagacactggcccagtacacctccaagacatgcagcaactgtgggtttaccatcaccagcgccgactacgacagggtgctggagaagctgaagaagacagcaacaggctggatgaccacaattaacggcaaggagctgaaggtggagggccagattacctactacaacagatacaagagacagaacgtagtcaaggacctgtccgtcgagctggatagactgagcgaagaatctgtgaacaacgacatctcctcctggacaaagggcagaagcggagaagctctgagcctcctgaagaaaagattctcccatagacccgtgcaggagaagttcgtgtgcctgaactgcggcttcgagacacacgcagccgagcaagccgccctgaacatcgccagatcctggctgttcctgcggagccaggagtacaagaaataccagacaaacaagacaaccggcaacaccgataagagagccttcgtcgagacctggcagtccttttaccggaagaagcttaaggaggtgtggaaacctgccgtgcggtctggcggatctggcggaggctccaccagccccaagaaaaagagaaaagtctaagctgccttctgcggggcttgccttctggccatgcccttcttctctcccttgcacctgtacctcttggtctttgaataaagcctgagtaggaaggctagcaaaaaaaaaaaaaaaaaaaaaaaaaaaaaaaaaaaaaaaaaaaaaaaaaaaaaaaaaaaaaaaaaaaaaaaaaaaaaaaa

SEQ ID NO: 10042 - RNA, 8787 nt, synthetic construct
  source 1..8787: mol_type = other RNA
aggaaataagagagaaaagaagagtaagaagaaatataagagccaccatggcccctaagaagaagcgtaaagtgagccggatgaaccacgaccaggagttcgacccccctaaggtgtaccctcccgtccccgccgagaagagaaagcccatccgggtcctgagcctgttcgatggcatcgccaccggtctgctggtgctgaaggacctgggcatccaggtggataggtacattgcctccgaggtgtgcgaggactccatcaccgtgggaatggtgcgtcatcagggcaagatcatgtacgtgggcgacgtgcggagcgtgacacagaagcatatccaggagtggggccctttcgacctggtgatcggcggcagcccttgcaatgacctgagcatcgtgaacccagcccggaagggcctgtacgagggaaccggcagactgttcttcgagttttacagactgctgcacgacgcccggcctaaggaaggcgacgaccggcccttcttttggctgttcgagaatgtggtggccatgggagtcagcgacaagcgggatattagccggttcctggagagcaaccccgtgatgatcgatgccaaggaagtgagcgccgcccaccgggccagatacttctggggcaatctgcctggcatgaacagacccctggccagcaccgtgaacgacaagctggagctgcaggagtgcctggagcacggccggatcgccaagttcagcaaggtgagaaccatcaccacccgaagcaacagcatcaaacaaggcaaggaccagcactttcctgtgttcatgaacgagaaggaggacatcctgtggtgtaccgagatggagagagtgttcgggttcccagtccactacacagatgtcagcaacatgtctagactggccagacagagactgctgggaagaagctggtccgtccctgtgatcagacacctgttcgcccctctgaaggagtacttcgcctgcgtgagcagcggcaacagcaacgccaacagccggggccccagcttctctagcggcctggtgccactgtccctgagagggagccacatgggccccatggagatctacaaaaccgtgagcgcctggaagcggcagcctgtgcgcgtgctgagcctgtttcggaatatcgataaagtcctgaaaagcctgggattcctggagagcggctctggctccggcggtggcaccctgaagtacgtggaggatgtgacaaacgtggtcagacgggatgtggagaagtggggccccttcgatctggtgtacggcagcacccaacccctgggcagctcttgtgaccggtgccctggctggtacatgtttcagttccaccggatcctgcagtacgccctgccgagacaggagtcccagcggccattcttttggattttcatggacaacttgctgctgaccgaggatgaccaggaaactaccactcggttcctgcagaccgaagccgtgaccctgcaggacgtgagaggccgggactaccagaacgccatgcgggtgtggtccaacatccctggactgaaaagcaagcacgcacctctgacccctaaagaagaggagtacctgcaggcccaggtgcggagcagaagcaagctggacgcccctaaggtggatctgctggtgaagaattgcctcctgcccctgagagagtacttcaagtatttcagccagaatagtctgcccctgggaggcagcggcggcggccagcagggcagcgtgaccttccaggacgtggccgtggacttcagctgggaggagtggggccacctgggccccacccagaaggagctgtacagggaggtgatgctggagaactacggcaacctggtgtgcctgggcctggccgtgagcagccccgacgtggtgtgccagctggagaggggcgagggcccctggatgcccgagggcgacgcccccggcagcagcagggccggcagcagcaagcacggcggcccaagcagcggcgcccctcctcccagcggcggcaggcggcccaagcagcggcgcccctcctcccagcggcggcagcccagccggctccccaacctctaccgaggagggcacctctgagtccgccacccccgagagcggccctggcacctccaccgagcccagcgagggcagcgcacccggcagccctgccggcagccccacctccacagaggagggaaccagcaccgagcccagcgaaggcagcgccccaggcaccagcaccgagcctagtgagcaggagattaaacggatcaacaagatcagaagaagacttgtgaaagacagcaacaccaagaaggccggcaagacaggccccatgaaaaccctgctggttagagtgatgacacccgatctgagagagcggctggaaaacctgagaaagaagcctgaaaatatcccccagcccatcagcaatacatctagagccaacctgaataagctgctgaccgattacaccgaaatgaagaaggcgatcctgcatgtgtactgggaagagttccagaaggaccctgtgggcctgatgagccgggtggcccagcctgccagcaagaagatcgatcagaacaagctgaaacctgagatggacgagaagggcaacctgaccaccgccggctttgcctgctctcagtgtggccagcccctgttcgtgtacaagctggagcaggtgtctgagaagggcaaggcttacaccaactacttcggacggtgcaatgtggccgagcacgaaaagctgatcctgctggcccagctgaagcccgagaaggatagcgacgaagccgtgacatatagcctgggaaagtttgggcagagggccctggatttctacagcattcatgtgaccaaggagtccacccaccccgtgaagcccctggcccagatcgccggaaacagatacgcctccggacctgtgggaaaggccctgagcgacgcatgtatgggcacaatcgcctccttcctgtctaagtaccaggacatcatcatcgaacaccagaaggtggtgaagggcaaccagaagagactggagagcctgcgggagctggccggcaaggaaaacctggaataccctagcgtgaccctgccacctcagcctcacaccaaggagggcgttgatgcctacaacgaagtgatcgcccgggtgcgaatgtgggtgaacctgaacctgtggcagaagctgaagctaagcagagatgatgccaagcctctgctgagactgaagggattcccttcctttcctctggtcgagagacaggccaacgaagtggactggtgggacatggtgtgtaacgtgaagaagctgatcaacgagaaaaaggaggatggcaaggtgttttggcagaatctggctggctacaagagacaggaagccctgagaccatacctgagcagcgaggaagatcggaagaagggaaagaaattcgctcggtaccagctgggcgacctgctgctgcacctggaaaagaagcacggcgaggactggggaaaggtgtacgacgaggcctgggagcggattgacaagaaagtggaaggcctgagcaagcacatcaagctggaagaggaacggagaagcgaggacgcccagagcaaggccgccctgaccgactggctgcgggctaaggccagcttcgtgatcgagggcctgaaggaggccgacaaggacgagttctgcagatgcgagctgaagctgcagaagtggtacggggacctgcggggaaagcccttcgccatcgaagccgagaacagcatcctggacatcagcggcttcagcaagcagtacaactgtgccttcatctggcagaaggacggcgtgaagaagctgaacctgtacctgatcatcaactacttcaagggcggcaagctgcggttcaagaagatcaaacctgaagccttcgaagccaacagattctacaccgtgatcaacaaaaagagcggcgagatcgtgcccatggaggtgaacttcaacttcgacgaccccaacctgatcatcctgcctctggcctttggcaagagacagggcagagaattcatctggaacgacctgctgtccctggaaaccggcagcctgaagctggccaacggaagagtgatcgagaagacactgtacaacagaagaacccggcaggatgagcctgccctgttcgtggccctgaccttcgagcggcgggaggtcctggactcctccaatatcaaaccaatgaacctgatcggcgtggcaagaggcgaaaacatccccgccgtgatcgccctgaccgaccccgagggctgcccactgagccggtttaaggatagcctgggaaacccaacccacatcctgagaatcggcgagagctataaggagaagcagcggaccatccaggccaagaaggaggtggagcagcggagagccggcggctacagccggaagtacgccagcaaagccaagaatctggcagacgatatggtgagaaacaccgctagagatctgctgtactacgccgtgacccaggatgccatgctgatcttcgccaacctgagccggggcttcggccggcagggcaagcggaccttcatggccgagagacagtacacacggatggaggactggctgaccgccaagctggcctacgagggcctgagcaagacctacctgtccaagacactggcccagtacacctccaagacatgcagcaactgtgggtttaccatcaccagcgccgactacgacagggtgctggagaagctgaagaagacagcaacaggctggatgaccacaattaacggcaaggagctgaaggtggagggccagattacctactacaacagatacaagagacagaacgtagtcaaggacctgtccgtcgagctggatagactgagcgaagaatctgtgaacaacgacatctcctcctggacaaagggcagaagcggagaagctctgagcctcctgaagaaaagattctcccatagacccgtgcaggagaagttcgtgtgcctgaactgcggcttcgagacacacgcagccgagcaagccgccctgaacatcgccagatcctggctgttcctgcggagccaggagtacaagaaataccagacaaacaagacaaccggcaacaccgataagagagccttcgtcgagacctggcagtccttttaccggaagaagcttaaggaggtgtggaaacctgccgtgcggtctggcggatctggcggaggctccaccagccccaagaaaaagagaaaagtctaagctgccttctgcggggcttgccttctggccatgcccttcttctctcccttgcacctgtacctcttggtctttgaataaagcctgagtaggaaggctagcaaaaaaaaaaaaaaaaaaaaaaaaaaaaaaaaaaaaaaaaaaaaaaaaaaaaaaaaaaaaaaaaaaaaaaaaaaaaaaaagcccagccggctccccaacctctaccgaggagggcacctctgagtccgccacccccgagagcggccctggcacctccaccgagcccagcgagggcagcgcacccggcagccctgccggcagccccacctccacagaggagggaaccagcaccgagcccagcgaaggcagcgccccaggcaccagcaccgagcctagtgagcaggagattaaacggatcaacaagatcagaagaagacttgtgaaagacagcaacaccaagaaggccggcaagacaggccccatgaaaaccctgctggttagagtgatgacacccgatctgagagagcggctggaaaacctgagaaagaagcctgaaaatatcccccagcccatcagcaatacatctagagccaacctgaataagctgctgaccgattacaccgaaatgaagaaggcgatcctgcatgtgtactgggaagagttccagaaggaccctgtgggcctgatgagccgggtggcccagcctgccagcaagaagatcgatcagaacaagctgaaacctgagatggacgagaagggcaacctgaccaccgccggctttgcctgctctcagtgtggccagcccctgttcgtgtacaagctggagcaggtgtctgagaagggcaaggcttacaccaactacttcggacggtgcaatgtggccgagcacgaaaagctgatcctgctggcccagctgaagcccgagaaggatagcgacgaagccgtgacatatagcctgggaaagtttgggcagagggccctggatttctacagcattcatgtgaccaaggagtccacccaccccgtgaagcccctggcccagatcgccggaaacagatacgcctccggacctgtgggaaaggccctgagcgacgcatgtatgggcacaatcgcctccttcctgtctaagtaccaggacatcatcatcgaacaccagaaggtggtgaagggcaaccagaagagactggagagcctgcgggagctggccggcaaggaaaacctggaataccctagcgtgaccctgccacctcagcctcacaccaaggagggcgttgatgcctacaacgaagtgatcgcccgggtgcgaatgtgggtgaacctgaacctgtggcagaagctgaagctaagcagagatgatgccaagcctctgctgagactgaagggattcccttcctttcctctggtcgagagacaggccaacgaagtggactggtgggacatggtgtgtaacgtgaagaagctgatcaacgagaaaaaggaggatggcaaggtgttttggcagaatctggctggctacaagagacaggaagccctgagaccatacctgagcagcgaggaagatcggaagaagggaaagaaattcgctcggtaccagctgggcgacctgctgctgcacctggaaaagaagcacggcgaggactggggaaaggtgtacgacgaggcctgggagcggattgacaagaaagtggaaggcctgagcaagcacatcaagctggaagaggaacggagaagcgaggacgcccagagcaaggccgccctgaccgactggctgcgggctaaggccagcttcgtgatcgagggcctgaaggaggccgacaaggacgagttctgcagatgcgagctgaagctgcagaagtggtacggggacctgcggggaaagcccttcgccatcgaagccgagaacagcatcctggacatcagcggcttcagcaagcagtacaactgtgccttcatctggcagaaggacggcgtgaagaagctgaacctgtacctgatcatcaactacttcaagggcggcaagctgcggttcaagaagatcaaacctgaagccttcgaagccaacagattctacaccgtgatcaacaaaaagagcggcgagatcgtgcccatggaggtgaacttcaacttcgacgaccccaacctgatcatcctgcctctggcctttggcaagagacagggcagagaattcatctggaacgacctgctgtccctggaaaccggcagcctgaagctggccaacggaagagtgatcgagaagacactgtacaacagaagaacccggcaggatgagcctgccctgttcgtggccctgaccttcgagcggcgggaggtcctggactcctccaatatcaaaccaatgaacctgatcggcgtggcaagaggcgaaaacatccccgccgtgatcgccctgaccgaccccgagggctgcccactgagccggtttaaggatagcctgggaaacccaacccacatcctgagaatcggcgagagctataaggagaagcagcggaccatccaggccaagaaggaggtggagcagcggagagccggcggctacagccggaagtacgccagcaaagccaagaatctggcagacgatatggtgagaaacaccgctagagatctgctgtactacgccgtgacccaggatgccatgctgatcttcgccaacctgagccggggcttcggccggcagggcaagcggaccttcatggccgagagacagtacacacggatggaggactggctgaccgccaagctggcctacgagggcctgagcaagacctacctgtccaagacactggcccagtacacctccaagacatgcagcaactgtgggtttaccatcaccagcgccgactacgacagggtgctggagaagctgaagaagacagcaacaggctggatgaccacaattaacggcaaggagctgaaggtggagggccagattacctactacaacagatacaagagacagaacgtagtcaaggacctgtccgtcgagctggatagactgagcgaagaatctgtgaacaacgacatctcctcctggacaaagggcagaagcggagaagctctgagcctcctgaagaaaagattctcccatagacccgtgcaggagaagttcgtgtgcctgaactgcggcttcgagacacacgcagccgagcaagccgccctgaacatcgccagatcctggctgttcctgcggagccaggagtacaagaaataccagacaaacaagacaaccggcaacaccgataagagagccttcgtcgagacctggcagtccttttaccggaagaagcttaaggaggtgtggaaacctgccgtgcggtctggcggatctggcggaggctccaccagccccaagaaaaagagaaaagtctaagctgccttctgcggggcttgccttctggccatgcccttcttctctcccttgcacctgtacctcttggtctttgaataaagcctgagtaggaaggctagcaaaaaaaaaaaaaaaaaaaaaaaaaaaaaaaaaaaaaaaaaaaaaaaaaaaaaaaaaaaaaaaaaaaaaaaaaaaaaaaa

SEQ ID NO: 10043 - RNA, 8787 nt, synthetic construct
  source 1..8787: mol_type = other RNA
aggaaataagagagaaaagaagagtaagaagaaatataagagccaccatggcccctaagaagaagcgtaaagtgagccggatgaaccacgaccaggagttcgacccccctaaggtgtaccctcccgtccccgccgagaagagaaagcccatccgggtcctgagcctgttcgatggcatcgccaccggtctgctggtgctgaaggacctgggcatccaggtggataggtacattgcctccgaggtgtgcgaggactccatcaccgtgggaatggtgcgtcatcagggcaagatcatgtacgtgggcgacgtgcggagcgtgacacagaagcatatccaggagtggggccctttcgacctggtgatcggcggcagcccttgcaatgacctgagcatcgtgaacccagcccggaagggcctgtacgagggaaccggcagactgttcttcgagttttacagactgctgcacgacgcccggcctaaggaaggcgacgaccggcccttcttttggctgttcgagaatgtggtggccatgggagtcagcgacaagcgggatattagccggttcctggagagcaaccccgtgatgatcgatgccaaggaagtgagcgccgcccaccgggccagatacttctggggcaatctgcctggcatgaacagacccctggccagcaccgtgaacgacaagctggagctgcaggagtgcctggagcacggccggatcgccaagttcagcaaggtgagaaccatcaccacccgaagcaacagcatcaaacaaggcaaggaccagcactttcctgtgttcatgaacgagaaggaggacatcctgtggtgtaccgagatggagagagtgttcgggttcccagtccactacacagatgtcagcaacatgtctagactggccagacagagactgctgggaagaagctggtccgtccctgtgatcagacacctgttcgcccctctgaaggagtacttcgcctgcgtgagcagcggcaacagcaacgccaacagccggggccccagcttctctagcggcctggtgccactgtccctgagagggagccacatgggccccatggagatctacaaaaccgtgagcgcctggaagcggcagcctgtgcgcgtgctgagcctgtttcggaatatcgataaagtcctgaaaagcctgggattcctggagagcggctctggctccggcggtggcaccctgaagtacgtggaggatgtgacaaacgtggtcagacgggatgtggagaagtggggccccttcgatctggtgtacggcagcacccaacccctgggcagctcttgtgaccggtgccctggctggtacatgtttcagttccaccggatcctgcagtacgccctgccgagacaggagtcccagcggccattcttttggattttcatggacaacttgctgctgaccgaggatgaccaggaaactaccactcggttcctgcagaccgaagccgtgaccctgcaggacgtgagaggccgggactaccagaacgccatgcgggtgtggtccaacatccctggactgaaaagcaagcacgcacctctgacccctaaagaagaggagtacctgcaggcccaggtgcggagcagaagcaagctggacgcccctaaggtggatctgctggtgaagaattgcctcctgcccctgagagagtacttcaagtatttcagccagaatagtctgcccctgggaggcagcggcggcggcgccctggagagcgtgaccttcagggacgtggccgtgttcttcagcagggacgagtggctgcacctgaaccccgcccagagggccctgtacagggaggtgatgctggacaactacagcgccctgctgagcctgggcatcctgttcagcaagcccaaggtgatcctgcagctggagcagggcgaggacccctggatggtggagaacggcgtgagccagagcgcctgcctgggctgggagagcctgggcggcccaagcagcggcgcccctcctcccagcggcggcaggcggcccaagcagcggcgcccctcctcccagcggcggcagcccagccggctccccaacctctaccgaggagggcacctctgagtccgccacccccgagagcggccctggcacctccaccgagcccagcgagggcagcgcacccggcagccctgccggcagccccacctccacagaggagggaaccagcaccgagcccagcgaaggcagcgccccaggcaccagcaccgagcctagtgagcaggagattaaacggatcaacaagatcagaagaagacttgtgaaagacagcaacaccaagaaggccggcaagacaggccccatgaaaaccctgctggttagagtgatgacacccgatctgagagagcggctggaaaacctgagaaagaagcctgaaaatatcccccagcccatcagcaatacatctagagccaacctgaataagctgctgaccgattacaccgaaatgaagaaggcgatcctgcatgtgtactgggaagagttccagaaggaccctgtgggcctgatgagccgggtggcccagcctgccagcaagaagatcgatcagaacaagctgaaacctgagatggacgagaagggcaacctgaccaccgccggctttgcctgctctcagtgtggccagcccctgttcgtgtacaagctggagcaggtgtctgagaagggcaaggcttacaccaactacttcggacggtgcaatgtggccgagcacgaaaagctgatcctgctggcccagctgaagcccgagaaggatagcgacgaagccgtgacatatagcctgggaaagtttgggcagagggccctggatttctacagcattcatgtgaccaaggagtccacccaccccgtgaagcccctggcccagatcgccggaaacagatacgcctccggacctgtgggaaaggccctgagcgacgcatgtatgggcacaatcgcctccttcctgtctaagtaccaggacatcatcatcgaacaccagaaggtggtgaagggcaaccagaagagactggagagcctgcgggagctggccggcaaggaaaacctggaataccctagcgtgaccctgccacctcagcctcacaccaaggagggcgttgatgcctacaacgaagtgatcgcccgggtgcgaatgtgggtgaacctgaacctgtggcagaagctgaagctaagcagagatgatgccaagcctctgctgagactgaagggattcccttcctttcctctggtcgagagacaggccaacgaagtggactggtgggacatggtgtgtaacgtgaagaagctgatcaacgagaaaaaggaggatggcaaggtgttttggcagaatctggctggctacaagagacaggaagccctgagaccatacctgagcagcgaggaagatcggaagaagggaaagaaattcgctcggtaccagctgggcgacctgctgctgcacctggaaaagaagcacggcgaggactggggaaaggtgtacgacgaggcctgggagcggattgacaagaaagtggaaggcctgagcaagcacatcaagctggaagaggaacggagaagcgaggacgcccagagcaaggccgccctgaccgactggctgcgggctaaggccagcttcgtgatcgagggcctgaaggaggccgacaaggacgagttctgcagatgcgagctgaagctgcagaagtggtacggggacctgcggggaaagcccttcgccatcgaagccgagaacagcatcctggacatcagcggcttcagcaagcagtacaactgtgccttcatctggcagaaggacggcgtgaagaagctgaacctgtacctgatcatcaactacttcaagggcggcaagctgcggttcaagaagatcaaacctgaagccttcgaagccaacagattctacaccgtgatcaacaaaaagagcggcgagatcgtgcccatggaggtgaacttcaacttcgacgaccccaacctgatcatcctgcctctggcctttggcaagagacagggcagagaattcatctggaacgacctgctgtccctggaaaccggcagcctgaagctggccaacggaagagtgatcgagaagacactgtacaacagaagaacccggcaggatgagcctgccctgttcgtggccctgaccttcgagcggcgggaggtcctggactcctccaatatcaaaccaatgaacctgatcggcgtggcaagaggcgaaaacatccccgccgtgatcgccctgaccgaccccgagggctgcccactgagccggtttaaggatagcctgggaaacccaacccacatcctgagaatcggcgagagctataaggagaagcagcggaccatccaggccaagaaggaggtggagcagcggagagccggcggctacagccggaagtacgccagcaaagccaagaatctggcagacgatatggtgagaaacaccgctagagatctgctgtactacgccgtgacccaggatgccatgctgatcttcgccaacctgagccggggcttcggccggcagggcaagcggaccttcatggccgagagacagtacacacggatggaggactggctgaccgccaagctggcctacgagggcctgagcaagacctacctgtccaagacactggcccagtacacctccaagacatgcagcaactgtgggtttaccatcaccagcgccgactacgacagggtgctggagaagctgaagaagacagcaacaggctggatgaccacaattaacggcaaggagctgaaggtggagggccagattacctactacaacagatacaagagacagaacgtagtcaaggacctgtccgtcgagctggatagactgagcgaagaatctgtgaacaacgacatctcctcctggacaaagggcagaagcggagaagctctgagcctcctgaagaaaagattctcccatagacccgtgcaggagaagttcgtgtgcctgaactgcggcttcgagacacacgcagccgagcaagccgccctgaacatcgccagatcctggctgttcctgcggagccaggagtacaagaaataccagacaaacaagacaaccggcaacaccgataagagagccttcgtcgagacctggcagtccttttaccggaagaagcttaaggaggtgtggaaacctgccgtgcggtctggcggatctggcggaggctccaccagccccaagaaaaagagaaaagtctaagctgccttctgcggggcttgccttctggccatgcccttcttctctcccttgcacctgtacctcttggtctttgaataaagcctgagtaggaaggctagcaaaaaaaaaaaaaaaaaaaaaaaaaaaaaaaaaaaaaaaaaaaaaaaaaaaaaaaaaaaaaaaaaaaaaaaaaaaaaaaagcccagccggctccccaacctctaccgaggagggcacctctgagtccgccacccccgagagcggccctggcacctccaccgagcccagcgagggcagcgcacccggcagccctgccggcagccccacctccacagaggagggaaccagcaccgagcccagcgaaggcagcgccccaggcaccagcaccgagcctagtgagcaggagattaaacggatcaacaagatcagaagaagacttgtgaaagacagcaacaccaagaaggccggcaagacaggccccatgaaaaccctgctggttagagtgatgacacccgatctgagagagcggctggaaaacctgagaaagaagcctgaaaatatcccccagcccatcagcaatacatctagagccaacctgaataagctgctgaccgattacaccgaaatgaagaaggcgatcctgcatgtgtactgggaagagttccagaaggaccctgtgggcctgatgagccgggtggcccagcctgccagcaagaagatcgatcagaacaagctgaaacctgagatggacgagaagggcaacctgaccaccgccggctttgcctgctctcagtgtggccagcccctgttcgtgtacaagctggagcaggtgtctgagaagggcaaggcttacaccaactacttcggacggtgcaatgtggccgagcacgaaaagctgatcctgctggcccagctgaagcccgagaaggatagcgacgaagccgtgacatatagcctgggaaagtttgggcagagggccctggatttctacagcattcatgtgaccaaggagtccacccaccccgtgaagcccctggcccagatcgccggaaacagatacgcctccggacctgtgggaaaggccctgagcgacgcatgtatgggcacaatcgcctccttcctgtctaagtaccaggacatcatcatcgaacaccagaaggtggtgaagggcaaccagaagagactggagagcctgcgggagctggccggcaaggaaaacctggaataccctagcgtgaccctgccacctcagcctcacaccaaggagggcgttgatgcctacaacgaagtgatcgcccgggtgcgaatgtgggtgaacctgaacctgtggcagaagctgaagctaagcagagatgatgccaagcctctgctgagactgaagggattcccttcctttcctctggtcgagagacaggccaacgaagtggactggtgggacatggtgtgtaacgtgaagaagctgatcaacgagaaaaaggaggatggcaaggtgttttggcagaatctggctggctacaagagacaggaagccctgagaccatacctgagcagcgaggaagatcggaagaagggaaagaaattcgctcggtaccagctgggcgacctgctgctgcacctggaaaagaagcacggcgaggactggggaaaggtgtacgacgaggcctgggagcggattgacaagaaagtggaaggcctgagcaagcacatcaagctggaagaggaacggagaagcgaggacgcccagagcaaggccgccctgaccgactggctgcgggctaaggccagcttcgtgatcgagggcctgaaggaggccgacaaggacgagttctgcagatgcgagctgaagctgcagaagtggtacggggacctgcggggaaagcccttcgccatcgaagccgagaacagcatcctggacatcagcggcttcagcaagcagtacaactgtgccttcatctggcagaaggacggcgtgaagaagctgaacctgtacctgatcatcaactacttcaagggcggcaagctgcggttcaagaagatcaaacctgaagccttcgaagccaacagattctacaccgtgatcaacaaaaagagcggcgagatcgtgcccatggaggtgaacttcaacttcgacgaccccaacctgatcatcctgcctctggcctttggcaagagacagggcagagaattcatctggaacgacctgctgtccctggaaaccggcagcctgaagctggccaacggaagagtgatcgagaagacactgtacaacagaagaacccggcaggatgagcctgccctgttcgtggccctgaccttcgagcggcgggaggtcctggactcctccaatatcaaaccaatgaacctgatcggcgtggcaagaggcgaaaacatccccgccgtgatcgccctgaccgaccccgagggctgcccactgagccggtttaaggatagcctgggaaacccaacccacatcctgagaatcggcgagagctataaggagaagcagcggaccatccaggccaagaaggaggtggagcagcggagagccggcggctacagccggaagtacgccagcaaagccaagaatctggcagacgatatggtgagaaacaccgctagagatctgctgtactacgccgtgacccaggatgccatgctgatcttcgccaacctgagccggggcttcggccggcagggcaagcggaccttcatggccgagagacagtacacacggatggaggactggctgaccgccaagctggcctacgagggcctgagcaagacctacctgtccaagacactggcccagtacacctccaagacatgcagcaactgtgggtttaccatcaccagcgccgactacgacagggtgctggagaagctgaagaagacagcaacaggctggatgaccacaattaacggcaaggagctgaaggtggagggccagattacctactacaacagatacaagagacagaacgtagtcaaggacctgtccgtcgagctggatagactgagcgaagaatctgtgaacaacgacatctcctcctggacaaagggcagaagcggagaagctctgagcctcctgaagaaaagattctcccatagacccgtgcaggagaagttcgtgtgcctgaactgcggcttcgagacacacgcagccgagcaagccgccctgaacatcgccagatcctggctgttcctgcggagccaggagtacaagaaataccagacaaacaagacaaccggcaacaccgataagagagccttcgtcgagacctggcagtccttttaccggaagaagcttaaggaggtgtggaaacctgccgtgcggtctggcggatctggcggaggctccaccagccccaagaaaaagagaaaagtctaagctgccttctgcggggcttgccttctggccatgcccttcttctctcccttgcacctgtacctcttggtctttgaataaagcctgagtaggaaggctagcaaaaaaaaaaaaaaaaaaaaaaaaaaaaaaaaaaaaaaaaaaaaaaaaaaaaaaaaaaaaaaaaaaaaaaaaaaaaaaaa

SEQ ID NO: 10044 - RNA, 8787 nt, synthetic construct
  source 1..8787: mol_type = other RNA
aggaaataagagagaaaagaagagtaagaagaaatataagagccaccatggcccctaagaagaagcgtaaagtgagccggatgaaccacgaccaggagttcgacccccctaaggtgtaccctcccgtccccgccgagaagagaaagcccatccgggtcctgagcctgttcgatggcatcgccaccggtctgctggtgctgaaggacctgggcatccaggtggataggtacattgcctccgaggtgtgcgaggactccatcaccgtgggaatggtgcgtcatcagggcaagatcatgtacgtgggcgacgtgcggagcgtgacacagaagcatatccaggagtggggccctttcgacctggtgatcggcggcagcccttgcaatgacctgagcatcgtgaacccagcccggaagggcctgtacgagggaaccggcagactgttcttcgagttttacagactgctgcacgacgcccggcctaaggaaggcgacgaccggcccttcttttggctgttcgagaatgtggtggccatgggagtcagcgacaagcgggatattagccggttcctggagagcaaccccgtgatgatcgatgccaaggaagtgagcgccgcccaccgggccagatacttctggggcaatctgcctggcatgaacagacccctggccagcaccgtgaacgacaagctggagctgcaggagtgcctggagcacggccggatcgccaagttcagcaaggtgagaaccatcaccacccgaagcaacagcatcaaacaaggcaaggaccagcactttcctgtgttcatgaacgagaaggaggacatcctgtggtgtaccgagatggagagagtgttcgggttcccagtccactacacagatgtcagcaacatgtctagactggccagacagagactgctgggaagaagctggtccgtccctgtgatcagacacctgttcgcccctctgaaggagtacttcgcctgcgtgagcagcggcaacagcaacgccaacagccggggccccagcttctctagcggcctggtgccactgtccctgagagggagccacatgggccccatggagatctacaaaaccgtgagcgcctggaagcggcagcctgtgcgcgtgctgagcctgtttcggaatatcgataaagtcctgaaaagcctgggattcctggagagcggctctggctccggcggtggcaccctgaagtacgtggaggatgtgacaaacgtggtcagacgggatgtggagaagtggggccccttcgatctggtgtacggcagcacccaacccctgggcagctcttgtgaccggtgccctggctggtacatgtttcagttccaccggatcctgcagtacgccctgccgagacaggagtcccagcggccattcttttggattttcatggacaacttgctgctgaccgaggatgaccaggaaactaccactcggttcctgcagaccgaagccgtgaccctgcaggacgtgagaggccgggactaccagaacgccatgcgggtgtggtccaacatccctggactgaaaagcaagcacgcacctctgacccctaaagaagaggagtacctgcaggcccaggtgcggagcagaagcaagctggacgcccctaaggtggatctgctggtgaagaattgcctcctgcccctgagagagtacttcaagtatttcagccagaatagtctgcccctgggaggcagcggcggcggcagccaggacctggtgaccttcaaggacgtggccatcgacttcagccaggaggagtgggagtggctgaaccccgcccagaggaacctgtacaagaacatgatgctggagaactaccagaacctggtgagcctgggcctgtgcatcagcaagccctacgtgatcagcctgctggagcagggcaagggcccctgggagatgaagaccgagatgaccaggagccccttccccgacagcggcagcgtgggcggcccaagcagcggcgcccctcctcccagcggcggcaggcggcccaagcagcggcgcccctcctcccagcggcggcagcccagccggctccccaacctctaccgaggagggcacctctgagtccgccacccccgagagcggccctggcacctccaccgagcccagcgagggcagcgcacccggcagccctgccggcagccccacctccacagaggagggaaccagcaccgagcccagcgaaggcagcgccccaggcaccagcaccgagcctagtgagcaggagattaaacggatcaacaagatcagaagaagacttgtgaaagacagcaacaccaagaaggccggcaagacaggccccatgaaaaccctgctggttagagtgatgacacccgatctgagagagcggctggaaaacctgagaaagaagcctgaaaatatcccccagcccatcagcaatacatctagagccaacctgaataagctgctgaccgattacaccgaaatgaagaaggcgatcctgcatgtgtactgggaagagttccagaaggaccctgtgggcctgatgagccgggtggcccagcctgccagcaagaagatcgatcagaacaagctgaaacctgagatggacgagaagggcaacctgaccaccgccggctttgcctgctctcagtgtggccagcccctgttcgtgtacaagctggagcaggtgtctgagaagggcaaggcttacaccaactacttcggacggtgcaatgtggccgagcacgaaaagctgatcctgctggcccagctgaagcccgagaaggatagcgacgaagccgtgacatatagcctgggaaagtttgggcagagggccctggatttctacagcattcatgtgaccaaggagtccacccaccccgtgaagcccctggcccagatcgccggaaacagatacgcctccggacctgtgggaaaggccctgagcgacgcatgtatgggcacaatcgcctccttcctgtctaagtaccaggacatcatcatcgaacaccagaaggtggtgaagggcaaccagaagagactggagagcctgcgggagctggccggcaaggaaaacctggaataccctagcgtgaccctgccacctcagcctcacaccaaggagggcgttgatgcctacaacgaagtgatcgcccgggtgcgaatgtgggtgaacctgaacctgtggcagaagctgaagctaagcagagatgatgccaagcctctgctgagactgaagggattcccttcctttcctctggtcgagagacaggccaacgaagtggactggtgggacatggtgtgtaacgtgaagaagctgatcaacgagaaaaaggaggatggcaaggtgttttggcagaatctggctggctacaagagacaggaagccctgagaccatacctgagcagcgaggaagatcggaagaagggaaagaaattcgctcggtaccagctgggcgacctgctgctgcacctggaaaagaagcacggcgaggactggggaaaggtgtacgacgaggcctgggagcggattgacaagaaagtggaaggcctgagcaagcacatcaagctggaagaggaacggagaagcgaggacgcccagagcaaggccgccctgaccgactggctgcgggctaaggccagcttcgtgatcgagggcctgaaggaggccgacaaggacgagttctgcagatgcgagctgaagctgcagaagtggtacggggacctgcggggaaagcccttcgccatcgaagccgagaacagcatcctggacatcagcggcttcagcaagcagtacaactgtgccttcatctggcagaaggacggcgtgaagaagctgaacctgtacctgatcatcaactacttcaagggcggcaagctgcggttcaagaagatcaaacctgaagccttcgaagccaacagattctacaccgtgatcaacaaaaagagcggcgagatcgtgcccatggaggtgaacttcaacttcgacgaccccaacctgatcatcctgcctctggcctttggcaagagacagggcagagaattcatctggaacgacctgctgtccctggaaaccggcagcctgaagctggccaacggaagagtgatcgagaagacactgtacaacagaagaacccggcaggatgagcctgccctgttcgtggccctgaccttcgagcggcgggaggtcctggactcctccaatatcaaaccaatgaacctgatcggcgtggcaagaggcgaaaacatccccgccgtgatcgccctgaccgaccccgagggctgcccactgagccggtttaaggatagcctgggaaacccaacccacatcctgagaatcggcgagagctataaggagaagcagcggaccatccaggccaagaaggaggtggagcagcggagagccggcggctacagccggaagtacgccagcaaagccaagaatctggcagacgatatggtgagaaacaccgctagagatctgctgtactacgccgtgacccaggatgccatgctgatcttcgccaacctgagccggggcttcggccggcagggcaagcggaccttcatggccgagagacagtacacacggatggaggactggctgaccgccaagctggcctacgagggcctgagcaagacctacctgtccaagacactggcccagtacacctccaagacatgcagcaactgtgggtttaccatcaccagcgccgactacgacagggtgctggagaagctgaagaagacagcaacaggctggatgaccacaattaacggcaaggagctgaaggtggagggccagattacctactacaacagatacaagagacagaacgtagtcaaggacctgtccgtcgagctggatagactgagcgaagaatctgtgaacaacgacatctcctcctggacaaagggcagaagcggagaagctctgagcctcctgaagaaaagattctcccatagacccgtgcaggagaagttcgtgtgcctgaactgcggcttcgagacacacgcagccgagcaagccgccctgaacatcgccagatcctggctgttcctgcggagccaggagtacaagaaataccagacaaacaagacaaccggcaacaccgataagagagccttcgtcgagacctggcagtccttttaccggaagaagcttaaggaggtgtggaaacctgccgtgcggtctggcggatctggcggaggctccaccagccccaagaaaaagagaaaagtctaagctgccttctgcggggcttgccttctggccatgcccttcttctctcccttgcacctgtacctcttggtctttgaataaagcctgagtaggaaggctagcaaaaaaaaaaaaaaaaaaaaaaaaaaaaaaaaaaaaaaaaaaaaaaaaaaaaaaaaaaaaaaaaaaaaaaaaaaaaaaaagcccagccggctccccaacctctaccgaggagggcacctctgagtccgccacccccgagagcggccctggcacctccaccgagcccagcgagggcagcgcacccggcagccctgccggcagccccacctccacagaggagggaaccagcaccgagcccagcgaaggcagcgccccaggcaccagcaccgagcctagtgagcaggagattaaacggatcaacaagatcagaagaagacttgtgaaagacagcaacaccaagaaggccggcaagacaggccccatgaaaaccctgctggttagagtgatgacacccgatctgagagagcggctggaaaacctgagaaagaagcctgaaaatatcccccagcccatcagcaatacatctagagccaacctgaataagctgctgaccgattacaccgaaatgaagaaggcgatcctgcatgtgtactgggaagagttccagaaggaccctgtgggcctgatgagccgggtggcccagcctgccagcaagaagatcgatcagaacaagctgaaacctgagatggacgagaagggcaacctgaccaccgccggctttgcctgctctcagtgtggccagcccctgttcgtgtacaagctggagcaggtgtctgagaagggcaaggcttacaccaactacttcggacggtgcaatgtggccgagcacgaaaagctgatcctgctggcccagctgaagcccgagaaggatagcgacgaagccgtgacatatagcctgggaaagtttgggcagagggccctggatttctacagcattcatgtgaccaaggagtccacccaccccgtgaagcccctggcccagatcgccggaaacagatacgcctccggacctgtgggaaaggccctgagcgacgcatgtatgggcacaatcgcctccttcctgtctaagtaccaggacatcatcatcgaacaccagaaggtggtgaagggcaaccagaagagactggagagcctgcgggagctggccggcaaggaaaacctggaataccctagcgtgaccctgccacctcagcctcacaccaaggagggcgttgatgcctacaacgaagtgatcgcccgggtgcgaatgtgggtgaacctgaacctgtggcagaagctgaagctaagcagagatgatgccaagcctctgctgagactgaagggattcccttcctttcctctggtcgagagacaggccaacgaagtggactggtgggacatggtgtgtaacgtgaagaagctgatcaacgagaaaaaggaggatggcaaggtgttttggcagaatctggctggctacaagagacaggaagccctgagaccatacctgagcagcgaggaagatcggaagaagggaaagaaattcgctcggtaccagctgggcgacctgctgctgcacctggaaaagaagcacggcgaggactggggaaaggtgtacgacgaggcctgggagcggattgacaagaaagtggaaggcctgagcaagcacatcaagctggaagaggaacggagaagcgaggacgcccagagcaaggccgccctgaccgactggctgcgggctaaggccagcttcgtgatcgagggcctgaaggaggccgacaaggacgagttctgcagatgcgagctgaagctgcagaagtggtacggggacctgcggggaaagcccttcgccatcgaagccgagaacagcatcctggacatcagcggcttcagcaagcagtacaactgtgccttcatctggcagaaggacggcgtgaagaagctgaacctgtacctgatcatcaactacttcaagggcggcaagctgcggttcaagaagatcaaacctgaagccttcgaagccaacagattctacaccgtgatcaacaaaaagagcggcgagatcgtgcccatggaggtgaacttcaacttcgacgaccccaacctgatcatcctgcctctggcctttggcaagagacagggcagagaattcatctggaacgacctgctgtccctggaaaccggcagcctgaagctggccaacggaagagtgatcgagaagacactgtacaacagaagaacccggcaggatgagcctgccctgttcgtggccctgaccttcgagcggcgggaggtcctggactcctccaatatcaaaccaatgaacctgatcggcgtggcaagaggcgaaaacatccccgccgtgatcgccctgaccgaccccgagggctgcccactgagccggtttaaggatagcctgggaaacccaacccacatcctgagaatcggcgagagctataaggagaagcagcggaccatccaggccaagaaggaggtggagcagcggagagccggcggctacagccggaagtacgccagcaaagccaagaatctggcagacgatatggtgagaaacaccgctagagatctgctgtactacgccgtgacccaggatgccatgctgatcttcgccaacctgagccggggcttcggccggcagggcaagcggaccttcatggccgagagacagtacacacggatggaggactggctgaccgccaagctggcctacgagggcctgagcaagacctacctgtccaagacactggcccagtacacctccaagacatgcagcaactgtgggtttaccatcaccagcgccgactacgacagggtgctggagaagctgaagaagacagcaacaggctggatgaccacaattaacggcaaggagctgaaggtggagggccagattacctactacaacagatacaagagacagaacgtagtcaaggacctgtccgtcgagctggatagactgagcgaagaatctgtgaacaacgacatctcctcctggacaaagggcagaagcggagaagctctgagcctcctgaagaaaagattctcccatagacccgtgcaggagaagttcgtgtgcctgaactgcggcttcgagacacacgcagccgagcaagccgccctgaacatcgccagatcctggctgttcctgcggagccaggagtacaagaaataccagacaaacaagacaaccggcaacaccgataagagagccttcgtcgagacctggcagtccttttaccggaagaagcttaaggaggtgtggaaacctgccgtgcggtctggcggatctggcggaggctccaccagccccaagaaaaagagaaaagtctaagctgccttctgcggggcttgccttctggccatgcccttcttctctcccttgcacctgtacctcttggtctttgaataaagcctgagtaggaaggctagcaaaaaaaaaaaaaaaaaaaaaaaaaaaaaaaaaaaaaaaaaaaaaaaaaaaaaaaaaaaaaaaaaaaaaaaaaaaaaaaa

SEQ ID NO: 10045 - RNA, 8787 nt, synthetic construct
  source 1..8787: mol_type = other RNA
aggaaataagagagaaaagaagagtaagaagaaatataagagccaccatggcccctaagaagaagcgtaaagtgagccggatgaaccacgaccaggagttcgacccccctaaggtgtaccctcccgtccccgccgagaagagaaagcccatccgggtcctgagcctgttcgatggcatcgccaccggtctgctggtgctgaaggacctgggcatccaggtggataggtacattgcctccgaggtgtgcgaggactccatcaccgtgggaatggtgcgtcatcagggcaagatcatgtacgtgggcgacgtgcggagcgtgacacagaagcatatccaggagtggggccctttcgacctggtgatcggcggcagcccttgcaatgacctgagcatcgtgaacccagcccggaagggcctgtacgagggaaccggcagactgttcttcgagttttacagactgctgcacgacgcccggcctaaggaaggcgacgaccggcccttcttttggctgttcgagaatgtggtggccatgggagtcagcgacaagcgggatattagccggttcctggagagcaaccccgtgatgatcgatgccaaggaagtgagcgccgcccaccgggccagatacttctggggcaatctgcctggcatgaacagacccctggccagcaccgtgaacgacaagctggagctgcaggagtgcctggagcacggccggatcgccaagttcagcaaggtgagaaccatcaccacccgaagcaacagcatcaaacaaggcaaggaccagcactttcctgtgttcatgaacgagaaggaggacatcctgtggtgtaccgagatggagagagtgttcgggttcccagtccactacacagatgtcagcaacatgtctagactggccagacagagactgctgggaagaagctggtccgtccctgtgatcagacacctgttcgcccctctgaaggagtacttcgcctgcgtgagcagcggcaacagcaacgccaacagccggggccccagcttctctagcggcctggtgccactgtccctgagagggagccacatgggccccatggagatctacaaaaccgtgagcgcctggaagcggcagcctgtgcgcgtgctgagcctgtttcggaatatcgataaagtcctgaaaagcctgggattcctggagagcggctctggctccggcggtggcaccctgaagtacgtggaggatgtgacaaacgtggtcagacgggatgtggagaagtggggccccttcgatctggtgtacggcagcacccaacccctgggcagctcttgtgaccggtgccctggctggtacatgtttcagttccaccggatcctgcagtacgccctgccgagacaggagtcccagcggccattcttttggattttcatggacaacttgctgctgaccgaggatgaccaggaaactaccactcggttcctgcagaccgaagccgtgaccctgcaggacgtgagaggccgggactaccagaacgccatgcgggtgtggtccaacatccctggactgaaaagcaagcacgcacctctgacccctaaagaagaggagtacctgcaggcccaggtgcggagcagaagcaagctggacgcccctaaggtggatctgctggtgaagaattgcctcctgcccctgagagagtacttcaagtatttcagccagaatagtctgcccctgggaggcagcggcggcggccagcaggtgcccgtgaccttcgaggacgtggccgtgagcttcagccaggaggagtggaagtacctggacgaggcccagaagaacctgtactgggaggtgatgaaggagaactacgagaccctgatcagcctggacagcgaggtgcaccaggaggaggagagggagaagaaccaggaggagtaccccatgctgtggggcctgatcagcaggcagagcaggaagaaccacgagaaggtgtactggggcggcccaagcagcggcgcccctcctcccagcggcggcaggcggcccaagcagcggcgcccctcctcccagcggcggcagcccagccggctccccaacctctaccgaggagggcacctctgagtccgccacccccgagagcggccctggcacctccaccgagcccagcgagggcagcgcacccggcagccctgccggcagccccacctccacagaggagggaaccagcaccgagcccagcgaaggcagcgccccaggcaccagcaccgagcctagtgagcaggagattaaacggatcaacaagatcagaagaagacttgtgaaagacagcaacaccaagaaggccggcaagacaggccccatgaaaaccctgctggttagagtgatgacacccgatctgagagagcggctggaaaacctgagaaagaagcctgaaaatatcccccagcccatcagcaatacatctagagccaacctgaataagctgctgaccgattacaccgaaatgaagaaggcgatcctgcatgtgtactgggaagagttccagaaggaccctgtgggcctgatgagccgggtggcccagcctgccagcaagaagatcgatcagaacaagctgaaacctgagatggacgagaagggcaacctgaccaccgccggctttgcctgctctcagtgtggccagcccctgttcgtgtacaagctggagcaggtgtctgagaagggcaaggcttacaccaactacttcggacggtgcaatgtggccgagcacgaaaagctgatcctgctggcccagctgaagcccgagaaggatagcgacgaagccgtgacatatagcctgggaaagtttgggcagagggccctggatttctacagcattcatgtgaccaaggagtccacccaccccgtgaagcccctggcccagatcgccggaaacagatacgcctccggacctgtgggaaaggccctgagcgacgcatgtatgggcacaatcgcctccttcctgtctaagtaccaggacatcatcatcgaacaccagaaggtggtgaagggcaaccagaagagactggagagcctgcgggagctggccggcaaggaaaacctggaataccctagcgtgaccctgccacctcagcctcacaccaaggagggcgttgatgcctacaacgaagtgatcgcccgggtgcgaatgtgggtgaacctgaacctgtggcagaagctgaagctaagcagagatgatgccaagcctctgctgagactgaagggattcccttcctttcctctggtcgagagacaggccaacgaagtggactggtgggacatggtgtgtaacgtgaagaagctgatcaacgagaaaaaggaggatggcaaggtgttttggcagaatctggctggctacaagagacaggaagccctgagaccatacctgagcagcgaggaagatcggaagaagggaaagaaattcgctcggtaccagctgggcgacctgctgctgcacctggaaaagaagcacggcgaggactggggaaaggtgtacgacgaggcctgggagcggattgacaagaaagtggaaggcctgagcaagcacatcaagctggaagaggaacggagaagcgaggacgcccagagcaaggccgccctgaccgactggctgcgggctaaggccagcttcgtgatcgagggcctgaaggaggccgacaaggacgagttctgcagatgcgagctgaagctgcagaagtggtacggggacctgcggggaaagcccttcgccatcgaagccgagaacagcatcctggacatcagcggcttcagcaagcagtacaactgtgccttcatctggcagaaggacggcgtgaagaagctgaacctgtacctgatcatcaactacttcaagggcggcaagctgcggttcaagaagatcaaacctgaagccttcgaagccaacagattctacaccgtgatcaacaaaaagagcggcgagatcgtgcccatggaggtgaacttcaacttcgacgaccccaacctgatcatcctgcctctggcctttggcaagagacagggcagagaattcatctggaacgacctgctgtccctggaaaccggcagcctgaagctggccaacggaagagtgatcgagaagacactgtacaacagaagaacccggcaggatgagcctgccctgttcgtggccctgaccttcgagcggcgggaggtcctggactcctccaatatcaaaccaatgaacctgatcggcgtggcaagaggcgaaaacatccccgccgtgatcgccctgaccgaccccgagggctgcccactgagccggtttaaggatagcctgggaaacccaacccacatcctgagaatcggcgagagctataaggagaagcagcggaccatccaggccaagaaggaggtggagcagcggagagccggcggctacagccggaagtacgccagcaaagccaagaatctggcagacgatatggtgagaaacaccgctagagatctgctgtactacgccgtgacccaggatgccatgctgatcttcgccaacctgagccggggcttcggccggcagggcaagcggaccttcatggccgagagacagtacacacggatggaggactggctgaccgccaagctggcctacgagggcctgagcaagacctacctgtccaagacactggcccagtacacctccaagacatgcagcaactgtgggtttaccatcaccagcgccgactacgacagggtgctggagaagctgaagaagacagcaacaggctggatgaccacaattaacggcaaggagctgaaggtggagggccagattacctactacaacagatacaagagacagaacgtagtcaaggacctgtccgtcgagctggatagactgagcgaagaatctgtgaacaacgacatctcctcctggacaaagggcagaagcggagaagctctgagcctcctgaagaaaagattctcccatagacccgtgcaggagaagttcgtgtgcctgaactgcggcttcgagacacacgcagccgagcaagccgccctgaacatcgccagatcctggctgttcctgcggagccaggagtacaagaaataccagacaaacaagacaaccggcaacaccgataagagagccttcgtcgagacctggcagtccttttaccggaagaagcttaaggaggtgtggaaacctgccgtgcggtctggcggatctggcggaggctccaccagccccaagaaaaagagaaaagtctaagctgccttctgcggggcttgccttctggccatgcccttcttctctcccttgcacctgtacctcttggtctttgaataaagcctgagtaggaaggctagcaaaaaaaaaaaaaaaaaaaaaaaaaaaaaaaaaaaaaaaaaaaaaaaaaaaaaaaaaaaaaaaaaaaaaaaaaaaaaaaagcccagccggctccccaacctctaccgaggagggcacctctgagtccgccacccccgagagcggccctggcacctccaccgagcccagcgagggcagcgcacccggcagccctgccggcagccccacctccacagaggagggaaccagcaccgagcccagcgaaggcagcgccccaggcaccagcaccgagcctagtgagcaggagattaaacggatcaacaagatcagaagaagacttgtgaaagacagcaacaccaagaaggccggcaagacaggccccatgaaaaccctgctggttagagtgatgacacccgatctgagagagcggctggaaaacctgagaaagaagcctgaaaatatcccccagcccatcagcaatacatctagagccaacctgaataagctgctgaccgattacaccgaaatgaagaaggcgatcctgcatgtgtactgggaagagttccagaaggaccctgtgggcctgatgagccgggtggcccagcctgccagcaagaagatcgatcagaacaagctgaaacctgagatggacgagaagggcaacctgaccaccgccggctttgcctgctctcagtgtggccagcccctgttcgtgtacaagctggagcaggtgtctgagaagggcaaggcttacaccaactacttcggacggtgcaatgtggccgagcacgaaaagctgatcctgctggcccagctgaagcccgagaaggatagcgacgaagccgtgacatatagcctgggaaagtttgggcagagggccctggatttctacagcattcatgtgaccaaggagtccacccaccccgtgaagcccctggcccagatcgccggaaacagatacgcctccggacctgtgggaaaggccctgagcgacgcatgtatgggcacaatcgcctccttcctgtctaagtaccaggacatcatcatcgaacaccagaaggtggtgaagggcaaccagaagagactggagagcctgcgggagctggccggcaaggaaaacctggaataccctagcgtgaccctgccacctcagcctcacaccaaggagggcgttgatgcctacaacgaagtgatcgcccgggtgcgaatgtgggtgaacctgaacctgtggcagaagctgaagctaagcagagatgatgccaagcctctgctgagactgaagggattcccttcctttcctctggtcgagagacaggccaacgaagtggactggtgggacatggtgtgtaacgtgaagaagctgatcaacgagaaaaaggaggatggcaaggtgttttggcagaatctggctggctacaagagacaggaagccctgagaccatacctgagcagcgaggaagatcggaagaagggaaagaaattcgctcggtaccagctgggcgacctgctgctgcacctggaaaagaagcacggcgaggactggggaaaggtgtacgacgaggcctgggagcggattgacaagaaagtggaaggcctgagcaagcacatcaagctggaagaggaacggagaagcgaggacgcccagagcaaggccgccctgaccgactggctgcgggctaaggccagcttcgtgatcgagggcctgaaggaggccgacaaggacgagttctgcagatgcgagctgaagctgcagaagtggtacggggacctgcggggaaagcccttcgccatcgaagccgagaacagcatcctggacatcagcggcttcagcaagcagtacaactgtgccttcatctggcagaaggacggcgtgaagaagctgaacctgtacctgatcatcaactacttcaagggcggcaagctgcggttcaagaagatcaaacctgaagccttcgaagccaacagattctacaccgtgatcaacaaaaagagcggcgagatcgtgcccatggaggtgaacttcaacttcgacgaccccaacctgatcatcctgcctctggcctttggcaagagacagggcagagaattcatctggaacgacctgctgtccctggaaaccggcagcctgaagctggccaacggaagagtgatcgagaagacactgtacaacagaagaacccggcaggatgagcctgccctgttcgtggccctgaccttcgagcggcgggaggtcctggactcctccaatatcaaaccaatgaacctgatcggcgtggcaagaggcgaaaacatccccgccgtgatcgccctgaccgaccccgagggctgcccactgagccggtttaaggatagcctgggaaacccaacccacatcctgagaatcggcgagagctataaggagaagcagcggaccatccaggccaagaaggaggtggagcagcggagagccggcggctacagccggaagtacgccagcaaagccaagaatctggcagacgatatggtgagaaacaccgctagagatctgctgtactacgccgtgacccaggatgccatgctgatcttcgccaacctgagccggggcttcggccggcagggcaagcggaccttcatggccgagagacagtacacacggatggaggactggctgaccgccaagctggcctacgagggcctgagcaagacctacctgtccaagacactggcccagtacacctccaagacatgcagcaactgtgggtttaccatcaccagcgccgactacgacagggtgctggagaagctgaagaagacagcaacaggctggatgaccacaattaacggcaaggagctgaaggtggagggccagattacctactacaacagatacaagagacagaacgtagtcaaggacctgtccgtcgagctggatagactgagcgaagaatctgtgaacaacgacatctcctcctggacaaagggcagaagcggagaagctctgagcctcctgaagaaaagattctcccatagacccgtgcaggagaagttcgtgtgcctgaactgcggcttcgagacacacgcagccgagcaagccgccctgaacatcgccagatcctggctgttcctgcggagccaggagtacaagaaataccagacaaacaagacaaccggcaacaccgataagagagccttcgtcgagacctggcagtccttttaccggaagaagcttaaggaggtgtggaaacctgccgtgcggtctggcggatctggcggaggctccaccagccccaagaaaaagagaaaagtctaagctgccttctgcggggcttgccttctggccatgcccttcttctctcccttgcacctgtacctcttggtctttgaataaagcctgagtaggaaggctagcaaaaaaaaaaaaaaaaaaaaaaaaaaaaaaaaaaaaaaaaaaaaaaaaaaaaaaaaaaaaaaaaaaaaaaaaaaaaaaaa

SEQ ID NO: 10046 - RNA, 8787 nt, synthetic construct
  source 1..8787: mol_type = other RNA
aggaaataagagagaaaagaagagtaagaagaaatataagagccaccatggcccctaagaagaagcgtaaagtgagccggatgaaccacgaccaggagttcgacccccctaaggtgtaccctcccgtccccgccgagaagagaaagcccatccgggtcctgagcctgttcgatggcatcgccaccggtctgctggtgctgaaggacctgggcatccaggtggataggtacattgcctccgaggtgtgcgaggactccatcaccgtgggaatggtgcgtcatcagggcaagatcatgtacgtgggcgacgtgcggagcgtgacacagaagcatatccaggagtggggccctttcgacctggtgatcggcggcagcccttgcaatgacctgagcatcgtgaacccagcccggaagggcctgtacgagggaaccggcagactgttcttcgagttttacagactgctgcacgacgcccggcctaaggaaggcgacgaccggcccttcttttggctgttcgagaatgtggtggccatgggagtcagcgacaagcgggatattagccggttcctggagagcaaccccgtgatgatcgatgccaaggaagtgagcgccgcccaccgggccagatacttctggggcaatctgcctggcatgaacagacccctggccagcaccgtgaacgacaagctggagctgcaggagtgcctggagcacggccggatcgccaagttcagcaaggtgagaaccatcaccacccgaagcaacagcatcaaacaaggcaaggaccagcactttcctgtgttcatgaacgagaaggaggacatcctgtggtgtaccgagatggagagagtgttcgggttcccagtccactacacagatgtcagcaacatgtctagactggccagacagagactgctgggaagaagctggtccgtccctgtgatcagacacctgttcgcccctctgaaggagtacttcgcctgcgtgagcagcggcaacagcaacgccaacagccggggccccagcttctctagcggcctggtgccactgtccctgagagggagccacatgggccccatggagatctacaaaaccgtgagcgcctggaagcggcagcctgtgcgcgtgctgagcctgtttcggaatatcgataaagtcctgaaaagcctgggattcctggagagcggctctggctccggcggtggcaccctgaagtacgtggaggatgtgacaaacgtggtcagacgggatgtggagaagtggggccccttcgatctggtgtacggcagcacccaacccctgggcagctcttgtgaccggtgccctggctggtacatgtttcagttccaccggatcctgcagtacgccctgccgagacaggagtcccagcggccattcttttggattttcatggacaacttgctgctgaccgaggatgaccaggaaactaccactcggttcctgcagaccgaagccgtgaccctgcaggacgtgagaggccgggactaccagaacgccatgcgggtgtggtccaacatccctggactgaaaagcaagcacgcacctctgacccctaaagaagaggagtacctgcaggcccaggtgcggagcagaagcaagctggacgcccctaaggtggatctgctggtgaagaattgcctcctgcccctgagagagtacttcaagtatttcagccagaatagtctgcccctgggaggcagcggcggcggccccagggagagcgtgaccttcgaggacgtggccgtgaacttcagccacgaggagtggcagtgcctgacccacagccagaggcacctgtacaaggacgtgatgctggagaactacggcaacatggtgagcctgggcttcagcttcagcaagccccccctgatcagctgcctggagcagggcgccgagagctacgtgcaggaccagcaggactgggagttcctgagctgcagctaccccgtgagcggcggcccaagcagcggcgcccctcctcccagcggcggcaggcggcccaagcagcggcgcccctcctcccagcggcggcagcccagccggctccccaacctctaccgaggagggcacctctgagtccgccacccccgagagcggccctggcacctccaccgagcccagcgagggcagcgcacccggcagccctgccggcagccccacctccacagaggagggaaccagcaccgagcccagcgaaggcagcgccccaggcaccagcaccgagcctagtgagcaggagattaaacggatcaacaagatcagaagaagacttgtgaaagacagcaacaccaagaaggccggcaagacaggccccatgaaaaccctgctggttagagtgatgacacccgatctgagagagcggctggaaaacctgagaaagaagcctgaaaatatcccccagcccatcagcaatacatctagagccaacctgaataagctgctgaccgattacaccgaaatgaagaaggcgatcctgcatgtgtactgggaagagttccagaaggaccctgtgggcctgatgagccgggtggcccagcctgccagcaagaagatcgatcagaacaagctgaaacctgagatggacgagaagggcaacctgaccaccgccggctttgcctgctctcagtgtggccagcccctgttcgtgtacaagctggagcaggtgtctgagaagggcaaggcttacaccaactacttcggacggtgcaatgtggccgagcacgaaaagctgatcctgctggcccagctgaagcccgagaaggatagcgacgaagccgtgacatatagcctgggaaagtttgggcagagggccctggatttctacagcattcatgtgaccaaggagtccacccaccccgtgaagcccctggcccagatcgccggaaacagatacgcctccggacctgtgggaaaggccctgagcgacgcatgtatgggcacaatcgcctccttcctgtctaagtaccaggacatcatcatcgaacaccagaaggtggtgaagggcaaccagaagagactggagagcctgcgggagctggccggcaaggaaaacctggaataccctagcgtgaccctgccacctcagcctcacaccaaggagggcgttgatgcctacaacgaagtgatcgcccgggtgcgaatgtgggtgaacctgaacctgtggcagaagctgaagctaagcagagatgatgccaagcctctgctgagactgaagggattcccttcctttcctctggtcgagagacaggccaacgaagtggactggtgggacatggtgtgtaacgtgaagaagctgatcaacgagaaaaaggaggatggcaaggtgttttggcagaatctggctggctacaagagacaggaagccctgagaccatacctgagcagcgaggaagatcggaagaagggaaagaaattcgctcggtaccagctgggcgacctgctgctgcacctggaaaagaagcacggcgaggactggggaaaggtgtacgacgaggcctgggagcggattgacaagaaagtggaaggcctgagcaagcacatcaagctggaagaggaacggagaagcgaggacgcccagagcaaggccgccctgaccgactggctgcgggctaaggccagcttcgtgatcgagggcctgaaggaggccgacaaggacgagttctgcagatgcgagctgaagctgcagaagtggtacggggacctgcggggaaagcccttcgccatcgaagccgagaacagcatcctggacatcagcggcttcagcaagcagtacaactgtgccttcatctggcagaaggacggcgtgaagaagctgaacctgtacctgatcatcaactacttcaagggcggcaagctgcggttcaagaagatcaaacctgaagccttcgaagccaacagattctacaccgtgatcaacaaaaagagcggcgagatcgtgcccatggaggtgaacttcaacttcgacgaccccaacctgatcatcctgcctctggcctttggcaagagacagggcagagaattcatctggaacgacctgctgtccctggaaaccggcagcctgaagctggccaacggaagagtgatcgagaagacactgtacaacagaagaacccggcaggatgagcctgccctgttcgtggccctgaccttcgagcggcgggaggtcctggactcctccaatatcaaaccaatgaacctgatcggcgtggcaagaggcgaaaacatccccgccgtgatcgccctgaccgaccccgagggctgcccactgagccggtttaaggatagcctgggaaacccaacccacatcctgagaatcggcgagagctataaggagaagcagcggaccatccaggccaagaaggaggtggagcagcggagagccggcggctacagccggaagtacgccagcaaagccaagaatctggcagacgatatggtgagaaacaccgctagagatctgctgtactacgccgtgacccaggatgccatgctgatcttcgccaacctgagccggggcttcggccggcagggcaagcggaccttcatggccgagagacagtacacacggatggaggactggctgaccgccaagctggcctacgagggcctgagcaagacctacctgtccaagacactggcccagtacacctccaagacatgcagcaactgtgggtttaccatcaccagcgccgactacgacagggtgctggagaagctgaagaagacagcaacaggctggatgaccacaattaacggcaaggagctgaaggtggagggccagattacctactacaacagatacaagagacagaacgtagtcaaggacctgtccgtcgagctggatagactgagcgaagaatctgtgaacaacgacatctcctcctggacaaagggcagaagcggagaagctctgagcctcctgaagaaaagattctcccatagacccgtgcaggagaagttcgtgtgcctgaactgcggcttcgagacacacgcagccgagcaagccgccctgaacatcgccagatcctggctgttcctgcggagccaggagtacaagaaataccagacaaacaagacaaccggcaacaccgataagagagccttcgtcgagacctggcagtccttttaccggaagaagcttaaggaggtgtggaaacctgccgtgcggtctggcggatctggcggaggctccaccagccccaagaaaaagagaaaagtctaagctgccttctgcggggcttgccttctggccatgcccttcttctctcccttgcacctgtacctcttggtctttgaataaagcctgagtaggaaggctagcaaaaaaaaaaaaaaaaaaaaaaaaaaaaaaaaaaaaaaaaaaaaaaaaaaaaaaaaaaaaaaaaaaaaaaaaaaaaaaaagcccagccggctccccaacctctaccgaggagggcacctctgagtccgccacccccgagagcggccctggcacctccaccgagcccagcgagggcagcgcacccggcagccctgccggcagccccacctccacagaggagggaaccagcaccgagcccagcgaaggcagcgccccaggcaccagcaccgagcctagtgagcaggagattaaacggatcaacaagatcagaagaagacttgtgaaagacagcaacaccaagaaggccggcaagacaggccccatgaaaaccctgctggttagagtgatgacacccgatctgagagagcggctggaaaacctgagaaagaagcctgaaaatatcccccagcccatcagcaatacatctagagccaacctgaataagctgctgaccgattacaccgaaatgaagaaggcgatcctgcatgtgtactgggaagagttccagaaggaccctgtgggcctgatgagccgggtggcccagcctgccagcaagaagatcgatcagaacaagctgaaacctgagatggacgagaagggcaacctgaccaccgccggctttgcctgctctcagtgtggccagcccctgttcgtgtacaagctggagcaggtgtctgagaagggcaaggcttacaccaactacttcggacggtgcaatgtggccgagcacgaaaagctgatcctgctggcccagctgaagcccgagaaggatagcgacgaagccgtgacatatagcctgggaaagtttgggcagagggccctggatttctacagcattcatgtgaccaaggagtccacccaccccgtgaagcccctggcccagatcgccggaaacagatacgcctccggacctgtgggaaaggccctgagcgacgcatgtatgggcacaatcgcctccttcctgtctaagtaccaggacatcatcatcgaacaccagaaggtggtgaagggcaaccagaagagactggagagcctgcgggagctggccggcaaggaaaacctggaataccctagcgtgaccctgccacctcagcctcacaccaaggagggcgttgatgcctacaacgaagtgatcgcccgggtgcgaatgtgggtgaacctgaacctgtggcagaagctgaagctaagcagagatgatgccaagcctctgctgagactgaagggattcccttcctttcctctggtcgagagacaggccaacgaagtggactggtgggacatggtgtgtaacgtgaagaagctgatcaacgagaaaaaggaggatggcaaggtgttttggcagaatctggctggctacaagagacaggaagccctgagaccatacctgagcagcgaggaagatcggaagaagggaaagaaattcgctcggtaccagctgggcgacctgctgctgcacctggaaaagaagcacggcgaggactggggaaaggtgtacgacgaggcctgggagcggattgacaagaaagtggaaggcctgagcaagcacatcaagctggaagaggaacggagaagcgaggacgcccagagcaaggccgccctgaccgactggctgcgggctaaggccagcttcgtgatcgagggcctgaaggaggccgacaaggacgagttctgcagatgcgagctgaagctgcagaagtggtacggggacctgcggggaaagcccttcgccatcgaagccgagaacagcatcctggacatcagcggcttcagcaagcagtacaactgtgccttcatctggcagaaggacggcgtgaagaagctgaacctgtacctgatcatcaactacttcaagggcggcaagctgcggttcaagaagatcaaacctgaagccttcgaagccaacagattctacaccgtgatcaacaaaaagagcggcgagatcgtgcccatggaggtgaacttcaacttcgacgaccccaacctgatcatcctgcctctggcctttggcaagagacagggcagagaattcatctggaacgacctgctgtccctggaaaccggcagcctgaagctggccaacggaagagtgatcgagaagacactgtacaacagaagaacccggcaggatgagcctgccctgttcgtggccctgaccttcgagcggcgggaggtcctggactcctccaatatcaaaccaatgaacctgatcggcgtggcaagaggcgaaaacatccccgccgtgatcgccctgaccgaccccgagggctgcccactgagccggtttaaggatagcctgggaaacccaacccacatcctgagaatcggcgagagctataaggagaagcagcggaccatccaggccaagaaggaggtggagcagcggagagccggcggctacagccggaagtacgccagcaaagccaagaatctggcagacgatatggtgagaaacaccgctagagatctgctgtactacgccgtgacccaggatgccatgctgatcttcgccaacctgagccggggcttcggccggcagggcaagcggaccttcatggccgagagacagtacacacggatggaggactggctgaccgccaagctggcctacgagggcctgagcaagacctacctgtccaagacactggcccagtacacctccaagacatgcagcaactgtgggtttaccatcaccagcgccgactacgacagggtgctggagaagctgaagaagacagcaacaggctggatgaccacaattaacggcaaggagctgaaggtggagggccagattacctactacaacagatacaagagacagaacgtagtcaaggacctgtccgtcgagctggatagactgagcgaagaatctgtgaacaacgacatctcctcctggacaaagggcagaagcggagaagctctgagcctcctgaagaaaagattctcccatagacccgtgcaggagaagttcgtgtgcctgaactgcggcttcgagacacacgcagccgagcaagccgccctgaacatcgccagatcctggctgttcctgcggagccaggagtacaagaaataccagacaaacaagacaaccggcaacaccgataagagagccttcgtcgagacctggcagtccttttaccggaagaagcttaaggaggtgtggaaacctgccgtgcggtctggcggatctggcggaggctccaccagccccaagaaaaagagaaaagtctaagctgccttctgcggggcttgccttctggccatgcccttcttctctcccttgcacctgtacctcttggtctttgaataaagcctgagtaggaaggctagcaaaaaaaaaaaaaaaaaaaaaaaaaaaaaaaaaaaaaaaaaaaaaaaaaaaaaaaaaaaaaaaaaaaaaaaaaaaaaaaa

SEQ ID NO: 10047 - RNA, 8787 nt, synthetic construct
  source 1..8787: mol_type = other RNA
aggaaataagagagaaaagaagagtaagaagaaatataagagccaccatggcccctaagaagaagcgtaaagtgagccggatgaaccacgaccaggagttcgacccccctaaggtgtaccctcccgtccccgccgagaagagaaagcccatccgggtcctgagcctgttcgatggcatcgccaccggtctgctggtgctgaaggacctgggcatccaggtggataggtacattgcctccgaggtgtgcgaggactccatcaccgtgggaatggtgcgtcatcagggcaagatcatgtacgtgggcgacgtgcggagcgtgacacagaagcatatccaggagtggggccctttcgacctggtgatcggcggcagcccttgcaatgacctgagcatcgtgaacccagcccggaagggcctgtacgagggaaccggcagactgttcttcgagttttacagactgctgcacgacgcccggcctaaggaaggcgacgaccggcccttcttttggctgttcgagaatgtggtggccatgggagtcagcgacaagcgggatattagccggttcctggagagcaaccccgtgatgatcgatgccaaggaagtgagcgccgcccaccgggccagatacttctggggcaatctgcctggcatgaacagacccctggccagcaccgtgaacgacaagctggagctgcaggagtgcctggagcacggccggatcgccaagttcagcaaggtgagaaccatcaccacccgaagcaacagcatcaaacaaggcaaggaccagcactttcctgtgttcatgaacgagaaggaggacatcctgtggtgtaccgagatggagagagtgttcgggttcccagtccactacacagatgtcagcaacatgtctagactggccagacagagactgctgggaagaagctggtccgtccctgtgatcagacacctgttcgcccctctgaaggagtacttcgcctgcgtgagcagcggcaacagcaacgccaacagccggggccccagcttctctagcggcctggtgccactgtccctgagagggagccacatgggccccatggagatctacaaaaccgtgagcgcctggaagcggcagcctgtgcgcgtgctgagcctgtttcggaatatcgataaagtcctgaaaagcctgggattcctggagagcggctctggctccggcggtggcaccctgaagtacgtggaggatgtgacaaacgtggtcagacgggatgtggagaagtggggccccttcgatctggtgtacggcagcacccaacccctgggcagctcttgtgaccggtgccctggctggtacatgtttcagttccaccggatcctgcagtacgccctgccgagacaggagtcccagcggccattcttttggattttcatggacaacttgctgctgaccgaggatgaccaggaaactaccactcggttcctgcagaccgaagccgtgaccctgcaggacgtgagaggccgggactaccagaacgccatgcgggtgtggtccaacatccctggactgaaaagcaagcacgcacctctgacccctaaagaagaggagtacctgcaggcccaggtgcggagcagaagcaagctggacgcccctaaggtggatctgctggtgaagaattgcctcctgcccctgagagagtacttcaagtatttcagccagaatagtctgcccctgggaggcagcggcggcggcagcagccagggcctgctgaccttcagggacgtggccatcgagttcagccaggaggagtggggctgcctgaaccacacccagagggagctgtacagggacgtgatgctggagaactacggccacctgctgttcctgggcctgatcgtgagcaagcccgacctggtgagcttcctggagcagaagaaggacccctgggacgtgaagaggaagaagaccgtggccttccaccccggcaggtgggagggcggcccaagcagcggcgcccctcctcccagcggcggcaggcggcccaagcagcggcgcccctcctcccagcggcggcagcccagccggctccccaacctctaccgaggagggcacctctgagtccgccacccccgagagcggccctggcacctccaccgagcccagcgagggcagcgcacccggcagccctgccggcagccccacctccacagaggagggaaccagcaccgagcccagcgaaggcagcgccccaggcaccagcaccgagcctagtgagcaggagattaaacggatcaacaagatcagaagaagacttgtgaaagacagcaacaccaagaaggccggcaagacaggccccatgaaaaccctgctggttagagtgatgacacccgatctgagagagcggctggaaaacctgagaaagaagcctgaaaatatcccccagcccatcagcaatacatctagagccaacctgaataagctgctgaccgattacaccgaaatgaagaaggcgatcctgcatgtgtactgggaagagttccagaaggaccctgtgggcctgatgagccgggtggcccagcctgccagcaagaagatcgatcagaacaagctgaaacctgagatggacgagaagggcaacctgaccaccgccggctttgcctgctctcagtgtggccagcccctgttcgtgtacaagctggagcaggtgtctgagaagggcaaggcttacaccaactacttcggacggtgcaatgtggccgagcacgaaaagctgatcctgctggcccagctgaagcccgagaaggatagcgacgaagccgtgacatatagcctgggaaagtttgggcagagggccctggatttctacagcattcatgtgaccaaggagtccacccaccccgtgaagcccctggcccagatcgccggaaacagatacgcctccggacctgtgggaaaggccctgagcgacgcatgtatgggcacaatcgcctccttcctgtctaagtaccaggacatcatcatcgaacaccagaaggtggtgaagggcaaccagaagagactggagagcctgcgggagctggccggcaaggaaaacctggaataccctagcgtgaccctgccacctcagcctcacaccaaggagggcgttgatgcctacaacgaagtgatcgcccgggtgcgaatgtgggtgaacctgaacctgtggcagaagctgaagctaagcagagatgatgccaagcctctgctgagactgaagggattcccttcctttcctctggtcgagagacaggccaacgaagtggactggtgggacatggtgtgtaacgtgaagaagctgatcaacgagaaaaaggaggatggcaaggtgttttggcagaatctggctggctacaagagacaggaagccctgagaccatacctgagcagcgaggaagatcggaagaagggaaagaaattcgctcggtaccagctgggcgacctgctgctgcacctggaaaagaagcacggcgaggactggggaaaggtgtacgacgaggcctgggagcggattgacaagaaagtggaaggcctgagcaagcacatcaagctggaagaggaacggagaagcgaggacgcccagagcaaggccgccctgaccgactggctgcgggctaaggccagcttcgtgatcgagggcctgaaggaggccgacaaggacgagttctgcagatgcgagctgaagctgcagaagtggtacggggacctgcggggaaagcccttcgccatcgaagccgagaacagcatcctggacatcagcggcttcagcaagcagtacaactgtgccttcatctggcagaaggacggcgtgaagaagctgaacctgtacctgatcatcaactacttcaagggcggcaagctgcggttcaagaagatcaaacctgaagccttcgaagccaacagattctacaccgtgatcaacaaaaagagcggcgagatcgtgcccatggaggtgaacttcaacttcgacgaccccaacctgatcatcctgcctctggcctttggcaagagacagggcagagaattcatctggaacgacctgctgtccctggaaaccggcagcctgaagctggccaacggaagagtgatcgagaagacactgtacaacagaagaacccggcaggatgagcctgccctgttcgtggccctgaccttcgagcggcgggaggtcctggactcctccaatatcaaaccaatgaacctgatcggcgtggcaagaggcgaaaacatccccgccgtgatcgccctgaccgaccccgagggctgcccactgagccggtttaaggatagcctgggaaacccaacccacatcctgagaatcggcgagagctataaggagaagcagcggaccatccaggccaagaaggaggtggagcagcggagagccggcggctacagccggaagtacgccagcaaagccaagaatctggcagacgatatggtgagaaacaccgctagagatctgctgtactacgccgtgacccaggatgccatgctgatcttcgccaacctgagccggggcttcggccggcagggcaagcggaccttcatggccgagagacagtacacacggatggaggactggctgaccgccaagctggcctacgagggcctgagcaagacctacctgtccaagacactggcccagtacacctccaagacatgcagcaactgtgggtttaccatcaccagcgccgactacgacagggtgctggagaagctgaagaagacagcaacaggctggatgaccacaattaacggcaaggagctgaaggtggagggccagattacctactacaacagatacaagagacagaacgtagtcaaggacctgtccgtcgagctggatagactgagcgaagaatctgtgaacaacgacatctcctcctggacaaagggcagaagcggagaagctctgagcctcctgaagaaaagattctcccatagacccgtgcaggagaagttcgtgtgcctgaactgcggcttcgagacacacgcagccgagcaagccgccctgaacatcgccagatcctggctgttcctgcggagccaggagtacaagaaataccagacaaacaagacaaccggcaacaccgataagagagccttcgtcgagacctggcagtccttttaccggaagaagcttaaggaggtgtggaaacctgccgtgcggtctggcggatctggcggaggctccaccagccccaagaaaaagagaaaagtctaagctgccttctgcggggcttgccttctggccatgcccttcttctctcccttgcacctgtacctcttggtctttgaataaagcctgagtaggaaggctagcaaaaaaaaaaaaaaaaaaaaaaaaaaaaaaaaaaaaaaaaaaaaaaaaaaaaaaaaaaaaaaaaaaaaaaaaaaaaaaaagcccagccggctccccaacctctaccgaggagggcacctctgagtccgccacccccgagagcggccctggcacctccaccgagcccagcgagggcagcgcacccggcagccctgccggcagccccacctccacagaggagggaaccagcaccgagcccagcgaaggcagcgccccaggcaccagcaccgagcctagtgagcaggagattaaacggatcaacaagatcagaagaagacttgtgaaagacagcaacaccaagaaggccggcaagacaggccccatgaaaaccctgctggttagagtgatgacacccgatctgagagagcggctggaaaacctgagaaagaagcctgaaaatatcccccagcccatcagcaatacatctagagccaacctgaataagctgctgaccgattacaccgaaatgaagaaggcgatcctgcatgtgtactgggaagagttccagaaggaccctgtgggcctgatgagccgggtggcccagcctgccagcaagaagatcgatcagaacaagctgaaacctgagatggacgagaagggcaacctgaccaccgccggctttgcctgctctcagtgtggccagcccctgttcgtgtacaagctggagcaggtgtctgagaagggcaaggcttacaccaactacttcggacggtgcaatgtggccgagcacgaaaagctgatcctgctggcccagctgaagcccgagaaggatagcgacgaagccgtgacatatagcctgggaaagtttgggcagagggccctggatttctacagcattcatgtgaccaaggagtccacccaccccgtgaagcccctggcccagatcgccggaaacagatacgcctccggacctgtgggaaaggccctgagcgacgcatgtatgggcacaatcgcctccttcctgtctaagtaccaggacatcatcatcgaacaccagaaggtggtgaagggcaaccagaagagactggagagcctgcgggagctggccggcaaggaaaacctggaataccctagcgtgaccctgccacctcagcctcacaccaaggagggcgttgatgcctacaacgaagtgatcgcccgggtgcgaatgtgggtgaacctgaacctgtggcagaagctgaagctaagcagagatgatgccaagcctctgctgagactgaagggattcccttcctttcctctggtcgagagacaggccaacgaagtggactggtgggacatggtgtgtaacgtgaagaagctgatcaacgagaaaaaggaggatggcaaggtgttttggcagaatctggctggctacaagagacaggaagccctgagaccatacctgagcagcgaggaagatcggaagaagggaaagaaattcgctcggtaccagctgggcgacctgctgctgcacctggaaaagaagcacggcgaggactggggaaaggtgtacgacgaggcctgggagcggattgacaagaaagtggaaggcctgagcaagcacatcaagctggaagaggaacggagaagcgaggacgcccagagcaaggccgccctgaccgactggctgcgggctaaggccagcttcgtgatcgagggcctgaaggaggccgacaaggacgagttctgcagatgcgagctgaagctgcagaagtggtacggggacctgcggggaaagcccttcgccatcgaagccgagaacagcatcctggacatcagcggcttcagcaagcagtacaactgtgccttcatctggcagaaggacggcgtgaagaagctgaacctgtacctgatcatcaactacttcaagggcggcaagctgcggttcaagaagatcaaacctgaagccttcgaagccaacagattctacaccgtgatcaacaaaaagagcggcgagatcgtgcccatggaggtgaacttcaacttcgacgaccccaacctgatcatcctgcctctggcctttggcaagagacagggcagagaattcatctggaacgacctgctgtccctggaaaccggcagcctgaagctggccaacggaagagtgatcgagaagacactgtacaacagaagaacccggcaggatgagcctgccctgttcgtggccctgaccttcgagcggcgggaggtcctggactcctccaatatcaaaccaatgaacctgatcggcgtggcaagaggcgaaaacatccccgccgtgatcgccctgaccgaccccgagggctgcccactgagccggtttaaggatagcctgggaaacccaacccacatcctgagaatcggcgagagctataaggagaagcagcggaccatccaggccaagaaggaggtggagcagcggagagccggcggctacagccggaagtacgccagcaaagccaagaatctggcagacgatatggtgagaaacaccgctagagatctgctgtactacgccgtgacccaggatgccatgctgatcttcgccaacctgagccggggcttcggccggcagggcaagcggaccttcatggccgagagacagtacacacggatggaggactggctgaccgccaagctggcctacgagggcctgagcaagacctacctgtccaagacactggcccagtacacctccaagacatgcagcaactgtgggtttaccatcaccagcgccgactacgacagggtgctggagaagctgaagaagacagcaacaggctggatgaccacaattaacggcaaggagctgaaggtggagggccagattacctactacaacagatacaagagacagaacgtagtcaaggacctgtccgtcgagctggatagactgagcgaagaatctgtgaacaacgacatctcctcctggacaaagggcagaagcggagaagctctgagcctcctgaagaaaagattctcccatagacccgtgcaggagaagttcgtgtgcctgaactgcggcttcgagacacacgcagccgagcaagccgccctgaacatcgccagatcctggctgttcctgcggagccaggagtacaagaaataccagacaaacaagacaaccggcaacaccgataagagagccttcgtcgagacctggcagtccttttaccggaagaagcttaaggaggtgtggaaacctgccgtgcggtctggcggatctggcggaggctccaccagccccaagaaaaagagaaaagtctaagctgccttctgcggggcttgccttctggccatgcccttcttctctcccttgcacctgtacctcttggtctttgaataaagcctgagtaggaaggctagcaaaaaaaaaaaaaaaaaaaaaaaaaaaaaaaaaaaaaaaaaaaaaaaaaaaaaaaaaaaaaaaaaaaaaaaaaaaaaaaa

SEQ ID NO: 10048 - RNA, 8787 nt, synthetic construct
  source 1..8787: mol_type = other RNA
aggaaataagagagaaaagaagagtaagaagaaatataagagccaccatggcccctaagaagaagcgtaaagtgagccggatgaaccacgaccaggagttcgacccccctaaggtgtaccctcccgtccccgccgagaagagaaagcccatccgggtcctgagcctgttcgatggcatcgccaccggtctgctggtgctgaaggacctgggcatccaggtggataggtacattgcctccgaggtgtgcgaggactccatcaccgtgggaatggtgcgtcatcagggcaagatcatgtacgtgggcgacgtgcggagcgtgacacagaagcatatccaggagtggggccctttcgacctggtgatcggcggcagcccttgcaatgacctgagcatcgtgaacccagcccggaagggcctgtacgagggaaccggcagactgttcttcgagttttacagactgctgcacgacgcccggcctaaggaaggcgacgaccggcccttcttttggctgttcgagaatgtggtggccatgggagtcagcgacaagcgggatattagccggttcctggagagcaaccccgtgatgatcgatgccaaggaagtgagcgccgcccaccgggccagatacttctggggcaatctgcctggcatgaacagacccctggccagcaccgtgaacgacaagctggagctgcaggagtgcctggagcacggccggatcgccaagttcagcaaggtgagaaccatcaccacccgaagcaacagcatcaaacaaggcaaggaccagcactttcctgtgttcatgaacgagaaggaggacatcctgtggtgtaccgagatggagagagtgttcgggttcccagtccactacacagatgtcagcaacatgtctagactggccagacagagactgctgggaagaagctggtccgtccctgtgatcagacacctgttcgcccctctgaaggagtacttcgcctgcgtgagcagcggcaacagcaacgccaacagccggggccccagcttctctagcggcctggtgccactgtccctgagagggagccacatgggccccatggagatctacaaaaccgtgagcgcctggaagcggcagcctgtgcgcgtgctgagcctgtttcggaatatcgataaagtcctgaaaagcctgggattcctggagagcggctctggctccggcggtggcaccctgaagtacgtggaggatgtgacaaacgtggtcagacgggatgtggagaagtggggccccttcgatctggtgtacggcagcacccaacccctgggcagctcttgtgaccggtgccctggctggtacatgtttcagttccaccggatcctgcagtacgccctgccgagacaggagtcccagcggccattcttttggattttcatggacaacttgctgctgaccgaggatgaccaggaaactaccactcggttcctgcagaccgaagccgtgaccctgcaggacgtgagaggccgggactaccagaacgccatgcgggtgtggtccaacatccctggactgaaaagcaagcacgcacctctgacccctaaagaagaggagtacctgcaggcccaggtgcggagcagaagcaagctggacgcccctaaggtggatctgctggtgaagaattgcctcctgcccctgagagagtacttcaagtatttcagccagaatagtctgcccctgggaggcagcggcggcggcatgctggcccccgtgaccttcgaggacgtgaccgtggtgttcaccgaggccgagtgggtgaccctgagcaccgagcagaagaacctgtacaaggaggtgaccctggagacctacaggaacctgctgagcctggccgagcccacccccgagacctaccccggccccagctgcctgctgcccttcagctgccagcagttcctgagccagcacgtgctgcagatcttccccggcgtgtgcgccgagggcggcccaagcagcggcgcccctcctcccagcggcggcaggcggcccaagcagcggcgcccctcctcccagcggcggcagcccagccggctccccaacctctaccgaggagggcacctctgagtccgccacccccgagagcggccctggcacctccaccgagcccagcgagggcagcgcacccggcagccctgccggcagccccacctccacagaggagggaaccagcaccgagcccagcgaaggcagcgccccaggcaccagcaccgagcctagtgagcaggagattaaacggatcaacaagatcagaagaagacttgtgaaagacagcaacaccaagaaggccggcaagacaggccccatgaaaaccctgctggttagagtgatgacacccgatctgagagagcggctggaaaacctgagaaagaagcctgaaaatatcccccagcccatcagcaatacatctagagccaacctgaataagctgctgaccgattacaccgaaatgaagaaggcgatcctgcatgtgtactgggaagagttccagaaggaccctgtgggcctgatgagccgggtggcccagcctgccagcaagaagatcgatcagaacaagctgaaacctgagatggacgagaagggcaacctgaccaccgccggctttgcctgctctcagtgtggccagcccctgttcgtgtacaagctggagcaggtgtctgagaagggcaaggcttacaccaactacttcggacggtgcaatgtggccgagcacgaaaagctgatcctgctggcccagctgaagcccgagaaggatagcgacgaagccgtgacatatagcctgggaaagtttgggcagagggccctggatttctacagcattcatgtgaccaaggagtccacccaccccgtgaagcccctggcccagatcgccggaaacagatacgcctccggacctgtgggaaaggccctgagcgacgcatgtatgggcacaatcgcctccttcctgtctaagtaccaggacatcatcatcgaacaccagaaggtggtgaagggcaaccagaagagactggagagcctgcgggagctggccggcaaggaaaacctggaataccctagcgtgaccctgccacctcagcctcacaccaaggagggcgttgatgcctacaacgaagtgatcgcccgggtgcgaatgtgggtgaacctgaacctgtggcagaagctgaagctaagcagagatgatgccaagcctctgctgagactgaagggattcccttcctttcctctggtcgagagacaggccaacgaagtggactggtgggacatggtgtgtaacgtgaagaagctgatcaacgagaaaaaggaggatggcaaggtgttttggcagaatctggctggctacaagagacaggaagccctgagaccatacctgagcagcgaggaagatcggaagaagggaaagaaattcgctcggtaccagctgggcgacctgctgctgcacctggaaaagaagcacggcgaggactggggaaaggtgtacgacgaggcctgggagcggattgacaagaaagtggaaggcctgagcaagcacatcaagctggaagaggaacggagaagcgaggacgcccagagcaaggccgccctgaccgactggctgcgggctaaggccagcttcgtgatcgagggcctgaaggaggccgacaaggacgagttctgcagatgcgagctgaagctgcagaagtggtacggggacctgcggggaaagcccttcgccatcgaagccgagaacagcatcctggacatcagcggcttcagcaagcagtacaactgtgccttcatctggcagaaggacggcgtgaagaagctgaacctgtacctgatcatcaactacttcaagggcggcaagctgcggttcaagaagatcaaacctgaagccttcgaagccaacagattctacaccgtgatcaacaaaaagagcggcgagatcgtgcccatggaggtgaacttcaacttcgacgaccccaacctgatcatcctgcctctggcctttggcaagagacagggcagagaattcatctggaacgacctgctgtccctggaaaccggcagcctgaagctggccaacggaagagtgatcgagaagacactgtacaacagaagaacccggcaggatgagcctgccctgttcgtggccctgaccttcgagcggcgggaggtcctggactcctccaatatcaaaccaatgaacctgatcggcgtggcaagaggcgaaaacatccccgccgtgatcgccctgaccgaccccgagggctgcccactgagccggtttaaggatagcctgggaaacccaacccacatcctgagaatcggcgagagctataaggagaagcagcggaccatccaggccaagaaggaggtggagcagcggagagccggcggctacagccggaagtacgccagcaaagccaagaatctggcagacgatatggtgagaaacaccgctagagatctgctgtactacgccgtgacccaggatgccatgctgatcttcgccaacctgagccggggcttcggccggcagggcaagcggaccttcatggccgagagacagtacacacggatggaggactggctgaccgccaagctggcctacgagggcctgagcaagacctacctgtccaagacactggcccagtacacctccaagacatgcagcaactgtgggtttaccatcaccagcgccgactacgacagggtgctggagaagctgaagaagacagcaacaggctggatgaccacaattaacggcaaggagctgaaggtggagggccagattacctactacaacagatacaagagacagaacgtagtcaaggacctgtccgtcgagctggatagactgagcgaagaatctgtgaacaacgacatctcctcctggacaaagggcagaagcggagaagctctgagcctcctgaagaaaagattctcccatagacccgtgcaggagaagttcgtgtgcctgaactgcggcttcgagacacacgcagccgagcaagccgccctgaacatcgccagatcctggctgttcctgcggagccaggagtacaagaaataccagacaaacaagacaaccggcaacaccgataagagagccttcgtcgagacctggcagtccttttaccggaagaagcttaaggaggtgtggaaacctgccgtgcggtctggcggatctggcggaggctccaccagccccaagaaaaagagaaaagtctaagctgccttctgcggggcttgccttctggccatgcccttcttctctcccttgcacctgtacctcttggtctttgaataaagcctgagtaggaaggctagcaaaaaaaaaaaaaaaaaaaaaaaaaaaaaaaaaaaaaaaaaaaaaaaaaaaaaaaaaaaaaaaaaaaaaaaaaaaaaaaagcccagccggctccccaacctctaccgaggagggcacctctgagtccgccacccccgagagcggccctggcacctccaccgagcccagcgagggcagcgcacccggcagccctgccggcagccccacctccacagaggagggaaccagcaccgagcccagcgaaggcagcgccccaggcaccagcaccgagcctagtgagcaggagattaaacggatcaacaagatcagaagaagacttgtgaaagacagcaacaccaagaaggccggcaagacaggccccatgaaaaccctgctggttagagtgatgacacccgatctgagagagcggctggaaaacctgagaaagaagcctgaaaatatcccccagcccatcagcaatacatctagagccaacctgaataagctgctgaccgattacaccgaaatgaagaaggcgatcctgcatgtgtactgggaagagttccagaaggaccctgtgggcctgatgagccgggtggcccagcctgccagcaagaagatcgatcagaacaagctgaaacctgagatggacgagaagggcaacctgaccaccgccggctttgcctgctctcagtgtggccagcccctgttcgtgtacaagctggagcaggtgtctgagaagggcaaggcttacaccaactacttcggacggtgcaatgtggccgagcacgaaaagctgatcctgctggcccagctgaagcccgagaaggatagcgacgaagccgtgacatatagcctgggaaagtttgggcagagggccctggatttctacagcattcatgtgaccaaggagtccacccaccccgtgaagcccctggcccagatcgccggaaacagatacgcctccggacctgtgggaaaggccctgagcgacgcatgtatgggcacaatcgcctccttcctgtctaagtaccaggacatcatcatcgaacaccagaaggtggtgaagggcaaccagaagagactggagagcctgcgggagctggccggcaaggaaaacctggaataccctagcgtgaccctgccacctcagcctcacaccaaggagggcgttgatgcctacaacgaagtgatcgcccgggtgcgaatgtgggtgaacctgaacctgtggcagaagctgaagctaagcagagatgatgccaagcctctgctgagactgaagggattcccttcctttcctctggtcgagagacaggccaacgaagtggactggtgggacatggtgtgtaacgtgaagaagctgatcaacgagaaaaaggaggatggcaaggtgttttggcagaatctggctggctacaagagacaggaagccctgagaccatacctgagcagcgaggaagatcggaagaagggaaagaaattcgctcggtaccagctgggcgacctgctgctgcacctggaaaagaagcacggcgaggactggggaaaggtgtacgacgaggcctgggagcggattgacaagaaagtggaaggcctgagcaagcacatcaagctggaagaggaacggagaagcgaggacgcccagagcaaggccgccctgaccgactggctgcgggctaaggccagcttcgtgatcgagggcctgaaggaggccgacaaggacgagttctgcagatgcgagctgaagctgcagaagtggtacggggacctgcggggaaagcccttcgccatcgaagccgagaacagcatcctggacatcagcggcttcagcaagcagtacaactgtgccttcatctggcagaaggacggcgtgaagaagctgaacctgtacctgatcatcaactacttcaagggcggcaagctgcggttcaagaagatcaaacctgaagccttcgaagccaacagattctacaccgtgatcaacaaaaagagcggcgagatcgtgcccatggaggtgaacttcaacttcgacgaccccaacctgatcatcctgcctctggcctttggcaagagacagggcagagaattcatctggaacgacctgctgtccctggaaaccggcagcctgaagctggccaacggaagagtgatcgagaagacactgtacaacagaagaacccggcaggatgagcctgccctgttcgtggccctgaccttcgagcggcgggaggtcctggactcctccaatatcaaaccaatgaacctgatcggcgtggcaagaggcgaaaacatccccgccgtgatcgccctgaccgaccccgagggctgcccactgagccggtttaaggatagcctgggaaacccaacccacatcctgagaatcggcgagagctataaggagaagcagcggaccatccaggccaagaaggaggtggagcagcggagagccggcggctacagccggaagtacgccagcaaagccaagaatctggcagacgatatggtgagaaacaccgctagagatctgctgtactacgccgtgacccaggatgccatgctgatcttcgccaacctgagccggggcttcggccggcagggcaagcggaccttcatggccgagagacagtacacacggatggaggactggctgaccgccaagctggcctacgagggcctgagcaagacctacctgtccaagacactggcccagtacacctccaagacatgcagcaactgtgggtttaccatcaccagcgccgactacgacagggtgctggagaagctgaagaagacagcaacaggctggatgaccacaattaacggcaaggagctgaaggtggagggccagattacctactacaacagatacaagagacagaacgtagtcaaggacctgtccgtcgagctggatagactgagcgaagaatctgtgaacaacgacatctcctcctggacaaagggcagaagcggagaagctctgagcctcctgaagaaaagattctcccatagacccgtgcaggagaagttcgtgtgcctgaactgcggcttcgagacacacgcagccgagcaagccgccctgaacatcgccagatcctggctgttcctgcggagccaggagtacaagaaataccagacaaacaagacaaccggcaacaccgataagagagccttcgtcgagacctggcagtccttttaccggaagaagcttaaggaggtgtggaaacctgccgtgcggtctggcggatctggcggaggctccaccagccccaagaaaaagagaaaagtctaagctgccttctgcggggcttgccttctggccatgcccttcttctctcccttgcacctgtacctcttggtctttgaataaagcctgagtaggaaggctagcaaaaaaaaaaaaaaaaaaaaaaaaaaaaaaaaaaaaaaaaaaaaaaaaaaaaaaaaaaaaaaaaaaaaaaaaaaaaaaaa

SEQ ID NO: 10049 - RNA, 8787 nt, synthetic construct
  source 1..8787: mol_type = other RNA
aggaaataagagagaaaagaagagtaagaagaaatataagagccaccatggcccctaagaagaagcgtaaagtgagccggatgaaccacgaccaggagttcgacccccctaaggtgtaccctcccgtccccgccgagaagagaaagcccatccgggtcctgagcctgttcgatggcatcgccaccggtctgctggtgctgaaggacctgggcatccaggtggataggtacattgcctccgaggtgtgcgaggactccatcaccgtgggaatggtgcgtcatcagggcaagatcatgtacgtgggcgacgtgcggagcgtgacacagaagcatatccaggagtggggccctttcgacctggtgatcggcggcagcccttgcaatgacctgagcatcgtgaacccagcccggaagggcctgtacgagggaaccggcagactgttcttcgagttttacagactgctgcacgacgcccggcctaaggaaggcgacgaccggcccttcttttggctgttcgagaatgtggtggccatgggagtcagcgacaagcgggatattagccggttcctggagagcaaccccgtgatgatcgatgccaaggaagtgagcgccgcccaccgggccagatacttctggggcaatctgcctggcatgaacagacccctggccagcaccgtgaacgacaagctggagctgcaggagtgcctggagcacggccggatcgccaagttcagcaaggtgagaaccatcaccacccgaagcaacagcatcaaacaaggcaaggaccagcactttcctgtgttcatgaacgagaaggaggacatcctgtggtgtaccgagatggagagagtgttcgggttcccagtccactacacagatgtcagcaacatgtctagactggccagacagagactgctgggaagaagctggtccgtccctgtgatcagacacctgttcgcccctctgaaggagtacttcgcctgcgtgagcagcggcaacagcaacgccaacagccggggccccagcttctctagcggcctggtgccactgtccctgagagggagccacatgggccccatggagatctacaaaaccgtgagcgcctggaagcggcagcctgtgcgcgtgctgagcctgtttcggaatatcgataaagtcctgaaaagcctgggattcctggagagcggctctggctccggcggtggcaccctgaagtacgtggaggatgtgacaaacgtggtcagacgggatgtggagaagtggggccccttcgatctggtgtacggcagcacccaacccctgggcagctcttgtgaccggtgccctggctggtacatgtttcagttccaccggatcctgcagtacgccctgccgagacaggagtcccagcggccattcttttggattttcatggacaacttgctgctgaccgaggatgaccaggaaactaccactcggttcctgcagaccgaagccgtgaccctgcaggacgtgagaggccgggactaccagaacgccatgcgggtgtggtccaacatccctggactgaaaagcaagcacgcacctctgacccctaaagaagaggagtacctgcaggcccaggtgcggagcagaagcaagctggacgcccctaaggtggatctgctggtgaagaattgcctcctgcccctgagagagtacttcaagtatttcagccagaatagtctgcccctgggaggcagcggcggcggcatgagccagggcagcgtgaccttcagggacgtggccatcgacttcagccaggaggagtggaagtggctgcagcccgcccagagggacctgtacaggtgcgtgatgctggagaactacggccacctggtgagcctgggcctgagcatcagcaagcccgacgtggtgagcctgctggagcagggcaaggagccctggctgggcaagagagacgtgaagagggacctgttcagcgtgctgaaggagggcggcccaagcagcggcgcccctcctcccagcggcggcaggcggcccaagcagcggcgcccctcctcccagcggcggcagcccagccggctccccaacctctaccgaggagggcacctctgagtccgccacccccgagagcggccctggcacctccaccgagcccagcgagggcagcgcacccggcagccctgccggcagccccacctccacagaggagggaaccagcaccgagcccagcgaaggcagcgccccaggcaccagcaccgagcctagtgagcaggagattaaacggatcaacaagatcagaagaagacttgtgaaagacagcaacaccaagaaggccggcaagacaggccccatgaaaaccctgctggttagagtgatgacacccgatctgagagagcggctggaaaacctgagaaagaagcctgaaaatatcccccagcccatcagcaatacatctagagccaacctgaataagctgctgaccgattacaccgaaatgaagaaggcgatcctgcatgtgtactgggaagagttccagaaggaccctgtgggcctgatgagccgggtggcccagcctgccagcaagaagatcgatcagaacaagctgaaacctgagatggacgagaagggcaacctgaccaccgccggctttgcctgctctcagtgtggccagcccctgttcgtgtacaagctggagcaggtgtctgagaagggcaaggcttacaccaactacttcggacggtgcaatgtggccgagcacgaaaagctgatcctgctggcccagctgaagcccgagaaggatagcgacgaagccgtgacatatagcctgggaaagtttgggcagagggccctggatttctacagcattcatgtgaccaaggagtccacccaccccgtgaagcccctggcccagatcgccggaaacagatacgcctccggacctgtgggaaaggccctgagcgacgcatgtatgggcacaatcgcctccttcctgtctaagtaccaggacatcatcatcgaacaccagaaggtggtgaagggcaaccagaagagactggagagcctgcgggagctggccggcaaggaaaacctggaataccctagcgtgaccctgccacctcagcctcacaccaaggagggcgttgatgcctacaacgaagtgatcgcccgggtgcgaatgtgggtgaacctgaacctgtggcagaagctgaagctaagcagagatgatgccaagcctctgctgagactgaagggattcccttcctttcctctggtcgagagacaggccaacgaagtggactggtgggacatggtgtgtaacgtgaagaagctgatcaacgagaaaaaggaggatggcaaggtgttttggcagaatctggctggctacaagagacaggaagccctgagaccatacctgagcagcgaggaagatcggaagaagggaaagaaattcgctcggtaccagctgggcgacctgctgctgcacctggaaaagaagcacggcgaggactggggaaaggtgtacgacgaggcctgggagcggattgacaagaaagtggaaggcctgagcaagcacatcaagctggaagaggaacggagaagcgaggacgcccagagcaaggccgccctgaccgactggctgcgggctaaggccagcttcgtgatcgagggcctgaaggaggccgacaaggacgagttctgcagatgcgagctgaagctgcagaagtggtacggggacctgcggggaaagcccttcgccatcgaagccgagaacagcatcctggacatcagcggcttcagcaagcagtacaactgtgccttcatctggcagaaggacggcgtgaagaagctgaacctgtacctgatcatcaactacttcaagggcggcaagctgcggttcaagaagatcaaacctgaagccttcgaagccaacagattctacaccgtgatcaacaaaaagagcggcgagatcgtgcccatggaggtgaacttcaacttcgacgaccccaacctgatcatcctgcctctggcctttggcaagagacagggcagagaattcatctggaacgacctgctgtccctggaaaccggcagcctgaagctggccaacggaagagtgatcgagaagacactgtacaacagaagaacccggcaggatgagcctgccctgttcgtggccctgaccttcgagcggcgggaggtcctggactcctccaatatcaaaccaatgaacctgatcggcgtggcaagaggcgaaaacatccccgccgtgatcgccctgaccgaccccgagggctgcccactgagccggtttaaggatagcctgggaaacccaacccacatcctgagaatcggcgagagctataaggagaagcagcggaccatccaggccaagaaggaggtggagcagcggagagccggcggctacagccggaagtacgccagcaaagccaagaatctggcagacgatatggtgagaaacaccgctagagatctgctgtactacgccgtgacccaggatgccatgctgatcttcgccaacctgagccggggcttcggccggcagggcaagcggaccttcatggccgagagacagtacacacggatggaggactggctgaccgccaagctggcctacgagggcctgagcaagacctacctgtccaagacactggcccagtacacctccaagacatgcagcaactgtgggtttaccatcaccagcgccgactacgacagggtgctggagaagctgaagaagacagcaacaggctggatgaccacaattaacggcaaggagctgaaggtggagggccagattacctactacaacagatacaagagacagaacgtagtcaaggacctgtccgtcgagctggatagactgagcgaagaatctgtgaacaacgacatctcctcctggacaaagggcagaagcggagaagctctgagcctcctgaagaaaagattctcccatagacccgtgcaggagaagttcgtgtgcctgaactgcggcttcgagacacacgcagccgagcaagccgccctgaacatcgccagatcctggctgttcctgcggagccaggagtacaagaaataccagacaaacaagacaaccggcaacaccgataagagagccttcgtcgagacctggcagtccttttaccggaagaagcttaaggaggtgtggaaacctgccgtgcggtctggcggatctggcggaggctccaccagccccaagaaaaagagaaaagtctaagctgccttctgcggggcttgccttctggccatgcccttcttctctcccttgcacctgtacctcttggtctttgaataaagcctgagtaggaaggctagcaaaaaaaaaaaaaaaaaaaaaaaaaaaaaaaaaaaaaaaaaaaaaaaaaaaaaaaaaaaaaaaaaaaaaaaaaaaaaaaagcccagccggctccccaacctctaccgaggagggcacctctgagtccgccacccccgagagcggccctggcacctccaccgagcccagcgagggcagcgcacccggcagccctgccggcagccccacctccacagaggagggaaccagcaccgagcccagcgaaggcagcgccccaggcaccagcaccgagcctagtgagcaggagattaaacggatcaacaagatcagaagaagacttgtgaaagacagcaacaccaagaaggccggcaagacaggccccatgaaaaccctgctggttagagtgatgacacccgatctgagagagcggctggaaaacctgagaaagaagcctgaaaatatcccccagcccatcagcaatacatctagagccaacctgaataagctgctgaccgattacaccgaaatgaagaaggcgatcctgcatgtgtactgggaagagttccagaaggaccctgtgggcctgatgagccgggtggcccagcctgccagcaagaagatcgatcagaacaagctgaaacctgagatggacgagaagggcaacctgaccaccgccggctttgcctgctctcagtgtggccagcccctgttcgtgtacaagctggagcaggtgtctgagaagggcaaggcttacaccaactacttcggacggtgcaatgtggccgagcacgaaaagctgatcctgctggcccagctgaagcccgagaaggatagcgacgaagccgtgacatatagcctgggaaagtttgggcagagggccctggatttctacagcattcatgtgaccaaggagtccacccaccccgtgaagcccctggcccagatcgccggaaacagatacgcctccggacctgtgggaaaggccctgagcgacgcatgtatgggcacaatcgcctccttcctgtctaagtaccaggacatcatcatcgaacaccagaaggtggtgaagggcaaccagaagagactggagagcctgcgggagctggccggcaaggaaaacctggaataccctagcgtgaccctgccacctcagcctcacaccaaggagggcgttgatgcctacaacgaagtgatcgcccgggtgcgaatgtgggtgaacctgaacctgtggcagaagctgaagctaagcagagatgatgccaagcctctgctgagactgaagggattcccttcctttcctctggtcgagagacaggccaacgaagtggactggtgggacatggtgtgtaacgtgaagaagctgatcaacgagaaaaaggaggatggcaaggtgttttggcagaatctggctggctacaagagacaggaagccctgagaccatacctgagcagcgaggaagatcggaagaagggaaagaaattcgctcggtaccagctgggcgacctgctgctgcacctggaaaagaagcacggcgaggactggggaaaggtgtacgacgaggcctgggagcggattgacaagaaagtggaaggcctgagcaagcacatcaagctggaagaggaacggagaagcgaggacgcccagagcaaggccgccctgaccgactggctgcgggctaaggccagcttcgtgatcgagggcctgaaggaggccgacaaggacgagttctgcagatgcgagctgaagctgcagaagtggtacggggacctgcggggaaagcccttcgccatcgaagccgagaacagcatcctggacatcagcggcttcagcaagcagtacaactgtgccttcatctggcagaaggacggcgtgaagaagctgaacctgtacctgatcatcaactacttcaagggcggcaagctgcggttcaagaagatcaaacctgaagccttcgaagccaacagattctacaccgtgatcaacaaaaagagcggcgagatcgtgcccatggaggtgaacttcaacttcgacgaccccaacctgatcatcctgcctctggcctttggcaagagacagggcagagaattcatctggaacgacctgctgtccctggaaaccggcagcctgaagctggccaacggaagagtgatcgagaagacactgtacaacagaagaacccggcaggatgagcctgccctgttcgtggccctgaccttcgagcggcgggaggtcctggactcctccaatatcaaaccaatgaacctgatcggcgtggcaagaggcgaaaacatccccgccgtgatcgccctgaccgaccccgagggctgcccactgagccggtttaaggatagcctgggaaacccaacccacatcctgagaatcggcgagagctataaggagaagcagcggaccatccaggccaagaaggaggtggagcagcggagagccggcggctacagccggaagtacgccagcaaagccaagaatctggcagacgatatggtgagaaacaccgctagagatctgctgtactacgccgtgacccaggatgccatgctgatcttcgccaacctgagccggggcttcggccggcagggcaagcggaccttcatggccgagagacagtacacacggatggaggactggctgaccgccaagctggcctacgagggcctgagcaagacctacctgtccaagacactggcccagtacacctccaagacatgcagcaactgtgggtttaccatcaccagcgccgactacgacagggtgctggagaagctgaagaagacagcaacaggctggatgaccacaattaacggcaaggagctgaaggtggagggccagattacctactacaacagatacaagagacagaacgtagtcaaggacctgtccgtcgagctggatagactgagcgaagaatctgtgaacaacgacatctcctcctggacaaagggcagaagcggagaagctctgagcctcctgaagaaaagattctcccatagacccgtgcaggagaagttcgtgtgcctgaactgcggcttcgagacacacgcagccgagcaagccgccctgaacatcgccagatcctggctgttcctgcggagccaggagtacaagaaataccagacaaacaagacaaccggcaacaccgataagagagccttcgtcgagacctggcagtccttttaccggaagaagcttaaggaggtgtggaaacctgccgtgcggtctggcggatctggcggaggctccaccagccccaagaaaaagagaaaagtctaagctgccttctgcggggcttgccttctggccatgcccttcttctctcccttgcacctgtacctcttggtctttgaataaagcctgagtaggaaggctagcaaaaaaaaaaaaaaaaaaaaaaaaaaaaaaaaaaaaaaaaaaaaaaaaaaaaaaaaaaaaaaaaaaaaaaaaaaaaaaaa

SEQ ID NO: 10050 - RNA, 8787 nt, synthetic construct
  source 1..8787: mol_type = other RNA
aggaaataagagagaaaagaagagtaagaagaaatataagagccaccatggcccctaagaagaagcgtaaagtgagccggatgaaccacgaccaggagttcgacccccctaaggtgtaccctcccgtccccgccgagaagagaaagcccatccgggtcctgagcctgttcgatggcatcgccaccggtctgctggtgctgaaggacctgggcatccaggtggataggtacattgcctccgaggtgtgcgaggactccatcaccgtgggaatggtgcgtcatcagggcaagatcatgtacgtgggcgacgtgcggagcgtgacacagaagcatatccaggagtggggccctttcgacctggtgatcggcggcagcccttgcaatgacctgagcatcgtgaacccagcccggaagggcctgtacgagggaaccggcagactgttcttcgagttttacagactgctgcacgacgcccggcctaaggaaggcgacgaccggcccttcttttggctgttcgagaatgtggtggccatgggagtcagcgacaagcgggatattagccggttcctggagagcaaccccgtgatgatcgatgccaaggaagtgagcgccgcccaccgggccagatacttctggggcaatctgcctggcatgaacagacccctggccagcaccgtgaacgacaagctggagctgcaggagtgcctggagcacggccggatcgccaagttcagcaaggtgagaaccatcaccacccgaagcaacagcatcaaacaaggcaaggaccagcactttcctgtgttcatgaacgagaaggaggacatcctgtggtgtaccgagatggagagagtgttcgggttcccagtccactacacagatgtcagcaacatgtctagactggccagacagagactgctgggaagaagctggtccgtccctgtgatcagacacctgttcgcccctctgaaggagtacttcgcctgcgtgagcagcggcaacagcaacgccaacagccggggccccagcttctctagcggcctggtgccactgtccctgagagggagccacatgggccccatggagatctacaaaaccgtgagcgcctggaagcggcagcctgtgcgcgtgctgagcctgtttcggaatatcgataaagtcctgaaaagcctgggattcctggagagcggctctggctccggcggtggcaccctgaagtacgtggaggatgtgacaaacgtggtcagacgggatgtggagaagtggggccccttcgatctggtgtacggcagcacccaacccctgggcagctcttgtgaccggtgccctggctggtacatgtttcagttccaccggatcctgcagtacgccctgccgagacaggagtcccagcggccattcttttggattttcatggacaacttgctgctgaccgaggatgaccaggaaactaccactcggttcctgcagaccgaagccgtgaccctgcaggacgtgagaggccgggactaccagaacgccatgcgggtgtggtccaacatccctggactgaaaagcaagcacgcacctctgacccctaaagaagaggagtacctgcaggcccaggtgcggagcagaagcaagctggacgcccctaaggtggatctgctggtgaagaattgcctcctgcccctgagagagtacttcaagtatttcagccagaatagtctgcccctgggaggcagcggcggcggcatgggcaggctgatgttccaggacgtggccatcgacttcacccaggaggagtgggagtgcctggacctgagccagagggacctgtacagggacgtgatgctggagacctacggcaacctggccagcctgggcctggtggtgagcaagcccgacctggtgaccttcctggagcagatgaagaacccctgggacgtgaggaggaccgacaccaaggccacctaccccgccgtgagcagccacaacggcggcccaagcagcggcgcccctcctcccagcggcggcaggcggcccaagcagcggcgcccctcctcccagcggcggcagcccagccggctccccaacctctaccgaggagggcacctctgagtccgccacccccgagagcggccctggcacctccaccgagcccagcgagggcagcgcacccggcagccctgccggcagccccacctccacagaggagggaaccagcaccgagcccagcgaaggcagcgccccaggcaccagcaccgagcctagtgagcaggagattaaacggatcaacaagatcagaagaagacttgtgaaagacagcaacaccaagaaggccggcaagacaggccccatgaaaaccctgctggttagagtgatgacacccgatctgagagagcggctggaaaacctgagaaagaagcctgaaaatatcccccagcccatcagcaatacatctagagccaacctgaataagctgctgaccgattacaccgaaatgaagaaggcgatcctgcatgtgtactgggaagagttccagaaggaccctgtgggcctgatgagccgggtggcccagcctgccagcaagaagatcgatcagaacaagctgaaacctgagatggacgagaagggcaacctgaccaccgccggctttgcctgctctcagtgtggccagcccctgttcgtgtacaagctggagcaggtgtctgagaagggcaaggcttacaccaactacttcggacggtgcaatgtggccgagcacgaaaagctgatcctgctggcccagctgaagcccgagaaggatagcgacgaagccgtgacatatagcctgggaaagtttgggcagagggccctggatttctacagcattcatgtgaccaaggagtccacccaccccgtgaagcccctggcccagatcgccggaaacagatacgcctccggacctgtgggaaaggccctgagcgacgcatgtatgggcacaatcgcctccttcctgtctaagtaccaggacatcatcatcgaacaccagaaggtggtgaagggcaaccagaagagactggagagcctgcgggagctggccggcaaggaaaacctggaataccctagcgtgaccctgccacctcagcctcacaccaaggagggcgttgatgcctacaacgaagtgatcgcccgggtgcgaatgtgggtgaacctgaacctgtggcagaagctgaagctaagcagagatgatgccaagcctctgctgagactgaagggattcccttcctttcctctggtcgagagacaggccaacgaagtggactggtgggacatggtgtgtaacgtgaagaagctgatcaacgagaaaaaggaggatggcaaggtgttttggcagaatctggctggctacaagagacaggaagccctgagaccatacctgagcagcgaggaagatcggaagaagggaaagaaattcgctcggtaccagctgggcgacctgctgctgcacctggaaaagaagcacggcgaggactggggaaaggtgtacgacgaggcctgggagcggattgacaagaaagtggaaggcctgagcaagcacatcaagctggaagaggaacggagaagcgaggacgcccagagcaaggccgccctgaccgactggctgcgggctaaggccagcttcgtgatcgagggcctgaaggaggccgacaaggacgagttctgcagatgcgagctgaagctgcagaagtggtacggggacctgcggggaaagcccttcgccatcgaagccgagaacagcatcctggacatcagcggcttcagcaagcagtacaactgtgccttcatctggcagaaggacggcgtgaagaagctgaacctgtacctgatcatcaactacttcaagggcggcaagctgcggttcaagaagatcaaacctgaagccttcgaagccaacagattctacaccgtgatcaacaaaaagagcggcgagatcgtgcccatggaggtgaacttcaacttcgacgaccccaacctgatcatcctgcctctggcctttggcaagagacagggcagagaattcatctggaacgacctgctgtccctggaaaccggcagcctgaagctggccaacggaagagtgatcgagaagacactgtacaacagaagaacccggcaggatgagcctgccctgttcgtggccctgaccttcgagcggcgggaggtcctggactcctccaatatcaaaccaatgaacctgatcggcgtggcaagaggcgaaaacatccccgccgtgatcgccctgaccgaccccgagggctgcccactgagccggtttaaggatagcctgggaaacccaacccacatcctgagaatcggcgagagctataaggagaagcagcggaccatccaggccaagaaggaggtggagcagcggagagccggcggctacagccggaagtacgccagcaaagccaagaatctggcagacgatatggtgagaaacaccgctagagatctgctgtactacgccgtgacccaggatgccatgctgatcttcgccaacctgagccggggcttcggccggcagggcaagcggaccttcatggccgagagacagtacacacggatggaggactggctgaccgccaagctggcctacgagggcctgagcaagacctacctgtccaagacactggcccagtacacctccaagacatgcagcaactgtgggtttaccatcaccagcgccgactacgacagggtgctggagaagctgaagaagacagcaacaggctggatgaccacaattaacggcaaggagctgaaggtggagggccagattacctactacaacagatacaagagacagaacgtagtcaaggacctgtccgtcgagctggatagactgagcgaagaatctgtgaacaacgacatctcctcctggacaaagggcagaagcggagaagctctgagcctcctgaagaaaagattctcccatagacccgtgcaggagaagttcgtgtgcctgaactgcggcttcgagacacacgcagccgagcaagccgccctgaacatcgccagatcctggctgttcctgcggagccaggagtacaagaaataccagacaaacaagacaaccggcaacaccgataagagagccttcgtcgagacctggcagtccttttaccggaagaagcttaaggaggtgtggaaacctgccgtgcggtctggcggatctggcggaggctccaccagccccaagaaaaagagaaaagtctaagctgccttctgcggggcttgccttctggccatgcccttcttctctcccttgcacctgtacctcttggtctttgaataaagcctgagtaggaaggctagcaaaaaaaaaaaaaaaaaaaaaaaaaaaaaaaaaaaaaaaaaaaaaaaaaaaaaaaaaaaaaaaaaaaaaaaaaaaaaaaagcccagccggctccccaacctctaccgaggagggcacctctgagtccgccacccccgagagcggccctggcacctccaccgagcccagcgagggcagcgcacccggcagccctgccggcagccccacctccacagaggagggaaccagcaccgagcccagcgaaggcagcgccccaggcaccagcaccgagcctagtgagcaggagattaaacggatcaacaagatcagaagaagacttgtgaaagacagcaacaccaagaaggccggcaagacaggccccatgaaaaccctgctggttagagtgatgacacccgatctgagagagcggctggaaaacctgagaaagaagcctgaaaatatcccccagcccatcagcaatacatctagagccaacctgaataagctgctgaccgattacaccgaaatgaagaaggcgatcctgcatgtgtactgggaagagttccagaaggaccctgtgggcctgatgagccgggtggcccagcctgccagcaagaagatcgatcagaacaagctgaaacctgagatggacgagaagggcaacctgaccaccgccggctttgcctgctctcagtgtggccagcccctgttcgtgtacaagctggagcaggtgtctgagaagggcaaggcttacaccaactacttcggacggtgcaatgtggccgagcacgaaaagctgatcctgctggcccagctgaagcccgagaaggatagcgacgaagccgtgacatatagcctgggaaagtttgggcagagggccctggatttctacagcattcatgtgaccaaggagtccacccaccccgtgaagcccctggcccagatcgccggaaacagatacgcctccggacctgtgggaaaggccctgagcgacgcatgtatgggcacaatcgcctccttcctgtctaagtaccaggacatcatcatcgaacaccagaaggtggtgaagggcaaccagaagagactggagagcctgcgggagctggccggcaaggaaaacctggaataccctagcgtgaccctgccacctcagcctcacaccaaggagggcgttgatgcctacaacgaagtgatcgcccgggtgcgaatgtgggtgaacctgaacctgtggcagaagctgaagctaagcagagatgatgccaagcctctgctgagactgaagggattcccttcctttcctctggtcgagagacaggccaacgaagtggactggtgggacatggtgtgtaacgtgaagaagctgatcaacgagaaaaaggaggatggcaaggtgttttggcagaatctggctggctacaagagacaggaagccctgagaccatacctgagcagcgaggaagatcggaagaagggaaagaaattcgctcggtaccagctgggcgacctgctgctgcacctggaaaagaagcacggcgaggactggggaaaggtgtacgacgaggcctgggagcggattgacaagaaagtggaaggcctgagcaagcacatcaagctggaagaggaacggagaagcgaggacgcccagagcaaggccgccctgaccgactggctgcgggctaaggccagcttcgtgatcgagggcctgaaggaggccgacaaggacgagttctgcagatgcgagctgaagctgcagaagtggtacggggacctgcggggaaagcccttcgccatcgaagccgagaacagcatcctggacatcagcggcttcagcaagcagtacaactgtgccttcatctggcagaaggacggcgtgaagaagctgaacctgtacctgatcatcaactacttcaagggcggcaagctgcggttcaagaagatcaaacctgaagccttcgaagccaacagattctacaccgtgatcaacaaaaagagcggcgagatcgtgcccatggaggtgaacttcaacttcgacgaccccaacctgatcatcctgcctctggcctttggcaagagacagggcagagaattcatctggaacgacctgctgtccctggaaaccggcagcctgaagctggccaacggaagagtgatcgagaagacactgtacaacagaagaacccggcaggatgagcctgccctgttcgtggccctgaccttcgagcggcgggaggtcctggactcctccaatatcaaaccaatgaacctgatcggcgtggcaagaggcgaaaacatccccgccgtgatcgccctgaccgaccccgagggctgcccactgagccggtttaaggatagcctgggaaacccaacccacatcctgagaatcggcgagagctataaggagaagcagcggaccatccaggccaagaaggaggtggagcagcggagagccggcggctacagccggaagtacgccagcaaagccaagaatctggcagacgatatggtgagaaacaccgctagagatctgctgtactacgccgtgacccaggatgccatgctgatcttcgccaacctgagccggggcttcggccggcagggcaagcggaccttcatggccgagagacagtacacacggatggaggactggctgaccgccaagctggcctacgagggcctgagcaagacctacctgtccaagacactggcccagtacacctccaagacatgcagcaactgtgggtttaccatcaccagcgccgactacgacagggtgctggagaagctgaagaagacagcaacaggctggatgaccacaattaacggcaaggagctgaaggtggagggccagattacctactacaacagatacaagagacagaacgtagtcaaggacctgtccgtcgagctggatagactgagcgaagaatctgtgaacaacgacatctcctcctggacaaagggcagaagcggagaagctctgagcctcctgaagaaaagattctcccatagacccgtgcaggagaagttcgtgtgcctgaactgcggcttcgagacacacgcagccgagcaagccgccctgaacatcgccagatcctggctgttcctgcggagccaggagtacaagaaataccagacaaacaagacaaccggcaacaccgataagagagccttcgtcgagacctggcagtccttttaccggaagaagcttaaggaggtgtggaaacctgccgtgcggtctggcggatctggcggaggctccaccagccccaagaaaaagagaaaagtctaagctgccttctgcggggcttgccttctggccatgcccttcttctctcccttgcacctgtacctcttggtctttgaataaagcctgagtaggaaggctagcaaaaaaaaaaaaaaaaaaaaaaaaaaaaaaaaaaaaaaaaaaaaaaaaaaaaaaaaaaaaaaaaaaaaaaaaaaaaaaaa

SEQ ID NO: 10051 - RNA, 8787 nt, synthetic construct
  source 1..8787: mol_type = other RNA
aggaaataagagagaaaagaagagtaagaagaaatataagagccaccatggcccctaagaagaagcgtaaagtgagccggatgaaccacgaccaggagttcgacccccctaaggtgtaccctcccgtccccgccgagaagagaaagcccatccgggtcctgagcctgttcgatggcatcgccaccggtctgctggtgctgaaggacctgggcatccaggtggataggtacattgcctccgaggtgtgcgaggactccatcaccgtgggaatggtgcgtcatcagggcaagatcatgtacgtgggcgacgtgcggagcgtgacacagaagcatatccaggagtggggccctttcgacctggtgatcggcggcagcccttgcaatgacctgagcatcgtgaacccagcccggaagggcctgtacgagggaaccggcagactgttcttcgagttttacagactgctgcacgacgcccggcctaaggaaggcgacgaccggcccttcttttggctgttcgagaatgtggtggccatgggagtcagcgacaagcgggatattagccggttcctggagagcaaccccgtgatgatcgatgccaaggaagtgagcgccgcccaccgggccagatacttctggggcaatctgcctggcatgaacagacccctggccagcaccgtgaacgacaagctggagctgcaggagtgcctggagcacggccggatcgccaagttcagcaaggtgagaaccatcaccacccgaagcaacagcatcaaacaaggcaaggaccagcactttcctgtgttcatgaacgagaaggaggacatcctgtggtgtaccgagatggagagagtgttcgggttcccagtccactacacagatgtcagcaacatgtctagactggccagacagagactgctgggaagaagctggtccgtccctgtgatcagacacctgttcgcccctctgaaggagtacttcgcctgcgtgagcagcggcaacagcaacgccaacagccggggccccagcttctctagcggcctggtgccactgtccctgagagggagccacatgggccccatggagatctacaaaaccgtgagcgcctggaagcggcagcctgtgcgcgtgctgagcctgtttcggaatatcgataaagtcctgaaaagcctgggattcctggagagcggctctggctccggcggtggcaccctgaagtacgtggaggatgtgacaaacgtggtcagacgggatgtggagaagtggggccccttcgatctggtgtacggcagcacccaacccctgggcagctcttgtgaccggtgccctggctggtacatgtttcagttccaccggatcctgcagtacgccctgccgagacaggagtcccagcggccattcttttggattttcatggacaacttgctgctgaccgaggatgaccaggaaactaccactcggttcctgcagaccgaagccgtgaccctgcaggacgtgagaggccgggactaccagaacgccatgcgggtgtggtccaacatccctggactgaaaagcaagcacgcacctctgacccctaaagaagaggagtacctgcaggcccaggtgcggagcagaagcaagctggacgcccctaaggtggatctgctggtgaagaattgcctcctgcccctgagagagtacttcaagtatttcagccagaatagtctgcccctgggaggcagcggcggcggcttcctgatgcccgtgaccttcgaggaggtggccgtgtacttcacccccggccagggcgccctgctggaccccgcccagagggccctgtacagggacgtgatgcaggagaactacgagaccgtggccagcctgggcttcagcatccccaagcccgacctgatcgcccagctggagcagggcgaggagccctgggtgcccgacctgcagcccagcaaggagatggtgatcctgaggggcatctgcggcggcccaagcagcggcgcccctcctcccagcggcggcaggcggcccaagcagcggcgcccctcctcccagcggcggcagcccagccggctccccaacctctaccgaggagggcacctctgagtccgccacccccgagagcggccctggcacctccaccgagcccagcgagggcagcgcacccggcagccctgccggcagccccacctccacagaggagggaaccagcaccgagcccagcgaaggcagcgccccaggcaccagcaccgagcctagtgagcaggagattaaacggatcaacaagatcagaagaagacttgtgaaagacagcaacaccaagaaggccggcaagacaggccccatgaaaaccctgctggttagagtgatgacacccgatctgagagagcggctggaaaacctgagaaagaagcctgaaaatatcccccagcccatcagcaatacatctagagccaacctgaataagctgctgaccgattacaccgaaatgaagaaggcgatcctgcatgtgtactgggaagagttccagaaggaccctgtgggcctgatgagccgggtggcccagcctgccagcaagaagatcgatcagaacaagctgaaacctgagatggacgagaagggcaacctgaccaccgccggctttgcctgctctcagtgtggccagcccctgttcgtgtacaagctggagcaggtgtctgagaagggcaaggcttacaccaactacttcggacggtgcaatgtggccgagcacgaaaagctgatcctgctggcccagctgaagcccgagaaggatagcgacgaagccgtgacatatagcctgggaaagtttgggcagagggccctggatttctacagcattcatgtgaccaaggagtccacccaccccgtgaagcccctggcccagatcgccggaaacagatacgcctccggacctgtgggaaaggccctgagcgacgcatgtatgggcacaatcgcctccttcctgtctaagtaccaggacatcatcatcgaacaccagaaggtggtgaagggcaaccagaagagactggagagcctgcgggagctggccggcaaggaaaacctggaataccctagcgtgaccctgccacctcagcctcacaccaaggagggcgttgatgcctacaacgaagtgatcgcccgggtgcgaatgtgggtgaacctgaacctgtggcagaagctgaagctaagcagagatgatgccaagcctctgctgagactgaagggattcccttcctttcctctggtcgagagacaggccaacgaagtggactggtgggacatggtgtgtaacgtgaagaagctgatcaacgagaaaaaggaggatggcaaggtgttttggcagaatctggctggctacaagagacaggaagccctgagaccatacctgagcagcgaggaagatcggaagaagggaaagaaattcgctcggtaccagctgggcgacctgctgctgcacctggaaaagaagcacggcgaggactggggaaaggtgtacgacgaggcctgggagcggattgacaagaaagtggaaggcctgagcaagcacatcaagctggaagaggaacggagaagcgaggacgcccagagcaaggccgccctgaccgactggctgcgggctaaggccagcttcgtgatcgagggcctgaaggaggccgacaaggacgagttctgcagatgcgagctgaagctgcagaagtggtacggggacctgcggggaaagcccttcgccatcgaagccgagaacagcatcctggacatcagcggcttcagcaagcagtacaactgtgccttcatctggcagaaggacggcgtgaagaagctgaacctgtacctgatcatcaactacttcaagggcggcaagctgcggttcaagaagatcaaacctgaagccttcgaagccaacagattctacaccgtgatcaacaaaaagagcggcgagatcgtgcccatggaggtgaacttcaacttcgacgaccccaacctgatcatcctgcctctggcctttggcaagagacagggcagagaattcatctggaacgacctgctgtccctggaaaccggcagcctgaagctggccaacggaagagtgatcgagaagacactgtacaacagaagaacccggcaggatgagcctgccctgttcgtggccctgaccttcgagcggcgggaggtcctggactcctccaatatcaaaccaatgaacctgatcggcgtggcaagaggcgaaaacatccccgccgtgatcgccctgaccgaccccgagggctgcccactgagccggtttaaggatagcctgggaaacccaacccacatcctgagaatcggcgagagctataaggagaagcagcggaccatccaggccaagaaggaggtggagcagcggagagccggcggctacagccggaagtacgccagcaaagccaagaatctggcagacgatatggtgagaaacaccgctagagatctgctgtactacgccgtgacccaggatgccatgctgatcttcgccaacctgagccggggcttcggccggcagggcaagcggaccttcatggccgagagacagtacacacggatggaggactggctgaccgccaagctggcctacgagggcctgagcaagacctacctgtccaagacactggcccagtacacctccaagacatgcagcaactgtgggtttaccatcaccagcgccgactacgacagggtgctggagaagctgaagaagacagcaacaggctggatgaccacaattaacggcaaggagctgaaggtggagggccagattacctactacaacagatacaagagacagaacgtagtcaaggacctgtccgtcgagctggatagactgagcgaagaatctgtgaacaacgacatctcctcctggacaaagggcagaagcggagaagctctgagcctcctgaagaaaagattctcccatagacccgtgcaggagaagttcgtgtgcctgaactgcggcttcgagacacacgcagccgagcaagccgccctgaacatcgccagatcctggctgttcctgcggagccaggagtacaagaaataccagacaaacaagacaaccggcaacaccgataagagagccttcgtcgagacctggcagtccttttaccggaagaagcttaaggaggtgtggaaacctgccgtgcggtctggcggatctggcggaggctccaccagccccaagaaaaagagaaaagtctaagctgccttctgcggggcttgccttctggccatgcccttcttctctcccttgcacctgtacctcttggtctttgaataaagcctgagtaggaaggctagcaaaaaaaaaaaaaaaaaaaaaaaaaaaaaaaaaaaaaaaaaaaaaaaaaaaaaaaaaaaaaaaaaaaaaaaaaaaaaaaagcccagccggctccccaacctctaccgaggagggcacctctgagtccgccacccccgagagcggccctggcacctccaccgagcccagcgagggcagcgcacccggcagccctgccggcagccccacctccacagaggagggaaccagcaccgagcccagcgaaggcagcgccccaggcaccagcaccgagcctagtgagcaggagattaaacggatcaacaagatcagaagaagacttgtgaaagacagcaacaccaagaaggccggcaagacaggccccatgaaaaccctgctggttagagtgatgacacccgatctgagagagcggctggaaaacctgagaaagaagcctgaaaatatcccccagcccatcagcaatacatctagagccaacctgaataagctgctgaccgattacaccgaaatgaagaaggcgatcctgcatgtgtactgggaagagttccagaaggaccctgtgggcctgatgagccgggtggcccagcctgccagcaagaagatcgatcagaacaagctgaaacctgagatggacgagaagggcaacctgaccaccgccggctttgcctgctctcagtgtggccagcccctgttcgtgtacaagctggagcaggtgtctgagaagggcaaggcttacaccaactacttcggacggtgcaatgtggccgagcacgaaaagctgatcctgctggcccagctgaagcccgagaaggatagcgacgaagccgtgacatatagcctgggaaagtttgggcagagggccctggatttctacagcattcatgtgaccaaggagtccacccaccccgtgaagcccctggcccagatcgccggaaacagatacgcctccggacctgtgggaaaggccctgagcgacgcatgtatgggcacaatcgcctccttcctgtctaagtaccaggacatcatcatcgaacaccagaaggtggtgaagggcaaccagaagagactggagagcctgcgggagctggccggcaaggaaaacctggaataccctagcgtgaccctgccacctcagcctcacaccaaggagggcgttgatgcctacaacgaagtgatcgcccgggtgcgaatgtgggtgaacctgaacctgtggcagaagctgaagctaagcagagatgatgccaagcctctgctgagactgaagggattcccttcctttcctctggtcgagagacaggccaacgaagtggactggtgggacatggtgtgtaacgtgaagaagctgatcaacgagaaaaaggaggatggcaaggtgttttggcagaatctggctggctacaagagacaggaagccctgagaccatacctgagcagcgaggaagatcggaagaagggaaagaaattcgctcggtaccagctgggcgacctgctgctgcacctggaaaagaagcacggcgaggactggggaaaggtgtacgacgaggcctgggagcggattgacaagaaagtggaaggcctgagcaagcacatcaagctggaagaggaacggagaagcgaggacgcccagagcaaggccgccctgaccgactggctgcgggctaaggccagcttcgtgatcgagggcctgaaggaggccgacaaggacgagttctgcagatgcgagctgaagctgcagaagtggtacggggacctgcggggaaagcccttcgccatcgaagccgagaacagcatcctggacatcagcggcttcagcaagcagtacaactgtgccttcatctggcagaaggacggcgtgaagaagctgaacctgtacctgatcatcaactacttcaagggcggcaagctgcggttcaagaagatcaaacctgaagccttcgaagccaacagattctacaccgtgatcaacaaaaagagcggcgagatcgtgcccatggaggtgaacttcaacttcgacgaccccaacctgatcatcctgcctctggcctttggcaagagacagggcagagaattcatctggaacgacctgctgtccctggaaaccggcagcctgaagctggccaacggaagagtgatcgagaagacactgtacaacagaagaacccggcaggatgagcctgccctgttcgtggccctgaccttcgagcggcgggaggtcctggactcctccaatatcaaaccaatgaacctgatcggcgtggcaagaggcgaaaacatccccgccgtgatcgccctgaccgaccccgagggctgcccactgagccggtttaaggatagcctgggaaacccaacccacatcctgagaatcggcgagagctataaggagaagcagcggaccatccaggccaagaaggaggtggagcagcggagagccggcggctacagccggaagtacgccagcaaagccaagaatctggcagacgatatggtgagaaacaccgctagagatctgctgtactacgccgtgacccaggatgccatgctgatcttcgccaacctgagccggggcttcggccggcagggcaagcggaccttcatggccgagagacagtacacacggatggaggactggctgaccgccaagctggcctacgagggcctgagcaagacctacctgtccaagacactggcccagtacacctccaagacatgcagcaactgtgggtttaccatcaccagcgccgactacgacagggtgctggagaagctgaagaagacagcaacaggctggatgaccacaattaacggcaaggagctgaaggtggagggccagattacctactacaacagatacaagagacagaacgtagtcaaggacctgtccgtcgagctggatagactgagcgaagaatctgtgaacaacgacatctcctcctggacaaagggcagaagcggagaagctctgagcctcctgaagaaaagattctcccatagacccgtgcaggagaagttcgtgtgcctgaactgcggcttcgagacacacgcagccgagcaagccgccctgaacatcgccagatcctggctgttcctgcggagccaggagtacaagaaataccagacaaacaagacaaccggcaacaccgataagagagccttcgtcgagacctggcagtccttttaccggaagaagcttaaggaggtgtggaaacctgccgtgcggtctggcggatctggcggaggctccaccagccccaagaaaaagagaaaagtctaagctgccttctgcggggcttgccttctggccatgcccttcttctctcccttgcacctgtacctcttggtctttgaataaagcctgagtaggaaggctagcaaaaaaaaaaaaaaaaaaaaaaaaaaaaaaaaaaaaaaaaaaaaaaaaaaaaaaaaaaaaaaaaaaaaaaaaaaaaaaaa

SEQ ID NO: 10052 - RNA, 8787 nt, synthetic construct
  source 1..8787: mol_type = other RNA
aggaaataagagagaaaagaagagtaagaagaaatataagagccaccatggcccctaagaagaagcgtaaagtgagccggatgaaccacgaccaggagttcgacccccctaaggtgtaccctcccgtccccgccgagaagagaaagcccatccgggtcctgagcctgttcgatggcatcgccaccggtctgctggtgctgaaggacctgggcatccaggtggataggtacattgcctccgaggtgtgcgaggactccatcaccgtgggaatggtgcgtcatcagggcaagatcatgtacgtgggcgacgtgcggagcgtgacacagaagcatatccaggagtggggccctttcgacctggtgatcggcggcagcccttgcaatgacctgagcatcgtgaacccagcccggaagggcctgtacgagggaaccggcagactgttcttcgagttttacagactgctgcacgacgcccggcctaaggaaggcgacgaccggcccttcttttggctgttcgagaatgtggtggccatgggagtcagcgacaagcgggatattagccggttcctggagagcaaccccgtgatgatcgatgccaaggaagtgagcgccgcccaccgggccagatacttctggggcaatctgcctggcatgaacagacccctggccagcaccgtgaacgacaagctggagctgcaggagtgcctggagcacggccggatcgccaagttcagcaaggtgagaaccatcaccacccgaagcaacagcatcaaacaaggcaaggaccagcactttcctgtgttcatgaacgagaaggaggacatcctgtggtgtaccgagatggagagagtgttcgggttcccagtccactacacagatgtcagcaacatgtctagactggccagacagagactgctgggaagaagctggtccgtccctgtgatcagacacctgttcgcccctctgaaggagtacttcgcctgcgtgagcagcggcaacagcaacgccaacagccggggccccagcttctctagcggcctggtgccactgtccctgagagggagccacatgggccccatggagatctacaaaaccgtgagcgcctggaagcggcagcctgtgcgcgtgctgagcctgtttcggaatatcgataaagtcctgaaaagcctgggattcctggagagcggctctggctccggcggtggcaccctgaagtacgtggaggatgtgacaaacgtggtcagacgggatgtggagaagtggggccccttcgatctggtgtacggcagcacccaacccctgggcagctcttgtgaccggtgccctggctggtacatgtttcagttccaccggatcctgcagtacgccctgccgagacaggagtcccagcggccattcttttggattttcatggacaacttgctgctgaccgaggatgaccaggaaactaccactcggttcctgcagaccgaagccgtgaccctgcaggacgtgagaggccgggactaccagaacgccatgcgggtgtggtccaacatccctggactgaaaagcaagcacgcacctctgacccctaaagaagaggagtacctgcaggcccaggtgcggagcagaagcaagctggacgcccctaaggtggatctgctggtgaagaattgcctcctgcccctgagagagtacttcaagtatttcagccagaatagtctgcccctgggaggcagcggcggcggctgcgagggcagcgtgagcttcgaggacgtgaccatggacttcagcagggaggagtggcagcagctggaccccgcccagaggtgcctgtaccaggacgtgatgctggagatctacagccacctgctgttcgtgggctacaacatccccaaccccgagatcatcagcaggatggagaagggcgaggagccctggatgagggagatccagctgccccaccagaggcacagggagagggccttcggcggcggcccaagcagcggcgcccctcctcccagcggcggcaggcggcccaagcagcggcgcccctcctcccagcggcggcagcccagccggctccccaacctctaccgaggagggcacctctgagtccgccacccccgagagcggccctggcacctccaccgagcccagcgagggcagcgcacccggcagccctgccggcagccccacctccacagaggagggaaccagcaccgagcccagcgaaggcagcgccccaggcaccagcaccgagcctagtgagcaggagattaaacggatcaacaagatcagaagaagacttgtgaaagacagcaacaccaagaaggccggcaagacaggccccatgaaaaccctgctggttagagtgatgacacccgatctgagagagcggctggaaaacctgagaaagaagcctgaaaatatcccccagcccatcagcaatacatctagagccaacctgaataagctgctgaccgattacaccgaaatgaagaaggcgatcctgcatgtgtactgggaagagttccagaaggaccctgtgggcctgatgagccgggtggcccagcctgccagcaagaagatcgatcagaacaagctgaaacctgagatggacgagaagggcaacctgaccaccgccggctttgcctgctctcagtgtggccagcccctgttcgtgtacaagctggagcaggtgtctgagaagggcaaggcttacaccaactacttcggacggtgcaatgtggccgagcacgaaaagctgatcctgctggcccagctgaagcccgagaaggatagcgacgaagccgtgacatatagcctgggaaagtttgggcagagggccctggatttctacagcattcatgtgaccaaggagtccacccaccccgtgaagcccctggcccagatcgccggaaacagatacgcctccggacctgtgggaaaggccctgagcgacgcatgtatgggcacaatcgcctccttcctgtctaagtaccaggacatcatcatcgaacaccagaaggtggtgaagggcaaccagaagagactggagagcctgcgggagctggccggcaaggaaaacctggaataccctagcgtgaccctgccacctcagcctcacaccaaggagggcgttgatgcctacaacgaagtgatcgcccgggtgcgaatgtgggtgaacctgaacctgtggcagaagctgaagctaagcagagatgatgccaagcctctgctgagactgaagggattcccttcctttcctctggtcgagagacaggccaacgaagtggactggtgggacatggtgtgtaacgtgaagaagctgatcaacgagaaaaaggaggatggcaaggtgttttggcagaatctggctggctacaagagacaggaagccctgagaccatacctgagcagcgaggaagatcggaagaagggaaagaaattcgctcggtaccagctgggcgacctgctgctgcacctggaaaagaagcacggcgaggactggggaaaggtgtacgacgaggcctgggagcggattgacaagaaagtggaaggcctgagcaagcacatcaagctggaagaggaacggagaagcgaggacgcccagagcaaggccgccctgaccgactggctgcgggctaaggccagcttcgtgatcgagggcctgaaggaggccgacaaggacgagttctgcagatgcgagctgaagctgcagaagtggtacggggacctgcggggaaagcccttcgccatcgaagccgagaacagcatcctggacatcagcggcttcagcaagcagtacaactgtgccttcatctggcagaaggacggcgtgaagaagctgaacctgtacctgatcatcaactacttcaagggcggcaagctgcggttcaagaagatcaaacctgaagccttcgaagccaacagattctacaccgtgatcaacaaaaagagcggcgagatcgtgcccatggaggtgaacttcaacttcgacgaccccaacctgatcatcctgcctctggcctttggcaagagacagggcagagaattcatctggaacgacctgctgtccctggaaaccggcagcctgaagctggccaacggaagagtgatcgagaagacactgtacaacagaagaacccggcaggatgagcctgccctgttcgtggccctgaccttcgagcggcgggaggtcctggactcctccaatatcaaaccaatgaacctgatcggcgtggcaagaggcgaaaacatccccgccgtgatcgccctgaccgaccccgagggctgcccactgagccggtttaaggatagcctgggaaacccaacccacatcctgagaatcggcgagagctataaggagaagcagcggaccatccaggccaagaaggaggtggagcagcggagagccggcggctacagccggaagtacgccagcaaagccaagaatctggcagacgatatggtgagaaacaccgctagagatctgctgtactacgccgtgacccaggatgccatgctgatcttcgccaacctgagccggggcttcggccggcagggcaagcggaccttcatggccgagagacagtacacacggatggaggactggctgaccgccaagctggcctacgagggcctgagcaagacctacctgtccaagacactggcccagtacacctccaagacatgcagcaactgtgggtttaccatcaccagcgccgactacgacagggtgctggagaagctgaagaagacagcaacaggctggatgaccacaattaacggcaaggagctgaaggtggagggccagattacctactacaacagatacaagagacagaacgtagtcaaggacctgtccgtcgagctggatagactgagcgaagaatctgtgaacaacgacatctcctcctggacaaagggcagaagcggagaagctctgagcctcctgaagaaaagattctcccatagacccgtgcaggagaagttcgtgtgcctgaactgcggcttcgagacacacgcagccgagcaagccgccctgaacatcgccagatcctggctgttcctgcggagccaggagtacaagaaataccagacaaacaagacaaccggcaacaccgataagagagccttcgtcgagacctggcagtccttttaccggaagaagcttaaggaggtgtggaaacctgccgtgcggtctggcggatctggcggaggctccaccagccccaagaaaaagagaaaagtctaagctgccttctgcggggcttgccttctggccatgcccttcttctctcccttgcacctgtacctcttggtctttgaataaagcctgagtaggaaggctagcaaaaaaaaaaaaaaaaaaaaaaaaaaaaaaaaaaaaaaaaaaaaaaaaaaaaaaaaaaaaaaaaaaaaaaaaaaaaaaaagcccagccggctccccaacctctaccgaggagggcacctctgagtccgccacccccgagagcggccctggcacctccaccgagcccagcgagggcagcgcacccggcagccctgccggcagccccacctccacagaggagggaaccagcaccgagcccagcgaaggcagcgccccaggcaccagcaccgagcctagtgagcaggagattaaacggatcaacaagatcagaagaagacttgtgaaagacagcaacaccaagaaggccggcaagacaggccccatgaaaaccctgctggttagagtgatgacacccgatctgagagagcggctggaaaacctgagaaagaagcctgaaaatatcccccagcccatcagcaatacatctagagccaacctgaataagctgctgaccgattacaccgaaatgaagaaggcgatcctgcatgtgtactgggaagagttccagaaggaccctgtgggcctgatgagccgggtggcccagcctgccagcaagaagatcgatcagaacaagctgaaacctgagatggacgagaagggcaacctgaccaccgccggctttgcctgctctcagtgtggccagcccctgttcgtgtacaagctggagcaggtgtctgagaagggcaaggcttacaccaactacttcggacggtgcaatgtggccgagcacgaaaagctgatcctgctggcccagctgaagcccgagaaggatagcgacgaagccgtgacatatagcctgggaaagtttgggcagagggccctggatttctacagcattcatgtgaccaaggagtccacccaccccgtgaagcccctggcccagatcgccggaaacagatacgcctccggacctgtgggaaaggccctgagcgacgcatgtatgggcacaatcgcctccttcctgtctaagtaccaggacatcatcatcgaacaccagaaggtggtgaagggcaaccagaagagactggagagcctgcgggagctggccggcaaggaaaacctggaataccctagcgtgaccctgccacctcagcctcacaccaaggagggcgttgatgcctacaacgaagtgatcgcccgggtgcgaatgtgggtgaacctgaacctgtggcagaagctgaagctaagcagagatgatgccaagcctctgctgagactgaagggattcccttcctttcctctggtcgagagacaggccaacgaagtggactggtgggacatggtgtgtaacgtgaagaagctgatcaacgagaaaaaggaggatggcaaggtgttttggcagaatctggctggctacaagagacaggaagccctgagaccatacctgagcagcgaggaagatcggaagaagggaaagaaattcgctcggtaccagctgggcgacctgctgctgcacctggaaaagaagcacggcgaggactggggaaaggtgtacgacgaggcctgggagcggattgacaagaaagtggaaggcctgagcaagcacatcaagctggaagaggaacggagaagcgaggacgcccagagcaaggccgccctgaccgactggctgcgggctaaggccagcttcgtgatcgagggcctgaaggaggccgacaaggacgagttctgcagatgcgagctgaagctgcagaagtggtacggggacctgcggggaaagcccttcgccatcgaagccgagaacagcatcctggacatcagcggcttcagcaagcagtacaactgtgccttcatctggcagaaggacggcgtgaagaagctgaacctgtacctgatcatcaactacttcaagggcggcaagctgcggttcaagaagatcaaacctgaagccttcgaagccaacagattctacaccgtgatcaacaaaaagagcggcgagatcgtgcccatggaggtgaacttcaacttcgacgaccccaacctgatcatcctgcctctggcctttggcaagagacagggcagagaattcatctggaacgacctgctgtccctggaaaccggcagcctgaagctggccaacggaagagtgatcgagaagacactgtacaacagaagaacccggcaggatgagcctgccctgttcgtggccctgaccttcgagcggcgggaggtcctggactcctccaatatcaaaccaatgaacctgatcggcgtggcaagaggcgaaaacatccccgccgtgatcgccctgaccgaccccgagggctgcccactgagccggtttaaggatagcctgggaaacccaacccacatcctgagaatcggcgagagctataaggagaagcagcggaccatccaggccaagaaggaggtggagcagcggagagccggcggctacagccggaagtacgccagcaaagccaagaatctggcagacgatatggtgagaaacaccgctagagatctgctgtactacgccgtgacccaggatgccatgctgatcttcgccaacctgagccggggcttcggccggcagggcaagcggaccttcatggccgagagacagtacacacggatggaggactggctgaccgccaagctggcctacgagggcctgagcaagacctacctgtccaagacactggcccagtacacctccaagacatgcagcaactgtgggtttaccatcaccagcgccgactacgacagggtgctggagaagctgaagaagacagcaacaggctggatgaccacaattaacggcaaggagctgaaggtggagggccagattacctactacaacagatacaagagacagaacgtagtcaaggacctgtccgtcgagctggatagactgagcgaagaatctgtgaacaacgacatctcctcctggacaaagggcagaagcggagaagctctgagcctcctgaagaaaagattctcccatagacccgtgcaggagaagttcgtgtgcctgaactgcggcttcgagacacacgcagccgagcaagccgccctgaacatcgccagatcctggctgttcctgcggagccaggagtacaagaaataccagacaaacaagacaaccggcaacaccgataagagagccttcgtcgagacctggcagtccttttaccggaagaagcttaaggaggtgtggaaacctgccgtgcggtctggcggatctggcggaggctccaccagccccaagaaaaagagaaaagtctaagctgccttctgcggggcttgccttctggccatgcccttcttctctcccttgcacctgtacctcttggtctttgaataaagcctgagtaggaaggctagcaaaaaaaaaaaaaaaaaaaaaaaaaaaaaaaaaaaaaaaaaaaaaaaaaaaaaaaaaaaaaaaaaaaaaaaaaaaaaaaa

SEQ ID NO: 10053 - RNA, 8787 nt, synthetic construct
  source 1..8787: mol_type = other RNA
aggaaataagagagaaaagaagagtaagaagaaatataagagccaccatggcccctaagaagaagcgtaaagtgagccggatgaaccacgaccaggagttcgacccccctaaggtgtaccctcccgtccccgccgagaagagaaagcccatccgggtcctgagcctgttcgatggcatcgccaccggtctgctggtgctgaaggacctgggcatccaggtggataggtacattgcctccgaggtgtgcgaggactccatcaccgtgggaatggtgcgtcatcagggcaagatcatgtacgtgggcgacgtgcggagcgtgacacagaagcatatccaggagtggggccctttcgacctggtgatcggcggcagcccttgcaatgacctgagcatcgtgaacccagcccggaagggcctgtacgagggaaccggcagactgttcttcgagttttacagactgctgcacgacgcccggcctaaggaaggcgacgaccggcccttcttttggctgttcgagaatgtggtggccatgggagtcagcgacaagcgggatattagccggttcctggagagcaaccccgtgatgatcgatgccaaggaagtgagcgccgcccaccgggccagatacttctggggcaatctgcctggcatgaacagacccctggccagcaccgtgaacgacaagctggagctgcaggagtgcctggagcacggccggatcgccaagttcagcaaggtgagaaccatcaccacccgaagcaacagcatcaaacaaggcaaggaccagcactttcctgtgttcatgaacgagaaggaggacatcctgtggtgtaccgagatggagagagtgttcgggttcccagtccactacacagatgtcagcaacatgtctagactggccagacagagactgctgggaagaagctggtccgtccctgtgatcagacacctgttcgcccctctgaaggagtacttcgcctgcgtgagcagcggcaacagcaacgccaacagccggggccccagcttctctagcggcctggtgccactgtccctgagagggagccacatgggccccatggagatctacaaaaccgtgagcgcctggaagcggcagcctgtgcgcgtgctgagcctgtttcggaatatcgataaagtcctgaaaagcctgggattcctggagagcggctctggctccggcggtggcaccctgaagtacgtggaggatgtgacaaacgtggtcagacgggatgtggagaagtggggccccttcgatctggtgtacggcagcacccaacccctgggcagctcttgtgaccggtgccctggctggtacatgtttcagttccaccggatcctgcagtacgccctgccgagacaggagtcccagcggccattcttttggattttcatggacaacttgctgctgaccgaggatgaccaggaaactaccactcggttcctgcagaccgaagccgtgaccctgcaggacgtgagaggccgggactaccagaacgccatgcgggtgtggtccaacatccctggactgaaaagcaagcacgcacctctgacccctaaagaagaggagtacctgcaggcccaggtgcggagcagaagcaagctggacgcccctaaggtggatctgctggtgaagaattgcctcctgcccctgagagagtacttcaagtatttcagccagaatagtctgcccctgggaggcagcggcggcggccagggcctggtgagcttcaaggacgtggccgtggacttcacccaggaggagtggcagcagctggaccccgcccagaggaccctgtacagggacgtgatgctggagaacttcagccacctggtgagcatcggctacgccgtgagcaagcccgacgtgatcagcaagctggagcagggcgaggacccctggatcatcaagagggacatccccaactggatctaccccgacgagaaccaggccgacggcggcccaagcagcggcgcccctcctcccagcggcggcaggcggcccaagcagcggcgcccctcctcccagcggcggcagcccagccggctccccaacctctaccgaggagggcacctctgagtccgccacccccgagagcggccctggcacctccaccgagcccagcgagggcagcgcacccggcagccctgccggcagccccacctccacagaggagggaaccagcaccgagcccagcgaaggcagcgccccaggcaccagcaccgagcctagtgagcaggagattaaacggatcaacaagatcagaagaagacttgtgaaagacagcaacaccaagaaggccggcaagacaggccccatgaaaaccctgctggttagagtgatgacacccgatctgagagagcggctggaaaacctgagaaagaagcctgaaaatatcccccagcccatcagcaatacatctagagccaacctgaataagctgctgaccgattacaccgaaatgaagaaggcgatcctgcatgtgtactgggaagagttccagaaggaccctgtgggcctgatgagccgggtggcccagcctgccagcaagaagatcgatcagaacaagctgaaacctgagatggacgagaagggcaacctgaccaccgccggctttgcctgctctcagtgtggccagcccctgttcgtgtacaagctggagcaggtgtctgagaagggcaaggcttacaccaactacttcggacggtgcaatgtggccgagcacgaaaagctgatcctgctggcccagctgaagcccgagaaggatagcgacgaagccgtgacatatagcctgggaaagtttgggcagagggccctggatttctacagcattcatgtgaccaaggagtccacccaccccgtgaagcccctggcccagatcgccggaaacagatacgcctccggacctgtgggaaaggccctgagcgacgcatgtatgggcacaatcgcctccttcctgtctaagtaccaggacatcatcatcgaacaccagaaggtggtgaagggcaaccagaagagactggagagcctgcgggagctggccggcaaggaaaacctggaataccctagcgtgaccctgccacctcagcctcacaccaaggagggcgttgatgcctacaacgaagtgatcgcccgggtgcgaatgtgggtgaacctgaacctgtggcagaagctgaagctaagcagagatgatgccaagcctctgctgagactgaagggattcccttcctttcctctggtcgagagacaggccaacgaagtggactggtgggacatggtgtgtaacgtgaagaagctgatcaacgagaaaaaggaggatggcaaggtgttttggcagaatctggctggctacaagagacaggaagccctgagaccatacctgagcagcgaggaagatcggaagaagggaaagaaattcgctcggtaccagctgggcgacctgctgctgcacctggaaaagaagcacggcgaggactggggaaaggtgtacgacgaggcctgggagcggattgacaagaaagtggaaggcctgagcaagcacatcaagctggaagaggaacggagaagcgaggacgcccagagcaaggccgccctgaccgactggctgcgggctaaggccagcttcgtgatcgagggcctgaaggaggccgacaaggacgagttctgcagatgcgagctgaagctgcagaagtggtacggggacctgcggggaaagcccttcgccatcgaagccgagaacagcatcctggacatcagcggcttcagcaagcagtacaactgtgccttcatctggcagaaggacggcgtgaagaagctgaacctgtacctgatcatcaactacttcaagggcggcaagctgcggttcaagaagatcaaacctgaagccttcgaagccaacagattctacaccgtgatcaacaaaaagagcggcgagatcgtgcccatggaggtgaacttcaacttcgacgaccccaacctgatcatcctgcctctggcctttggcaagagacagggcagagaattcatctggaacgacctgctgtccctggaaaccggcagcctgaagctggccaacggaagagtgatcgagaagacactgtacaacagaagaacccggcaggatgagcctgccctgttcgtggccctgaccttcgagcggcgggaggtcctggactcctccaatatcaaaccaatgaacctgatcggcgtggcaagaggcgaaaacatccccgccgtgatcgccctgaccgaccccgagggctgcccactgagccggtttaaggatagcctgggaaacccaacccacatcctgagaatcggcgagagctataaggagaagcagcggaccatccaggccaagaaggaggtggagcagcggagagccggcggctacagccggaagtacgccagcaaagccaagaatctggcagacgatatggtgagaaacaccgctagagatctgctgtactacgccgtgacccaggatgccatgctgatcttcgccaacctgagccggggcttcggccggcagggcaagcggaccttcatggccgagagacagtacacacggatggaggactggctgaccgccaagctggcctacgagggcctgagcaagacctacctgtccaagacactggcccagtacacctccaagacatgcagcaactgtgggtttaccatcaccagcgccgactacgacagggtgctggagaagctgaagaagacagcaacaggctggatgaccacaattaacggcaaggagctgaaggtggagggccagattacctactacaacagatacaagagacagaacgtagtcaaggacctgtccgtcgagctggatagactgagcgaagaatctgtgaacaacgacatctcctcctggacaaagggcagaagcggagaagctctgagcctcctgaagaaaagattctcccatagacccgtgcaggagaagttcgtgtgcctgaactgcggcttcgagacacacgcagccgagcaagccgccctgaacatcgccagatcctggctgttcctgcggagccaggagtacaagaaataccagacaaacaagacaaccggcaacaccgataagagagccttcgtcgagacctggcagtccttttaccggaagaagcttaaggaggtgtggaaacctgccgtgcggtctggcggatctggcggaggctccaccagccccaagaaaaagagaaaagtctaagctgccttctgcggggcttgccttctggccatgcccttcttctctcccttgcacctgtacctcttggtctttgaataaagcctgagtaggaaggctagcaaaaaaaaaaaaaaaaaaaaaaaaaaaaaaaaaaaaaaaaaaaaaaaaaaaaaaaaaaaaaaaaaaaaaaaaaaaaaaaagcccagccggctccccaacctctaccgaggagggcacctctgagtccgccacccccgagagcggccctggcacctccaccgagcccagcgagggcagcgcacccggcagccctgccggcagccccacctccacagaggagggaaccagcaccgagcccagcgaaggcagcgccccaggcaccagcaccgagcctagtgagcaggagattaaacggatcaacaagatcagaagaagacttgtgaaagacagcaacaccaagaaggccggcaagacaggccccatgaaaaccctgctggttagagtgatgacacccgatctgagagagcggctggaaaacctgagaaagaagcctgaaaatatcccccagcccatcagcaatacatctagagccaacctgaataagctgctgaccgattacaccgaaatgaagaaggcgatcctgcatgtgtactgggaagagttccagaaggaccctgtgggcctgatgagccgggtggcccagcctgccagcaagaagatcgatcagaacaagctgaaacctgagatggacgagaagggcaacctgaccaccgccggctttgcctgctctcagtgtggccagcccctgttcgtgtacaagctggagcaggtgtctgagaagggcaaggcttacaccaactacttcggacggtgcaatgtggccgagcacgaaaagctgatcctgctggcccagctgaagcccgagaaggatagcgacgaagccgtgacatatagcctgggaaagtttgggcagagggccctggatttctacagcattcatgtgaccaaggagtccacccaccccgtgaagcccctggcccagatcgccggaaacagatacgcctccggacctgtgggaaaggccctgagcgacgcatgtatgggcacaatcgcctccttcctgtctaagtaccaggacatcatcatcgaacaccagaaggtggtgaagggcaaccagaagagactggagagcctgcgggagctggccggcaaggaaaacctggaataccctagcgtgaccctgccacctcagcctcacaccaaggagggcgttgatgcctacaacgaagtgatcgcccgggtgcgaatgtgggtgaacctgaacctgtggcagaagctgaagctaagcagagatgatgccaagcctctgctgagactgaagggattcccttcctttcctctggtcgagagacaggccaacgaagtggactggtgggacatggtgtgtaacgtgaagaagctgatcaacgagaaaaaggaggatggcaaggtgttttggcagaatctggctggctacaagagacaggaagccctgagaccatacctgagcagcgaggaagatcggaagaagggaaagaaattcgctcggtaccagctgggcgacctgctgctgcacctggaaaagaagcacggcgaggactggggaaaggtgtacgacgaggcctgggagcggattgacaagaaagtggaaggcctgagcaagcacatcaagctggaagaggaacggagaagcgaggacgcccagagcaaggccgccctgaccgactggctgcgggctaaggccagcttcgtgatcgagggcctgaaggaggccgacaaggacgagttctgcagatgcgagctgaagctgcagaagtggtacggggacctgcggggaaagcccttcgccatcgaagccgagaacagcatcctggacatcagcggcttcagcaagcagtacaactgtgccttcatctggcagaaggacggcgtgaagaagctgaacctgtacctgatcatcaactacttcaagggcggcaagctgcggttcaagaagatcaaacctgaagccttcgaagccaacagattctacaccgtgatcaacaaaaagagcggcgagatcgtgcccatggaggtgaacttcaacttcgacgaccccaacctgatcatcctgcctctggcctttggcaagagacagggcagagaattcatctggaacgacctgctgtccctggaaaccggcagcctgaagctggccaacggaagagtgatcgagaagacactgtacaacagaagaacccggcaggatgagcctgccctgttcgtggccctgaccttcgagcggcgggaggtcctggactcctccaatatcaaaccaatgaacctgatcggcgtggcaagaggcgaaaacatccccgccgtgatcgccctgaccgaccccgagggctgcccactgagccggtttaaggatagcctgggaaacccaacccacatcctgagaatcggcgagagctataaggagaagcagcggaccatccaggccaagaaggaggtggagcagcggagagccggcggctacagccggaagtacgccagcaaagccaagaatctggcagacgatatggtgagaaacaccgctagagatctgctgtactacgccgtgacccaggatgccatgctgatcttcgccaacctgagccggggcttcggccggcagggcaagcggaccttcatggccgagagacagtacacacggatggaggactggctgaccgccaagctggcctacgagggcctgagcaagacctacctgtccaagacactggcccagtacacctccaagacatgcagcaactgtgggtttaccatcaccagcgccgactacgacagggtgctggagaagctgaagaagacagcaacaggctggatgaccacaattaacggcaaggagctgaaggtggagggccagattacctactacaacagatacaagagacagaacgtagtcaaggacctgtccgtcgagctggatagactgagcgaagaatctgtgaacaacgacatctcctcctggacaaagggcagaagcggagaagctctgagcctcctgaagaaaagattctcccatagacccgtgcaggagaagttcgtgtgcctgaactgcggcttcgagacacacgcagccgagcaagccgccctgaacatcgccagatcctggctgttcctgcggagccaggagtacaagaaataccagacaaacaagacaaccggcaacaccgataagagagccttcgtcgagacctggcagtccttttaccggaagaagcttaaggaggtgtggaaacctgccgtgcggtctggcggatctggcggaggctccaccagccccaagaaaaagagaaaagtctaagctgccttctgcggggcttgccttctggccatgcccttcttctctcccttgcacctgtacctcttggtctttgaataaagcctgagtaggaaggctagcaaaaaaaaaaaaaaaaaaaaaaaaaaaaaaaaaaaaaaaaaaaaaaaaaaaaaaaaaaaaaaaaaaaaaaaaaaaaaaaa

SEQ ID NO: 10054 - RNA, 8787 nt, synthetic construct
  source 1..8787: mol_type = other RNA
aggaaataagagagaaaagaagagtaagaagaaatataagagccaccatggcccctaagaagaagcgtaaagtgagccggatgaaccacgaccaggagttcgacccccctaaggtgtaccctcccgtccccgccgagaagagaaagcccatccgggtcctgagcctgttcgatggcatcgccaccggtctgctggtgctgaaggacctgggcatccaggtggataggtacattgcctccgaggtgtgcgaggactccatcaccgtgggaatggtgcgtcatcagggcaagatcatgtacgtgggcgacgtgcggagcgtgacacagaagcatatccaggagtggggccctttcgacctggtgatcggcggcagcccttgcaatgacctgagcatcgtgaacccagcccggaagggcctgtacgagggaaccggcagactgttcttcgagttttacagactgctgcacgacgcccggcctaaggaaggcgacgaccggcccttcttttggctgttcgagaatgtggtggccatgggagtcagcgacaagcgggatattagccggttcctggagagcaaccccgtgatgatcgatgccaaggaagtgagcgccgcccaccgggccagatacttctggggcaatctgcctggcatgaacagacccctggccagcaccgtgaacgacaagctggagctgcaggagtgcctggagcacggccggatcgccaagttcagcaaggtgagaaccatcaccacccgaagcaacagcatcaaacaaggcaaggaccagcactttcctgtgttcatgaacgagaaggaggacatcctgtggtgtaccgagatggagagagtgttcgggttcccagtccactacacagatgtcagcaacatgtctagactggccagacagagactgctgggaagaagctggtccgtccctgtgatcagacacctgttcgcccctctgaaggagtacttcgcctgcgtgagcagcggcaacagcaacgccaacagccggggccccagcttctctagcggcctggtgccactgtccctgagagggagccacatgggccccatggagatctacaaaaccgtgagcgcctggaagcggcagcctgtgcgcgtgctgagcctgtttcggaatatcgataaagtcctgaaaagcctgggattcctggagagcggctctggctccggcggtggcaccctgaagtacgtggaggatgtgacaaacgtggtcagacgggatgtggagaagtggggccccttcgatctggtgtacggcagcacccaacccctgggcagctcttgtgaccggtgccctggctggtacatgtttcagttccaccggatcctgcagtacgccctgccgagacaggagtcccagcggccattcttttggattttcatggacaacttgctgctgaccgaggatgaccaggaaactaccactcggttcctgcagaccgaagccgtgaccctgcaggacgtgagaggccgggactaccagaacgccatgcgggtgtggtccaacatccctggactgaaaagcaagcacgcacctctgacccctaaagaagaggagtacctgcaggcccaggtgcggagcagaagcaagctggacgcccctaaggtggatctgctggtgaagaattgcctcctgcccctgagagagtacttcaagtatttcagccagaatagtctgcccctgggaggcagcggcggcggcagcctgggcatggtgagcttcgacgacgtgatggtgaccttcagcctggaggagtggcagctgctgagcaccagccagaggaccctgtacaggaccgtgatgctggacacctacagcagcctggccgccctgggccactgcgccgtgaagcccggcgtgatcatcaagctggagcagggcgccgagccctggatgggcgcccaggccccccccaggagcctgagcgacccctgcggccccagcggcggcccaagcagcggcgcccctcctcccagcggcggcaggcggcccaagcagcggcgcccctcctcccagcggcggcagcccagccggctccccaacctctaccgaggagggcacctctgagtccgccacccccgagagcggccctggcacctccaccgagcccagcgagggcagcgcacccggcagccctgccggcagccccacctccacagaggagggaaccagcaccgagcccagcgaaggcagcgccccaggcaccagcaccgagcctagtgagcaggagattaaacggatcaacaagatcagaagaagacttgtgaaagacagcaacaccaagaaggccggcaagacaggccccatgaaaaccctgctggttagagtgatgacacccgatctgagagagcggctggaaaacctgagaaagaagcctgaaaatatcccccagcccatcagcaatacatctagagccaacctgaataagctgctgaccgattacaccgaaatgaagaaggcgatcctgcatgtgtactgggaagagttccagaaggaccctgtgggcctgatgagccgggtggcccagcctgccagcaagaagatcgatcagaacaagctgaaacctgagatggacgagaagggcaacctgaccaccgccggctttgcctgctctcagtgtggccagcccctgttcgtgtacaagctggagcaggtgtctgagaagggcaaggcttacaccaactacttcggacggtgcaatgtggccgagcacgaaaagctgatcctgctggcccagctgaagcccgagaaggatagcgacgaagccgtgacatatagcctgggaaagtttgggcagagggccctggatttctacagcattcatgtgaccaaggagtccacccaccccgtgaagcccctggcccagatcgccggaaacagatacgcctccggacctgtgggaaaggccctgagcgacgcatgtatgggcacaatcgcctccttcctgtctaagtaccaggacatcatcatcgaacaccagaaggtggtgaagggcaaccagaagagactggagagcctgcgggagctggccggcaaggaaaacctggaataccctagcgtgaccctgccacctcagcctcacaccaaggagggcgttgatgcctacaacgaagtgatcgcccgggtgcgaatgtgggtgaacctgaacctgtggcagaagctgaagctaagcagagatgatgccaagcctctgctgagactgaagggattcccttcctttcctctggtcgagagacaggccaacgaagtggactggtgggacatggtgtgtaacgtgaagaagctgatcaacgagaaaaaggaggatggcaaggtgttttggcagaatctggctggctacaagagacaggaagccctgagaccatacctgagcagcgaggaagatcggaagaagggaaagaaattcgctcggtaccagctgggcgacctgctgctgcacctggaaaagaagcacggcgaggactggggaaaggtgtacgacgaggcctgggagcggattgacaagaaagtggaaggcctgagcaagcacatcaagctggaagaggaacggagaagcgaggacgcccagagcaaggccgccctgaccgactggctgcgggctaaggccagcttcgtgatcgagggcctgaaggaggccgacaaggacgagttctgcagatgcgagctgaagctgcagaagtggtacggggacctgcggggaaagcccttcgccatcgaagccgagaacagcatcctggacatcagcggcttcagcaagcagtacaactgtgccttcatctggcagaaggacggcgtgaagaagctgaacctgtacctgatcatcaactacttcaagggcggcaagctgcggttcaagaagatcaaacctgaagccttcgaagccaacagattctacaccgtgatcaacaaaaagagcggcgagatcgtgcccatggaggtgaacttcaacttcgacgaccccaacctgatcatcctgcctctggcctttggcaagagacagggcagagaattcatctggaacgacctgctgtccctggaaaccggcagcctgaagctggccaacggaagagtgatcgagaagacactgtacaacagaagaacccggcaggatgagcctgccctgttcgtggccctgaccttcgagcggcgggaggtcctggactcctccaatatcaaaccaatgaacctgatcggcgtggcaagaggcgaaaacatccccgccgtgatcgccctgaccgaccccgagggctgcccactgagccggtttaaggatagcctgggaaacccaacccacatcctgagaatcggcgagagctataaggagaagcagcggaccatccaggccaagaaggaggtggagcagcggagagccggcggctacagccggaagtacgccagcaaagccaagaatctggcagacgatatggtgagaaacaccgctagagatctgctgtactacgccgtgacccaggatgccatgctgatcttcgccaacctgagccggggcttcggccggcagggcaagcggaccttcatggccgagagacagtacacacggatggaggactggctgaccgccaagctggcctacgagggcctgagcaagacctacctgtccaagacactggcccagtacacctccaagacatgcagcaactgtgggtttaccatcaccagcgccgactacgacagggtgctggagaagctgaagaagacagcaacaggctggatgaccacaattaacggcaaggagctgaaggtggagggccagattacctactacaacagatacaagagacagaacgtagtcaaggacctgtccgtcgagctggatagactgagcgaagaatctgtgaacaacgacatctcctcctggacaaagggcagaagcggagaagctctgagcctcctgaagaaaagattctcccatagacccgtgcaggagaagttcgtgtgcctgaactgcggcttcgagacacacgcagccgagcaagccgccctgaacatcgccagatcctggctgttcctgcggagccaggagtacaagaaataccagacaaacaagacaaccggcaacaccgataagagagccttcgtcgagacctggcagtccttttaccggaagaagcttaaggaggtgtggaaacctgccgtgcggtctggcggatctggcggaggctccaccagccccaagaaaaagagaaaagtctaagctgccttctgcggggcttgccttctggccatgcccttcttctctcccttgcacctgtacctcttggtctttgaataaagcctgagtaggaaggctagcaaaaaaaaaaaaaaaaaaaaaaaaaaaaaaaaaaaaaaaaaaaaaaaaaaaaaaaaaaaaaaaaaaaaaaaaaaaaaaaagcccagccggctccccaacctctaccgaggagggcacctctgagtccgccacccccgagagcggccctggcacctccaccgagcccagcgagggcagcgcacccggcagccctgccggcagccccacctccacagaggagggaaccagcaccgagcccagcgaaggcagcgccccaggcaccagcaccgagcctagtgagcaggagattaaacggatcaacaagatcagaagaagacttgtgaaagacagcaacaccaagaaggccggcaagacaggccccatgaaaaccctgctggttagagtgatgacacccgatctgagagagcggctggaaaacctgagaaagaagcctgaaaatatcccccagcccatcagcaatacatctagagccaacctgaataagctgctgaccgattacaccgaaatgaagaaggcgatcctgcatgtgtactgggaagagttccagaaggaccctgtgggcctgatgagccgggtggcccagcctgccagcaagaagatcgatcagaacaagctgaaacctgagatggacgagaagggcaacctgaccaccgccggctttgcctgctctcagtgtggccagcccctgttcgtgtacaagctggagcaggtgtctgagaagggcaaggcttacaccaactacttcggacggtgcaatgtggccgagcacgaaaagctgatcctgctggcccagctgaagcccgagaaggatagcgacgaagccgtgacatatagcctgggaaagtttgggcagagggccctggatttctacagcattcatgtgaccaaggagtccacccaccccgtgaagcccctggcccagatcgccggaaacagatacgcctccggacctgtgggaaaggccctgagcgacgcatgtatgggcacaatcgcctccttcctgtctaagtaccaggacatcatcatcgaacaccagaaggtggtgaagggcaaccagaagagactggagagcctgcgggagctggccggcaaggaaaacctggaataccctagcgtgaccctgccacctcagcctcacaccaaggagggcgttgatgcctacaacgaagtgatcgcccgggtgcgaatgtgggtgaacctgaacctgtggcagaagctgaagctaagcagagatgatgccaagcctctgctgagactgaagggattcccttcctttcctctggtcgagagacaggccaacgaagtggactggtgggacatggtgtgtaacgtgaagaagctgatcaacgagaaaaaggaggatggcaaggtgttttggcagaatctggctggctacaagagacaggaagccctgagaccatacctgagcagcgaggaagatcggaagaagggaaagaaattcgctcggtaccagctgggcgacctgctgctgcacctggaaaagaagcacggcgaggactggggaaaggtgtacgacgaggcctgggagcggattgacaagaaagtggaaggcctgagcaagcacatcaagctggaagaggaacggagaagcgaggacgcccagagcaaggccgccctgaccgactggctgcgggctaaggccagcttcgtgatcgagggcctgaaggaggccgacaaggacgagttctgcagatgcgagctgaagctgcagaagtggtacggggacctgcggggaaagcccttcgccatcgaagccgagaacagcatcctggacatcagcggcttcagcaagcagtacaactgtgccttcatctggcagaaggacggcgtgaagaagctgaacctgtacctgatcatcaactacttcaagggcggcaagctgcggttcaagaagatcaaacctgaagccttcgaagccaacagattctacaccgtgatcaacaaaaagagcggcgagatcgtgcccatggaggtgaacttcaacttcgacgaccccaacctgatcatcctgcctctggcctttggcaagagacagggcagagaattcatctggaacgacctgctgtccctggaaaccggcagcctgaagctggccaacggaagagtgatcgagaagacactgtacaacagaagaacccggcaggatgagcctgccctgttcgtggccctgaccttcgagcggcgggaggtcctggactcctccaatatcaaaccaatgaacctgatcggcgtggcaagaggcgaaaacatccccgccgtgatcgccctgaccgaccccgagggctgcccactgagccggtttaaggatagcctgggaaacccaacccacatcctgagaatcggcgagagctataaggagaagcagcggaccatccaggccaagaaggaggtggagcagcggagagccggcggctacagccggaagtacgccagcaaagccaagaatctggcagacgatatggtgagaaacaccgctagagatctgctgtactacgccgtgacccaggatgccatgctgatcttcgccaacctgagccggggcttcggccggcagggcaagcggaccttcatggccgagagacagtacacacggatggaggactggctgaccgccaagctggcctacgagggcctgagcaagacctacctgtccaagacactggcccagtacacctccaagacatgcagcaactgtgggtttaccatcaccagcgccgactacgacagggtgctggagaagctgaagaagacagcaacaggctggatgaccacaattaacggcaaggagctgaaggtggagggccagattacctactacaacagatacaagagacagaacgtagtcaaggacctgtccgtcgagctggatagactgagcgaagaatctgtgaacaacgacatctcctcctggacaaagggcagaagcggagaagctctgagcctcctgaagaaaagattctcccatagacccgtgcaggagaagttcgtgtgcctgaactgcggcttcgagacacacgcagccgagcaagccgccctgaacatcgccagatcctggctgttcctgcggagccaggagtacaagaaataccagacaaacaagacaaccggcaacaccgataagagagccttcgtcgagacctggcagtccttttaccggaagaagcttaaggaggtgtggaaacctgccgtgcggtctggcggatctggcggaggctccaccagccccaagaaaaagagaaaagtctaagctgccttctgcggggcttgccttctggccatgcccttcttctctcccttgcacctgtacctcttggtctttgaataaagcctgagtaggaaggctagcaaaaaaaaaaaaaaaaaaaaaaaaaaaaaaaaaaaaaaaaaaaaaaaaaaaaaaaaaaaaaaaaaaaaaaaaaaaaaaaa

SEQ ID NO: 10055 - RNA, 8787 nt, synthetic construct
  source 1..8787: mol_type = other RNA
aggaaataagagagaaaagaagagtaagaagaaatataagagccaccatggcccctaagaagaagcgtaaagtgagccggatgaaccacgaccaggagttcgacccccctaaggtgtaccctcccgtccccgccgagaagagaaagcccatccgggtcctgagcctgttcgatggcatcgccaccggtctgctggtgctgaaggacctgggcatccaggtggataggtacattgcctccgaggtgtgcgaggactccatcaccgtgggaatggtgcgtcatcagggcaagatcatgtacgtgggcgacgtgcggagcgtgacacagaagcatatccaggagtggggccctttcgacctggtgatcggcggcagcccttgcaatgacctgagcatcgtgaacccagcccggaagggcctgtacgagggaaccggcagactgttcttcgagttttacagactgctgcacgacgcccggcctaaggaaggcgacgaccggcccttcttttggctgttcgagaatgtggtggccatgggagtcagcgacaagcgggatattagccggttcctggagagcaaccccgtgatgatcgatgccaaggaagtgagcgccgcccaccgggccagatacttctggggcaatctgcctggcatgaacagacccctggccagcaccgtgaacgacaagctggagctgcaggagtgcctggagcacggccggatcgccaagttcagcaaggtgagaaccatcaccacccgaagcaacagcatcaaacaaggcaaggaccagcactttcctgtgttcatgaacgagaaggaggacatcctgtggtgtaccgagatggagagagtgttcgggttcccagtccactacacagatgtcagcaacatgtctagactggccagacagagactgctgggaagaagctggtccgtccctgtgatcagacacctgttcgcccctctgaaggagtacttcgcctgcgtgagcagcggcaacagcaacgccaacagccggggccccagcttctctagcggcctggtgccactgtccctgagagggagccacatgggccccatggagatctacaaaaccgtgagcgcctggaagcggcagcctgtgcgcgtgctgagcctgtttcggaatatcgataaagtcctgaaaagcctgggattcctggagagcggctctggctccggcggtggcaccctgaagtacgtggaggatgtgacaaacgtggtcagacgggatgtggagaagtggggccccttcgatctggtgtacggcagcacccaacccctgggcagctcttgtgaccggtgccctggctggtacatgtttcagttccaccggatcctgcagtacgccctgccgagacaggagtcccagcggccattcttttggattttcatggacaacttgctgctgaccgaggatgaccaggaaactaccactcggttcctgcagaccgaagccgtgaccctgcaggacgtgagaggccgggactaccagaacgccatgcgggtgtggtccaacatccctggactgaaaagcaagcacgcacctctgacccctaaagaagaggagtacctgcaggcccaggtgcggagcagaagcaagctggacgcccctaaggtggatctgctggtgaagaattgcctcctgcccctgagagagtacttcaagtatttcagccagaatagtctgcccctgggaggcagcggcggcggcacccaggagagcgtgatgttcgaggacgtggccgtggacttcaccagggaggagtggagccacctggaccccgcccagagggccctgtacagggaggtgatgctggagaactacgagaacctggtgagcctgggcctgcccgtgagcaagctggacgtgatcagcctgctggagaggggcgaggccccctggaggcccgagggcggcggccccaggtgcagctgccccgaccccttcatcgagggcggcccaagcagcggcgcccctcctcccagcggcggcaggcggcccaagcagcggcgcccctcctcccagcggcggcagcccagccggctccccaacctctaccgaggagggcacctctgagtccgccacccccgagagcggccctggcacctccaccgagcccagcgagggcagcgcacccggcagccctgccggcagccccacctccacagaggagggaaccagcaccgagcccagcgaaggcagcgccccaggcaccagcaccgagcctagtgagcaggagattaaacggatcaacaagatcagaagaagacttgtgaaagacagcaacaccaagaaggccggcaagacaggccccatgaaaaccctgctggttagagtgatgacacccgatctgagagagcggctggaaaacctgagaaagaagcctgaaaatatcccccagcccatcagcaatacatctagagccaacctgaataagctgctgaccgattacaccgaaatgaagaaggcgatcctgcatgtgtactgggaagagttccagaaggaccctgtgggcctgatgagccgggtggcccagcctgccagcaagaagatcgatcagaacaagctgaaacctgagatggacgagaagggcaacctgaccaccgccggctttgcctgctctcagtgtggccagcccctgttcgtgtacaagctggagcaggtgtctgagaagggcaaggcttacaccaactacttcggacggtgcaatgtggccgagcacgaaaagctgatcctgctggcccagctgaagcccgagaaggatagcgacgaagccgtgacatatagcctgggaaagtttgggcagagggccctggatttctacagcattcatgtgaccaaggagtccacccaccccgtgaagcccctggcccagatcgccggaaacagatacgcctccggacctgtgggaaaggccctgagcgacgcatgtatgggcacaatcgcctccttcctgtctaagtaccaggacatcatcatcgaacaccagaaggtggtgaagggcaaccagaagagactggagagcctgcgggagctggccggcaaggaaaacctggaataccctagcgtgaccctgccacctcagcctcacaccaaggagggcgttgatgcctacaacgaagtgatcgcccgggtgcgaatgtgggtgaacctgaacctgtggcagaagctgaagctaagcagagatgatgccaagcctctgctgagactgaagggattcccttcctttcctctggtcgagagacaggccaacgaagtggactggtgggacatggtgtgtaacgtgaagaagctgatcaacgagaaaaaggaggatggcaaggtgttttggcagaatctggctggctacaagagacaggaagccctgagaccatacctgagcagcgaggaagatcggaagaagggaaagaaattcgctcggtaccagctgggcgacctgctgctgcacctggaaaagaagcacggcgaggactggggaaaggtgtacgacgaggcctgggagcggattgacaagaaagtggaaggcctgagcaagcacatcaagctggaagaggaacggagaagcgaggacgcccagagcaaggccgccctgaccgactggctgcgggctaaggccagcttcgtgatcgagggcctgaaggaggccgacaaggacgagttctgcagatgcgagctgaagctgcagaagtggtacggggacctgcggggaaagcccttcgccatcgaagccgagaacagcatcctggacatcagcggcttcagcaagcagtacaactgtgccttcatctggcagaaggacggcgtgaagaagctgaacctgtacctgatcatcaactacttcaagggcggcaagctgcggttcaagaagatcaaacctgaagccttcgaagccaacagattctacaccgtgatcaacaaaaagagcggcgagatcgtgcccatggaggtgaacttcaacttcgacgaccccaacctgatcatcctgcctctggcctttggcaagagacagggcagagaattcatctggaacgacctgctgtccctggaaaccggcagcctgaagctggccaacggaagagtgatcgagaagacactgtacaacagaagaacccggcaggatgagcctgccctgttcgtggccctgaccttcgagcggcgggaggtcctggactcctccaatatcaaaccaatgaacctgatcggcgtggcaagaggcgaaaacatccccgccgtgatcgccctgaccgaccccgagggctgcccactgagccggtttaaggatagcctgggaaacccaacccacatcctgagaatcggcgagagctataaggagaagcagcggaccatccaggccaagaaggaggtggagcagcggagagccggcggctacagccggaagtacgccagcaaagccaagaatctggcagacgatatggtgagaaacaccgctagagatctgctgtactacgccgtgacccaggatgccatgctgatcttcgccaacctgagccggggcttcggccggcagggcaagcggaccttcatggccgagagacagtacacacggatggaggactggctgaccgccaagctggcctacgagggcctgagcaagacctacctgtccaagacactggcccagtacacctccaagacatgcagcaactgtgggtttaccatcaccagcgccgactacgacagggtgctggagaagctgaagaagacagcaacaggctggatgaccacaattaacggcaaggagctgaaggtggagggccagattacctactacaacagatacaagagacagaacgtagtcaaggacctgtccgtcgagctggatagactgagcgaagaatctgtgaacaacgacatctcctcctggacaaagggcagaagcggagaagctctgagcctcctgaagaaaagattctcccatagacccgtgcaggagaagttcgtgtgcctgaactgcggcttcgagacacacgcagccgagcaagccgccctgaacatcgccagatcctggctgttcctgcggagccaggagtacaagaaataccagacaaacaagacaaccggcaacaccgataagagagccttcgtcgagacctggcagtccttttaccggaagaagcttaaggaggtgtggaaacctgccgtgcggtctggcggatctggcggaggctccaccagccccaagaaaaagagaaaagtctaagctgccttctgcggggcttgccttctggccatgcccttcttctctcccttgcacctgtacctcttggtctttgaataaagcctgagtaggaaggctagcaaaaaaaaaaaaaaaaaaaaaaaaaaaaaaaaaaaaaaaaaaaaaaaaaaaaaaaaaaaaaaaaaaaaaaaaaaaaaaaagcccagccggctccccaacctctaccgaggagggcacctctgagtccgccacccccgagagcggccctggcacctccaccgagcccagcgagggcagcgcacccggcagccctgccggcagccccacctccacagaggagggaaccagcaccgagcccagcgaaggcagcgccccaggcaccagcaccgagcctagtgagcaggagattaaacggatcaacaagatcagaagaagacttgtgaaagacagcaacaccaagaaggccggcaagacaggccccatgaaaaccctgctggttagagtgatgacacccgatctgagagagcggctggaaaacctgagaaagaagcctgaaaatatcccccagcccatcagcaatacatctagagccaacctgaataagctgctgaccgattacaccgaaatgaagaaggcgatcctgcatgtgtactgggaagagttccagaaggaccctgtgggcctgatgagccgggtggcccagcctgccagcaagaagatcgatcagaacaagctgaaacctgagatggacgagaagggcaacctgaccaccgccggctttgcctgctctcagtgtggccagcccctgttcgtgtacaagctggagcaggtgtctgagaagggcaaggcttacaccaactacttcggacggtgcaatgtggccgagcacgaaaagctgatcctgctggcccagctgaagcccgagaaggatagcgacgaagccgtgacatatagcctgggaaagtttgggcagagggccctggatttctacagcattcatgtgaccaaggagtccacccaccccgtgaagcccctggcccagatcgccggaaacagatacgcctccggacctgtgggaaaggccctgagcgacgcatgtatgggcacaatcgcctccttcctgtctaagtaccaggacatcatcatcgaacaccagaaggtggtgaagggcaaccagaagagactggagagcctgcgggagctggccggcaaggaaaacctggaataccctagcgtgaccctgccacctcagcctcacaccaaggagggcgttgatgcctacaacgaagtgatcgcccgggtgcgaatgtgggtgaacctgaacctgtggcagaagctgaagctaagcagagatgatgccaagcctctgctgagactgaagggattcccttcctttcctctggtcgagagacaggccaacgaagtggactggtgggacatggtgtgtaacgtgaagaagctgatcaacgagaaaaaggaggatggcaaggtgttttggcagaatctggctggctacaagagacaggaagccctgagaccatacctgagcagcgaggaagatcggaagaagggaaagaaattcgctcggtaccagctgggcgacctgctgctgcacctggaaaagaagcacggcgaggactggggaaaggtgtacgacgaggcctgggagcggattgacaagaaagtggaaggcctgagcaagcacatcaagctggaagaggaacggagaagcgaggacgcccagagcaaggccgccctgaccgactggctgcgggctaaggccagcttcgtgatcgagggcctgaaggaggccgacaaggacgagttctgcagatgcgagctgaagctgcagaagtggtacggggacctgcggggaaagcccttcgccatcgaagccgagaacagcatcctggacatcagcggcttcagcaagcagtacaactgtgccttcatctggcagaaggacggcgtgaagaagctgaacctgtacctgatcatcaactacttcaagggcggcaagctgcggttcaagaagatcaaacctgaagccttcgaagccaacagattctacaccgtgatcaacaaaaagagcggcgagatcgtgcccatggaggtgaacttcaacttcgacgaccccaacctgatcatcctgcctctggcctttggcaagagacagggcagagaattcatctggaacgacctgctgtccctggaaaccggcagcctgaagctggccaacggaagagtgatcgagaagacactgtacaacagaagaacccggcaggatgagcctgccctgttcgtggccctgaccttcgagcggcgggaggtcctggactcctccaatatcaaaccaatgaacctgatcggcgtggcaagaggcgaaaacatccccgccgtgatcgccctgaccgaccccgagggctgcccactgagccggtttaaggatagcctgggaaacccaacccacatcctgagaatcggcgagagctataaggagaagcagcggaccatccaggccaagaaggaggtggagcagcggagagccggcggctacagccggaagtacgccagcaaagccaagaatctggcagacgatatggtgagaaacaccgctagagatctgctgtactacgccgtgacccaggatgccatgctgatcttcgccaacctgagccggggcttcggccggcagggcaagcggaccttcatggccgagagacagtacacacggatggaggactggctgaccgccaagctggcctacgagggcctgagcaagacctacctgtccaagacactggcccagtacacctccaagacatgcagcaactgtgggtttaccatcaccagcgccgactacgacagggtgctggagaagctgaagaagacagcaacaggctggatgaccacaattaacggcaaggagctgaaggtggagggccagattacctactacaacagatacaagagacagaacgtagtcaaggacctgtccgtcgagctggatagactgagcgaagaatctgtgaacaacgacatctcctcctggacaaagggcagaagcggagaagctctgagcctcctgaagaaaagattctcccatagacccgtgcaggagaagttcgtgtgcctgaactgcggcttcgagacacacgcagccgagcaagccgccctgaacatcgccagatcctggctgttcctgcggagccaggagtacaagaaataccagacaaacaagacaaccggcaacaccgataagagagccttcgtcgagacctggcagtccttttaccggaagaagcttaaggaggtgtggaaacctgccgtgcggtctggcggatctggcggaggctccaccagccccaagaaaaagagaaaagtctaagctgccttctgcggggcttgccttctggccatgcccttcttctctcccttgcacctgtacctcttggtctttgaataaagcctgagtaggaaggctagcaaaaaaaaaaaaaaaaaaaaaaaaaaaaaaaaaaaaaaaaaaaaaaaaaaaaaaaaaaaaaaaaaaaaaaaaaaaaaaaa

SEQ ID NO: 10056 - RNA, 8787 nt, synthetic construct
  source 1..8787: mol_type = other RNA
aggaaataagagagaaaagaagagtaagaagaaatataagagccaccatggcccctaagaagaagcgtaaagtgagccggatgaaccacgaccaggagttcgacccccctaaggtgtaccctcccgtccccgccgagaagagaaagcccatccgggtcctgagcctgttcgatggcatcgccaccggtctgctggtgctgaaggacctgggcatccaggtggataggtacattgcctccgaggtgtgcgaggactccatcaccgtgggaatggtgcgtcatcagggcaagatcatgtacgtgggcgacgtgcggagcgtgacacagaagcatatccaggagtggggccctttcgacctggtgatcggcggcagcccttgcaatgacctgagcatcgtgaacccagcccggaagggcctgtacgagggaaccggcagactgttcttcgagttttacagactgctgcacgacgcccggcctaaggaaggcgacgaccggcccttcttttggctgttcgagaatgtggtggccatgggagtcagcgacaagcgggatattagccggttcctggagagcaaccccgtgatgatcgatgccaaggaagtgagcgccgcccaccgggccagatacttctggggcaatctgcctggcatgaacagacccctggccagcaccgtgaacgacaagctggagctgcaggagtgcctggagcacggccggatcgccaagttcagcaaggtgagaaccatcaccacccgaagcaacagcatcaaacaaggcaaggaccagcactttcctgtgttcatgaacgagaaggaggacatcctgtggtgtaccgagatggagagagtgttcgggttcccagtccactacacagatgtcagcaacatgtctagactggccagacagagactgctgggaagaagctggtccgtccctgtgatcagacacctgttcgcccctctgaaggagtacttcgcctgcgtgagcagcggcaacagcaacgccaacagccggggccccagcttctctagcggcctggtgccactgtccctgagagggagccacatgggccccatggagatctacaaaaccgtgagcgcctggaagcggcagcctgtgcgcgtgctgagcctgtttcggaatatcgataaagtcctgaaaagcctgggattcctggagagcggctctggctccggcggtggcaccctgaagtacgtggaggatgtgacaaacgtggtcagacgggatgtggagaagtggggccccttcgatctggtgtacggcagcacccaacccctgggcagctcttgtgaccggtgccctggctggtacatgtttcagttccaccggatcctgcagtacgccctgccgagacaggagtcccagcggccattcttttggattttcatggacaacttgctgctgaccgaggatgaccaggaaactaccactcggttcctgcagaccgaagccgtgaccctgcaggacgtgagaggccgggactaccagaacgccatgcgggtgtggtccaacatccctggactgaaaagcaagcacgcacctctgacccctaaagaagaggagtacctgcaggcccaggtgcggagcagaagcaagctggacgcccctaaggtggatctgctggtgaagaattgcctcctgcccctgagagagtacttcaagtatttcagccagaatagtctgcccctgggaggcagcggcggcggcatggtgaccttcaaggacgtggccgtggccttcagcgaggaggagctgaggctgctggaccccgcccagaggaagctgtaccaggaggtgatggtggagaacttccagaacctgctgagcgtgggcatcaacaaccagagcgagctgagggccgtgcaggacggcggcagccacgaggccctgagctgctggcagatctggcagagggtgatcgacaacctgaccaggtgccaggacagcatgggcggcccaagcagcggcgcccctcctcccagcggcggcaggcggcccaagcagcggcgcccctcctcccagcggcggcagcccagccggctccccaacctctaccgaggagggcacctctgagtccgccacccccgagagcggccctggcacctccaccgagcccagcgagggcagcgcacccggcagccctgccggcagccccacctccacagaggagggaaccagcaccgagcccagcgaaggcagcgccccaggcaccagcaccgagcctagtgagcaggagattaaacggatcaacaagatcagaagaagacttgtgaaagacagcaacaccaagaaggccggcaagacaggccccatgaaaaccctgctggttagagtgatgacacccgatctgagagagcggctggaaaacctgagaaagaagcctgaaaatatcccccagcccatcagcaatacatctagagccaacctgaataagctgctgaccgattacaccgaaatgaagaaggcgatcctgcatgtgtactgggaagagttccagaaggaccctgtgggcctgatgagccgggtggcccagcctgccagcaagaagatcgatcagaacaagctgaaacctgagatggacgagaagggcaacctgaccaccgccggctttgcctgctctcagtgtggccagcccctgttcgtgtacaagctggagcaggtgtctgagaagggcaaggcttacaccaactacttcggacggtgcaatgtggccgagcacgaaaagctgatcctgctggcccagctgaagcccgagaaggatagcgacgaagccgtgacatatagcctgggaaagtttgggcagagggccctggatttctacagcattcatgtgaccaaggagtccacccaccccgtgaagcccctggcccagatcgccggaaacagatacgcctccggacctgtgggaaaggccctgagcgacgcatgtatgggcacaatcgcctccttcctgtctaagtaccaggacatcatcatcgaacaccagaaggtggtgaagggcaaccagaagagactggagagcctgcgggagctggccggcaaggaaaacctggaataccctagcgtgaccctgccacctcagcctcacaccaaggagggcgttgatgcctacaacgaagtgatcgcccgggtgcgaatgtgggtgaacctgaacctgtggcagaagctgaagctaagcagagatgatgccaagcctctgctgagactgaagggattcccttcctttcctctggtcgagagacaggccaacgaagtggactggtgggacatggtgtgtaacgtgaagaagctgatcaacgagaaaaaggaggatggcaaggtgttttggcagaatctggctggctacaagagacaggaagccctgagaccatacctgagcagcgaggaagatcggaagaagggaaagaaattcgctcggtaccagctgggcgacctgctgctgcacctggaaaagaagcacggcgaggactggggaaaggtgtacgacgaggcctgggagcggattgacaagaaagtggaaggcctgagcaagcacatcaagctggaagaggaacggagaagcgaggacgcccagagcaaggccgccctgaccgactggctgcgggctaaggccagcttcgtgatcgagggcctgaaggaggccgacaaggacgagttctgcagatgcgagctgaagctgcagaagtggtacggggacctgcggggaaagcccttcgccatcgaagccgagaacagcatcctggacatcagcggcttcagcaagcagtacaactgtgccttcatctggcagaaggacggcgtgaagaagctgaacctgtacctgatcatcaactacttcaagggcggcaagctgcggttcaagaagatcaaacctgaagccttcgaagccaacagattctacaccgtgatcaacaaaaagagcggcgagatcgtgcccatggaggtgaacttcaacttcgacgaccccaacctgatcatcctgcctctggcctttggcaagagacagggcagagaattcatctggaacgacctgctgtccctggaaaccggcagcctgaagctggccaacggaagagtgatcgagaagacactgtacaacagaagaacccggcaggatgagcctgccctgttcgtggccctgaccttcgagcggcgggaggtcctggactcctccaatatcaaaccaatgaacctgatcggcgtggcaagaggcgaaaacatccccgccgtgatcgccctgaccgaccccgagggctgcccactgagccggtttaaggatagcctgggaaacccaacccacatcctgagaatcggcgagagctataaggagaagcagcggaccatccaggccaagaaggaggtggagcagcggagagccggcggctacagccggaagtacgccagcaaagccaagaatctggcagacgatatggtgagaaacaccgctagagatctgctgtactacgccgtgacccaggatgccatgctgatcttcgccaacctgagccggggcttcggccggcagggcaagcggaccttcatggccgagagacagtacacacggatggaggactggctgaccgccaagctggcctacgagggcctgagcaagacctacctgtccaagacactggcccagtacacctccaagacatgcagcaactgtgggtttaccatcaccagcgccgactacgacagggtgctggagaagctgaagaagacagcaacaggctggatgaccacaattaacggcaaggagctgaaggtggagggccagattacctactacaacagatacaagagacagaacgtagtcaaggacctgtccgtcgagctggatagactgagcgaagaatctgtgaacaacgacatctcctcctggacaaagggcagaagcggagaagctctgagcctcctgaagaaaagattctcccatagacccgtgcaggagaagttcgtgtgcctgaactgcggcttcgagacacacgcagccgagcaagccgccctgaacatcgccagatcctggctgttcctgcggagccaggagtacaagaaataccagacaaacaagacaaccggcaacaccgataagagagccttcgtcgagacctggcagtccttttaccggaagaagcttaaggaggtgtggaaacctgccgtgcggtctggcggatctggcggaggctccaccagccccaagaaaaagagaaaagtctaagctgccttctgcggggcttgccttctggccatgcccttcttctctcccttgcacctgtacctcttggtctttgaataaagcctgagtaggaaggctagcaaaaaaaaaaaaaaaaaaaaaaaaaaaaaaaaaaaaaaaaaaaaaaaaaaaaaaaaaaaaaaaaaaaaaaaaaaaaaaaagcccagccggctccccaacctctaccgaggagggcacctctgagtccgccacccccgagagcggccctggcacctccaccgagcccagcgagggcagcgcacccggcagccctgccggcagccccacctccacagaggagggaaccagcaccgagcccagcgaaggcagcgccccaggcaccagcaccgagcctagtgagcaggagattaaacggatcaacaagatcagaagaagacttgtgaaagacagcaacaccaagaaggccggcaagacaggccccatgaaaaccctgctggttagagtgatgacacccgatctgagagagcggctggaaaacctgagaaagaagcctgaaaatatcccccagcccatcagcaatacatctagagccaacctgaataagctgctgaccgattacaccgaaatgaagaaggcgatcctgcatgtgtactgggaagagttccagaaggaccctgtgggcctgatgagccgggtggcccagcctgccagcaagaagatcgatcagaacaagctgaaacctgagatggacgagaagggcaacctgaccaccgccggctttgcctgctctcagtgtggccagcccctgttcgtgtacaagctggagcaggtgtctgagaagggcaaggcttacaccaactacttcggacggtgcaatgtggccgagcacgaaaagctgatcctgctggcccagctgaagcccgagaaggatagcgacgaagccgtgacatatagcctgggaaagtttgggcagagggccctggatttctacagcattcatgtgaccaaggagtccacccaccccgtgaagcccctggcccagatcgccggaaacagatacgcctccggacctgtgggaaaggccctgagcgacgcatgtatgggcacaatcgcctccttcctgtctaagtaccaggacatcatcatcgaacaccagaaggtggtgaagggcaaccagaagagactggagagcctgcgggagctggccggcaaggaaaacctggaataccctagcgtgaccctgccacctcagcctcacaccaaggagggcgttgatgcctacaacgaagtgatcgcccgggtgcgaatgtgggtgaacctgaacctgtggcagaagctgaagctaagcagagatgatgccaagcctctgctgagactgaagggattcccttcctttcctctggtcgagagacaggccaacgaagtggactggtgggacatggtgtgtaacgtgaagaagctgatcaacgagaaaaaggaggatggcaaggtgttttggcagaatctggctggctacaagagacaggaagccctgagaccatacctgagcagcgaggaagatcggaagaagggaaagaaattcgctcggtaccagctgggcgacctgctgctgcacctggaaaagaagcacggcgaggactggggaaaggtgtacgacgaggcctgggagcggattgacaagaaagtggaaggcctgagcaagcacatcaagctggaagaggaacggagaagcgaggacgcccagagcaaggccgccctgaccgactggctgcgggctaaggccagcttcgtgatcgagggcctgaaggaggccgacaaggacgagttctgcagatgcgagctgaagctgcagaagtggtacggggacctgcggggaaagcccttcgccatcgaagccgagaacagcatcctggacatcagcggcttcagcaagcagtacaactgtgccttcatctggcagaaggacggcgtgaagaagctgaacctgtacctgatcatcaactacttcaagggcggcaagctgcggttcaagaagatcaaacctgaagccttcgaagccaacagattctacaccgtgatcaacaaaaagagcggcgagatcgtgcccatggaggtgaacttcaacttcgacgaccccaacctgatcatcctgcctctggcctttggcaagagacagggcagagaattcatctggaacgacctgctgtccctggaaaccggcagcctgaagctggccaacggaagagtgatcgagaagacactgtacaacagaagaacccggcaggatgagcctgccctgttcgtggccctgaccttcgagcggcgggaggtcctggactcctccaatatcaaaccaatgaacctgatcggcgtggcaagaggcgaaaacatccccgccgtgatcgccctgaccgaccccgagggctgcccactgagccggtttaaggatagcctgggaaacccaacccacatcctgagaatcggcgagagctataaggagaagcagcggaccatccaggccaagaaggaggtggagcagcggagagccggcggctacagccggaagtacgccagcaaagccaagaatctggcagacgatatggtgagaaacaccgctagagatctgctgtactacgccgtgacccaggatgccatgctgatcttcgccaacctgagccggggcttcggccggcagggcaagcggaccttcatggccgagagacagtacacacggatggaggactggctgaccgccaagctggcctacgagggcctgagcaagacctacctgtccaagacactggcccagtacacctccaagacatgcagcaactgtgggtttaccatcaccagcgccgactacgacagggtgctggagaagctgaagaagacagcaacaggctggatgaccacaattaacggcaaggagctgaaggtggagggccagattacctactacaacagatacaagagacagaacgtagtcaaggacctgtccgtcgagctggatagactgagcgaagaatctgtgaacaacgacatctcctcctggacaaagggcagaagcggagaagctctgagcctcctgaagaaaagattctcccatagacccgtgcaggagaagttcgtgtgcctgaactgcggcttcgagacacacgcagccgagcaagccgccctgaacatcgccagatcctggctgttcctgcggagccaggagtacaagaaataccagacaaacaagacaaccggcaacaccgataagagagccttcgtcgagacctggcagtccttttaccggaagaagcttaaggaggtgtggaaacctgccgtgcggtctggcggatctggcggaggctccaccagccccaagaaaaagagaaaagtctaagctgccttctgcggggcttgccttctggccatgcccttcttctctcccttgcacctgtacctcttggtctttgaataaagcctgagtaggaaggctagcaaaaaaaaaaaaaaaaaaaaaaaaaaaaaaaaaaaaaaaaaaaaaaaaaaaaaaaaaaaaaaaaaaaaaaaaaaaaaaaa

SEQ ID NO: 10057 - RNA, 8787 nt, synthetic construct
  source 1..8787: mol_type = other RNA
aggaaataagagagaaaagaagagtaagaagaaatataagagccaccatggcccctaagaagaagcgtaaagtgagccggatgaaccacgaccaggagttcgacccccctaaggtgtaccctcccgtccccgccgagaagagaaagcccatccgggtcctgagcctgttcgatggcatcgccaccggtctgctggtgctgaaggacctgggcatccaggtggataggtacattgcctccgaggtgtgcgaggactccatcaccgtgggaatggtgcgtcatcagggcaagatcatgtacgtgggcgacgtgcggagcgtgacacagaagcatatccaggagtggggccctttcgacctggtgatcggcggcagcccttgcaatgacctgagcatcgtgaacccagcccggaagggcctgtacgagggaaccggcagactgttcttcgagttttacagactgctgcacgacgcccggcctaaggaaggcgacgaccggcccttcttttggctgttcgagaatgtggtggccatgggagtcagcgacaagcgggatattagccggttcctggagagcaaccccgtgatgatcgatgccaaggaagtgagcgccgcccaccgggccagatacttctggggcaatctgcctggcatgaacagacccctggccagcaccgtgaacgacaagctggagctgcaggagtgcctggagcacggccggatcgccaagttcagcaaggtgagaaccatcaccacccgaagcaacagcatcaaacaaggcaaggaccagcactttcctgtgttcatgaacgagaaggaggacatcctgtggtgtaccgagatggagagagtgttcgggttcccagtccactacacagatgtcagcaacatgtctagactggccagacagagactgctgggaagaagctggtccgtccctgtgatcagacacctgttcgcccctctgaaggagtacttcgcctgcgtgagcagcggcaacagcaacgccaacagccggggccccagcttctctagcggcctggtgccactgtccctgagagggagccacatgggccccatggagatctacaaaaccgtgagcgcctggaagcggcagcctgtgcgcgtgctgagcctgtttcggaatatcgataaagtcctgaaaagcctgggattcctggagagcggctctggctccggcggtggcaccctgaagtacgtggaggatgtgacaaacgtggtcagacgggatgtggagaagtggggccccttcgatctggtgtacggcagcacccaacccctgggcagctcttgtgaccggtgccctggctggtacatgtttcagttccaccggatcctgcagtacgccctgccgagacaggagtcccagcggccattcttttggattttcatggacaacttgctgctgaccgaggatgaccaggaaactaccactcggttcctgcagaccgaagccgtgaccctgcaggacgtgagaggccgggactaccagaacgccatgcgggtgtggtccaacatccctggactgaaaagcaagcacgcacctctgacccctaaagaagaggagtacctgcaggcccaggtgcggagcagaagcaagctggacgcccctaaggtggatctgctggtgaagaattgcctcctgcccctgagagagtacttcaagtatttcagccagaatagtctgcccctgggaggcagcggcggcggcatgcccggcccccccggcagcctggagatgggcgtgctgaccttcagggacgtggccatcgagttcagcctggaggagtggcagtgcctggacatcacccagcagaacctgtacaggaacgtgatgctggagaactacaggaacctggtgttcgtgggcatcgccgccagcaagcccgacctgatcacctgcctggagcagggcaaggagccctggaacgtgaagaggcacgagatggtggccggcggcccaagcagcggcgcccctcctcccagcggcggcaggcggcccaagcagcggcgcccctcctcccagcggcggcagcccagccggctccccaacctctaccgaggagggcacctctgagtccgccacccccgagagcggccctggcacctccaccgagcccagcgagggcagcgcacccggcagccctgccggcagccccacctccacagaggagggaaccagcaccgagcccagcgaaggcagcgccccaggcaccagcaccgagcctagtgagcaggagattaaacggatcaacaagatcagaagaagacttgtgaaagacagcaacaccaagaaggccggcaagacaggccccatgaaaaccctgctggttagagtgatgacacccgatctgagagagcggctggaaaacctgagaaagaagcctgaaaatatcccccagcccatcagcaatacatctagagccaacctgaataagctgctgaccgattacaccgaaatgaagaaggcgatcctgcatgtgtactgggaagagttccagaaggaccctgtgggcctgatgagccgggtggcccagcctgccagcaagaagatcgatcagaacaagctgaaacctgagatggacgagaagggcaacctgaccaccgccggctttgcctgctctcagtgtggccagcccctgttcgtgtacaagctggagcaggtgtctgagaagggcaaggcttacaccaactacttcggacggtgcaatgtggccgagcacgaaaagctgatcctgctggcccagctgaagcccgagaaggatagcgacgaagccgtgacatatagcctgggaaagtttgggcagagggccctggatttctacagcattcatgtgaccaaggagtccacccaccccgtgaagcccctggcccagatcgccggaaacagatacgcctccggacctgtgggaaaggccctgagcgacgcatgtatgggcacaatcgcctccttcctgtctaagtaccaggacatcatcatcgaacaccagaaggtggtgaagggcaaccagaagagactggagagcctgcgggagctggccggcaaggaaaacctggaataccctagcgtgaccctgccacctcagcctcacaccaaggagggcgttgatgcctacaacgaagtgatcgcccgggtgcgaatgtgggtgaacctgaacctgtggcagaagctgaagctaagcagagatgatgccaagcctctgctgagactgaagggattcccttcctttcctctggtcgagagacaggccaacgaagtggactggtgggacatggtgtgtaacgtgaagaagctgatcaacgagaaaaaggaggatggcaaggtgttttggcagaatctggctggctacaagagacaggaagccctgagaccatacctgagcagcgaggaagatcggaagaagggaaagaaattcgctcggtaccagctgggcgacctgctgctgcacctggaaaagaagcacggcgaggactggggaaaggtgtacgacgaggcctgggagcggattgacaagaaagtggaaggcctgagcaagcacatcaagctggaagaggaacggagaagcgaggacgcccagagcaaggccgccctgaccgactggctgcgggctaaggccagcttcgtgatcgagggcctgaaggaggccgacaaggacgagttctgcagatgcgagctgaagctgcagaagtggtacggggacctgcggggaaagcccttcgccatcgaagccgagaacagcatcctggacatcagcggcttcagcaagcagtacaactgtgccttcatctggcagaaggacggcgtgaagaagctgaacctgtacctgatcatcaactacttcaagggcggcaagctgcggttcaagaagatcaaacctgaagccttcgaagccaacagattctacaccgtgatcaacaaaaagagcggcgagatcgtgcccatggaggtgaacttcaacttcgacgaccccaacctgatcatcctgcctctggcctttggcaagagacagggcagagaattcatctggaacgacctgctgtccctggaaaccggcagcctgaagctggccaacggaagagtgatcgagaagacactgtacaacagaagaacccggcaggatgagcctgccctgttcgtggccctgaccttcgagcggcgggaggtcctggactcctccaatatcaaaccaatgaacctgatcggcgtggcaagaggcgaaaacatccccgccgtgatcgccctgaccgaccccgagggctgcccactgagccggtttaaggatagcctgggaaacccaacccacatcctgagaatcggcgagagctataaggagaagcagcggaccatccaggccaagaaggaggtggagcagcggagagccggcggctacagccggaagtacgccagcaaagccaagaatctggcagacgatatggtgagaaacaccgctagagatctgctgtactacgccgtgacccaggatgccatgctgatcttcgccaacctgagccggggcttcggccggcagggcaagcggaccttcatggccgagagacagtacacacggatggaggactggctgaccgccaagctggcctacgagggcctgagcaagacctacctgtccaagacactggcccagtacacctccaagacatgcagcaactgtgggtttaccatcaccagcgccgactacgacagggtgctggagaagctgaagaagacagcaacaggctggatgaccacaattaacggcaaggagctgaaggtggagggccagattacctactacaacagatacaagagacagaacgtagtcaaggacctgtccgtcgagctggatagactgagcgaagaatctgtgaacaacgacatctcctcctggacaaagggcagaagcggagaagctctgagcctcctgaagaaaagattctcccatagacccgtgcaggagaagttcgtgtgcctgaactgcggcttcgagacacacgcagccgagcaagccgccctgaacatcgccagatcctggctgttcctgcggagccaggagtacaagaaataccagacaaacaagacaaccggcaacaccgataagagagccttcgtcgagacctggcagtccttttaccggaagaagcttaaggaggtgtggaaacctgccgtgcggtctggcggatctggcggaggctccaccagccccaagaaaaagagaaaagtctaagctgccttctgcggggcttgccttctggccatgcccttcttctctcccttgcacctgtacctcttggtctttgaataaagcctgagtaggaaggctagcaaaaaaaaaaaaaaaaaaaaaaaaaaaaaaaaaaaaaaaaaaaaaaaaaaaaaaaaaaaaaaaaaaaaaaaaaaaaaaaagcccagccggctccccaacctctaccgaggagggcacctctgagtccgccacccccgagagcggccctggcacctccaccgagcccagcgagggcagcgcacccggcagccctgccggcagccccacctccacagaggagggaaccagcaccgagcccagcgaaggcagcgccccaggcaccagcaccgagcctagtgagcaggagattaaacggatcaacaagatcagaagaagacttgtgaaagacagcaacaccaagaaggccggcaagacaggccccatgaaaaccctgctggttagagtgatgacacccgatctgagagagcggctggaaaacctgagaaagaagcctgaaaatatcccccagcccatcagcaatacatctagagccaacctgaataagctgctgaccgattacaccgaaatgaagaaggcgatcctgcatgtgtactgggaagagttccagaaggaccctgtgggcctgatgagccgggtggcccagcctgccagcaagaagatcgatcagaacaagctgaaacctgagatggacgagaagggcaacctgaccaccgccggctttgcctgctctcagtgtggccagcccctgttcgtgtacaagctggagcaggtgtctgagaagggcaaggcttacaccaactacttcggacggtgcaatgtggccgagcacgaaaagctgatcctgctggcccagctgaagcccgagaaggatagcgacgaagccgtgacatatagcctgggaaagtttgggcagagggccctggatttctacagcattcatgtgaccaaggagtccacccaccccgtgaagcccctggcccagatcgccggaaacagatacgcctccggacctgtgggaaaggccctgagcgacgcatgtatgggcacaatcgcctccttcctgtctaagtaccaggacatcatcatcgaacaccagaaggtggtgaagggcaaccagaagagactggagagcctgcgggagctggccggcaaggaaaacctggaataccctagcgtgaccctgccacctcagcctcacaccaaggagggcgttgatgcctacaacgaagtgatcgcccgggtgcgaatgtgggtgaacctgaacctgtggcagaagctgaagctaagcagagatgatgccaagcctctgctgagactgaagggattcccttcctttcctctggtcgagagacaggccaacgaagtggactggtgggacatggtgtgtaacgtgaagaagctgatcaacgagaaaaaggaggatggcaaggtgttttggcagaatctggctggctacaagagacaggaagccctgagaccatacctgagcagcgaggaagatcggaagaagggaaagaaattcgctcggtaccagctgggcgacctgctgctgcacctggaaaagaagcacggcgaggactggggaaaggtgtacgacgaggcctgggagcggattgacaagaaagtggaaggcctgagcaagcacatcaagctggaagaggaacggagaagcgaggacgcccagagcaaggccgccctgaccgactggctgcgggctaaggccagcttcgtgatcgagggcctgaaggaggccgacaaggacgagttctgcagatgcgagctgaagctgcagaagtggtacggggacctgcggggaaagcccttcgccatcgaagccgagaacagcatcctggacatcagcggcttcagcaagcagtacaactgtgccttcatctggcagaaggacggcgtgaagaagctgaacctgtacctgatcatcaactacttcaagggcggcaagctgcggttcaagaagatcaaacctgaagccttcgaagccaacagattctacaccgtgatcaacaaaaagagcggcgagatcgtgcccatggaggtgaacttcaacttcgacgaccccaacctgatcatcctgcctctggcctttggcaagagacagggcagagaattcatctggaacgacctgctgtccctggaaaccggcagcctgaagctggccaacggaagagtgatcgagaagacactgtacaacagaagaacccggcaggatgagcctgccctgttcgtggccctgaccttcgagcggcgggaggtcctggactcctccaatatcaaaccaatgaacctgatcggcgtggcaagaggcgaaaacatccccgccgtgatcgccctgaccgaccccgagggctgcccactgagccggtttaaggatagcctgggaaacccaacccacatcctgagaatcggcgagagctataaggagaagcagcggaccatccaggccaagaaggaggtggagcagcggagagccggcggctacagccggaagtacgccagcaaagccaagaatctggcagacgatatggtgagaaacaccgctagagatctgctgtactacgccgtgacccaggatgccatgctgatcttcgccaacctgagccggggcttcggccggcagggcaagcggaccttcatggccgagagacagtacacacggatggaggactggctgaccgccaagctggcctacgagggcctgagcaagacctacctgtccaagacactggcccagtacacctccaagacatgcagcaactgtgggtttaccatcaccagcgccgactacgacagggtgctggagaagctgaagaagacagcaacaggctggatgaccacaattaacggcaaggagctgaaggtggagggccagattacctactacaacagatacaagagacagaacgtagtcaaggacctgtccgtcgagctggatagactgagcgaagaatctgtgaacaacgacatctcctcctggacaaagggcagaagcggagaagctctgagcctcctgaagaaaagattctcccatagacccgtgcaggagaagttcgtgtgcctgaactgcggcttcgagacacacgcagccgagcaagccgccctgaacatcgccagatcctggctgttcctgcggagccaggagtacaagaaataccagacaaacaagacaaccggcaacaccgataagagagccttcgtcgagacctggcagtccttttaccggaagaagcttaaggaggtgtggaaacctgccgtgcggtctggcggatctggcggaggctccaccagccccaagaaaaagagaaaagtctaagctgccttctgcggggcttgccttctggccatgcccttcttctctcccttgcacctgtacctcttggtctttgaataaagcctgagtaggaaggctagcaaaaaaaaaaaaaaaaaaaaaaaaaaaaaaaaaaaaaaaaaaaaaaaaaaaaaaaaaaaaaaaaaaaaaaaaaaaaaaaa

SEQ ID NO: 10058 - RNA, 8787 nt, synthetic construct
  source 1..8787: mol_type = other RNA
aggaaataagagagaaaagaagagtaagaagaaatataagagccaccatggcccctaagaagaagcgtaaagtgagccggatgaaccacgaccaggagttcgacccccctaaggtgtaccctcccgtccccgccgagaagagaaagcccatccgggtcctgagcctgttcgatggcatcgccaccggtctgctggtgctgaaggacctgggcatccaggtggataggtacattgcctccgaggtgtgcgaggactccatcaccgtgggaatggtgcgtcatcagggcaagatcatgtacgtgggcgacgtgcggagcgtgacacagaagcatatccaggagtggggccctttcgacctggtgatcggcggcagcccttgcaatgacctgagcatcgtgaacccagcccggaagggcctgtacgagggaaccggcagactgttcttcgagttttacagactgctgcacgacgcccggcctaaggaaggcgacgaccggcccttcttttggctgttcgagaatgtggtggccatgggagtcagcgacaagcgggatattagccggttcctggagagcaaccccgtgatgatcgatgccaaggaagtgagcgccgcccaccgggccagatacttctggggcaatctgcctggcatgaacagacccctggccagcaccgtgaacgacaagctggagctgcaggagtgcctggagcacggccggatcgccaagttcagcaaggtgagaaccatcaccacccgaagcaacagcatcaaacaaggcaaggaccagcactttcctgtgttcatgaacgagaaggaggacatcctgtggtgtaccgagatggagagagtgttcgggttcccagtccactacacagatgtcagcaacatgtctagactggccagacagagactgctgggaagaagctggtccgtccctgtgatcagacacctgttcgcccctctgaaggagtacttcgcctgcgtgagcagcggcaacagcaacgccaacagccggggccccagcttctctagcggcctggtgccactgtccctgagagggagccacatgggccccatggagatctacaaaaccgtgagcgcctggaagcggcagcctgtgcgcgtgctgagcctgtttcggaatatcgataaagtcctgaaaagcctgggattcctggagagcggctctggctccggcggtggcaccctgaagtacgtggaggatgtgacaaacgtggtcagacgggatgtggagaagtggggccccttcgatctggtgtacggcagcacccaacccctgggcagctcttgtgaccggtgccctggctggtacatgtttcagttccaccggatcctgcagtacgccctgccgagacaggagtcccagcggccattcttttggattttcatggacaacttgctgctgaccgaggatgaccaggaaactaccactcggttcctgcagaccgaagccgtgaccctgcaggacgtgagaggccgggactaccagaacgccatgcgggtgtggtccaacatccctggactgaaaagcaagcacgcacctctgacccctaaagaagaggagtacctgcaggcccaggtgcggagcagaagcaagctggacgcccctaaggtggatctgctggtgaagaattgcctcctgcccctgagagagtacttcaagtatttcagccagaatagtctgcccctgggaggcagcggcggcggcgacatgggcctggtgagcttcgaggacgtggccgtggacttcacctggcaggagtggcaggagctggacgccgcccagaggaccctgtacagggacgtgatgctggagaactacaggagcctggtgtggctgggccactgcctggccaagcccgagctgatcagcaagctggaggagggcttcgagccctggggcgtggccgaggccaccgagcagtgcctgccctgcgccgaggaccagaccggcggcccaagcagcggcgcccctcctcccagcggcggcaggcggcccaagcagcggcgcccctcctcccagcggcggcagcccagccggctccccaacctctaccgaggagggcacctctgagtccgccacccccgagagcggccctggcacctccaccgagcccagcgagggcagcgcacccggcagccctgccggcagccccacctccacagaggagggaaccagcaccgagcccagcgaaggcagcgccccaggcaccagcaccgagcctagtgagcaggagattaaacggatcaacaagatcagaagaagacttgtgaaagacagcaacaccaagaaggccggcaagacaggccccatgaaaaccctgctggttagagtgatgacacccgatctgagagagcggctggaaaacctgagaaagaagcctgaaaatatcccccagcccatcagcaatacatctagagccaacctgaataagctgctgaccgattacaccgaaatgaagaaggcgatcctgcatgtgtactgggaagagttccagaaggaccctgtgggcctgatgagccgggtggcccagcctgccagcaagaagatcgatcagaacaagctgaaacctgagatggacgagaagggcaacctgaccaccgccggctttgcctgctctcagtgtggccagcccctgttcgtgtacaagctggagcaggtgtctgagaagggcaaggcttacaccaactacttcggacggtgcaatgtggccgagcacgaaaagctgatcctgctggcccagctgaagcccgagaaggatagcgacgaagccgtgacatatagcctgggaaagtttgggcagagggccctggatttctacagcattcatgtgaccaaggagtccacccaccccgtgaagcccctggcccagatcgccggaaacagatacgcctccggacctgtgggaaaggccctgagcgacgcatgtatgggcacaatcgcctccttcctgtctaagtaccaggacatcatcatcgaacaccagaaggtggtgaagggcaaccagaagagactggagagcctgcgggagctggccggcaaggaaaacctggaataccctagcgtgaccctgccacctcagcctcacaccaaggagggcgttgatgcctacaacgaagtgatcgcccgggtgcgaatgtgggtgaacctgaacctgtggcagaagctgaagctaagcagagatgatgccaagcctctgctgagactgaagggattcccttcctttcctctggtcgagagacaggccaacgaagtggactggtgggacatggtgtgtaacgtgaagaagctgatcaacgagaaaaaggaggatggcaaggtgttttggcagaatctggctggctacaagagacaggaagccctgagaccatacctgagcagcgaggaagatcggaagaagggaaagaaattcgctcggtaccagctgggcgacctgctgctgcacctggaaaagaagcacggcgaggactggggaaaggtgtacgacgaggcctgggagcggattgacaagaaagtggaaggcctgagcaagcacatcaagctggaagaggaacggagaagcgaggacgcccagagcaaggccgccctgaccgactggctgcgggctaaggccagcttcgtgatcgagggcctgaaggaggccgacaaggacgagttctgcagatgcgagctgaagctgcagaagtggtacggggacctgcggggaaagcccttcgccatcgaagccgagaacagcatcctggacatcagcggcttcagcaagcagtacaactgtgccttcatctggcagaaggacggcgtgaagaagctgaacctgtacctgatcatcaactacttcaagggcggcaagctgcggttcaagaagatcaaacctgaagccttcgaagccaacagattctacaccgtgatcaacaaaaagagcggcgagatcgtgcccatggaggtgaacttcaacttcgacgaccccaacctgatcatcctgcctctggcctttggcaagagacagggcagagaattcatctggaacgacctgctgtccctggaaaccggcagcctgaagctggccaacggaagagtgatcgagaagacactgtacaacagaagaacccggcaggatgagcctgccctgttcgtggccctgaccttcgagcggcgggaggtcctggactcctccaatatcaaaccaatgaacctgatcggcgtggcaagaggcgaaaacatccccgccgtgatcgccctgaccgaccccgagggctgcccactgagccggtttaaggatagcctgggaaacccaacccacatcctgagaatcggcgagagctataaggagaagcagcggaccatccaggccaagaaggaggtggagcagcggagagccggcggctacagccggaagtacgccagcaaagccaagaatctggcagacgatatggtgagaaacaccgctagagatctgctgtactacgccgtgacccaggatgccatgctgatcttcgccaacctgagccggggcttcggccggcagggcaagcggaccttcatggccgagagacagtacacacggatggaggactggctgaccgccaagctggcctacgagggcctgagcaagacctacctgtccaagacactggcccagtacacctccaagacatgcagcaactgtgggtttaccatcaccagcgccgactacgacagggtgctggagaagctgaagaagacagcaacaggctggatgaccacaattaacggcaaggagctgaaggtggagggccagattacctactacaacagatacaagagacagaacgtagtcaaggacctgtccgtcgagctggatagactgagcgaagaatctgtgaacaacgacatctcctcctggacaaagggcagaagcggagaagctctgagcctcctgaagaaaagattctcccatagacccgtgcaggagaagttcgtgtgcctgaactgcggcttcgagacacacgcagccgagcaagccgccctgaacatcgccagatcctggctgttcctgcggagccaggagtacaagaaataccagacaaacaagacaaccggcaacaccgataagagagccttcgtcgagacctggcagtccttttaccggaagaagcttaaggaggtgtggaaacctgccgtgcggtctggcggatctggcggaggctccaccagccccaagaaaaagagaaaagtctaagctgccttctgcggggcttgccttctggccatgcccttcttctctcccttgcacctgtacctcttggtctttgaataaagcctgagtaggaaggctagcaaaaaaaaaaaaaaaaaaaaaaaaaaaaaaaaaaaaaaaaaaaaaaaaaaaaaaaaaaaaaaaaaaaaaaaaaaaaaaaagcccagccggctccccaacctctaccgaggagggcacctctgagtccgccacccccgagagcggccctggcacctccaccgagcccagcgagggcagcgcacccggcagccctgccggcagccccacctccacagaggagggaaccagcaccgagcccagcgaaggcagcgccccaggcaccagcaccgagcctagtgagcaggagattaaacggatcaacaagatcagaagaagacttgtgaaagacagcaacaccaagaaggccggcaagacaggccccatgaaaaccctgctggttagagtgatgacacccgatctgagagagcggctggaaaacctgagaaagaagcctgaaaatatcccccagcccatcagcaatacatctagagccaacctgaataagctgctgaccgattacaccgaaatgaagaaggcgatcctgcatgtgtactgggaagagttccagaaggaccctgtgggcctgatgagccgggtggcccagcctgccagcaagaagatcgatcagaacaagctgaaacctgagatggacgagaagggcaacctgaccaccgccggctttgcctgctctcagtgtggccagcccctgttcgtgtacaagctggagcaggtgtctgagaagggcaaggcttacaccaactacttcggacggtgcaatgtggccgagcacgaaaagctgatcctgctggcccagctgaagcccgagaaggatagcgacgaagccgtgacatatagcctgggaaagtttgggcagagggccctggatttctacagcattcatgtgaccaaggagtccacccaccccgtgaagcccctggcccagatcgccggaaacagatacgcctccggacctgtgggaaaggccctgagcgacgcatgtatgggcacaatcgcctccttcctgtctaagtaccaggacatcatcatcgaacaccagaaggtggtgaagggcaaccagaagagactggagagcctgcgggagctggccggcaaggaaaacctggaataccctagcgtgaccctgccacctcagcctcacaccaaggagggcgttgatgcctacaacgaagtgatcgcccgggtgcgaatgtgggtgaacctgaacctgtggcagaagctgaagctaagcagagatgatgccaagcctctgctgagactgaagggattcccttcctttcctctggtcgagagacaggccaacgaagtggactggtgggacatggtgtgtaacgtgaagaagctgatcaacgagaaaaaggaggatggcaaggtgttttggcagaatctggctggctacaagagacaggaagccctgagaccatacctgagcagcgaggaagatcggaagaagggaaagaaattcgctcggtaccagctgggcgacctgctgctgcacctggaaaagaagcacggcgaggactggggaaaggtgtacgacgaggcctgggagcggattgacaagaaagtggaaggcctgagcaagcacatcaagctggaagaggaacggagaagcgaggacgcccagagcaaggccgccctgaccgactggctgcgggctaaggccagcttcgtgatcgagggcctgaaggaggccgacaaggacgagttctgcagatgcgagctgaagctgcagaagtggtacggggacctgcggggaaagcccttcgccatcgaagccgagaacagcatcctggacatcagcggcttcagcaagcagtacaactgtgccttcatctggcagaaggacggcgtgaagaagctgaacctgtacctgatcatcaactacttcaagggcggcaagctgcggttcaagaagatcaaacctgaagccttcgaagccaacagattctacaccgtgatcaacaaaaagagcggcgagatcgtgcccatggaggtgaacttcaacttcgacgaccccaacctgatcatcctgcctctggcctttggcaagagacagggcagagaattcatctggaacgacctgctgtccctggaaaccggcagcctgaagctggccaacggaagagtgatcgagaagacactgtacaacagaagaacccggcaggatgagcctgccctgttcgtggccctgaccttcgagcggcgggaggtcctggactcctccaatatcaaaccaatgaacctgatcggcgtggcaagaggcgaaaacatccccgccgtgatcgccctgaccgaccccgagggctgcccactgagccggtttaaggatagcctgggaaacccaacccacatcctgagaatcggcgagagctataaggagaagcagcggaccatccaggccaagaaggaggtggagcagcggagagccggcggctacagccggaagtacgccagcaaagccaagaatctggcagacgatatggtgagaaacaccgctagagatctgctgtactacgccgtgacccaggatgccatgctgatcttcgccaacctgagccggggcttcggccggcagggcaagcggaccttcatggccgagagacagtacacacggatggaggactggctgaccgccaagctggcctacgagggcctgagcaagacctacctgtccaagacactggcccagtacacctccaagacatgcagcaactgtgggtttaccatcaccagcgccgactacgacagggtgctggagaagctgaagaagacagcaacaggctggatgaccacaattaacggcaaggagctgaaggtggagggccagattacctactacaacagatacaagagacagaacgtagtcaaggacctgtccgtcgagctggatagactgagcgaagaatctgtgaacaacgacatctcctcctggacaaagggcagaagcggagaagctctgagcctcctgaagaaaagattctcccatagacccgtgcaggagaagttcgtgtgcctgaactgcggcttcgagacacacgcagccgagcaagccgccctgaacatcgccagatcctggctgttcctgcggagccaggagtacaagaaataccagacaaacaagacaaccggcaacaccgataagagagccttcgtcgagacctggcagtccttttaccggaagaagcttaaggaggtgtggaaacctgccgtgcggtctggcggatctggcggaggctccaccagccccaagaaaaagagaaaagtctaagctgccttctgcggggcttgccttctggccatgcccttcttctctcccttgcacctgtacctcttggtctttgaataaagcctgagtaggaaggctagcaaaaaaaaaaaaaaaaaaaaaaaaaaaaaaaaaaaaaaaaaaaaaaaaaaaaaaaaaaaaaaaaaaaaaaaaaaaaaaaa

SEQ ID NO: 10059 - RNA, 8787 nt, synthetic construct
  source 1..8787: mol_type = other RNA
aggaaataagagagaaaagaagagtaagaagaaatataagagccaccatggcccctaagaagaagcgtaaagtgagccggatgaaccacgaccaggagttcgacccccctaaggtgtaccctcccgtccccgccgagaagagaaagcccatccgggtcctgagcctgttcgatggcatcgccaccggtctgctggtgctgaaggacctgggcatccaggtggataggtacattgcctccgaggtgtgcgaggactccatcaccgtgggaatggtgcgtcatcagggcaagatcatgtacgtgggcgacgtgcggagcgtgacacagaagcatatccaggagtggggccctttcgacctggtgatcggcggcagcccttgcaatgacctgagcatcgtgaacccagcccggaagggcctgtacgagggaaccggcagactgttcttcgagttttacagactgctgcacgacgcccggcctaaggaaggcgacgaccggcccttcttttggctgttcgagaatgtggtggccatgggagtcagcgacaagcgggatattagccggttcctggagagcaaccccgtgatgatcgatgccaaggaagtgagcgccgcccaccgggccagatacttctggggcaatctgcctggcatgaacagacccctggccagcaccgtgaacgacaagctggagctgcaggagtgcctggagcacggccggatcgccaagttcagcaaggtgagaaccatcaccacccgaagcaacagcatcaaacaaggcaaggaccagcactttcctgtgttcatgaacgagaaggaggacatcctgtggtgtaccgagatggagagagtgttcgggttcccagtccactacacagatgtcagcaacatgtctagactggccagacagagactgctgggaagaagctggtccgtccctgtgatcagacacctgttcgcccctctgaaggagtacttcgcctgcgtgagcagcggcaacagcaacgccaacagccggggccccagcttctctagcggcctggtgccactgtccctgagagggagccacatgggccccatggagatctacaaaaccgtgagcgcctggaagcggcagcctgtgcgcgtgctgagcctgtttcggaatatcgataaagtcctgaaaagcctgggattcctggagagcggctctggctccggcggtggcaccctgaagtacgtggaggatgtgacaaacgtggtcagacgggatgtggagaagtggggccccttcgatctggtgtacggcagcacccaacccctgggcagctcttgtgaccggtgccctggctggtacatgtttcagttccaccggatcctgcagtacgccctgccgagacaggagtcccagcggccattcttttggattttcatggacaacttgctgctgaccgaggatgaccaggaaactaccactcggttcctgcagaccgaagccgtgaccctgcaggacgtgagaggccgggactaccagaacgccatgcgggtgtggtccaacatccctggactgaaaagcaagcacgcacctctgacccctaaagaagaggagtacctgcaggcccaggtgcggagcagaagcaagctggacgcccctaaggtggatctgctggtgaagaattgcctcctgcccctgagagagtacttcaagtatttcagccagaatagtctgcccctgggaggcagcggcggcggcctgcagggccagctgaccttcagggacgtggccatcgagttcagcgaggaggagtggaggtgcctgacccacacccagaggcagctgtacagggacatgatgctggagaactacaggcacctgctgttcctgggcctgatcgtgagcaagcccgacctggtgagcttcctggagcagaagaaggacccctgggacgtgaagaggaagaagaccgtggtgttcgaccccggcaggtgggagtggggcggcccaagcagcggcgcccctcctcccagcggcggcaggcggcccaagcagcggcgcccctcctcccagcggcggcagcccagccggctccccaacctctaccgaggagggcacctctgagtccgccacccccgagagcggccctggcacctccaccgagcccagcgagggcagcgcacccggcagccctgccggcagccccacctccacagaggagggaaccagcaccgagcccagcgaaggcagcgccccaggcaccagcaccgagcctagtgagcaggagattaaacggatcaacaagatcagaagaagacttgtgaaagacagcaacaccaagaaggccggcaagacaggccccatgaaaaccctgctggttagagtgatgacacccgatctgagagagcggctggaaaacctgagaaagaagcctgaaaatatcccccagcccatcagcaatacatctagagccaacctgaataagctgctgaccgattacaccgaaatgaagaaggcgatcctgcatgtgtactgggaagagttccagaaggaccctgtgggcctgatgagccgggtggcccagcctgccagcaagaagatcgatcagaacaagctgaaacctgagatggacgagaagggcaacctgaccaccgccggctttgcctgctctcagtgtggccagcccctgttcgtgtacaagctggagcaggtgtctgagaagggcaaggcttacaccaactacttcggacggtgcaatgtggccgagcacgaaaagctgatcctgctggcccagctgaagcccgagaaggatagcgacgaagccgtgacatatagcctgggaaagtttgggcagagggccctggatttctacagcattcatgtgaccaaggagtccacccaccccgtgaagcccctggcccagatcgccggaaacagatacgcctccggacctgtgggaaaggccctgagcgacgcatgtatgggcacaatcgcctccttcctgtctaagtaccaggacatcatcatcgaacaccagaaggtggtgaagggcaaccagaagagactggagagcctgcgggagctggccggcaaggaaaacctggaataccctagcgtgaccctgccacctcagcctcacaccaaggagggcgttgatgcctacaacgaagtgatcgcccgggtgcgaatgtgggtgaacctgaacctgtggcagaagctgaagctaagcagagatgatgccaagcctctgctgagactgaagggattcccttcctttcctctggtcgagagacaggccaacgaagtggactggtgggacatggtgtgtaacgtgaagaagctgatcaacgagaaaaaggaggatggcaaggtgttttggcagaatctggctggctacaagagacaggaagccctgagaccatacctgagcagcgaggaagatcggaagaagggaaagaaattcgctcggtaccagctgggcgacctgctgctgcacctggaaaagaagcacggcgaggactggggaaaggtgtacgacgaggcctgggagcggattgacaagaaagtggaaggcctgagcaagcacatcaagctggaagaggaacggagaagcgaggacgcccagagcaaggccgccctgaccgactggctgcgggctaaggccagcttcgtgatcgagggcctgaaggaggccgacaaggacgagttctgcagatgcgagctgaagctgcagaagtggtacggggacctgcggggaaagcccttcgccatcgaagccgagaacagcatcctggacatcagcggcttcagcaagcagtacaactgtgccttcatctggcagaaggacggcgtgaagaagctgaacctgtacctgatcatcaactacttcaagggcggcaagctgcggttcaagaagatcaaacctgaagccttcgaagccaacagattctacaccgtgatcaacaaaaagagcggcgagatcgtgcccatggaggtgaacttcaacttcgacgaccccaacctgatcatcctgcctctggcctttggcaagagacagggcagagaattcatctggaacgacctgctgtccctggaaaccggcagcctgaagctggccaacggaagagtgatcgagaagacactgtacaacagaagaacccggcaggatgagcctgccctgttcgtggccctgaccttcgagcggcgggaggtcctggactcctccaatatcaaaccaatgaacctgatcggcgtggcaagaggcgaaaacatccccgccgtgatcgccctgaccgaccccgagggctgcccactgagccggtttaaggatagcctgggaaacccaacccacatcctgagaatcggcgagagctataaggagaagcagcggaccatccaggccaagaaggaggtggagcagcggagagccggcggctacagccggaagtacgccagcaaagccaagaatctggcagacgatatggtgagaaacaccgctagagatctgctgtactacgccgtgacccaggatgccatgctgatcttcgccaacctgagccggggcttcggccggcagggcaagcggaccttcatggccgagagacagtacacacggatggaggactggctgaccgccaagctggcctacgagggcctgagcaagacctacctgtccaagacactggcccagtacacctccaagacatgcagcaactgtgggtttaccatcaccagcgccgactacgacagggtgctggagaagctgaagaagacagcaacaggctggatgaccacaattaacggcaaggagctgaaggtggagggccagattacctactacaacagatacaagagacagaacgtagtcaaggacctgtccgtcgagctggatagactgagcgaagaatctgtgaacaacgacatctcctcctggacaaagggcagaagcggagaagctctgagcctcctgaagaaaagattctcccatagacccgtgcaggagaagttcgtgtgcctgaactgcggcttcgagacacacgcagccgagcaagccgccctgaacatcgccagatcctggctgttcctgcggagccaggagtacaagaaataccagacaaacaagacaaccggcaacaccgataagagagccttcgtcgagacctggcagtccttttaccggaagaagcttaaggaggtgtggaaacctgccgtgcggtctggcggatctggcggaggctccaccagccccaagaaaaagagaaaagtctaagctgccttctgcggggcttgccttctggccatgcccttcttctctcccttgcacctgtacctcttggtctttgaataaagcctgagtaggaaggctagcaaaaaaaaaaaaaaaaaaaaaaaaaaaaaaaaaaaaaaaaaaaaaaaaaaaaaaaaaaaaaaaaaaaaaaaaaaaaaaaagcccagccggctccccaacctctaccgaggagggcacctctgagtccgccacccccgagagcggccctggcacctccaccgagcccagcgagggcagcgcacccggcagccctgccggcagccccacctccacagaggagggaaccagcaccgagcccagcgaaggcagcgccccaggcaccagcaccgagcctagtgagcaggagattaaacggatcaacaagatcagaagaagacttgtgaaagacagcaacaccaagaaggccggcaagacaggccccatgaaaaccctgctggttagagtgatgacacccgatctgagagagcggctggaaaacctgagaaagaagcctgaaaatatcccccagcccatcagcaatacatctagagccaacctgaataagctgctgaccgattacaccgaaatgaagaaggcgatcctgcatgtgtactgggaagagttccagaaggaccctgtgggcctgatgagccgggtggcccagcctgccagcaagaagatcgatcagaacaagctgaaacctgagatggacgagaagggcaacctgaccaccgccggctttgcctgctctcagtgtggccagcccctgttcgtgtacaagctggagcaggtgtctgagaagggcaaggcttacaccaactacttcggacggtgcaatgtggccgagcacgaaaagctgatcctgctggcccagctgaagcccgagaaggatagcgacgaagccgtgacatatagcctgggaaagtttgggcagagggccctggatttctacagcattcatgtgaccaaggagtccacccaccccgtgaagcccctggcccagatcgccggaaacagatacgcctccggacctgtgggaaaggccctgagcgacgcatgtatgggcacaatcgcctccttcctgtctaagtaccaggacatcatcatcgaacaccagaaggtggtgaagggcaaccagaagagactggagagcctgcgggagctggccggcaaggaaaacctggaataccctagcgtgaccctgccacctcagcctcacaccaaggagggcgttgatgcctacaacgaagtgatcgcccgggtgcgaatgtgggtgaacctgaacctgtggcagaagctgaagctaagcagagatgatgccaagcctctgctgagactgaagggattcccttcctttcctctggtcgagagacaggccaacgaagtggactggtgggacatggtgtgtaacgtgaagaagctgatcaacgagaaaaaggaggatggcaaggtgttttggcagaatctggctggctacaagagacaggaagccctgagaccatacctgagcagcgaggaagatcggaagaagggaaagaaattcgctcggtaccagctgggcgacctgctgctgcacctggaaaagaagcacggcgaggactggggaaaggtgtacgacgaggcctgggagcggattgacaagaaagtggaaggcctgagcaagcacatcaagctggaagaggaacggagaagcgaggacgcccagagcaaggccgccctgaccgactggctgcgggctaaggccagcttcgtgatcgagggcctgaaggaggccgacaaggacgagttctgcagatgcgagctgaagctgcagaagtggtacggggacctgcggggaaagcccttcgccatcgaagccgagaacagcatcctggacatcagcggcttcagcaagcagtacaactgtgccttcatctggcagaaggacggcgtgaagaagctgaacctgtacctgatcatcaactacttcaagggcggcaagctgcggttcaagaagatcaaacctgaagccttcgaagccaacagattctacaccgtgatcaacaaaaagagcggcgagatcgtgcccatggaggtgaacttcaacttcgacgaccccaacctgatcatcctgcctctggcctttggcaagagacagggcagagaattcatctggaacgacctgctgtccctggaaaccggcagcctgaagctggccaacggaagagtgatcgagaagacactgtacaacagaagaacccggcaggatgagcctgccctgttcgtggccctgaccttcgagcggcgggaggtcctggactcctccaatatcaaaccaatgaacctgatcggcgtggcaagaggcgaaaacatccccgccgtgatcgccctgaccgaccccgagggctgcccactgagccggtttaaggatagcctgggaaacccaacccacatcctgagaatcggcgagagctataaggagaagcagcggaccatccaggccaagaaggaggtggagcagcggagagccggcggctacagccggaagtacgccagcaaagccaagaatctggcagacgatatggtgagaaacaccgctagagatctgctgtactacgccgtgacccaggatgccatgctgatcttcgccaacctgagccggggcttcggccggcagggcaagcggaccttcatggccgagagacagtacacacggatggaggactggctgaccgccaagctggcctacgagggcctgagcaagacctacctgtccaagacactggcccagtacacctccaagacatgcagcaactgtgggtttaccatcaccagcgccgactacgacagggtgctggagaagctgaagaagacagcaacaggctggatgaccacaattaacggcaaggagctgaaggtggagggccagattacctactacaacagatacaagagacagaacgtagtcaaggacctgtccgtcgagctggatagactgagcgaagaatctgtgaacaacgacatctcctcctggacaaagggcagaagcggagaagctctgagcctcctgaagaaaagattctcccatagacccgtgcaggagaagttcgtgtgcctgaactgcggcttcgagacacacgcagccgagcaagccgccctgaacatcgccagatcctggctgttcctgcggagccaggagtacaagaaataccagacaaacaagacaaccggcaacaccgataagagagccttcgtcgagacctggcagtccttttaccggaagaagcttaaggaggtgtggaaacctgccgtgcggtctggcggatctggcggaggctccaccagccccaagaaaaagagaaaagtctaagctgccttctgcggggcttgccttctggccatgcccttcttctctcccttgcacctgtacctcttggtctttgaataaagcctgagtaggaaggctagcaaaaaaaaaaaaaaaaaaaaaaaaaaaaaaaaaaaaaaaaaaaaaaaaaaaaaaaaaaaaaaaaaaaaaaaaaaaaaaaa

SEQ ID NO: 10060 - RNA, 8787 nt, synthetic construct
  source 1..8787: mol_type = other RNA
aggaaataagagagaaaagaagagtaagaagaaatataagagccaccatggcccctaagaagaagcgtaaagtgagccggatgaaccacgaccaggagttcgacccccctaaggtgtaccctcccgtccccgccgagaagagaaagcccatccgggtcctgagcctgttcgatggcatcgccaccggtctgctggtgctgaaggacctgggcatccaggtggataggtacattgcctccgaggtgtgcgaggactccatcaccgtgggaatggtgcgtcatcagggcaagatcatgtacgtgggcgacgtgcggagcgtgacacagaagcatatccaggagtggggccctttcgacctggtgatcggcggcagcccttgcaatgacctgagcatcgtgaacccagcccggaagggcctgtacgagggaaccggcagactgttcttcgagttttacagactgctgcacgacgcccggcctaaggaaggcgacgaccggcccttcttttggctgttcgagaatgtggtggccatgggagtcagcgacaagcgggatattagccggttcctggagagcaaccccgtgatgatcgatgccaaggaagtgagcgccgcccaccgggccagatacttctggggcaatctgcctggcatgaacagacccctggccagcaccgtgaacgacaagctggagctgcaggagtgcctggagcacggccggatcgccaagttcagcaaggtgagaaccatcaccacccgaagcaacagcatcaaacaaggcaaggaccagcactttcctgtgttcatgaacgagaaggaggacatcctgtggtgtaccgagatggagagagtgttcgggttcccagtccactacacagatgtcagcaacatgtctagactggccagacagagactgctgggaagaagctggtccgtccctgtgatcagacacctgttcgcccctctgaaggagtacttcgcctgcgtgagcagcggcaacagcaacgccaacagccggggccccagcttctctagcggcctggtgccactgtccctgagagggagccacatgggccccatggagatctacaaaaccgtgagcgcctggaagcggcagcctgtgcgcgtgctgagcctgtttcggaatatcgataaagtcctgaaaagcctgggattcctggagagcggctctggctccggcggtggcaccctgaagtacgtggaggatgtgacaaacgtggtcagacgggatgtggagaagtggggccccttcgatctggtgtacggcagcacccaacccctgggcagctcttgtgaccggtgccctggctggtacatgtttcagttccaccggatcctgcagtacgccctgccgagacaggagtcccagcggccattcttttggattttcatggacaacttgctgctgaccgaggatgaccaggaaactaccactcggttcctgcagaccgaagccgtgaccctgcaggacgtgagaggccgggactaccagaacgccatgcgggtgtggtccaacatccctggactgaaaagcaagcacgcacctctgacccctaaagaagaggagtacctgcaggcccaggtgcggagcagaagcaagctggacgcccctaaggtggatctgctggtgaagaattgcctcctgcccctgagagagtacttcaagtatttcagccagaatagtctgcccctgggaggcagcggcggcggcagccaggagcccgtgaccttcgccgacgtggccgtggtgttcacccccgaggagtgggtgttcctggacagcacccagaggagcctgtacagggacgtgatgctggagaactacaggaacctggccagcgtggccgaccagctgtgcaagcccaacgccagcagctacctggagcagaggggcgagcagtggaccaccgacaggggcatcctggccgacacctgcgccgagccccagctgcagggcggcccaagcagcggcgcccctcctcccagcggcggcaggcggcccaagcagcggcgcccctcctcccagcggcggcagcccagccggctccccaacctctaccgaggagggcacctctgagtccgccacccccgagagcggccctggcacctccaccgagcccagcgagggcagcgcacccggcagccctgccggcagccccacctccacagaggagggaaccagcaccgagcccagcgaaggcagcgccccaggcaccagcaccgagcctagtgagcaggagattaaacggatcaacaagatcagaagaagacttgtgaaagacagcaacaccaagaaggccggcaagacaggccccatgaaaaccctgctggttagagtgatgacacccgatctgagagagcggctggaaaacctgagaaagaagcctgaaaatatcccccagcccatcagcaatacatctagagccaacctgaataagctgctgaccgattacaccgaaatgaagaaggcgatcctgcatgtgtactgggaagagttccagaaggaccctgtgggcctgatgagccgggtggcccagcctgccagcaagaagatcgatcagaacaagctgaaacctgagatggacgagaagggcaacctgaccaccgccggctttgcctgctctcagtgtggccagcccctgttcgtgtacaagctggagcaggtgtctgagaagggcaaggcttacaccaactacttcggacggtgcaatgtggccgagcacgaaaagctgatcctgctggcccagctgaagcccgagaaggatagcgacgaagccgtgacatatagcctgggaaagtttgggcagagggccctggatttctacagcattcatgtgaccaaggagtccacccaccccgtgaagcccctggcccagatcgccggaaacagatacgcctccggacctgtgggaaaggccctgagcgacgcatgtatgggcacaatcgcctccttcctgtctaagtaccaggacatcatcatcgaacaccagaaggtggtgaagggcaaccagaagagactggagagcctgcgggagctggccggcaaggaaaacctggaataccctagcgtgaccctgccacctcagcctcacaccaaggagggcgttgatgcctacaacgaagtgatcgcccgggtgcgaatgtgggtgaacctgaacctgtggcagaagctgaagctaagcagagatgatgccaagcctctgctgagactgaagggattcccttcctttcctctggtcgagagacaggccaacgaagtggactggtgggacatggtgtgtaacgtgaagaagctgatcaacgagaaaaaggaggatggcaaggtgttttggcagaatctggctggctacaagagacaggaagccctgagaccatacctgagcagcgaggaagatcggaagaagggaaagaaattcgctcggtaccagctgggcgacctgctgctgcacctggaaaagaagcacggcgaggactggggaaaggtgtacgacgaggcctgggagcggattgacaagaaagtggaaggcctgagcaagcacatcaagctggaagaggaacggagaagcgaggacgcccagagcaaggccgccctgaccgactggctgcgggctaaggccagcttcgtgatcgagggcctgaaggaggccgacaaggacgagttctgcagatgcgagctgaagctgcagaagtggtacggggacctgcggggaaagcccttcgccatcgaagccgagaacagcatcctggacatcagcggcttcagcaagcagtacaactgtgccttcatctggcagaaggacggcgtgaagaagctgaacctgtacctgatcatcaactacttcaagggcggcaagctgcggttcaagaagatcaaacctgaagccttcgaagccaacagattctacaccgtgatcaacaaaaagagcggcgagatcgtgcccatggaggtgaacttcaacttcgacgaccccaacctgatcatcctgcctctggcctttggcaagagacagggcagagaattcatctggaacgacctgctgtccctggaaaccggcagcctgaagctggccaacggaagagtgatcgagaagacactgtacaacagaagaacccggcaggatgagcctgccctgttcgtggccctgaccttcgagcggcgggaggtcctggactcctccaatatcaaaccaatgaacctgatcggcgtggcaagaggcgaaaacatccccgccgtgatcgccctgaccgaccccgagggctgcccactgagccggtttaaggatagcctgggaaacccaacccacatcctgagaatcggcgagagctataaggagaagcagcggaccatccaggccaagaaggaggtggagcagcggagagccggcggctacagccggaagtacgccagcaaagccaagaatctggcagacgatatggtgagaaacaccgctagagatctgctgtactacgccgtgacccaggatgccatgctgatcttcgccaacctgagccggggcttcggccggcagggcaagcggaccttcatggccgagagacagtacacacggatggaggactggctgaccgccaagctggcctacgagggcctgagcaagacctacctgtccaagacactggcccagtacacctccaagacatgcagcaactgtgggtttaccatcaccagcgccgactacgacagggtgctggagaagctgaagaagacagcaacaggctggatgaccacaattaacggcaaggagctgaaggtggagggccagattacctactacaacagatacaagagacagaacgtagtcaaggacctgtccgtcgagctggatagactgagcgaagaatctgtgaacaacgacatctcctcctggacaaagggcagaagcggagaagctctgagcctcctgaagaaaagattctcccatagacccgtgcaggagaagttcgtgtgcctgaactgcggcttcgagacacacgcagccgagcaagccgccctgaacatcgccagatcctggctgttcctgcggagccaggagtacaagaaataccagacaaacaagacaaccggcaacaccgataagagagccttcgtcgagacctggcagtccttttaccggaagaagcttaaggaggtgtggaaacctgccgtgcggtctggcggatctggcggaggctccaccagccccaagaaaaagagaaaagtctaagctgccttctgcggggcttgccttctggccatgcccttcttctctcccttgcacctgtacctcttggtctttgaataaagcctgagtaggaaggctagcaaaaaaaaaaaaaaaaaaaaaaaaaaaaaaaaaaaaaaaaaaaaaaaaaaaaaaaaaaaaaaaaaaaaaaaaaaaaaaaagcccagccggctccccaacctctaccgaggagggcacctctgagtccgccacccccgagagcggccctggcacctccaccgagcccagcgagggcagcgcacccggcagccctgccggcagccccacctccacagaggagggaaccagcaccgagcccagcgaaggcagcgccccaggcaccagcaccgagcctagtgagcaggagattaaacggatcaacaagatcagaagaagacttgtgaaagacagcaacaccaagaaggccggcaagacaggccccatgaaaaccctgctggttagagtgatgacacccgatctgagagagcggctggaaaacctgagaaagaagcctgaaaatatcccccagcccatcagcaatacatctagagccaacctgaataagctgctgaccgattacaccgaaatgaagaaggcgatcctgcatgtgtactgggaagagttccagaaggaccctgtgggcctgatgagccgggtggcccagcctgccagcaagaagatcgatcagaacaagctgaaacctgagatggacgagaagggcaacctgaccaccgccggctttgcctgctctcagtgtggccagcccctgttcgtgtacaagctggagcaggtgtctgagaagggcaaggcttacaccaactacttcggacggtgcaatgtggccgagcacgaaaagctgatcctgctggcccagctgaagcccgagaaggatagcgacgaagccgtgacatatagcctgggaaagtttgggcagagggccctggatttctacagcattcatgtgaccaaggagtccacccaccccgtgaagcccctggcccagatcgccggaaacagatacgcctccggacctgtgggaaaggccctgagcgacgcatgtatgggcacaatcgcctccttcctgtctaagtaccaggacatcatcatcgaacaccagaaggtggtgaagggcaaccagaagagactggagagcctgcgggagctggccggcaaggaaaacctggaataccctagcgtgaccctgccacctcagcctcacaccaaggagggcgttgatgcctacaacgaagtgatcgcccgggtgcgaatgtgggtgaacctgaacctgtggcagaagctgaagctaagcagagatgatgccaagcctctgctgagactgaagggattcccttcctttcctctggtcgagagacaggccaacgaagtggactggtgggacatggtgtgtaacgtgaagaagctgatcaacgagaaaaaggaggatggcaaggtgttttggcagaatctggctggctacaagagacaggaagccctgagaccatacctgagcagcgaggaagatcggaagaagggaaagaaattcgctcggtaccagctgggcgacctgctgctgcacctggaaaagaagcacggcgaggactggggaaaggtgtacgacgaggcctgggagcggattgacaagaaagtggaaggcctgagcaagcacatcaagctggaagaggaacggagaagcgaggacgcccagagcaaggccgccctgaccgactggctgcgggctaaggccagcttcgtgatcgagggcctgaaggaggccgacaaggacgagttctgcagatgcgagctgaagctgcagaagtggtacggggacctgcggggaaagcccttcgccatcgaagccgagaacagcatcctggacatcagcggcttcagcaagcagtacaactgtgccttcatctggcagaaggacggcgtgaagaagctgaacctgtacctgatcatcaactacttcaagggcggcaagctgcggttcaagaagatcaaacctgaagccttcgaagccaacagattctacaccgtgatcaacaaaaagagcggcgagatcgtgcccatggaggtgaacttcaacttcgacgaccccaacctgatcatcctgcctctggcctttggcaagagacagggcagagaattcatctggaacgacctgctgtccctggaaaccggcagcctgaagctggccaacggaagagtgatcgagaagacactgtacaacagaagaacccggcaggatgagcctgccctgttcgtggccctgaccttcgagcggcgggaggtcctggactcctccaatatcaaaccaatgaacctgatcggcgtggcaagaggcgaaaacatccccgccgtgatcgccctgaccgaccccgagggctgcccactgagccggtttaaggatagcctgggaaacccaacccacatcctgagaatcggcgagagctataaggagaagcagcggaccatccaggccaagaaggaggtggagcagcggagagccggcggctacagccggaagtacgccagcaaagccaagaatctggcagacgatatggtgagaaacaccgctagagatctgctgtactacgccgtgacccaggatgccatgctgatcttcgccaacctgagccggggcttcggccggcagggcaagcggaccttcatggccgagagacagtacacacggatggaggactggctgaccgccaagctggcctacgagggcctgagcaagacctacctgtccaagacactggcccagtacacctccaagacatgcagcaactgtgggtttaccatcaccagcgccgactacgacagggtgctggagaagctgaagaagacagcaacaggctggatgaccacaattaacggcaaggagctgaaggtggagggccagattacctactacaacagatacaagagacagaacgtagtcaaggacctgtccgtcgagctggatagactgagcgaagaatctgtgaacaacgacatctcctcctggacaaagggcagaagcggagaagctctgagcctcctgaagaaaagattctcccatagacccgtgcaggagaagttcgtgtgcctgaactgcggcttcgagacacacgcagccgagcaagccgccctgaacatcgccagatcctggctgttcctgcggagccaggagtacaagaaataccagacaaacaagacaaccggcaacaccgataagagagccttcgtcgagacctggcagtccttttaccggaagaagcttaaggaggtgtggaaacctgccgtgcggtctggcggatctggcggaggctccaccagccccaagaaaaagagaaaagtctaagctgccttctgcggggcttgccttctggccatgcccttcttctctcccttgcacctgtacctcttggtctttgaataaagcctgagtaggaaggctagcaaaaaaaaaaaaaaaaaaaaaaaaaaaaaaaaaaaaaaaaaaaaaaaaaaaaaaaaaaaaaaaaaaaaaaaaaaaaaaaa

SEQ ID NO: 10061 - RNA, 8787 nt, synthetic construct
  source 1..8787: mol_type = other RNA
aggaaataagagagaaaagaagagtaagaagaaatataagagccaccatggcccctaagaagaagcgtaaagtgagccggatgaaccacgaccaggagttcgacccccctaaggtgtaccctcccgtccccgccgagaagagaaagcccatccgggtcctgagcctgttcgatggcatcgccaccggtctgctggtgctgaaggacctgggcatccaggtggataggtacattgcctccgaggtgtgcgaggactccatcaccgtgggaatggtgcgtcatcagggcaagatcatgtacgtgggcgacgtgcggagcgtgacacagaagcatatccaggagtggggccctttcgacctggtgatcggcggcagcccttgcaatgacctgagcatcgtgaacccagcccggaagggcctgtacgagggaaccggcagactgttcttcgagttttacagactgctgcacgacgcccggcctaaggaaggcgacgaccggcccttcttttggctgttcgagaatgtggtggccatgggagtcagcgacaagcgggatattagccggttcctggagagcaaccccgtgatgatcgatgccaaggaagtgagcgccgcccaccgggccagatacttctggggcaatctgcctggcatgaacagacccctggccagcaccgtgaacgacaagctggagctgcaggagtgcctggagcacggccggatcgccaagttcagcaaggtgagaaccatcaccacccgaagcaacagcatcaaacaaggcaaggaccagcactttcctgtgttcatgaacgagaaggaggacatcctgtggtgtaccgagatggagagagtgttcgggttcccagtccactacacagatgtcagcaacatgtctagactggccagacagagactgctgggaagaagctggtccgtccctgtgatcagacacctgttcgcccctctgaaggagtacttcgcctgcgtgagcagcggcaacagcaacgccaacagccggggccccagcttctctagcggcctggtgccactgtccctgagagggagccacatgggccccatggagatctacaaaaccgtgagcgcctggaagcggcagcctgtgcgcgtgctgagcctgtttcggaatatcgataaagtcctgaaaagcctgggattcctggagagcggctctggctccggcggtggcaccctgaagtacgtggaggatgtgacaaacgtggtcagacgggatgtggagaagtggggccccttcgatctggtgtacggcagcacccaacccctgggcagctcttgtgaccggtgccctggctggtacatgtttcagttccaccggatcctgcagtacgccctgccgagacaggagtcccagcggccattcttttggattttcatggacaacttgctgctgaccgaggatgaccaggaaactaccactcggttcctgcagaccgaagccgtgaccctgcaggacgtgagaggccgggactaccagaacgccatgcgggtgtggtccaacatccctggactgaaaagcaagcacgcacctctgacccctaaagaagaggagtacctgcaggcccaggtgcggagcagaagcaagctggacgcccctaaggtggatctgctggtgaagaattgcctcctgcccctgagagagtacttcaagtatttcagccagaatagtctgcccctgggaggcagcggcggcggcgacgtggtgacctacgaggacgtgcacgtgaacttcacccaggaggagtgggccctgctggaccccagccagaagaggctgtacaaggtggtgatgctggagacctacaagaacctgagcgccatcggctacatctgggaggaccacaccatcgagcagcacttccagagcagcaggagccacggcaggcacaagaggcacaggaccggcgagcagcccagcgagctgatccagcacggcaagggcggcccaagcagcggcgcccctcctcccagcggcggcaggcggcccaagcagcggcgcccctcctcccagcggcggcagcccagccggctccccaacctctaccgaggagggcacctctgagtccgccacccccgagagcggccctggcacctccaccgagcccagcgagggcagcgcacccggcagccctgccggcagccccacctccacagaggagggaaccagcaccgagcccagcgaaggcagcgccccaggcaccagcaccgagcctagtgagcaggagattaaacggatcaacaagatcagaagaagacttgtgaaagacagcaacaccaagaaggccggcaagacaggccccatgaaaaccctgctggttagagtgatgacacccgatctgagagagcggctggaaaacctgagaaagaagcctgaaaatatcccccagcccatcagcaatacatctagagccaacctgaataagctgctgaccgattacaccgaaatgaagaaggcgatcctgcatgtgtactgggaagagttccagaaggaccctgtgggcctgatgagccgggtggcccagcctgccagcaagaagatcgatcagaacaagctgaaacctgagatggacgagaagggcaacctgaccaccgccggctttgcctgctctcagtgtggccagcccctgttcgtgtacaagctggagcaggtgtctgagaagggcaaggcttacaccaactacttcggacggtgcaatgtggccgagcacgaaaagctgatcctgctggcccagctgaagcccgagaaggatagcgacgaagccgtgacatatagcctgggaaagtttgggcagagggccctggatttctacagcattcatgtgaccaaggagtccacccaccccgtgaagcccctggcccagatcgccggaaacagatacgcctccggacctgtgggaaaggccctgagcgacgcatgtatgggcacaatcgcctccttcctgtctaagtaccaggacatcatcatcgaacaccagaaggtggtgaagggcaaccagaagagactggagagcctgcgggagctggccggcaaggaaaacctggaataccctagcgtgaccctgccacctcagcctcacaccaaggagggcgttgatgcctacaacgaagtgatcgcccgggtgcgaatgtgggtgaacctgaacctgtggcagaagctgaagctaagcagagatgatgccaagcctctgctgagactgaagggattcccttcctttcctctggtcgagagacaggccaacgaagtggactggtgggacatggtgtgtaacgtgaagaagctgatcaacgagaaaaaggaggatggcaaggtgttttggcagaatctggctggctacaagagacaggaagccctgagaccatacctgagcagcgaggaagatcggaagaagggaaagaaattcgctcggtaccagctgggcgacctgctgctgcacctggaaaagaagcacggcgaggactggggaaaggtgtacgacgaggcctgggagcggattgacaagaaagtggaaggcctgagcaagcacatcaagctggaagaggaacggagaagcgaggacgcccagagcaaggccgccctgaccgactggctgcgggctaaggccagcttcgtgatcgagggcctgaaggaggccgacaaggacgagttctgcagatgcgagctgaagctgcagaagtggtacggggacctgcggggaaagcccttcgccatcgaagccgagaacagcatcctggacatcagcggcttcagcaagcagtacaactgtgccttcatctggcagaaggacggcgtgaagaagctgaacctgtacctgatcatcaactacttcaagggcggcaagctgcggttcaagaagatcaaacctgaagccttcgaagccaacagattctacaccgtgatcaacaaaaagagcggcgagatcgtgcccatggaggtgaacttcaacttcgacgaccccaacctgatcatcctgcctctggcctttggcaagagacagggcagagaattcatctggaacgacctgctgtccctggaaaccggcagcctgaagctggccaacggaagagtgatcgagaagacactgtacaacagaagaacccggcaggatgagcctgccctgttcgtggccctgaccttcgagcggcgggaggtcctggactcctccaatatcaaaccaatgaacctgatcggcgtggcaagaggcgaaaacatccccgccgtgatcgccctgaccgaccccgagggctgcccactgagccggtttaaggatagcctgggaaacccaacccacatcctgagaatcggcgagagctataaggagaagcagcggaccatccaggccaagaaggaggtggagcagcggagagccggcggctacagccggaagtacgccagcaaagccaagaatctggcagacgatatggtgagaaacaccgctagagatctgctgtactacgccgtgacccaggatgccatgctgatcttcgccaacctgagccggggcttcggccggcagggcaagcggaccttcatggccgagagacagtacacacggatggaggactggctgaccgccaagctggcctacgagggcctgagcaagacctacctgtccaagacactggcccagtacacctccaagacatgcagcaactgtgggtttaccatcaccagcgccgactacgacagggtgctggagaagctgaagaagacagcaacaggctggatgaccacaattaacggcaaggagctgaaggtggagggccagattacctactacaacagatacaagagacagaacgtagtcaaggacctgtccgtcgagctggatagactgagcgaagaatctgtgaacaacgacatctcctcctggacaaagggcagaagcggagaagctctgagcctcctgaagaaaagattctcccatagacccgtgcaggagaagttcgtgtgcctgaactgcggcttcgagacacacgcagccgagcaagccgccctgaacatcgccagatcctggctgttcctgcggagccaggagtacaagaaataccagacaaacaagacaaccggcaacaccgataagagagccttcgtcgagacctggcagtccttttaccggaagaagcttaaggaggtgtggaaacctgccgtgcggtctggcggatctggcggaggctccaccagccccaagaaaaagagaaaagtctaagctgccttctgcggggcttgccttctggccatgcccttcttctctcccttgcacctgtacctcttggtctttgaataaagcctgagtaggaaggctagcaaaaaaaaaaaaaaaaaaaaaaaaaaaaaaaaaaaaaaaaaaaaaaaaaaaaaaaaaaaaaaaaaaaaaaaaaaaaaaaagcccagccggctccccaacctctaccgaggagggcacctctgagtccgccacccccgagagcggccctggcacctccaccgagcccagcgagggcagcgcacccggcagccctgccggcagccccacctccacagaggagggaaccagcaccgagcccagcgaaggcagcgccccaggcaccagcaccgagcctagtgagcaggagattaaacggatcaacaagatcagaagaagacttgtgaaagacagcaacaccaagaaggccggcaagacaggccccatgaaaaccctgctggttagagtgatgacacccgatctgagagagcggctggaaaacctgagaaagaagcctgaaaatatcccccagcccatcagcaatacatctagagccaacctgaataagctgctgaccgattacaccgaaatgaagaaggcgatcctgcatgtgtactgggaagagttccagaaggaccctgtgggcctgatgagccgggtggcccagcctgccagcaagaagatcgatcagaacaagctgaaacctgagatggacgagaagggcaacctgaccaccgccggctttgcctgctctcagtgtggccagcccctgttcgtgtacaagctggagcaggtgtctgagaagggcaaggcttacaccaactacttcggacggtgcaatgtggccgagcacgaaaagctgatcctgctggcccagctgaagcccgagaaggatagcgacgaagccgtgacatatagcctgggaaagtttgggcagagggccctggatttctacagcattcatgtgaccaaggagtccacccaccccgtgaagcccctggcccagatcgccggaaacagatacgcctccggacctgtgggaaaggccctgagcgacgcatgtatgggcacaatcgcctccttcctgtctaagtaccaggacatcatcatcgaacaccagaaggtggtgaagggcaaccagaagagactggagagcctgcgggagctggccggcaaggaaaacctggaataccctagcgtgaccctgccacctcagcctcacaccaaggagggcgttgatgcctacaacgaagtgatcgcccgggtgcgaatgtgggtgaacctgaacctgtggcagaagctgaagctaagcagagatgatgccaagcctctgctgagactgaagggattcccttcctttcctctggtcgagagacaggccaacgaagtggactggtgggacatggtgtgtaacgtgaagaagctgatcaacgagaaaaaggaggatggcaaggtgttttggcagaatctggctggctacaagagacaggaagccctgagaccatacctgagcagcgaggaagatcggaagaagggaaagaaattcgctcggtaccagctgggcgacctgctgctgcacctggaaaagaagcacggcgaggactggggaaaggtgtacgacgaggcctgggagcggattgacaagaaagtggaaggcctgagcaagcacatcaagctggaagaggaacggagaagcgaggacgcccagagcaaggccgccctgaccgactggctgcgggctaaggccagcttcgtgatcgagggcctgaaggaggccgacaaggacgagttctgcagatgcgagctgaagctgcagaagtggtacggggacctgcggggaaagcccttcgccatcgaagccgagaacagcatcctggacatcagcggcttcagcaagcagtacaactgtgccttcatctggcagaaggacggcgtgaagaagctgaacctgtacctgatcatcaactacttcaagggcggcaagctgcggttcaagaagatcaaacctgaagccttcgaagccaacagattctacaccgtgatcaacaaaaagagcggcgagatcgtgcccatggaggtgaacttcaacttcgacgaccccaacctgatcatcctgcctctggcctttggcaagagacagggcagagaattcatctggaacgacctgctgtccctggaaaccggcagcctgaagctggccaacggaagagtgatcgagaagacactgtacaacagaagaacccggcaggatgagcctgccctgttcgtggccctgaccttcgagcggcgggaggtcctggactcctccaatatcaaaccaatgaacctgatcggcgtggcaagaggcgaaaacatccccgccgtgatcgccctgaccgaccccgagggctgcccactgagccggtttaaggatagcctgggaaacccaacccacatcctgagaatcggcgagagctataaggagaagcagcggaccatccaggccaagaaggaggtggagcagcggagagccggcggctacagccggaagtacgccagcaaagccaagaatctggcagacgatatggtgagaaacaccgctagagatctgctgtactacgccgtgacccaggatgccatgctgatcttcgccaacctgagccggggcttcggccggcagggcaagcggaccttcatggccgagagacagtacacacggatggaggactggctgaccgccaagctggcctacgagggcctgagcaagacctacctgtccaagacactggcccagtacacctccaagacatgcagcaactgtgggtttaccatcaccagcgccgactacgacagggtgctggagaagctgaagaagacagcaacaggctggatgaccacaattaacggcaaggagctgaaggtggagggccagattacctactacaacagatacaagagacagaacgtagtcaaggacctgtccgtcgagctggatagactgagcgaagaatctgtgaacaacgacatctcctcctggacaaagggcagaagcggagaagctctgagcctcctgaagaaaagattctcccatagacccgtgcaggagaagttcgtgtgcctgaactgcggcttcgagacacacgcagccgagcaagccgccctgaacatcgccagatcctggctgttcctgcggagccaggagtacaagaaataccagacaaacaagacaaccggcaacaccgataagagagccttcgtcgagacctggcagtccttttaccggaagaagcttaaggaggtgtggaaacctgccgtgcggtctggcggatctggcggaggctccaccagccccaagaaaaagagaaaagtctaagctgccttctgcggggcttgccttctggccatgcccttcttctctcccttgcacctgtacctcttggtctttgaataaagcctgagtaggaaggctagcaaaaaaaaaaaaaaaaaaaaaaaaaaaaaaaaaaaaaaaaaaaaaaaaaaaaaaaaaaaaaaaaaaaaaaaaaaaaaaaa

SEQ ID NO: 10062 - RNA, 8787 nt, synthetic construct
  source 1..8787: mol_type = other RNA
aggaaataagagagaaaagaagagtaagaagaaatataagagccaccatggcccctaagaagaagcgtaaagtgagccggatgaaccacgaccaggagttcgacccccctaaggtgtaccctcccgtccccgccgagaagagaaagcccatccgggtcctgagcctgttcgatggcatcgccaccggtctgctggtgctgaaggacctgggcatccaggtggataggtacattgcctccgaggtgtgcgaggactccatcaccgtgggaatggtgcgtcatcagggcaagatcatgtacgtgggcgacgtgcggagcgtgacacagaagcatatccaggagtggggccctttcgacctggtgatcggcggcagcccttgcaatgacctgagcatcgtgaacccagcccggaagggcctgtacgagggaaccggcagactgttcttcgagttttacagactgctgcacgacgcccggcctaaggaaggcgacgaccggcccttcttttggctgttcgagaatgtggtggccatgggagtcagcgacaagcgggatattagccggttcctggagagcaaccccgtgatgatcgatgccaaggaagtgagcgccgcccaccgggccagatacttctggggcaatctgcctggcatgaacagacccctggccagcaccgtgaacgacaagctggagctgcaggagtgcctggagcacggccggatcgccaagttcagcaaggtgagaaccatcaccacccgaagcaacagcatcaaacaaggcaaggaccagcactttcctgtgttcatgaacgagaaggaggacatcctgtggtgtaccgagatggagagagtgttcgggttcccagtccactacacagatgtcagcaacatgtctagactggccagacagagactgctgggaagaagctggtccgtccctgtgatcagacacctgttcgcccctctgaaggagtacttcgcctgcgtgagcagcggcaacagcaacgccaacagccggggccccagcttctctagcggcctggtgccactgtccctgagagggagccacatgggccccatggagatctacaaaaccgtgagcgcctggaagcggcagcctgtgcgcgtgctgagcctgtttcggaatatcgataaagtcctgaaaagcctgggattcctggagagcggctctggctccggcggtggcaccctgaagtacgtggaggatgtgacaaacgtggtcagacgggatgtggagaagtggggccccttcgatctggtgtacggcagcacccaacccctgggcagctcttgtgaccggtgccctggctggtacatgtttcagttccaccggatcctgcagtacgccctgccgagacaggagtcccagcggccattcttttggattttcatggacaacttgctgctgaccgaggatgaccaggaaactaccactcggttcctgcagaccgaagccgtgaccctgcaggacgtgagaggccgggactaccagaacgccatgcgggtgtggtccaacatccctggactgaaaagcaagcacgcacctctgacccctaaagaagaggagtacctgcaggcccaggtgcggagcagaagcaagctggacgcccctaaggtggatctgctggtgaagaattgcctcctgcccctgagagagtacttcaagtatttcagccagaatagtctgcccctgggaggcagcggcggcggcatggacgccgtgacctacgaggacgtgcacgtgaacttcagcagggaggagtgggtgctgctggaccccagccagaagagcctgtacaaggacgtgatgctggagacctactggaacctgacctgcatcggctacaagtggaaggaccacgacaacgaggagtactgccagaacagcggcaggcacggcaggtgcatcaactgccccagcgcctacggcaagaagcagtgcaccaacctgttcggcggcccaagcagcggcgcccctcctcccagcggcggcaggcggcccaagcagcggcgcccctcctcccagcggcggcagcccagccggctccccaacctctaccgaggagggcacctctgagtccgccacccccgagagcggccctggcacctccaccgagcccagcgagggcagcgcacccggcagccctgccggcagccccacctccacagaggagggaaccagcaccgagcccagcgaaggcagcgccccaggcaccagcaccgagcctagtgagcaggagattaaacggatcaacaagatcagaagaagacttgtgaaagacagcaacaccaagaaggccggcaagacaggccccatgaaaaccctgctggttagagtgatgacacccgatctgagagagcggctggaaaacctgagaaagaagcctgaaaatatcccccagcccatcagcaatacatctagagccaacctgaataagctgctgaccgattacaccgaaatgaagaaggcgatcctgcatgtgtactgggaagagttccagaaggaccctgtgggcctgatgagccgggtggcccagcctgccagcaagaagatcgatcagaacaagctgaaacctgagatggacgagaagggcaacctgaccaccgccggctttgcctgctctcagtgtggccagcccctgttcgtgtacaagctggagcaggtgtctgagaagggcaaggcttacaccaactacttcggacggtgcaatgtggccgagcacgaaaagctgatcctgctggcccagctgaagcccgagaaggatagcgacgaagccgtgacatatagcctgggaaagtttgggcagagggccctggatttctacagcattcatgtgaccaaggagtccacccaccccgtgaagcccctggcccagatcgccggaaacagatacgcctccggacctgtgggaaaggccctgagcgacgcatgtatgggcacaatcgcctccttcctgtctaagtaccaggacatcatcatcgaacaccagaaggtggtgaagggcaaccagaagagactggagagcctgcgggagctggccggcaaggaaaacctggaataccctagcgtgaccctgccacctcagcctcacaccaaggagggcgttgatgcctacaacgaagtgatcgcccgggtgcgaatgtgggtgaacctgaacctgtggcagaagctgaagctaagcagagatgatgccaagcctctgctgagactgaagggattcccttcctttcctctggtcgagagacaggccaacgaagtggactggtgggacatggtgtgtaacgtgaagaagctgatcaacgagaaaaaggaggatggcaaggtgttttggcagaatctggctggctacaagagacaggaagccctgagaccatacctgagcagcgaggaagatcggaagaagggaaagaaattcgctcggtaccagctgggcgacctgctgctgcacctggaaaagaagcacggcgaggactggggaaaggtgtacgacgaggcctgggagcggattgacaagaaagtggaaggcctgagcaagcacatcaagctggaagaggaacggagaagcgaggacgcccagagcaaggccgccctgaccgactggctgcgggctaaggccagcttcgtgatcgagggcctgaaggaggccgacaaggacgagttctgcagatgcgagctgaagctgcagaagtggtacggggacctgcggggaaagcccttcgccatcgaagccgagaacagcatcctggacatcagcggcttcagcaagcagtacaactgtgccttcatctggcagaaggacggcgtgaagaagctgaacctgtacctgatcatcaactacttcaagggcggcaagctgcggttcaagaagatcaaacctgaagccttcgaagccaacagattctacaccgtgatcaacaaaaagagcggcgagatcgtgcccatggaggtgaacttcaacttcgacgaccccaacctgatcatcctgcctctggcctttggcaagagacagggcagagaattcatctggaacgacctgctgtccctggaaaccggcagcctgaagctggccaacggaagagtgatcgagaagacactgtacaacagaagaacccggcaggatgagcctgccctgttcgtggccctgaccttcgagcggcgggaggtcctggactcctccaatatcaaaccaatgaacctgatcggcgtggcaagaggcgaaaacatccccgccgtgatcgccctgaccgaccccgagggctgcccactgagccggtttaaggatagcctgggaaacccaacccacatcctgagaatcggcgagagctataaggagaagcagcggaccatccaggccaagaaggaggtggagcagcggagagccggcggctacagccggaagtacgccagcaaagccaagaatctggcagacgatatggtgagaaacaccgctagagatctgctgtactacgccgtgacccaggatgccatgctgatcttcgccaacctgagccggggcttcggccggcagggcaagcggaccttcatggccgagagacagtacacacggatggaggactggctgaccgccaagctggcctacgagggcctgagcaagacctacctgtccaagacactggcccagtacacctccaagacatgcagcaactgtgggtttaccatcaccagcgccgactacgacagggtgctggagaagctgaagaagacagcaacaggctggatgaccacaattaacggcaaggagctgaaggtggagggccagattacctactacaacagatacaagagacagaacgtagtcaaggacctgtccgtcgagctggatagactgagcgaagaatctgtgaacaacgacatctcctcctggacaaagggcagaagcggagaagctctgagcctcctgaagaaaagattctcccatagacccgtgcaggagaagttcgtgtgcctgaactgcggcttcgagacacacgcagccgagcaagccgccctgaacatcgccagatcctggctgttcctgcggagccaggagtacaagaaataccagacaaacaagacaaccggcaacaccgataagagagccttcgtcgagacctggcagtccttttaccggaagaagcttaaggaggtgtggaaacctgccgtgcggtctggcggatctggcggaggctccaccagccccaagaaaaagagaaaagtctaagctgccttctgcggggcttgccttctggccatgcccttcttctctcccttgcacctgtacctcttggtctttgaataaagcctgagtaggaaggctagcaaaaaaaaaaaaaaaaaaaaaaaaaaaaaaaaaaaaaaaaaaaaaaaaaaaaaaaaaaaaaaaaaaaaaaaaaaaaaaaagcccagccggctccccaacctctaccgaggagggcacctctgagtccgccacccccgagagcggccctggcacctccaccgagcccagcgagggcagcgcacccggcagccctgccggcagccccacctccacagaggagggaaccagcaccgagcccagcgaaggcagcgccccaggcaccagcaccgagcctagtgagcaggagattaaacggatcaacaagatcagaagaagacttgtgaaagacagcaacaccaagaaggccggcaagacaggccccatgaaaaccctgctggttagagtgatgacacccgatctgagagagcggctggaaaacctgagaaagaagcctgaaaatatcccccagcccatcagcaatacatctagagccaacctgaataagctgctgaccgattacaccgaaatgaagaaggcgatcctgcatgtgtactgggaagagttccagaaggaccctgtgggcctgatgagccgggtggcccagcctgccagcaagaagatcgatcagaacaagctgaaacctgagatggacgagaagggcaacctgaccaccgccggctttgcctgctctcagtgtggccagcccctgttcgtgtacaagctggagcaggtgtctgagaagggcaaggcttacaccaactacttcggacggtgcaatgtggccgagcacgaaaagctgatcctgctggcccagctgaagcccgagaaggatagcgacgaagccgtgacatatagcctgggaaagtttgggcagagggccctggatttctacagcattcatgtgaccaaggagtccacccaccccgtgaagcccctggcccagatcgccggaaacagatacgcctccggacctgtgggaaaggccctgagcgacgcatgtatgggcacaatcgcctccttcctgtctaagtaccaggacatcatcatcgaacaccagaaggtggtgaagggcaaccagaagagactggagagcctgcgggagctggccggcaaggaaaacctggaataccctagcgtgaccctgccacctcagcctcacaccaaggagggcgttgatgcctacaacgaagtgatcgcccgggtgcgaatgtgggtgaacctgaacctgtggcagaagctgaagctaagcagagatgatgccaagcctctgctgagactgaagggattcccttcctttcctctggtcgagagacaggccaacgaagtggactggtgggacatggtgtgtaacgtgaagaagctgatcaacgagaaaaaggaggatggcaaggtgttttggcagaatctggctggctacaagagacaggaagccctgagaccatacctgagcagcgaggaagatcggaagaagggaaagaaattcgctcggtaccagctgggcgacctgctgctgcacctggaaaagaagcacggcgaggactggggaaaggtgtacgacgaggcctgggagcggattgacaagaaagtggaaggcctgagcaagcacatcaagctggaagaggaacggagaagcgaggacgcccagagcaaggccgccctgaccgactggctgcgggctaaggccagcttcgtgatcgagggcctgaaggaggccgacaaggacgagttctgcagatgcgagctgaagctgcagaagtggtacggggacctgcggggaaagcccttcgccatcgaagccgagaacagcatcctggacatcagcggcttcagcaagcagtacaactgtgccttcatctggcagaaggacggcgtgaagaagctgaacctgtacctgatcatcaactacttcaagggcggcaagctgcggttcaagaagatcaaacctgaagccttcgaagccaacagattctacaccgtgatcaacaaaaagagcggcgagatcgtgcccatggaggtgaacttcaacttcgacgaccccaacctgatcatcctgcctctggcctttggcaagagacagggcagagaattcatctggaacgacctgctgtccctggaaaccggcagcctgaagctggccaacggaagagtgatcgagaagacactgtacaacagaagaacccggcaggatgagcctgccctgttcgtggccctgaccttcgagcggcgggaggtcctggactcctccaatatcaaaccaatgaacctgatcggcgtggcaagaggcgaaaacatccccgccgtgatcgccctgaccgaccccgagggctgcccactgagccggtttaaggatagcctgggaaacccaacccacatcctgagaatcggcgagagctataaggagaagcagcggaccatccaggccaagaaggaggtggagcagcggagagccggcggctacagccggaagtacgccagcaaagccaagaatctggcagacgatatggtgagaaacaccgctagagatctgctgtactacgccgtgacccaggatgccatgctgatcttcgccaacctgagccggggcttcggccggcagggcaagcggaccttcatggccgagagacagtacacacggatggaggactggctgaccgccaagctggcctacgagggcctgagcaagacctacctgtccaagacactggcccagtacacctccaagacatgcagcaactgtgggtttaccatcaccagcgccgactacgacagggtgctggagaagctgaagaagacagcaacaggctggatgaccacaattaacggcaaggagctgaaggtggagggccagattacctactacaacagatacaagagacagaacgtagtcaaggacctgtccgtcgagctggatagactgagcgaagaatctgtgaacaacgacatctcctcctggacaaagggcagaagcggagaagctctgagcctcctgaagaaaagattctcccatagacccgtgcaggagaagttcgtgtgcctgaactgcggcttcgagacacacgcagccgagcaagccgccctgaacatcgccagatcctggctgttcctgcggagccaggagtacaagaaataccagacaaacaagacaaccggcaacaccgataagagagccttcgtcgagacctggcagtccttttaccggaagaagcttaaggaggtgtggaaacctgccgtgcggtctggcggatctggcggaggctccaccagccccaagaaaaagagaaaagtctaagctgccttctgcggggcttgccttctggccatgcccttcttctctcccttgcacctgtacctcttggtctttgaataaagcctgagtaggaaggctagcaaaaaaaaaaaaaaaaaaaaaaaaaaaaaaaaaaaaaaaaaaaaaaaaaaaaaaaaaaaaaaaaaaaaaaaaaaaaaaaa

SEQ ID NO: 10063 - RNA, 8787 nt, synthetic construct
  source 1..8787: mol_type = other RNA
aggaaataagagagaaaagaagagtaagaagaaatataagagccaccatggcccctaagaagaagcgtaaagtgagccggatgaaccacgaccaggagttcgacccccctaaggtgtaccctcccgtccccgccgagaagagaaagcccatccgggtcctgagcctgttcgatggcatcgccaccggtctgctggtgctgaaggacctgggcatccaggtggataggtacattgcctccgaggtgtgcgaggactccatcaccgtgggaatggtgcgtcatcagggcaagatcatgtacgtgggcgacgtgcggagcgtgacacagaagcatatccaggagtggggccctttcgacctggtgatcggcggcagcccttgcaatgacctgagcatcgtgaacccagcccggaagggcctgtacgagggaaccggcagactgttcttcgagttttacagactgctgcacgacgcccggcctaaggaaggcgacgaccggcccttcttttggctgttcgagaatgtggtggccatgggagtcagcgacaagcgggatattagccggttcctggagagcaaccccgtgatgatcgatgccaaggaagtgagcgccgcccaccgggccagatacttctggggcaatctgcctggcatgaacagacccctggccagcaccgtgaacgacaagctggagctgcaggagtgcctggagcacggccggatcgccaagttcagcaaggtgagaaccatcaccacccgaagcaacagcatcaaacaaggcaaggaccagcactttcctgtgttcatgaacgagaaggaggacatcctgtggtgtaccgagatggagagagtgttcgggttcccagtccactacacagatgtcagcaacatgtctagactggccagacagagactgctgggaagaagctggtccgtccctgtgatcagacacctgttcgcccctctgaaggagtacttcgcctgcgtgagcagcggcaacagcaacgccaacagccggggccccagcttctctagcggcctggtgccactgtccctgagagggagccacatgggccccatggagatctacaaaaccgtgagcgcctggaagcggcagcctgtgcgcgtgctgagcctgtttcggaatatcgataaagtcctgaaaagcctgggattcctggagagcggctctggctccggcggtggcaccctgaagtacgtggaggatgtgacaaacgtggtcagacgggatgtggagaagtggggccccttcgatctggtgtacggcagcacccaacccctgggcagctcttgtgaccggtgccctggctggtacatgtttcagttccaccggatcctgcagtacgccctgccgagacaggagtcccagcggccattcttttggattttcatggacaacttgctgctgaccgaggatgaccaggaaactaccactcggttcctgcagaccgaagccgtgaccctgcaggacgtgagaggccgggactaccagaacgccatgcgggtgtggtccaacatccctggactgaaaagcaagcacgcacctctgacccctaaagaagaggagtacctgcaggcccaggtgcggagcagaagcaagctggacgcccctaaggtggatctgctggtgaagaattgcctcctgcccctgagagagtacttcaagtatttcagccagaatagtctgcccctgggaggcagcggcggcggcggcagccagggcaacctgccccaggccgagatcaccctgatgaaccaggcccaggagagcgtgaccttcgaggacgtggccgtgaacttcaccaacagggagtggcagtgcctgacctacgcccagaggcacctgtacaaggacgtgatgctggagaactacggcaacatggtgagcctgggcttccccttccccaagccccccctgatcagccacctggagagggaggtggacccctgcgtgggcggcccaagcagcggcgcccctcctcccagcggcggcaggcggcccaagcagcggcgcccctcctcccagcggcggcagcccagccggctccccaacctctaccgaggagggcacctctgagtccgccacccccgagagcggccctggcacctccaccgagcccagcgagggcagcgcacccggcagccctgccggcagccccacctccacagaggagggaaccagcaccgagcccagcgaaggcagcgccccaggcaccagcaccgagcctagtgagcaggagattaaacggatcaacaagatcagaagaagacttgtgaaagacagcaacaccaagaaggccggcaagacaggccccatgaaaaccctgctggttagagtgatgacacccgatctgagagagcggctggaaaacctgagaaagaagcctgaaaatatcccccagcccatcagcaatacatctagagccaacctgaataagctgctgaccgattacaccgaaatgaagaaggcgatcctgcatgtgtactgggaagagttccagaaggaccctgtgggcctgatgagccgggtggcccagcctgccagcaagaagatcgatcagaacaagctgaaacctgagatggacgagaagggcaacctgaccaccgccggctttgcctgctctcagtgtggccagcccctgttcgtgtacaagctggagcaggtgtctgagaagggcaaggcttacaccaactacttcggacggtgcaatgtggccgagcacgaaaagctgatcctgctggcccagctgaagcccgagaaggatagcgacgaagccgtgacatatagcctgggaaagtttgggcagagggccctggatttctacagcattcatgtgaccaaggagtccacccaccccgtgaagcccctggcccagatcgccggaaacagatacgcctccggacctgtgggaaaggccctgagcgacgcatgtatgggcacaatcgcctccttcctgtctaagtaccaggacatcatcatcgaacaccagaaggtggtgaagggcaaccagaagagactggagagcctgcgggagctggccggcaaggaaaacctggaataccctagcgtgaccctgccacctcagcctcacaccaaggagggcgttgatgcctacaacgaagtgatcgcccgggtgcgaatgtgggtgaacctgaacctgtggcagaagctgaagctaagcagagatgatgccaagcctctgctgagactgaagggattcccttcctttcctctggtcgagagacaggccaacgaagtggactggtgggacatggtgtgtaacgtgaagaagctgatcaacgagaaaaaggaggatggcaaggtgttttggcagaatctggctggctacaagagacaggaagccctgagaccatacctgagcagcgaggaagatcggaagaagggaaagaaattcgctcggtaccagctgggcgacctgctgctgcacctggaaaagaagcacggcgaggactggggaaaggtgtacgacgaggcctgggagcggattgacaagaaagtggaaggcctgagcaagcacatcaagctggaagaggaacggagaagcgaggacgcccagagcaaggccgccctgaccgactggctgcgggctaaggccagcttcgtgatcgagggcctgaaggaggccgacaaggacgagttctgcagatgcgagctgaagctgcagaagtggtacggggacctgcggggaaagcccttcgccatcgaagccgagaacagcatcctggacatcagcggcttcagcaagcagtacaactgtgccttcatctggcagaaggacggcgtgaagaagctgaacctgtacctgatcatcaactacttcaagggcggcaagctgcggttcaagaagatcaaacctgaagccttcgaagccaacagattctacaccgtgatcaacaaaaagagcggcgagatcgtgcccatggaggtgaacttcaacttcgacgaccccaacctgatcatcctgcctctggcctttggcaagagacagggcagagaattcatctggaacgacctgctgtccctggaaaccggcagcctgaagctggccaacggaagagtgatcgagaagacactgtacaacagaagaacccggcaggatgagcctgccctgttcgtggccctgaccttcgagcggcgggaggtcctggactcctccaatatcaaaccaatgaacctgatcggcgtggcaagaggcgaaaacatccccgccgtgatcgccctgaccgaccccgagggctgcccactgagccggtttaaggatagcctgggaaacccaacccacatcctgagaatcggcgagagctataaggagaagcagcggaccatccaggccaagaaggaggtggagcagcggagagccggcggctacagccggaagtacgccagcaaagccaagaatctggcagacgatatggtgagaaacaccgctagagatctgctgtactacgccgtgacccaggatgccatgctgatcttcgccaacctgagccggggcttcggccggcagggcaagcggaccttcatggccgagagacagtacacacggatggaggactggctgaccgccaagctggcctacgagggcctgagcaagacctacctgtccaagacactggcccagtacacctccaagacatgcagcaactgtgggtttaccatcaccagcgccgactacgacagggtgctggagaagctgaagaagacagcaacaggctggatgaccacaattaacggcaaggagctgaaggtggagggccagattacctactacaacagatacaagagacagaacgtagtcaaggacctgtccgtcgagctggatagactgagcgaagaatctgtgaacaacgacatctcctcctggacaaagggcagaagcggagaagctctgagcctcctgaagaaaagattctcccatagacccgtgcaggagaagttcgtgtgcctgaactgcggcttcgagacacacgcagccgagcaagccgccctgaacatcgccagatcctggctgttcctgcggagccaggagtacaagaaataccagacaaacaagacaaccggcaacaccgataagagagccttcgtcgagacctggcagtccttttaccggaagaagcttaaggaggtgtggaaacctgccgtgcggtctggcggatctggcggaggctccaccagccccaagaaaaagagaaaagtctaagctgccttctgcggggcttgccttctggccatgcccttcttctctcccttgcacctgtacctcttggtctttgaataaagcctgagtaggaaggctagcaaaaaaaaaaaaaaaaaaaaaaaaaaaaaaaaaaaaaaaaaaaaaaaaaaaaaaaaaaaaaaaaaaaaaaaaaaaaaaaagcccagccggctccccaacctctaccgaggagggcacctctgagtccgccacccccgagagcggccctggcacctccaccgagcccagcgagggcagcgcacccggcagccctgccggcagccccacctccacagaggagggaaccagcaccgagcccagcgaaggcagcgccccaggcaccagcaccgagcctagtgagcaggagattaaacggatcaacaagatcagaagaagacttgtgaaagacagcaacaccaagaaggccggcaagacaggccccatgaaaaccctgctggttagagtgatgacacccgatctgagagagcggctggaaaacctgagaaagaagcctgaaaatatcccccagcccatcagcaatacatctagagccaacctgaataagctgctgaccgattacaccgaaatgaagaaggcgatcctgcatgtgtactgggaagagttccagaaggaccctgtgggcctgatgagccgggtggcccagcctgccagcaagaagatcgatcagaacaagctgaaacctgagatggacgagaagggcaacctgaccaccgccggctttgcctgctctcagtgtggccagcccctgttcgtgtacaagctggagcaggtgtctgagaagggcaaggcttacaccaactacttcggacggtgcaatgtggccgagcacgaaaagctgatcctgctggcccagctgaagcccgagaaggatagcgacgaagccgtgacatatagcctgggaaagtttgggcagagggccctggatttctacagcattcatgtgaccaaggagtccacccaccccgtgaagcccctggcccagatcgccggaaacagatacgcctccggacctgtgggaaaggccctgagcgacgcatgtatgggcacaatcgcctccttcctgtctaagtaccaggacatcatcatcgaacaccagaaggtggtgaagggcaaccagaagagactggagagcctgcgggagctggccggcaaggaaaacctggaataccctagcgtgaccctgccacctcagcctcacaccaaggagggcgttgatgcctacaacgaagtgatcgcccgggtgcgaatgtgggtgaacctgaacctgtggcagaagctgaagctaagcagagatgatgccaagcctctgctgagactgaagggattcccttcctttcctctggtcgagagacaggccaacgaagtggactggtgggacatggtgtgtaacgtgaagaagctgatcaacgagaaaaaggaggatggcaaggtgttttggcagaatctggctggctacaagagacaggaagccctgagaccatacctgagcagcgaggaagatcggaagaagggaaagaaattcgctcggtaccagctgggcgacctgctgctgcacctggaaaagaagcacggcgaggactggggaaaggtgtacgacgaggcctgggagcggattgacaagaaagtggaaggcctgagcaagcacatcaagctggaagaggaacggagaagcgaggacgcccagagcaaggccgccctgaccgactggctgcgggctaaggccagcttcgtgatcgagggcctgaaggaggccgacaaggacgagttctgcagatgcgagctgaagctgcagaagtggtacggggacctgcggggaaagcccttcgccatcgaagccgagaacagcatcctggacatcagcggcttcagcaagcagtacaactgtgccttcatctggcagaaggacggcgtgaagaagctgaacctgtacctgatcatcaactacttcaagggcggcaagctgcggttcaagaagatcaaacctgaagccttcgaagccaacagattctacaccgtgatcaacaaaaagagcggcgagatcgtgcccatggaggtgaacttcaacttcgacgaccccaacctgatcatcctgcctctggcctttggcaagagacagggcagagaattcatctggaacgacctgctgtccctggaaaccggcagcctgaagctggccaacggaagagtgatcgagaagacactgtacaacagaagaacccggcaggatgagcctgccctgttcgtggccctgaccttcgagcggcgggaggtcctggactcctccaatatcaaaccaatgaacctgatcggcgtggcaagaggcgaaaacatccccgccgtgatcgccctgaccgaccccgagggctgcccactgagccggtttaaggatagcctgggaaacccaacccacatcctgagaatcggcgagagctataaggagaagcagcggaccatccaggccaagaaggaggtggagcagcggagagccggcggctacagccggaagtacgccagcaaagccaagaatctggcagacgatatggtgagaaacaccgctagagatctgctgtactacgccgtgacccaggatgccatgctgatcttcgccaacctgagccggggcttcggccggcagggcaagcggaccttcatggccgagagacagtacacacggatggaggactggctgaccgccaagctggcctacgagggcctgagcaagacctacctgtccaagacactggcccagtacacctccaagacatgcagcaactgtgggtttaccatcaccagcgccgactacgacagggtgctggagaagctgaagaagacagcaacaggctggatgaccacaattaacggcaaggagctgaaggtggagggccagattacctactacaacagatacaagagacagaacgtagtcaaggacctgtccgtcgagctggatagactgagcgaagaatctgtgaacaacgacatctcctcctggacaaagggcagaagcggagaagctctgagcctcctgaagaaaagattctcccatagacccgtgcaggagaagttcgtgtgcctgaactgcggcttcgagacacacgcagccgagcaagccgccctgaacatcgccagatcctggctgttcctgcggagccaggagtacaagaaataccagacaaacaagacaaccggcaacaccgataagagagccttcgtcgagacctggcagtccttttaccggaagaagcttaaggaggtgtggaaacctgccgtgcggtctggcggatctggcggaggctccaccagccccaagaaaaagagaaaagtctaagctgccttctgcggggcttgccttctggccatgcccttcttctctcccttgcacctgtacctcttggtctttgaataaagcctgagtaggaaggctagcaaaaaaaaaaaaaaaaaaaaaaaaaaaaaaaaaaaaaaaaaaaaaaaaaaaaaaaaaaaaaaaaaaaaaaaaaaaaaaaa

SEQ ID NO: 10064 - RNA, 8787 nt, synthetic construct
  source 1..8787: mol_type = other RNA
aggaaataagagagaaaagaagagtaagaagaaatataagagccaccatggcccctaagaagaagcgtaaagtgagccggatgaaccacgaccaggagttcgacccccctaaggtgtaccctcccgtccccgccgagaagagaaagcccatccgggtcctgagcctgttcgatggcatcgccaccggtctgctggtgctgaaggacctgggcatccaggtggataggtacattgcctccgaggtgtgcgaggactccatcaccgtgggaatggtgcgtcatcagggcaagatcatgtacgtgggcgacgtgcggagcgtgacacagaagcatatccaggagtggggccctttcgacctggtgatcggcggcagcccttgcaatgacctgagcatcgtgaacccagcccggaagggcctgtacgagggaaccggcagactgttcttcgagttttacagactgctgcacgacgcccggcctaaggaaggcgacgaccggcccttcttttggctgttcgagaatgtggtggccatgggagtcagcgacaagcgggatattagccggttcctggagagcaaccccgtgatgatcgatgccaaggaagtgagcgccgcccaccgggccagatacttctggggcaatctgcctggcatgaacagacccctggccagcaccgtgaacgacaagctggagctgcaggagtgcctggagcacggccggatcgccaagttcagcaaggtgagaaccatcaccacccgaagcaacagcatcaaacaaggcaaggaccagcactttcctgtgttcatgaacgagaaggaggacatcctgtggtgtaccgagatggagagagtgttcgggttcccagtccactacacagatgtcagcaacatgtctagactggccagacagagactgctgggaagaagctggtccgtccctgtgatcagacacctgttcgcccctctgaaggagtacttcgcctgcgtgagcagcggcaacagcaacgccaacagccggggccccagcttctctagcggcctggtgccactgtccctgagagggagccacatgggccccatggagatctacaaaaccgtgagcgcctggaagcggcagcctgtgcgcgtgctgagcctgtttcggaatatcgataaagtcctgaaaagcctgggattcctggagagcggctctggctccggcggtggcaccctgaagtacgtggaggatgtgacaaacgtggtcagacgggatgtggagaagtggggccccttcgatctggtgtacggcagcacccaacccctgggcagctcttgtgaccggtgccctggctggtacatgtttcagttccaccggatcctgcagtacgccctgccgagacaggagtcccagcggccattcttttggattttcatggacaacttgctgctgaccgaggatgaccaggaaactaccactcggttcctgcagaccgaagccgtgaccctgcaggacgtgagaggccgggactaccagaacgccatgcgggtgtggtccaacatccctggactgaaaagcaagcacgcacctctgacccctaaagaagaggagtacctgcaggcccaggtgcggagcagaagcaagctggacgcccctaaggtggatctgctggtgaagaattgcctcctgcccctgagagagtacttcaagtatttcagccagaatagtctgcccctgggaggcagcggcggcggccaggtgcccgtgaccttcgaggacctggccgtgaggttcagcgccgaggagtggcacctgctggaggagtggcagagggagttccacagggacgtgatgagggagaactacgagatgctggtgagcctgggcaccgcccagctgctgcccctgagcgccttcctgagcctgaccgagccccaggaggacatgggcgacaacggctgcagcgacggcgagtgggagaggcccggcggcggcctgggcggcccaagcagcggcgcccctcctcccagcggcggcaggcggcccaagcagcggcgcccctcctcccagcggcggcagcccagccggctccccaacctctaccgaggagggcacctctgagtccgccacccccgagagcggccctggcacctccaccgagcccagcgagggcagcgcacccggcagccctgccggcagccccacctccacagaggagggaaccagcaccgagcccagcgaaggcagcgccccaggcaccagcaccgagcctagtgagcaggagattaaacggatcaacaagatcagaagaagacttgtgaaagacagcaacaccaagaaggccggcaagacaggccccatgaaaaccctgctggttagagtgatgacacccgatctgagagagcggctggaaaacctgagaaagaagcctgaaaatatcccccagcccatcagcaatacatctagagccaacctgaataagctgctgaccgattacaccgaaatgaagaaggcgatcctgcatgtgtactgggaagagttccagaaggaccctgtgggcctgatgagccgggtggcccagcctgccagcaagaagatcgatcagaacaagctgaaacctgagatggacgagaagggcaacctgaccaccgccggctttgcctgctctcagtgtggccagcccctgttcgtgtacaagctggagcaggtgtctgagaagggcaaggcttacaccaactacttcggacggtgcaatgtggccgagcacgaaaagctgatcctgctggcccagctgaagcccgagaaggatagcgacgaagccgtgacatatagcctgggaaagtttgggcagagggccctggatttctacagcattcatgtgaccaaggagtccacccaccccgtgaagcccctggcccagatcgccggaaacagatacgcctccggacctgtgggaaaggccctgagcgacgcatgtatgggcacaatcgcctccttcctgtctaagtaccaggacatcatcatcgaacaccagaaggtggtgaagggcaaccagaagagactggagagcctgcgggagctggccggcaaggaaaacctggaataccctagcgtgaccctgccacctcagcctcacaccaaggagggcgttgatgcctacaacgaagtgatcgcccgggtgcgaatgtgggtgaacctgaacctgtggcagaagctgaagctaagcagagatgatgccaagcctctgctgagactgaagggattcccttcctttcctctggtcgagagacaggccaacgaagtggactggtgggacatggtgtgtaacgtgaagaagctgatcaacgagaaaaaggaggatggcaaggtgttttggcagaatctggctggctacaagagacaggaagccctgagaccatacctgagcagcgaggaagatcggaagaagggaaagaaattcgctcggtaccagctgggcgacctgctgctgcacctggaaaagaagcacggcgaggactggggaaaggtgtacgacgaggcctgggagcggattgacaagaaagtggaaggcctgagcaagcacatcaagctggaagaggaacggagaagcgaggacgcccagagcaaggccgccctgaccgactggctgcgggctaaggccagcttcgtgatcgagggcctgaaggaggccgacaaggacgagttctgcagatgcgagctgaagctgcagaagtggtacggggacctgcggggaaagcccttcgccatcgaagccgagaacagcatcctggacatcagcggcttcagcaagcagtacaactgtgccttcatctggcagaaggacggcgtgaagaagctgaacctgtacctgatcatcaactacttcaagggcggcaagctgcggttcaagaagatcaaacctgaagccttcgaagccaacagattctacaccgtgatcaacaaaaagagcggcgagatcgtgcccatggaggtgaacttcaacttcgacgaccccaacctgatcatcctgcctctggcctttggcaagagacagggcagagaattcatctggaacgacctgctgtccctggaaaccggcagcctgaagctggccaacggaagagtgatcgagaagacactgtacaacagaagaacccggcaggatgagcctgccctgttcgtggccctgaccttcgagcggcgggaggtcctggactcctccaatatcaaaccaatgaacctgatcggcgtggcaagaggcgaaaacatccccgccgtgatcgccctgaccgaccccgagggctgcccactgagccggtttaaggatagcctgggaaacccaacccacatcctgagaatcggcgagagctataaggagaagcagcggaccatccaggccaagaaggaggtggagcagcggagagccggcggctacagccggaagtacgccagcaaagccaagaatctggcagacgatatggtgagaaacaccgctagagatctgctgtactacgccgtgacccaggatgccatgctgatcttcgccaacctgagccggggcttcggccggcagggcaagcggaccttcatggccgagagacagtacacacggatggaggactggctgaccgccaagctggcctacgagggcctgagcaagacctacctgtccaagacactggcccagtacacctccaagacatgcagcaactgtgggtttaccatcaccagcgccgactacgacagggtgctggagaagctgaagaagacagcaacaggctggatgaccacaattaacggcaaggagctgaaggtggagggccagattacctactacaacagatacaagagacagaacgtagtcaaggacctgtccgtcgagctggatagactgagcgaagaatctgtgaacaacgacatctcctcctggacaaagggcagaagcggagaagctctgagcctcctgaagaaaagattctcccatagacccgtgcaggagaagttcgtgtgcctgaactgcggcttcgagacacacgcagccgagcaagccgccctgaacatcgccagatcctggctgttcctgcggagccaggagtacaagaaataccagacaaacaagacaaccggcaacaccgataagagagccttcgtcgagacctggcagtccttttaccggaagaagcttaaggaggtgtggaaacctgccgtgcggtctggcggatctggcggaggctccaccagccccaagaaaaagagaaaagtctaagctgccttctgcggggcttgccttctggccatgcccttcttctctcccttgcacctgtacctcttggtctttgaataaagcctgagtaggaaggctagcaaaaaaaaaaaaaaaaaaaaaaaaaaaaaaaaaaaaaaaaaaaaaaaaaaaaaaaaaaaaaaaaaaaaaaaaaaaaaaaagcccagccggctccccaacctctaccgaggagggcacctctgagtccgccacccccgagagcggccctggcacctccaccgagcccagcgagggcagcgcacccggcagccctgccggcagccccacctccacagaggagggaaccagcaccgagcccagcgaaggcagcgccccaggcaccagcaccgagcctagtgagcaggagattaaacggatcaacaagatcagaagaagacttgtgaaagacagcaacaccaagaaggccggcaagacaggccccatgaaaaccctgctggttagagtgatgacacccgatctgagagagcggctggaaaacctgagaaagaagcctgaaaatatcccccagcccatcagcaatacatctagagccaacctgaataagctgctgaccgattacaccgaaatgaagaaggcgatcctgcatgtgtactgggaagagttccagaaggaccctgtgggcctgatgagccgggtggcccagcctgccagcaagaagatcgatcagaacaagctgaaacctgagatggacgagaagggcaacctgaccaccgccggctttgcctgctctcagtgtggccagcccctgttcgtgtacaagctggagcaggtgtctgagaagggcaaggcttacaccaactacttcggacggtgcaatgtggccgagcacgaaaagctgatcctgctggcccagctgaagcccgagaaggatagcgacgaagccgtgacatatagcctgggaaagtttgggcagagggccctggatttctacagcattcatgtgaccaaggagtccacccaccccgtgaagcccctggcccagatcgccggaaacagatacgcctccggacctgtgggaaaggccctgagcgacgcatgtatgggcacaatcgcctccttcctgtctaagtaccaggacatcatcatcgaacaccagaaggtggtgaagggcaaccagaagagactggagagcctgcgggagctggccggcaaggaaaacctggaataccctagcgtgaccctgccacctcagcctcacaccaaggagggcgttgatgcctacaacgaagtgatcgcccgggtgcgaatgtgggtgaacctgaacctgtggcagaagctgaagctaagcagagatgatgccaagcctctgctgagactgaagggattcccttcctttcctctggtcgagagacaggccaacgaagtggactggtgggacatggtgtgtaacgtgaagaagctgatcaacgagaaaaaggaggatggcaaggtgttttggcagaatctggctggctacaagagacaggaagccctgagaccatacctgagcagcgaggaagatcggaagaagggaaagaaattcgctcggtaccagctgggcgacctgctgctgcacctggaaaagaagcacggcgaggactggggaaaggtgtacgacgaggcctgggagcggattgacaagaaagtggaaggcctgagcaagcacatcaagctggaagaggaacggagaagcgaggacgcccagagcaaggccgccctgaccgactggctgcgggctaaggccagcttcgtgatcgagggcctgaaggaggccgacaaggacgagttctgcagatgcgagctgaagctgcagaagtggtacggggacctgcggggaaagcccttcgccatcgaagccgagaacagcatcctggacatcagcggcttcagcaagcagtacaactgtgccttcatctggcagaaggacggcgtgaagaagctgaacctgtacctgatcatcaactacttcaagggcggcaagctgcggttcaagaagatcaaacctgaagccttcgaagccaacagattctacaccgtgatcaacaaaaagagcggcgagatcgtgcccatggaggtgaacttcaacttcgacgaccccaacctgatcatcctgcctctggcctttggcaagagacagggcagagaattcatctggaacgacctgctgtccctggaaaccggcagcctgaagctggccaacggaagagtgatcgagaagacactgtacaacagaagaacccggcaggatgagcctgccctgttcgtggccctgaccttcgagcggcgggaggtcctggactcctccaatatcaaaccaatgaacctgatcggcgtggcaagaggcgaaaacatccccgccgtgatcgccctgaccgaccccgagggctgcccactgagccggtttaaggatagcctgggaaacccaacccacatcctgagaatcggcgagagctataaggagaagcagcggaccatccaggccaagaaggaggtggagcagcggagagccggcggctacagccggaagtacgccagcaaagccaagaatctggcagacgatatggtgagaaacaccgctagagatctgctgtactacgccgtgacccaggatgccatgctgatcttcgccaacctgagccggggcttcggccggcagggcaagcggaccttcatggccgagagacagtacacacggatggaggactggctgaccgccaagctggcctacgagggcctgagcaagacctacctgtccaagacactggcccagtacacctccaagacatgcagcaactgtgggtttaccatcaccagcgccgactacgacagggtgctggagaagctgaagaagacagcaacaggctggatgaccacaattaacggcaaggagctgaaggtggagggccagattacctactacaacagatacaagagacagaacgtagtcaaggacctgtccgtcgagctggatagactgagcgaagaatctgtgaacaacgacatctcctcctggacaaagggcagaagcggagaagctctgagcctcctgaagaaaagattctcccatagacccgtgcaggagaagttcgtgtgcctgaactgcggcttcgagacacacgcagccgagcaagccgccctgaacatcgccagatcctggctgttcctgcggagccaggagtacaagaaataccagacaaacaagacaaccggcaacaccgataagagagccttcgtcgagacctggcagtccttttaccggaagaagcttaaggaggtgtggaaacctgccgtgcggtctggcggatctggcggaggctccaccagccccaagaaaaagagaaaagtctaagctgccttctgcggggcttgccttctggccatgcccttcttctctcccttgcacctgtacctcttggtctttgaataaagcctgagtaggaaggctagcaaaaaaaaaaaaaaaaaaaaaaaaaaaaaaaaaaaaaaaaaaaaaaaaaaaaaaaaaaaaaaaaaaaaaaaaaaaaaaaa

SEQ ID NO: 10065 - RNA, 8787 nt, synthetic construct
  source 1..8787: mol_type = other RNA
aggaaataagagagaaaagaagagtaagaagaaatataagagccaccatggcccctaagaagaagcgtaaagtgagccggatgaaccacgaccaggagttcgacccccctaaggtgtaccctcccgtccccgccgagaagagaaagcccatccgggtcctgagcctgttcgatggcatcgccaccggtctgctggtgctgaaggacctgggcatccaggtggataggtacattgcctccgaggtgtgcgaggactccatcaccgtgggaatggtgcgtcatcagggcaagatcatgtacgtgggcgacgtgcggagcgtgacacagaagcatatccaggagtggggccctttcgacctggtgatcggcggcagcccttgcaatgacctgagcatcgtgaacccagcccggaagggcctgtacgagggaaccggcagactgttcttcgagttttacagactgctgcacgacgcccggcctaaggaaggcgacgaccggcccttcttttggctgttcgagaatgtggtggccatgggagtcagcgacaagcgggatattagccggttcctggagagcaaccccgtgatgatcgatgccaaggaagtgagcgccgcccaccgggccagatacttctggggcaatctgcctggcatgaacagacccctggccagcaccgtgaacgacaagctggagctgcaggagtgcctggagcacggccggatcgccaagttcagcaaggtgagaaccatcaccacccgaagcaacagcatcaaacaaggcaaggaccagcactttcctgtgttcatgaacgagaaggaggacatcctgtggtgtaccgagatggagagagtgttcgggttcccagtccactacacagatgtcagcaacatgtctagactggccagacagagactgctgggaagaagctggtccgtccctgtgatcagacacctgttcgcccctctgaaggagtacttcgcctgcgtgagcagcggcaacagcaacgccaacagccggggccccagcttctctagcggcctggtgccactgtccctgagagggagccacatgggccccatggagatctacaaaaccgtgagcgcctggaagcggcagcctgtgcgcgtgctgagcctgtttcggaatatcgataaagtcctgaaaagcctgggattcctggagagcggctctggctccggcggtggcaccctgaagtacgtggaggatgtgacaaacgtggtcagacgggatgtggagaagtggggccccttcgatctggtgtacggcagcacccaacccctgggcagctcttgtgaccggtgccctggctggtacatgtttcagttccaccggatcctgcagtacgccctgccgagacaggagtcccagcggccattcttttggattttcatggacaacttgctgctgaccgaggatgaccaggaaactaccactcggttcctgcagaccgaagccgtgaccctgcaggacgtgagaggccgggactaccagaacgccatgcgggtgtggtccaacatccctggactgaaaagcaagcacgcacctctgacccctaaagaagaggagtacctgcaggcccaggtgcggagcagaagcaagctggacgcccctaaggtggatctgctggtgaagaattgcctcctgcccctgagagagtacttcaagtatttcagccagaatagtctgcccctgggaggcagcggcggcggcctgcaggaggccgtgaccttcaaggacgtggccgtggtgttcaccgaggaggagctgggcctgctggacagcacccagaggaccctgtacagggacgtgatgctggagaacttcaggaacctggtgagcctgggccaccagagcttcaagcccgacgtgatcagccagctggagagggaggagaagctgtggctgaagaagctgcagacccagaggggcaggaggagcggcggcaggagccagggcggcccaagcagcggcgcccctcctcccagcggcggcaggcggcccaagcagcggcgcccctcctcccagcggcggcagcccagccggctccccaacctctaccgaggagggcacctctgagtccgccacccccgagagcggccctggcacctccaccgagcccagcgagggcagcgcacccggcagccctgccggcagccccacctccacagaggagggaaccagcaccgagcccagcgaaggcagcgccccaggcaccagcaccgagcctagtgagcaggagattaaacggatcaacaagatcagaagaagacttgtgaaagacagcaacaccaagaaggccggcaagacaggccccatgaaaaccctgctggttagagtgatgacacccgatctgagagagcggctggaaaacctgagaaagaagcctgaaaatatcccccagcccatcagcaatacatctagagccaacctgaataagctgctgaccgattacaccgaaatgaagaaggcgatcctgcatgtgtactgggaagagttccagaaggaccctgtgggcctgatgagccgggtggcccagcctgccagcaagaagatcgatcagaacaagctgaaacctgagatggacgagaagggcaacctgaccaccgccggctttgcctgctctcagtgtggccagcccctgttcgtgtacaagctggagcaggtgtctgagaagggcaaggcttacaccaactacttcggacggtgcaatgtggccgagcacgaaaagctgatcctgctggcccagctgaagcccgagaaggatagcgacgaagccgtgacatatagcctgggaaagtttgggcagagggccctggatttctacagcattcatgtgaccaaggagtccacccaccccgtgaagcccctggcccagatcgccggaaacagatacgcctccggacctgtgggaaaggccctgagcgacgcatgtatgggcacaatcgcctccttcctgtctaagtaccaggacatcatcatcgaacaccagaaggtggtgaagggcaaccagaagagactggagagcctgcgggagctggccggcaaggaaaacctggaataccctagcgtgaccctgccacctcagcctcacaccaaggagggcgttgatgcctacaacgaagtgatcgcccgggtgcgaatgtgggtgaacctgaacctgtggcagaagctgaagctaagcagagatgatgccaagcctctgctgagactgaagggattcccttcctttcctctggtcgagagacaggccaacgaagtggactggtgggacatggtgtgtaacgtgaagaagctgatcaacgagaaaaaggaggatggcaaggtgttttggcagaatctggctggctacaagagacaggaagccctgagaccatacctgagcagcgaggaagatcggaagaagggaaagaaattcgctcggtaccagctgggcgacctgctgctgcacctggaaaagaagcacggcgaggactggggaaaggtgtacgacgaggcctgggagcggattgacaagaaagtggaaggcctgagcaagcacatcaagctggaagaggaacggagaagcgaggacgcccagagcaaggccgccctgaccgactggctgcgggctaaggccagcttcgtgatcgagggcctgaaggaggccgacaaggacgagttctgcagatgcgagctgaagctgcagaagtggtacggggacctgcggggaaagcccttcgccatcgaagccgagaacagcatcctggacatcagcggcttcagcaagcagtacaactgtgccttcatctggcagaaggacggcgtgaagaagctgaacctgtacctgatcatcaactacttcaagggcggcaagctgcggttcaagaagatcaaacctgaagccttcgaagccaacagattctacaccgtgatcaacaaaaagagcggcgagatcgtgcccatggaggtgaacttcaacttcgacgaccccaacctgatcatcctgcctctggcctttggcaagagacagggcagagaattcatctggaacgacctgctgtccctggaaaccggcagcctgaagctggccaacggaagagtgatcgagaagacactgtacaacagaagaacccggcaggatgagcctgccctgttcgtggccctgaccttcgagcggcgggaggtcctggactcctccaatatcaaaccaatgaacctgatcggcgtggcaagaggcgaaaacatccccgccgtgatcgccctgaccgaccccgagggctgcccactgagccggtttaaggatagcctgggaaacccaacccacatcctgagaatcggcgagagctataaggagaagcagcggaccatccaggccaagaaggaggtggagcagcggagagccggcggctacagccggaagtacgccagcaaagccaagaatctggcagacgatatggtgagaaacaccgctagagatctgctgtactacgccgtgacccaggatgccatgctgatcttcgccaacctgagccggggcttcggccggcagggcaagcggaccttcatggccgagagacagtacacacggatggaggactggctgaccgccaagctggcctacgagggcctgagcaagacctacctgtccaagacactggcccagtacacctccaagacatgcagcaactgtgggtttaccatcaccagcgccgactacgacagggtgctggagaagctgaagaagacagcaacaggctggatgaccacaattaacggcaaggagctgaaggtggagggccagattacctactacaacagatacaagagacagaacgtagtcaaggacctgtccgtcgagctggatagactgagcgaagaatctgtgaacaacgacatctcctcctggacaaagggcagaagcggagaagctctgagcctcctgaagaaaagattctcccatagacccgtgcaggagaagttcgtgtgcctgaactgcggcttcgagacacacgcagccgagcaagccgccctgaacatcgccagatcctggctgttcctgcggagccaggagtacaagaaataccagacaaacaagacaaccggcaacaccgataagagagccttcgtcgagacctggcagtccttttaccggaagaagcttaaggaggtgtggaaacctgccgtgcggtctggcggatctggcggaggctccaccagccccaagaaaaagagaaaagtctaagctgccttctgcggggcttgccttctggccatgcccttcttctctcccttgcacctgtacctcttggtctttgaataaagcctgagtaggaaggctagcaaaaaaaaaaaaaaaaaaaaaaaaaaaaaaaaaaaaaaaaaaaaaaaaaaaaaaaaaaaaaaaaaaaaaaaaaaaaaaaagcccagccggctccccaacctctaccgaggagggcacctctgagtccgccacccccgagagcggccctggcacctccaccgagcccagcgagggcagcgcacccggcagccctgccggcagccccacctccacagaggagggaaccagcaccgagcccagcgaaggcagcgccccaggcaccagcaccgagcctagtgagcaggagattaaacggatcaacaagatcagaagaagacttgtgaaagacagcaacaccaagaaggccggcaagacaggccccatgaaaaccctgctggttagagtgatgacacccgatctgagagagcggctggaaaacctgagaaagaagcctgaaaatatcccccagcccatcagcaatacatctagagccaacctgaataagctgctgaccgattacaccgaaatgaagaaggcgatcctgcatgtgtactgggaagagttccagaaggaccctgtgggcctgatgagccgggtggcccagcctgccagcaagaagatcgatcagaacaagctgaaacctgagatggacgagaagggcaacctgaccaccgccggctttgcctgctctcagtgtggccagcccctgttcgtgtacaagctggagcaggtgtctgagaagggcaaggcttacaccaactacttcggacggtgcaatgtggccgagcacgaaaagctgatcctgctggcccagctgaagcccgagaaggatagcgacgaagccgtgacatatagcctgggaaagtttgggcagagggccctggatttctacagcattcatgtgaccaaggagtccacccaccccgtgaagcccctggcccagatcgccggaaacagatacgcctccggacctgtgggaaaggccctgagcgacgcatgtatgggcacaatcgcctccttcctgtctaagtaccaggacatcatcatcgaacaccagaaggtggtgaagggcaaccagaagagactggagagcctgcgggagctggccggcaaggaaaacctggaataccctagcgtgaccctgccacctcagcctcacaccaaggagggcgttgatgcctacaacgaagtgatcgcccgggtgcgaatgtgggtgaacctgaacctgtggcagaagctgaagctaagcagagatgatgccaagcctctgctgagactgaagggattcccttcctttcctctggtcgagagacaggccaacgaagtggactggtgggacatggtgtgtaacgtgaagaagctgatcaacgagaaaaaggaggatggcaaggtgttttggcagaatctggctggctacaagagacaggaagccctgagaccatacctgagcagcgaggaagatcggaagaagggaaagaaattcgctcggtaccagctgggcgacctgctgctgcacctggaaaagaagcacggcgaggactggggaaaggtgtacgacgaggcctgggagcggattgacaagaaagtggaaggcctgagcaagcacatcaagctggaagaggaacggagaagcgaggacgcccagagcaaggccgccctgaccgactggctgcgggctaaggccagcttcgtgatcgagggcctgaaggaggccgacaaggacgagttctgcagatgcgagctgaagctgcagaagtggtacggggacctgcggggaaagcccttcgccatcgaagccgagaacagcatcctggacatcagcggcttcagcaagcagtacaactgtgccttcatctggcagaaggacggcgtgaagaagctgaacctgtacctgatcatcaactacttcaagggcggcaagctgcggttcaagaagatcaaacctgaagccttcgaagccaacagattctacaccgtgatcaacaaaaagagcggcgagatcgtgcccatggaggtgaacttcaacttcgacgaccccaacctgatcatcctgcctctggcctttggcaagagacagggcagagaattcatctggaacgacctgctgtccctggaaaccggcagcctgaagctggccaacggaagagtgatcgagaagacactgtacaacagaagaacccggcaggatgagcctgccctgttcgtggccctgaccttcgagcggcgggaggtcctggactcctccaatatcaaaccaatgaacctgatcggcgtggcaagaggcgaaaacatccccgccgtgatcgccctgaccgaccccgagggctgcccactgagccggtttaaggatagcctgggaaacccaacccacatcctgagaatcggcgagagctataaggagaagcagcggaccatccaggccaagaaggaggtggagcagcggagagccggcggctacagccggaagtacgccagcaaagccaagaatctggcagacgatatggtgagaaacaccgctagagatctgctgtactacgccgtgacccaggatgccatgctgatcttcgccaacctgagccggggcttcggccggcagggcaagcggaccttcatggccgagagacagtacacacggatggaggactggctgaccgccaagctggcctacgagggcctgagcaagacctacctgtccaagacactggcccagtacacctccaagacatgcagcaactgtgggtttaccatcaccagcgccgactacgacagggtgctggagaagctgaagaagacagcaacaggctggatgaccacaattaacggcaaggagctgaaggtggagggccagattacctactacaacagatacaagagacagaacgtagtcaaggacctgtccgtcgagctggatagactgagcgaagaatctgtgaacaacgacatctcctcctggacaaagggcagaagcggagaagctctgagcctcctgaagaaaagattctcccatagacccgtgcaggagaagttcgtgtgcctgaactgcggcttcgagacacacgcagccgagcaagccgccctgaacatcgccagatcctggctgttcctgcggagccaggagtacaagaaataccagacaaacaagacaaccggcaacaccgataagagagccttcgtcgagacctggcagtccttttaccggaagaagcttaaggaggtgtggaaacctgccgtgcggtctggcggatctggcggaggctccaccagccccaagaaaaagagaaaagtctaagctgccttctgcggggcttgccttctggccatgcccttcttctctcccttgcacctgtacctcttggtctttgaataaagcctgagtaggaaggctagcaaaaaaaaaaaaaaaaaaaaaaaaaaaaaaaaaaaaaaaaaaaaaaaaaaaaaaaaaaaaaaaaaaaaaaaaaaaaaaaa

SEQ ID NO: 10066 - RNA, 8820 nt, synthetic construct
  source 1..8820: mol_type = other RNA
aggaaataagagagaaaagaagagtaagaagaaatataagagccaccatggcccctaagaagaagcgtaaagtgagccggatgaaccacgaccaggagttcgacccccctaaggtgtaccctcccgtccccgccgagaagagaaagcccatccgggtcctgagcctgttcgatggcatcgccaccggtctgctggtgctgaaggacctgggcatccaggtggataggtacattgcctccgaggtgtgcgaggactccatcaccgtgggaatggtgcgtcatcagggcaagatcatgtacgtgggcgacgtgcggagcgtgacacagaagcatatccaggagtggggccctttcgacctggtgatcggcggcagcccttgcaatgacctgagcatcgtgaacccagcccggaagggcctgtacgagggaaccggcagactgttcttcgagttttacagactgctgcacgacgcccggcctaaggaaggcgacgaccggcccttcttttggctgttcgagaatgtggtggccatgggagtcagcgacaagcgggatattagccggttcctggagagcaaccccgtgatgatcgatgccaaggaagtgagcgccgcccaccgggccagatacttctggggcaatctgcctggcatgaacagacccctggccagcaccgtgaacgacaagctggagctgcaggagtgcctggagcacggccggatcgccaagttcagcaaggtgagaaccatcaccacccgaagcaacagcatcaaacaaggcaaggaccagcactttcctgtgttcatgaacgagaaggaggacatcctgtggtgtaccgagatggagagagtgttcgggttcccagtccactacacagatgtcagcaacatgtctagactggccagacagagactgctgggaagaagctggtccgtccctgtgatcagacacctgttcgcccctctgaaggagtacttcgcctgcgtgagcagcggcaacagcaacgccaacagccggggccccagcttctctagcggcctggtgccactgtccctgagagggagccacatgggccccatggagatctacaaaaccgtgagcgcctggaagcggcagcctgtgcgcgtgctgagcctgtttcggaatatcgataaagtcctgaaaagcctgggattcctggagagcggctctggctccggcggtggcaccctgaagtacgtggaggatgtgacaaacgtggtcagacgggatgtggagaagtggggccccttcgatctggtgtacggcagcacccaacccctgggcagctcttgtgaccggtgccctggctggtacatgtttcagttccaccggatcctgcagtacgccctgccgagacaggagtcccagcggccattcttttggattttcatggacaacttgctgctgaccgaggatgaccaggaaactaccactcggttcctgcagaccgaagccgtgaccctgcaggacgtgagaggccgggactaccagaacgccatgcgggtgtggtccaacatccctggactgaaaagcaagcacgcacctctgacccctaaagaagaggagtacctgcaggcccaggtgcggagcagaagcaagctggacgcccctaaggtggatctgctggtgaagaattgcctcctgcccctgagagagtacttcaagtatttcagccagaatagtctgcccctgggaggcagcggcggcggcgtggtgttcgaggacgtggccgtgtacttcagccaggaggagtggggcctgctggacgaggcccagaggcacctgtaccacgccgtgatgaccgagaacttcgccctggtgaccagcctgggctgctggcacggcgcccaggacgaggaggcccccagcgagcagagcatcagcgtgggcatgagcgaggtgggcacccccaagcccgaccccagcaccaagaagggccagccctacgagatgtgcgagcccctgagcaaggacctgctgcacctgggcggcccaagcagcggcgcccctcctcccagcggcggcaggcggcccaagcagcggcgcccctcctcccagcggcggcagcccagccggctccccaacctctaccgaggagggcacctctgagtccgccacccccgagagcggccctggcacctccaccgagcccagcgagggcagcgcacccggcagccctgccggcagccccacctccacagaggagggaaccagcaccgagcccagcgaaggcagcgccccaggcaccagcaccgagcctagtgagcaggagattaaacggatcaacaagatcagaagaagacttgtgaaagacagcaacaccaagaaggccggcaagacaggccccatgaaaaccctgctggttagagtgatgacacccgatctgagagagcggctggaaaacctgagaaagaagcctgaaaatatcccccagcccatcagcaatacatctagagccaacctgaataagctgctgaccgattacaccgaaatgaagaaggcgatcctgcatgtgtactgggaagagttccagaaggaccctgtgggcctgatgagccgggtggcccagcctgccagcaagaagatcgatcagaacaagctgaaacctgagatggacgagaagggcaacctgaccaccgccggctttgcctgctctcagtgtggccagcccctgttcgtgtacaagctggagcaggtgtctgagaagggcaaggcttacaccaactacttcggacggtgcaatgtggccgagcacgaaaagctgatcctgctggcccagctgaagcccgagaaggatagcgacgaagccgtgacatatagcctgggaaagtttgggcagagggccctggatttctacagcattcatgtgaccaaggagtccacccaccccgtgaagcccctggcccagatcgccggaaacagatacgcctccggacctgtgggaaaggccctgagcgacgcatgtatgggcacaatcgcctccttcctgtctaagtaccaggacatcatcatcgaacaccagaaggtggtgaagggcaaccagaagagactggagagcctgcgggagctggccggcaaggaaaacctggaataccctagcgtgaccctgccacctcagcctcacaccaaggagggcgttgatgcctacaacgaagtgatcgcccgggtgcgaatgtgggtgaacctgaacctgtggcagaagctgaagctaagcagagatgatgccaagcctctgctgagactgaagggattcccttcctttcctctggtcgagagacaggccaacgaagtggactggtgggacatggtgtgtaacgtgaagaagctgatcaacgagaaaaaggaggatggcaaggtgttttggcagaatctggctggctacaagagacaggaagccctgagaccatacctgagcagcgaggaagatcggaagaagggaaagaaattcgctcggtaccagctgggcgacctgctgctgcacctggaaaagaagcacggcgaggactggggaaaggtgtacgacgaggcctgggagcggattgacaagaaagtggaaggcctgagcaagcacatcaagctggaagaggaacggagaagcgaggacgcccagagcaaggccgccctgaccgactggctgcgggctaaggccagcttcgtgatcgagggcctgaaggaggccgacaaggacgagttctgcagatgcgagctgaagctgcagaagtggtacggggacctgcggggaaagcccttcgccatcgaagccgagaacagcatcctggacatcagcggcttcagcaagcagtacaactgtgccttcatctggcagaaggacggcgtgaagaagctgaacctgtacctgatcatcaactacttcaagggcggcaagctgcggttcaagaagatcaaacctgaagccttcgaagccaacagattctacaccgtgatcaacaaaaagagcggcgagatcgtgcccatggaggtgaacttcaacttcgacgaccccaacctgatcatcctgcctctggcctttggcaagagacagggcagagaattcatctggaacgacctgctgtccctggaaaccggcagcctgaagctggccaacggaagagtgatcgagaagacactgtacaacagaagaacccggcaggatgagcctgccctgttcgtggccctgaccttcgagcggcgggaggtcctggactcctccaatatcaaaccaatgaacctgatcggcgtggcaagaggcgaaaacatccccgccgtgatcgccctgaccgaccccgagggctgcccactgagccggtttaaggatagcctgggaaacccaacccacatcctgagaatcggcgagagctataaggagaagcagcggaccatccaggccaagaaggaggtggagcagcggagagccggcggctacagccggaagtacgccagcaaagccaagaatctggcagacgatatggtgagaaacaccgctagagatctgctgtactacgccgtgacccaggatgccatgctgatcttcgccaacctgagccggggcttcggccggcagggcaagcggaccttcatggccgagagacagtacacacggatggaggactggctgaccgccaagctggcctacgagggcctgagcaagacctacctgtccaagacactggcccagtacacctccaagacatgcagcaactgtgggtttaccatcaccagcgccgactacgacagggtgctggagaagctgaagaagacagcaacaggctggatgaccacaattaacggcaaggagctgaaggtggagggccagattacctactacaacagatacaagagacagaacgtagtcaaggacctgtccgtcgagctggatagactgagcgaagaatctgtgaacaacgacatctcctcctggacaaagggcagaagcggagaagctctgagcctcctgaagaaaagattctcccatagacccgtgcaggagaagttcgtgtgcctgaactgcggcttcgagacacacgcagccgagcaagccgccctgaacatcgccagatcctggctgttcctgcggagccaggagtacaagaaataccagacaaacaagacaaccggcaacaccgataagagagccttcgtcgagacctggcagtccttttaccggaagaagcttaaggaggtgtggaaacctgccgtgcggtctggcggatctggcggaggctccaccagccccaagaaaaagagaaaagtctaagctgccttctgcggggcttgccttctggccatgcccttcttctctcccttgcacctgtacctcttggtctttgaataaagcctgagtaggaaggctagcaaaaaaaaaaaaaaaaaaaaaaaaaaaaaaaaaaaaaaaaaaaaaaaaaaaaaaaaaaaaaaaaaaaaaaaaaaaaaaaagcccagccggctccccaacctctaccgaggagggcacctctgagtccgccacccccgagagcggccctggcacctccaccgagcccagcgagggcagcgcacccggcagccctgccggcagccccacctccacagaggagggaaccagcaccgagcccagcgaaggcagcgccccaggcaccagcaccgagcctagtgagcaggagattaaacggatcaacaagatcagaagaagacttgtgaaagacagcaacaccaagaaggccggcaagacaggccccatgaaaaccctgctggttagagtgatgacacccgatctgagagagcggctggaaaacctgagaaagaagcctgaaaatatcccccagcccatcagcaatacatctagagccaacctgaataagctgctgaccgattacaccgaaatgaagaaggcgatcctgcatgtgtactgggaagagttccagaaggaccctgtgggcctgatgagccgggtggcccagcctgccagcaagaagatcgatcagaacaagctgaaacctgagatggacgagaagggcaacctgaccaccgccggctttgcctgctctcagtgtggccagcccctgttcgtgtacaagctggagcaggtgtctgagaagggcaaggcttacaccaactacttcggacggtgcaatgtggccgagcacgaaaagctgatcctgctggcccagctgaagcccgagaaggatagcgacgaagccgtgacatatagcctgggaaagtttgggcagagggccctggatttctacagcattcatgtgaccaaggagtccacccaccccgtgaagcccctggcccagatcgccggaaacagatacgcctccggacctgtgggaaaggccctgagcgacgcatgtatgggcacaatcgcctccttcctgtctaagtaccaggacatcatcatcgaacaccagaaggtggtgaagggcaaccagaagagactggagagcctgcgggagctggccggcaaggaaaacctggaataccctagcgtgaccctgccacctcagcctcacaccaaggagggcgttgatgcctacaacgaagtgatcgcccgggtgcgaatgtgggtgaacctgaacctgtggcagaagctgaagctaagcagagatgatgccaagcctctgctgagactgaagggattcccttcctttcctctggtcgagagacaggccaacgaagtggactggtgggacatggtgtgtaacgtgaagaagctgatcaacgagaaaaaggaggatggcaaggtgttttggcagaatctggctggctacaagagacaggaagccctgagaccatacctgagcagcgaggaagatcggaagaagggaaagaaattcgctcggtaccagctgggcgacctgctgctgcacctggaaaagaagcacggcgaggactggggaaaggtgtacgacgaggcctgggagcggattgacaagaaagtggaaggcctgagcaagcacatcaagctggaagaggaacggagaagcgaggacgcccagagcaaggccgccctgaccgactggctgcgggctaaggccagcttcgtgatcgagggcctgaaggaggccgacaaggacgagttctgcagatgcgagctgaagctgcagaagtggtacggggacctgcggggaaagcccttcgccatcgaagccgagaacagcatcctggacatcagcggcttcagcaagcagtacaactgtgccttcatctggcagaaggacggcgtgaagaagctgaacctgtacctgatcatcaactacttcaagggcggcaagctgcggttcaagaagatcaaacctgaagccttcgaagccaacagattctacaccgtgatcaacaaaaagagcggcgagatcgtgcccatggaggtgaacttcaacttcgacgaccccaacctgatcatcctgcctctggcctttggcaagagacagggcagagaattcatctggaacgacctgctgtccctggaaaccggcagcctgaagctggccaacggaagagtgatcgagaagacactgtacaacagaagaacccggcaggatgagcctgccctgttcgtggccctgaccttcgagcggcgggaggtcctggactcctccaatatcaaaccaatgaacctgatcggcgtggcaagaggcgaaaacatccccgccgtgatcgccctgaccgaccccgagggctgcccactgagccggtttaaggatagcctgggaaacccaacccacatcctgagaatcggcgagagctataaggagaagcagcggaccatccaggccaagaaggaggtggagcagcggagagccggcggctacagccggaagtacgccagcaaagccaagaatctggcagacgatatggtgagaaacaccgctagagatctgctgtactacgccgtgacccaggatgccatgctgatcttcgccaacctgagccggggcttcggccggcagggcaagcggaccttcatggccgagagacagtacacacggatggaggactggctgaccgccaagctggcctacgagggcctgagcaagacctacctgtccaagacactggcccagtacacctccaagacatgcagcaactgtgggtttaccatcaccagcgccgactacgacagggtgctggagaagctgaagaagacagcaacaggctggatgaccacaattaacggcaaggagctgaaggtggagggccagattacctactacaacagatacaagagacagaacgtagtcaaggacctgtccgtcgagctggatagactgagcgaagaatctgtgaacaacgacatctcctcctggacaaagggcagaagcggagaagctctgagcctcctgaagaaaagattctcccatagacccgtgcaggagaagttcgtgtgcctgaactgcggcttcgagacacacgcagccgagcaagccgccctgaacatcgccagatcctggctgttcctgcggagccaggagtacaagaaataccagacaaacaagacaaccggcaacaccgataagagagccttcgtcgagacctggcagtccttttaccggaagaagcttaaggaggtgtggaaacctgccgtgcggtctggcggatctggcggaggctccaccagccccaagaaaaagagaaaagtctaagctgccttctgcggggcttgccttctggccatgcccttcttctctcccttgcacctgtacctcttggtctttgaataaagcctgagtaggaaggctagcaaaaaaaaaaaaaaaaaaaaaaaaaaaaaaaaaaaaaaaaaaaaaaaaaaaaaaaaaaaaaaaaaaaaaaaaaaaaaaaa

SEQ ID NO: 10067 - RNA, 8787 nt, synthetic construct
  source 1..8787: mol_type = other RNA
aggaaataagagagaaaagaagagtaagaagaaatataagagccaccatggcccctaagaagaagcgtaaagtgagccggatgaaccacgaccaggagttcgacccccctaaggtgtaccctcccgtccccgccgagaagagaaagcccatccgggtcctgagcctgttcgatggcatcgccaccggtctgctggtgctgaaggacctgggcatccaggtggataggtacattgcctccgaggtgtgcgaggactccatcaccgtgggaatggtgcgtcatcagggcaagatcatgtacgtgggcgacgtgcggagcgtgacacagaagcatatccaggagtggggccctttcgacctggtgatcggcggcagcccttgcaatgacctgagcatcgtgaacccagcccggaagggcctgtacgagggaaccggcagactgttcttcgagttttacagactgctgcacgacgcccggcctaaggaaggcgacgaccggcccttcttttggctgttcgagaatgtggtggccatgggagtcagcgacaagcgggatattagccggttcctggagagcaaccccgtgatgatcgatgccaaggaagtgagcgccgcccaccgggccagatacttctggggcaatctgcctggcatgaacagacccctggccagcaccgtgaacgacaagctggagctgcaggagtgcctggagcacggccggatcgccaagttcagcaaggtgagaaccatcaccacccgaagcaacagcatcaaacaaggcaaggaccagcactttcctgtgttcatgaacgagaaggaggacatcctgtggtgtaccgagatggagagagtgttcgggttcccagtccactacacagatgtcagcaacatgtctagactggccagacagagactgctgggaagaagctggtccgtccctgtgatcagacacctgttcgcccctctgaaggagtacttcgcctgcgtgagcagcggcaacagcaacgccaacagccggggccccagcttctctagcggcctggtgccactgtccctgagagggagccacatgggccccatggagatctacaaaaccgtgagcgcctggaagcggcagcctgtgcgcgtgctgagcctgtttcggaatatcgataaagtcctgaaaagcctgggattcctggagagcggctctggctccggcggtggcaccctgaagtacgtggaggatgtgacaaacgtggtcagacgggatgtggagaagtggggccccttcgatctggtgtacggcagcacccaacccctgggcagctcttgtgaccggtgccctggctggtacatgtttcagttccaccggatcctgcagtacgccctgccgagacaggagtcccagcggccattcttttggattttcatggacaacttgctgctgaccgaggatgaccaggaaactaccactcggttcctgcagaccgaagccgtgaccctgcaggacgtgagaggccgggactaccagaacgccatgcgggtgtggtccaacatccctggactgaaaagcaagcacgcacctctgacccctaaagaagaggagtacctgcaggcccaggtgcggagcagaagcaagctggacgcccctaaggtggatctgctggtgaagaattgcctcctgcccctgagagagtacttcaagtatttcagccagaatagtctgcccctgggaggcagcggcggcggcccccaggagcccgtgaccttcgccgacgtggccgtgctgttcacccccgaggagtggctgttcctggacagcgcccagaagagcctgtacagggacgtgatgctggagaactacaggaacctggccagcgtgggcgaccagctgtgcaagaccaggatgagcagccacctggagcagagggaggagctgtgcgtgaccgagaggggcatcttccccggcgcccacctgggcccccacttccagggcggcccaagcagcggcgcccctcctcccagcggcggcaggcggcccaagcagcggcgcccctcctcccagcggcggcagcccagccggctccccaacctctaccgaggagggcacctctgagtccgccacccccgagagcggccctggcacctccaccgagcccagcgagggcagcgcacccggcagccctgccggcagccccacctccacagaggagggaaccagcaccgagcccagcgaaggcagcgccccaggcaccagcaccgagcctagtgagcaggagattaaacggatcaacaagatcagaagaagacttgtgaaagacagcaacaccaagaaggccggcaagacaggccccatgaaaaccctgctggttagagtgatgacacccgatctgagagagcggctggaaaacctgagaaagaagcctgaaaatatcccccagcccatcagcaatacatctagagccaacctgaataagctgctgaccgattacaccgaaatgaagaaggcgatcctgcatgtgtactgggaagagttccagaaggaccctgtgggcctgatgagccgggtggcccagcctgccagcaagaagatcgatcagaacaagctgaaacctgagatggacgagaagggcaacctgaccaccgccggctttgcctgctctcagtgtggccagcccctgttcgtgtacaagctggagcaggtgtctgagaagggcaaggcttacaccaactacttcggacggtgcaatgtggccgagcacgaaaagctgatcctgctggcccagctgaagcccgagaaggatagcgacgaagccgtgacatatagcctgggaaagtttgggcagagggccctggatttctacagcattcatgtgaccaaggagtccacccaccccgtgaagcccctggcccagatcgccggaaacagatacgcctccggacctgtgggaaaggccctgagcgacgcatgtatgggcacaatcgcctccttcctgtctaagtaccaggacatcatcatcgaacaccagaaggtggtgaagggcaaccagaagagactggagagcctgcgggagctggccggcaaggaaaacctggaataccctagcgtgaccctgccacctcagcctcacaccaaggagggcgttgatgcctacaacgaagtgatcgcccgggtgcgaatgtgggtgaacctgaacctgtggcagaagctgaagctaagcagagatgatgccaagcctctgctgagactgaagggattcccttcctttcctctggtcgagagacaggccaacgaagtggactggtgggacatggtgtgtaacgtgaagaagctgatcaacgagaaaaaggaggatggcaaggtgttttggcagaatctggctggctacaagagacaggaagccctgagaccatacctgagcagcgaggaagatcggaagaagggaaagaaattcgctcggtaccagctgggcgacctgctgctgcacctggaaaagaagcacggcgaggactggggaaaggtgtacgacgaggcctgggagcggattgacaagaaagtggaaggcctgagcaagcacatcaagctggaagaggaacggagaagcgaggacgcccagagcaaggccgccctgaccgactggctgcgggctaaggccagcttcgtgatcgagggcctgaaggaggccgacaaggacgagttctgcagatgcgagctgaagctgcagaagtggtacggggacctgcggggaaagcccttcgccatcgaagccgagaacagcatcctggacatcagcggcttcagcaagcagtacaactgtgccttcatctggcagaaggacggcgtgaagaagctgaacctgtacctgatcatcaactacttcaagggcggcaagctgcggttcaagaagatcaaacctgaagccttcgaagccaacagattctacaccgtgatcaacaaaaagagcggcgagatcgtgcccatggaggtgaacttcaacttcgacgaccccaacctgatcatcctgcctctggcctttggcaagagacagggcagagaattcatctggaacgacctgctgtccctggaaaccggcagcctgaagctggccaacggaagagtgatcgagaagacactgtacaacagaagaacccggcaggatgagcctgccctgttcgtggccctgaccttcgagcggcgggaggtcctggactcctccaatatcaaaccaatgaacctgatcggcgtggcaagaggcgaaaacatccccgccgtgatcgccctgaccgaccccgagggctgcccactgagccggtttaaggatagcctgggaaacccaacccacatcctgagaatcggcgagagctataaggagaagcagcggaccatccaggccaagaaggaggtggagcagcggagagccggcggctacagccggaagtacgccagcaaagccaagaatctggcagacgatatggtgagaaacaccgctagagatctgctgtactacgccgtgacccaggatgccatgctgatcttcgccaacctgagccggggcttcggccggcagggcaagcggaccttcatggccgagagacagtacacacggatggaggactggctgaccgccaagctggcctacgagggcctgagcaagacctacctgtccaagacactggcccagtacacctccaagacatgcagcaactgtgggtttaccatcaccagcgccgactacgacagggtgctggagaagctgaagaagacagcaacaggctggatgaccacaattaacggcaaggagctgaaggtggagggccagattacctactacaacagatacaagagacagaacgtagtcaaggacctgtccgtcgagctggatagactgagcgaagaatctgtgaacaacgacatctcctcctggacaaagggcagaagcggagaagctctgagcctcctgaagaaaagattctcccatagacccgtgcaggagaagttcgtgtgcctgaactgcggcttcgagacacacgcagccgagcaagccgccctgaacatcgccagatcctggctgttcctgcggagccaggagtacaagaaataccagacaaacaagacaaccggcaacaccgataagagagccttcgtcgagacctggcagtccttttaccggaagaagcttaaggaggtgtggaaacctgccgtgcggtctggcggatctggcggaggctccaccagccccaagaaaaagagaaaagtctaagctgccttctgcggggcttgccttctggccatgcccttcttctctcccttgcacctgtacctcttggtctttgaataaagcctgagtaggaaggctagcaaaaaaaaaaaaaaaaaaaaaaaaaaaaaaaaaaaaaaaaaaaaaaaaaaaaaaaaaaaaaaaaaaaaaaaaaaaaaaaagcccagccggctccccaacctctaccgaggagggcacctctgagtccgccacccccgagagcggccctggcacctccaccgagcccagcgagggcagcgcacccggcagccctgccggcagccccacctccacagaggagggaaccagcaccgagcccagcgaaggcagcgccccaggcaccagcaccgagcctagtgagcaggagattaaacggatcaacaagatcagaagaagacttgtgaaagacagcaacaccaagaaggccggcaagacaggccccatgaaaaccctgctggttagagtgatgacacccgatctgagagagcggctggaaaacctgagaaagaagcctgaaaatatcccccagcccatcagcaatacatctagagccaacctgaataagctgctgaccgattacaccgaaatgaagaaggcgatcctgcatgtgtactgggaagagttccagaaggaccctgtgggcctgatgagccgggtggcccagcctgccagcaagaagatcgatcagaacaagctgaaacctgagatggacgagaagggcaacctgaccaccgccggctttgcctgctctcagtgtggccagcccctgttcgtgtacaagctggagcaggtgtctgagaagggcaaggcttacaccaactacttcggacggtgcaatgtggccgagcacgaaaagctgatcctgctggcccagctgaagcccgagaaggatagcgacgaagccgtgacatatagcctgggaaagtttgggcagagggccctggatttctacagcattcatgtgaccaaggagtccacccaccccgtgaagcccctggcccagatcgccggaaacagatacgcctccggacctgtgggaaaggccctgagcgacgcatgtatgggcacaatcgcctccttcctgtctaagtaccaggacatcatcatcgaacaccagaaggtggtgaagggcaaccagaagagactggagagcctgcgggagctggccggcaaggaaaacctggaataccctagcgtgaccctgccacctcagcctcacaccaaggagggcgttgatgcctacaacgaagtgatcgcccgggtgcgaatgtgggtgaacctgaacctgtggcagaagctgaagctaagcagagatgatgccaagcctctgctgagactgaagggattcccttcctttcctctggtcgagagacaggccaacgaagtggactggtgggacatggtgtgtaacgtgaagaagctgatcaacgagaaaaaggaggatggcaaggtgttttggcagaatctggctggctacaagagacaggaagccctgagaccatacctgagcagcgaggaagatcggaagaagggaaagaaattcgctcggtaccagctgggcgacctgctgctgcacctggaaaagaagcacggcgaggactggggaaaggtgtacgacgaggcctgggagcggattgacaagaaagtggaaggcctgagcaagcacatcaagctggaagaggaacggagaagcgaggacgcccagagcaaggccgccctgaccgactggctgcgggctaaggccagcttcgtgatcgagggcctgaaggaggccgacaaggacgagttctgcagatgcgagctgaagctgcagaagtggtacggggacctgcggggaaagcccttcgccatcgaagccgagaacagcatcctggacatcagcggcttcagcaagcagtacaactgtgccttcatctggcagaaggacggcgtgaagaagctgaacctgtacctgatcatcaactacttcaagggcggcaagctgcggttcaagaagatcaaacctgaagccttcgaagccaacagattctacaccgtgatcaacaaaaagagcggcgagatcgtgcccatggaggtgaacttcaacttcgacgaccccaacctgatcatcctgcctctggcctttggcaagagacagggcagagaattcatctggaacgacctgctgtccctggaaaccggcagcctgaagctggccaacggaagagtgatcgagaagacactgtacaacagaagaacccggcaggatgagcctgccctgttcgtggccctgaccttcgagcggcgggaggtcctggactcctccaatatcaaaccaatgaacctgatcggcgtggcaagaggcgaaaacatccccgccgtgatcgccctgaccgaccccgagggctgcccactgagccggtttaaggatagcctgggaaacccaacccacatcctgagaatcggcgagagctataaggagaagcagcggaccatccaggccaagaaggaggtggagcagcggagagccggcggctacagccggaagtacgccagcaaagccaagaatctggcagacgatatggtgagaaacaccgctagagatctgctgtactacgccgtgacccaggatgccatgctgatcttcgccaacctgagccggggcttcggccggcagggcaagcggaccttcatggccgagagacagtacacacggatggaggactggctgaccgccaagctggcctacgagggcctgagcaagacctacctgtccaagacactggcccagtacacctccaagacatgcagcaactgtgggtttaccatcaccagcgccgactacgacagggtgctggagaagctgaagaagacagcaacaggctggatgaccacaattaacggcaaggagctgaaggtggagggccagattacctactacaacagatacaagagacagaacgtagtcaaggacctgtccgtcgagctggatagactgagcgaagaatctgtgaacaacgacatctcctcctggacaaagggcagaagcggagaagctctgagcctcctgaagaaaagattctcccatagacccgtgcaggagaagttcgtgtgcctgaactgcggcttcgagacacacgcagccgagcaagccgccctgaacatcgccagatcctggctgttcctgcggagccaggagtacaagaaataccagacaaacaagacaaccggcaacaccgataagagagccttcgtcgagacctggcagtccttttaccggaagaagcttaaggaggtgtggaaacctgccgtgcggtctggcggatctggcggaggctccaccagccccaagaaaaagagaaaagtctaagctgccttctgcggggcttgccttctggccatgcccttcttctctcccttgcacctgtacctcttggtctttgaataaagcctgagtaggaaggctagcaaaaaaaaaaaaaaaaaaaaaaaaaaaaaaaaaaaaaaaaaaaaaaaaaaaaaaaaaaaaaaaaaaaaaaaaaaaaaaaa

SEQ ID NO: 10068 - RNA, 8784 nt, synthetic construct
  source 1..8784: mol_type = other RNA
aggaaataagagagaaaagaagagtaagaagaaatataagagccaccatggcccctaagaagaagcgtaaagtgagccggatgaaccacgaccaggagttcgacccccctaaggtgtaccctcccgtccccgccgagaagagaaagcccatccgggtcctgagcctgttcgatggcatcgccaccggtctgctggtgctgaaggacctgggcatccaggtggataggtacattgcctccgaggtgtgcgaggactccatcaccgtgggaatggtgcgtcatcagggcaagatcatgtacgtgggcgacgtgcggagcgtgacacagaagcatatccaggagtggggccctttcgacctggtgatcggcggcagcccttgcaatgacctgagcatcgtgaacccagcccggaagggcctgtacgagggaaccggcagactgttcttcgagttttacagactgctgcacgacgcccggcctaaggaaggcgacgaccggcccttcttttggctgttcgagaatgtggtggccatgggagtcagcgacaagcgggatattagccggttcctggagagcaaccccgtgatgatcgatgccaaggaagtgagcgccgcccaccgggccagatacttctggggcaatctgcctggcatgaacagacccctggccagcaccgtgaacgacaagctggagctgcaggagtgcctggagcacggccggatcgccaagttcagcaaggtgagaaccatcaccacccgaagcaacagcatcaaacaaggcaaggaccagcactttcctgtgttcatgaacgagaaggaggacatcctgtggtgtaccgagatggagagagtgttcgggttcccagtccactacacagatgtcagcaacatgtctagactggccagacagagactgctgggaagaagctggtccgtccctgtgatcagacacctgttcgcccctctgaaggagtacttcgcctgcgtgagcagcggcaacagcaacgccaacagccggggccccagcttctctagcggcctggtgccactgtccctgagagggagccacatgggccccatggagatctacaaaaccgtgagcgcctggaagcggcagcctgtgcgcgtgctgagcctgtttcggaatatcgataaagtcctgaaaagcctgggattcctggagagcggctctggctccggcggtggcaccctgaagtacgtggaggatgtgacaaacgtggtcagacgggatgtggagaagtggggccccttcgatctggtgtacggcagcacccaacccctgggcagctcttgtgaccggtgccctggctggtacatgtttcagttccaccggatcctgcagtacgccctgccgagacaggagtcccagcggccattcttttggattttcatggacaacttgctgctgaccgaggatgaccaggaaactaccactcggttcctgcagaccgaagccgtgaccctgcaggacgtgagaggccgggactaccagaacgccatgcgggtgtggtccaacatccctggactgaaaagcaagcacgcacctctgacccctaaagaagaggagtacctgcaggcccaggtgcggagcagaagcaagctggacgcccctaaggtggatctgctggtgaagaattgcctcctgcccctgagagagtacttcaagtatttcagccagaatagtctgcccctgggaggcagcggcggcggcagagtgctgaccttcagagacgtggccgtggagttcagccccgaggagtgggagtgcctggacagcgcccagcagagactgtacagagacgtgatgctggagaactacggcaacctgttcagcctgggcctggccatcttcaagcccgacctgatcacctacctggagcagagaaaggagccctggaacgccagaagacagaagaccgtggccaagcaccccgccggcagcctgcacttcggcggcccaagcagcggcgcccctcctcccagcggcggcaggcggcccaagcagcggcgcccctcctcccagcggcggcagcccagccggctccccaacctctaccgaggagggcacctctgagtccgccacccccgagagcggccctggcacctccaccgagcccagcgagggcagcgcacccggcagccctgccggcagccccacctccacagaggagggaaccagcaccgagcccagcgaaggcagcgccccaggcaccagcaccgagcctagtgagcaggagattaaacggatcaacaagatcagaagaagacttgtgaaagacagcaacaccaagaaggccggcaagacaggccccatgaaaaccctgctggttagagtgatgacacccgatctgagagagcggctggaaaacctgagaaagaagcctgaaaatatcccccagcccatcagcaatacatctagagccaacctgaataagctgctgaccgattacaccgaaatgaagaaggcgatcctgcatgtgtactgggaagagttccagaaggaccctgtgggcctgatgagccgggtggcccagcctgccagcaagaagatcgatcagaacaagctgaaacctgagatggacgagaagggcaacctgaccaccgccggctttgcctgctctcagtgtggccagcccctgttcgtgtacaagctggagcaggtgtctgagaagggcaaggcttacaccaactacttcggacggtgcaatgtggccgagcacgaaaagctgatcctgctggcccagctgaagcccgagaaggatagcgacgaagccgtgacatatagcctgggaaagtttgggcagagggccctggatttctacagcattcatgtgaccaaggagtccacccaccccgtgaagcccctggcccagatcgccggaaacagatacgcctccggacctgtgggaaaggccctgagcgacgcatgtatgggcacaatcgcctccttcctgtctaagtaccaggacatcatcatcgaacaccagaaggtggtgaagggcaaccagaagagactggagagcctgcgggagctggccggcaaggaaaacctggaataccctagcgtgaccctgccacctcagcctcacaccaaggagggcgttgatgcctacaacgaagtgatcgcccgggtgcgaatgtgggtgaacctgaacctgtggcagaagctgaagctaagcagagatgatgccaagcctctgctgagactgaagggattcccttcctttcctctggtcgagagacaggccaacgaagtggactggtgggacatggtgtgtaacgtgaagaagctgatcaacgagaaaaaggaggatggcaaggtgttttggcagaatctggctggctacaagagacaggaagccctgagaccatacctgagcagcgaggaagatcggaagaagggaaagaaattcgctcggtaccagctgggcgacctgctgctgcacctggaaaagaagcacggcgaggactggggaaaggtgtacgacgaggcctgggagcggattgacaagaaagtggaaggcctgagcaagcacatcaagctggaagaggaacggagaagcgaggacgcccagagcaaggccgccctgaccgactggctgcgggctaaggccagcttcgtgatcgagggcctgaaggaggccgacaaggacgagttctgcagatgcgagctgaagctgcagaagtggtacggggacctgcggggaaagcccttcgccatcgaagccgagaacagcatcctggacatcagcggcttcagcaagcagtacaactgtgccttcatctggcagaaggacggcgtgaagaagctgaacctgtacctgatcatcaactacttcaagggcggcaagctgcggttcaagaagatcaaacctgaagccttcgaagccaacagattctacaccgtgatcaacaaaaagagcggcgagatcgtgcccatggaggtgaacttcaacttcgacgaccccaacctgatcatcctgcctctggcctttggcaagagacagggcagagaattcatctggaacgacctgctgtccctggaaaccggcagcctgaagctggccaacggaagagtgatcgagaagacactgtacaacagaagaacccggcaggatgagcctgccctgttcgtggccctgaccttcgagcggcgggaggtcctggactcctccaatatcaaaccaatgaacctgatcggcgtggcaagaggcgaaaacatccccgccgtgatcgccctgaccgaccccgagggctgcccactgagccggtttaaggatagcctgggaaacccaacccacatcctgagaatcggcgagagctataaggagaagcagcggaccatccaggccaagaaggaggtggagcagcggagagccggcggctacagccggaagtacgccagcaaagccaagaatctggcagacgatatggtgagaaacaccgctagagatctgctgtactacgccgtgacccaggatgccatgctgatcttcgccaacctgagccggggcttcggccggcagggcaagcggaccttcatggccgagagacagtacacacggatggaggactggctgaccgccaagctggcctacgagggcctgagcaagacctacctgtccaagacactggcccagtacacctccaagacatgcagcaactgtgggtttaccatcaccagcgccgactacgacagggtgctggagaagctgaagaagacagcaacaggctggatgaccacaattaacggcaaggagctgaaggtggagggccagattacctactacaacagatacaagagacagaacgtagtcaaggacctgtccgtcgagctggatagactgagcgaagaatctgtgaacaacgacatctcctcctggacaaagggcagaagcggagaagctctgagcctcctgaagaaaagattctcccatagacccgtgcaggagaagttcgtgtgcctgaactgcggcttcgagacacacgcagccgagcaagccgccctgaacatcgccagatcctggctgttcctgcggagccaggagtacaagaaataccagacaaacaagacaaccggcaacaccgataagagagccttcgtcgagacctggcagtccttttaccggaagaagcttaaggaggtgtggaaacctgccgtgcggtctggcggatctggcggaggctccaccagccccaagaaaaagagaaaagtctaagctgccttctgcggggcttgccttctggccatgcccttcttctctcccttgcacctgtacctcttggtctttgaataaagcctgagtaggaaggctagcaaaaaaaaaaaaaaaaaaaaaaaaaaaaaaaaaaaaaaaaaaaaaaaaaaaaaaaaaaaaaaaaaaaaaaaaaaaaaaaagcccagccggctccccaacctctaccgaggagggcacctctgagtccgccacccccgagagcggccctggcacctccaccgagcccagcgagggcagcgcacccggcagccctgccggcagccccacctccacagaggagggaaccagcaccgagcccagcgaaggcagcgccccaggcaccagcaccgagcctagtgagcaggagattaaacggatcaacaagatcagaagaagacttgtgaaagacagcaacaccaagaaggccggcaagacaggccccatgaaaaccctgctggttagagtgatgacacccgatctgagagagcggctggaaaacctgagaaagaagcctgaaaatatcccccagcccatcagcaatacatctagagccaacctgaataagctgctgaccgattacaccgaaatgaagaaggcgatcctgcatgtgtactgggaagagttccagaaggaccctgtgggcctgatgagccgggtggcccagcctgccagcaagaagatcgatcagaacaagctgaaacctgagatggacgagaagggcaacctgaccaccgccggctttgcctgctctcagtgtggccagcccctgttcgtgtacaagctggagcaggtgtctgagaagggcaaggcttacaccaactacttcggacggtgcaatgtggccgagcacgaaaagctgatcctgctggcccagctgaagcccgagaaggatagcgacgaagccgtgacatatagcctgggaaagtttgggcagagggccctggatttctacagcattcatgtgaccaaggagtccacccaccccgtgaagcccctggcccagatcgccggaaacagatacgcctccggacctgtgggaaaggccctgagcgacgcatgtatgggcacaatcgcctccttcctgtctaagtaccaggacatcatcatcgaacaccagaaggtggtgaagggcaaccagaagagactggagagcctgcgggagctggccggcaaggaaaacctggaataccctagcgtgaccctgccacctcagcctcacaccaaggagggcgttgatgcctacaacgaagtgatcgcccgggtgcgaatgtgggtgaacctgaacctgtggcagaagctgaagctaagcagagatgatgccaagcctctgctgagactgaagggattcccttcctttcctctggtcgagagacaggccaacgaagtggactggtgggacatggtgtgtaacgtgaagaagctgatcaacgagaaaaaggaggatggcaaggtgttttggcagaatctggctggctacaagagacaggaagccctgagaccatacctgagcagcgaggaagatcggaagaagggaaagaaattcgctcggtaccagctgggcgacctgctgctgcacctggaaaagaagcacggcgaggactggggaaaggtgtacgacgaggcctgggagcggattgacaagaaagtggaaggcctgagcaagcacatcaagctggaagaggaacggagaagcgaggacgcccagagcaaggccgccctgaccgactggctgcgggctaaggccagcttcgtgatcgagggcctgaaggaggccgacaaggacgagttctgcagatgcgagctgaagctgcagaagtggtacggggacctgcggggaaagcccttcgccatcgaagccgagaacagcatcctggacatcagcggcttcagcaagcagtacaactgtgccttcatctggcagaaggacggcgtgaagaagctgaacctgtacctgatcatcaactacttcaagggcggcaagctgcggttcaagaagatcaaacctgaagccttcgaagccaacagattctacaccgtgatcaacaaaaagagcggcgagatcgtgcccatggaggtgaacttcaacttcgacgaccccaacctgatcatcctgcctctggcctttggcaagagacagggcagagaattcatctggaacgacctgctgtccctggaaaccggcagcctgaagctggccaacggaagagtgatcgagaagacactgtacaacagaagaacccggcaggatgagcctgccctgttcgtggccctgaccttcgagcggcgggaggtcctggactcctccaatatcaaaccaatgaacctgatcggcgtggcaagaggcgaaaacatccccgccgtgatcgccctgaccgaccccgagggctgcccactgagccggtttaaggatagcctgggaaacccaacccacatcctgagaatcggcgagagctataaggagaagcagcggaccatccaggccaagaaggaggtggagcagcggagagccggcggctacagccggaagtacgccagcaaagccaagaatctggcagacgatatggtgagaaacaccgctagagatctgctgtactacgccgtgacccaggatgccatgctgatcttcgccaacctgagccggggcttcggccggcagggcaagcggaccttcatggccgagagacagtacacacggatggaggactggctgaccgccaagctggcctacgagggcctgagcaagacctacctgtccaagacactggcccagtacacctccaagacatgcagcaactgtgggtttaccatcaccagcgccgactacgacagggtgctggagaagctgaagaagacagcaacaggctggatgaccacaattaacggcaaggagctgaaggtggagggccagattacctactacaacagatacaagagacagaacgtagtcaaggacctgtccgtcgagctggatagactgagcgaagaatctgtgaacaacgacatctcctcctggacaaagggcagaagcggagaagctctgagcctcctgaagaaaagattctcccatagacccgtgcaggagaagttcgtgtgcctgaactgcggcttcgagacacacgcagccgagcaagccgccctgaacatcgccagatcctggctgttcctgcggagccaggagtacaagaaataccagacaaacaagacaaccggcaacaccgataagagagccttcgtcgagacctggcagtccttttaccggaagaagcttaaggaggtgtggaaacctgccgtgcggtctggcggatctggcggaggctccaccagccccaagaaaaagagaaaagtctaagctgccttctgcggggcttgccttctggccatgcccttcttctctcccttgcacctgtacctcttggtctttgaataaagcctgagtaggaaggctagcaaaaaaaaaaaaaaaaaaaaaaaaaaaaaaaaaaaaaaaaaaaaaaaaaaaaaaaaaaaaaaaaaaaaaaaaaaaaaaaa

SEQ ID NO: 10069 - RNA, 8787 nt, synthetic construct
  source 1..8787: mol_type = other RNA
aggaaataagagagaaaagaagagtaagaagaaatataagagccaccatggcccctaagaagaagcgtaaagtgagccggatgaaccacgaccaggagttcgacccccctaaggtgtaccctcccgtccccgccgagaagagaaagcccatccgggtcctgagcctgttcgatggcatcgccaccggtctgctggtgctgaaggacctgggcatccaggtggataggtacattgcctccgaggtgtgcgaggactccatcaccgtgggaatggtgcgtcatcagggcaagatcatgtacgtgggcgacgtgcggagcgtgacacagaagcatatccaggagtggggccctttcgacctggtgatcggcggcagcccttgcaatgacctgagcatcgtgaacccagcccggaagggcctgtacgagggaaccggcagactgttcttcgagttttacagactgctgcacgacgcccggcctaaggaaggcgacgaccggcccttcttttggctgttcgagaatgtggtggccatgggagtcagcgacaagcgggatattagccggttcctggagagcaaccccgtgatgatcgatgccaaggaagtgagcgccgcccaccgggccagatacttctggggcaatctgcctggcatgaacagacccctggccagcaccgtgaacgacaagctggagctgcaggagtgcctggagcacggccggatcgccaagttcagcaaggtgagaaccatcaccacccgaagcaacagcatcaaacaaggcaaggaccagcactttcctgtgttcatgaacgagaaggaggacatcctgtggtgtaccgagatggagagagtgttcgggttcccagtccactacacagatgtcagcaacatgtctagactggccagacagagactgctgggaagaagctggtccgtccctgtgatcagacacctgttcgcccctctgaaggagtacttcgcctgcgtgagcagcggcaacagcaacgccaacagccggggccccagcttctctagcggcctggtgccactgtccctgagagggagccacatgggccccatggagatctacaaaaccgtgagcgcctggaagcggcagcctgtgcgcgtgctgagcctgtttcggaatatcgataaagtcctgaaaagcctgggattcctggagagcggctctggctccggcggtggcaccctgaagtacgtggaggatgtgacaaacgtggtcagacgggatgtggagaagtggggccccttcgatctggtgtacggcagcacccaacccctgggcagctcttgtgaccggtgccctggctggtacatgtttcagttccaccggatcctgcagtacgccctgccgagacaggagtcccagcggccattcttttggattttcatggacaacttgctgctgaccgaggatgaccaggaaactaccactcggttcctgcagaccgaagccgtgaccctgcaggacgtgagaggccgggactaccagaacgccatgcgggtgtggtccaacatccctggactgaaaagcaagcacgcacctctgacccctaaagaagaggagtacctgcaggcccaggtgcggagcagaagcaagctggacgcccctaaggtggatctgctggtgaagaattgcctcctgcccctgagagagtacttcaagtatttcagccagaatagtctgcccctgggaggcagcggcggcggcgcccaggagaccgtgaccttcaaggacgtggccgtggacttcacccaggaggagtggggccagctggaccccgtgcagaggaccctgtacagggacgtgatgctggagacctacggccacctgctgagcgtgggcaaccagatcgccaagcccgaggtgatcagcctgctggagcagggcgaggagccctggagcatggacagggtgtaccccccccagaggacctgccccgagtggatgaggggcggcccaagcagcggcgcccctcctcccagcggcggcaggcggcccaagcagcggcgcccctcctcccagcggcggcagcccagccggctccccaacctctaccgaggagggcacctctgagtccgccacccccgagagcggccctggcacctccaccgagcccagcgagggcagcgcacccggcagccctgccggcagccccacctccacagaggagggaaccagcaccgagcccagcgaaggcagcgccccaggcaccagcaccgagcctagtgagcaggagattaaacggatcaacaagatcagaagaagacttgtgaaagacagcaacaccaagaaggccggcaagacaggccccatgaaaaccctgctggttagagtgatgacacccgatctgagagagcggctggaaaacctgagaaagaagcctgaaaatatcccccagcccatcagcaatacatctagagccaacctgaataagctgctgaccgattacaccgaaatgaagaaggcgatcctgcatgtgtactgggaagagttccagaaggaccctgtgggcctgatgagccgggtggcccagcctgccagcaagaagatcgatcagaacaagctgaaacctgagatggacgagaagggcaacctgaccaccgccggctttgcctgctctcagtgtggccagcccctgttcgtgtacaagctggagcaggtgtctgagaagggcaaggcttacaccaactacttcggacggtgcaatgtggccgagcacgaaaagctgatcctgctggcccagctgaagcccgagaaggatagcgacgaagccgtgacatatagcctgggaaagtttgggcagagggccctggatttctacagcattcatgtgaccaaggagtccacccaccccgtgaagcccctggcccagatcgccggaaacagatacgcctccggacctgtgggaaaggccctgagcgacgcatgtatgggcacaatcgcctccttcctgtctaagtaccaggacatcatcatcgaacaccagaaggtggtgaagggcaaccagaagagactggagagcctgcgggagctggccggcaaggaaaacctggaataccctagcgtgaccctgccacctcagcctcacaccaaggagggcgttgatgcctacaacgaagtgatcgcccgggtgcgaatgtgggtgaacctgaacctgtggcagaagctgaagctaagcagagatgatgccaagcctctgctgagactgaagggattcccttcctttcctctggtcgagagacaggccaacgaagtggactggtgggacatggtgtgtaacgtgaagaagctgatcaacgagaaaaaggaggatggcaaggtgttttggcagaatctggctggctacaagagacaggaagccctgagaccatacctgagcagcgaggaagatcggaagaagggaaagaaattcgctcggtaccagctgggcgacctgctgctgcacctggaaaagaagcacggcgaggactggggaaaggtgtacgacgaggcctgggagcggattgacaagaaagtggaaggcctgagcaagcacatcaagctggaagaggaacggagaagcgaggacgcccagagcaaggccgccctgaccgactggctgcgggctaaggccagcttcgtgatcgagggcctgaaggaggccgacaaggacgagttctgcagatgcgagctgaagctgcagaagtggtacggggacctgcggggaaagcccttcgccatcgaagccgagaacagcatcctggacatcagcggcttcagcaagcagtacaactgtgccttcatctggcagaaggacggcgtgaagaagctgaacctgtacctgatcatcaactacttcaagggcggcaagctgcggttcaagaagatcaaacctgaagccttcgaagccaacagattctacaccgtgatcaacaaaaagagcggcgagatcgtgcccatggaggtgaacttcaacttcgacgaccccaacctgatcatcctgcctctggcctttggcaagagacagggcagagaattcatctggaacgacctgctgtccctggaaaccggcagcctgaagctggccaacggaagagtgatcgagaagacactgtacaacagaagaacccggcaggatgagcctgccctgttcgtggccctgaccttcgagcggcgggaggtcctggactcctccaatatcaaaccaatgaacctgatcggcgtggcaagaggcgaaaacatccccgccgtgatcgccctgaccgaccccgagggctgcccactgagccggtttaaggatagcctgggaaacccaacccacatcctgagaatcggcgagagctataaggagaagcagcggaccatccaggccaagaaggaggtggagcagcggagagccggcggctacagccggaagtacgccagcaaagccaagaatctggcagacgatatggtgagaaacaccgctagagatctgctgtactacgccgtgacccaggatgccatgctgatcttcgccaacctgagccggggcttcggccggcagggcaagcggaccttcatggccgagagacagtacacacggatggaggactggctgaccgccaagctggcctacgagggcctgagcaagacctacctgtccaagacactggcccagtacacctccaagacatgcagcaactgtgggtttaccatcaccagcgccgactacgacagggtgctggagaagctgaagaagacagcaacaggctggatgaccacaattaacggcaaggagctgaaggtggagggccagattacctactacaacagatacaagagacagaacgtagtcaaggacctgtccgtcgagctggatagactgagcgaagaatctgtgaacaacgacatctcctcctggacaaagggcagaagcggagaagctctgagcctcctgaagaaaagattctcccatagacccgtgcaggagaagttcgtgtgcctgaactgcggcttcgagacacacgcagccgagcaagccgccctgaacatcgccagatcctggctgttcctgcggagccaggagtacaagaaataccagacaaacaagacaaccggcaacaccgataagagagccttcgtcgagacctggcagtccttttaccggaagaagcttaaggaggtgtggaaacctgccgtgcggtctggcggatctggcggaggctccaccagccccaagaaaaagagaaaagtctaagctgccttctgcggggcttgccttctggccatgcccttcttctctcccttgcacctgtacctcttggtctttgaataaagcctgagtaggaaggctagcaaaaaaaaaaaaaaaaaaaaaaaaaaaaaaaaaaaaaaaaaaaaaaaaaaaaaaaaaaaaaaaaaaaaaaaaaaaaaaaagcccagccggctccccaacctctaccgaggagggcacctctgagtccgccacccccgagagcggccctggcacctccaccgagcccagcgagggcagcgcacccggcagccctgccggcagccccacctccacagaggagggaaccagcaccgagcccagcgaaggcagcgccccaggcaccagcaccgagcctagtgagcaggagattaaacggatcaacaagatcagaagaagacttgtgaaagacagcaacaccaagaaggccggcaagacaggccccatgaaaaccctgctggttagagtgatgacacccgatctgagagagcggctggaaaacctgagaaagaagcctgaaaatatcccccagcccatcagcaatacatctagagccaacctgaataagctgctgaccgattacaccgaaatgaagaaggcgatcctgcatgtgtactgggaagagttccagaaggaccctgtgggcctgatgagccgggtggcccagcctgccagcaagaagatcgatcagaacaagctgaaacctgagatggacgagaagggcaacctgaccaccgccggctttgcctgctctcagtgtggccagcccctgttcgtgtacaagctggagcaggtgtctgagaagggcaaggcttacaccaactacttcggacggtgcaatgtggccgagcacgaaaagctgatcctgctggcccagctgaagcccgagaaggatagcgacgaagccgtgacatatagcctgggaaagtttgggcagagggccctggatttctacagcattcatgtgaccaaggagtccacccaccccgtgaagcccctggcccagatcgccggaaacagatacgcctccggacctgtgggaaaggccctgagcgacgcatgtatgggcacaatcgcctccttcctgtctaagtaccaggacatcatcatcgaacaccagaaggtggtgaagggcaaccagaagagactggagagcctgcgggagctggccggcaaggaaaacctggaataccctagcgtgaccctgccacctcagcctcacaccaaggagggcgttgatgcctacaacgaagtgatcgcccgggtgcgaatgtgggtgaacctgaacctgtggcagaagctgaagctaagcagagatgatgccaagcctctgctgagactgaagggattcccttcctttcctctggtcgagagacaggccaacgaagtggactggtgggacatggtgtgtaacgtgaagaagctgatcaacgagaaaaaggaggatggcaaggtgttttggcagaatctggctggctacaagagacaggaagccctgagaccatacctgagcagcgaggaagatcggaagaagggaaagaaattcgctcggtaccagctgggcgacctgctgctgcacctggaaaagaagcacggcgaggactggggaaaggtgtacgacgaggcctgggagcggattgacaagaaagtggaaggcctgagcaagcacatcaagctggaagaggaacggagaagcgaggacgcccagagcaaggccgccctgaccgactggctgcgggctaaggccagcttcgtgatcgagggcctgaaggaggccgacaaggacgagttctgcagatgcgagctgaagctgcagaagtggtacggggacctgcggggaaagcccttcgccatcgaagccgagaacagcatcctggacatcagcggcttcagcaagcagtacaactgtgccttcatctggcagaaggacggcgtgaagaagctgaacctgtacctgatcatcaactacttcaagggcggcaagctgcggttcaagaagatcaaacctgaagccttcgaagccaacagattctacaccgtgatcaacaaaaagagcggcgagatcgtgcccatggaggtgaacttcaacttcgacgaccccaacctgatcatcctgcctctggcctttggcaagagacagggcagagaattcatctggaacgacctgctgtccctggaaaccggcagcctgaagctggccaacggaagagtgatcgagaagacactgtacaacagaagaacccggcaggatgagcctgccctgttcgtggccctgaccttcgagcggcgggaggtcctggactcctccaatatcaaaccaatgaacctgatcggcgtggcaagaggcgaaaacatccccgccgtgatcgccctgaccgaccccgagggctgcccactgagccggtttaaggatagcctgggaaacccaacccacatcctgagaatcggcgagagctataaggagaagcagcggaccatccaggccaagaaggaggtggagcagcggagagccggcggctacagccggaagtacgccagcaaagccaagaatctggcagacgatatggtgagaaacaccgctagagatctgctgtactacgccgtgacccaggatgccatgctgatcttcgccaacctgagccggggcttcggccggcagggcaagcggaccttcatggccgagagacagtacacacggatggaggactggctgaccgccaagctggcctacgagggcctgagcaagacctacctgtccaagacactggcccagtacacctccaagacatgcagcaactgtgggtttaccatcaccagcgccgactacgacagggtgctggagaagctgaagaagacagcaacaggctggatgaccacaattaacggcaaggagctgaaggtggagggccagattacctactacaacagatacaagagacagaacgtagtcaaggacctgtccgtcgagctggatagactgagcgaagaatctgtgaacaacgacatctcctcctggacaaagggcagaagcggagaagctctgagcctcctgaagaaaagattctcccatagacccgtgcaggagaagttcgtgtgcctgaactgcggcttcgagacacacgcagccgagcaagccgccctgaacatcgccagatcctggctgttcctgcggagccaggagtacaagaaataccagacaaacaagacaaccggcaacaccgataagagagccttcgtcgagacctggcagtccttttaccggaagaagcttaaggaggtgtggaaacctgccgtgcggtctggcggatctggcggaggctccaccagccccaagaaaaagagaaaagtctaagctgccttctgcggggcttgccttctggccatgcccttcttctctcccttgcacctgtacctcttggtctttgaataaagcctgagtaggaaggctagcaaaaaaaaaaaaaaaaaaaaaaaaaaaaaaaaaaaaaaaaaaaaaaaaaaaaaaaaaaaaaaaaaaaaaaaaaaaaaaaa

SEQ ID NO: 10070 - RNA, 8787 nt, synthetic construct
  source 1..8787: mol_type = other RNA
aggaaataagagagaaaagaagagtaagaagaaatataagagccaccatggcccctaagaagaagcgtaaagtgagccggatgaaccacgaccaggagttcgacccccctaaggtgtaccctcccgtccccgccgagaagagaaagcccatccgggtcctgagcctgttcgatggcatcgccaccggtctgctggtgctgaaggacctgggcatccaggtggataggtacattgcctccgaggtgtgcgaggactccatcaccgtgggaatggtgcgtcatcagggcaagatcatgtacgtgggcgacgtgcggagcgtgacacagaagcatatccaggagtggggccctttcgacctggtgatcggcggcagcccttgcaatgacctgagcatcgtgaacccagcccggaagggcctgtacgagggaaccggcagactgttcttcgagttttacagactgctgcacgacgcccggcctaaggaaggcgacgaccggcccttcttttggctgttcgagaatgtggtggccatgggagtcagcgacaagcgggatattagccggttcctggagagcaaccccgtgatgatcgatgccaaggaagtgagcgccgcccaccgggccagatacttctggggcaatctgcctggcatgaacagacccctggccagcaccgtgaacgacaagctggagctgcaggagtgcctggagcacggccggatcgccaagttcagcaaggtgagaaccatcaccacccgaagcaacagcatcaaacaaggcaaggaccagcactttcctgtgttcatgaacgagaaggaggacatcctgtggtgtaccgagatggagagagtgttcgggttcccagtccactacacagatgtcagcaacatgtctagactggccagacagagactgctgggaagaagctggtccgtccctgtgatcagacacctgttcgcccctctgaaggagtacttcgcctgcgtgagcagcggcaacagcaacgccaacagccggggccccagcttctctagcggcctggtgccactgtccctgagagggagccacatgggccccatggagatctacaaaaccgtgagcgcctggaagcggcagcctgtgcgcgtgctgagcctgtttcggaatatcgataaagtcctgaaaagcctgggattcctggagagcggctctggctccggcggtggcaccctgaagtacgtggaggatgtgacaaacgtggtcagacgggatgtggagaagtggggccccttcgatctggtgtacggcagcacccaacccctgggcagctcttgtgaccggtgccctggctggtacatgtttcagttccaccggatcctgcagtacgccctgccgagacaggagtcccagcggccattcttttggattttcatggacaacttgctgctgaccgaggatgaccaggaaactaccactcggttcctgcagaccgaagccgtgaccctgcaggacgtgagaggccgggactaccagaacgccatgcgggtgtggtccaacatccctggactgaaaagcaagcacgcacctctgacccctaaagaagaggagtacctgcaggcccaggtgcggagcagaagcaagctggacgcccctaaggtggatctgctggtgaagaattgcctcctgcccctgagagagtacttcaagtatttcagccagaatagtctgcccctgggaggcagcggcggcggcatggccgccgtgagccccaccaccaggtgccaggagagcgtgaccttcgaggacgtggccgtggtgttcaccgacgaggagtggagccacctggtgcccatccagagggacctgtacaaggaggtgatgctggagaactacaacagcatcgtgagcctgggcctgcccgtgccccagcccgacgtgatcttccagctgaagaggggcgacaagccctgggtggtggacctgcacggcagcgagggcggcccaagcagcggcgcccctcctcccagcggcggcaggcggcccaagcagcggcgcccctcctcccagcggcggcagcccagccggctccccaacctctaccgaggagggcacctctgagtccgccacccccgagagcggccctggcacctccaccgagcccagcgagggcagcgcacccggcagccctgccggcagccccacctccacagaggagggaaccagcaccgagcccagcgaaggcagcgccccaggcaccagcaccgagcctagtgagcaggagattaaacggatcaacaagatcagaagaagacttgtgaaagacagcaacaccaagaaggccggcaagacaggccccatgaaaaccctgctggttagagtgatgacacccgatctgagagagcggctggaaaacctgagaaagaagcctgaaaatatcccccagcccatcagcaatacatctagagccaacctgaataagctgctgaccgattacaccgaaatgaagaaggcgatcctgcatgtgtactgggaagagttccagaaggaccctgtgggcctgatgagccgggtggcccagcctgccagcaagaagatcgatcagaacaagctgaaacctgagatggacgagaagggcaacctgaccaccgccggctttgcctgctctcagtgtggccagcccctgttcgtgtacaagctggagcaggtgtctgagaagggcaaggcttacaccaactacttcggacggtgcaatgtggccgagcacgaaaagctgatcctgctggcccagctgaagcccgagaaggatagcgacgaagccgtgacatatagcctgggaaagtttgggcagagggccctggatttctacagcattcatgtgaccaaggagtccacccaccccgtgaagcccctggcccagatcgccggaaacagatacgcctccggacctgtgggaaaggccctgagcgacgcatgtatgggcacaatcgcctccttcctgtctaagtaccaggacatcatcatcgaacaccagaaggtggtgaagggcaaccagaagagactggagagcctgcgggagctggccggcaaggaaaacctggaataccctagcgtgaccctgccacctcagcctcacaccaaggagggcgttgatgcctacaacgaagtgatcgcccgggtgcgaatgtgggtgaacctgaacctgtggcagaagctgaagctaagcagagatgatgccaagcctctgctgagactgaagggattcccttcctttcctctggtcgagagacaggccaacgaagtggactggtgggacatggtgtgtaacgtgaagaagctgatcaacgagaaaaaggaggatggcaaggtgttttggcagaatctggctggctacaagagacaggaagccctgagaccatacctgagcagcgaggaagatcggaagaagggaaagaaattcgctcggtaccagctgggcgacctgctgctgcacctggaaaagaagcacggcgaggactggggaaaggtgtacgacgaggcctgggagcggattgacaagaaagtggaaggcctgagcaagcacatcaagctggaagaggaacggagaagcgaggacgcccagagcaaggccgccctgaccgactggctgcgggctaaggccagcttcgtgatcgagggcctgaaggaggccgacaaggacgagttctgcagatgcgagctgaagctgcagaagtggtacggggacctgcggggaaagcccttcgccatcgaagccgagaacagcatcctggacatcagcggcttcagcaagcagtacaactgtgccttcatctggcagaaggacggcgtgaagaagctgaacctgtacctgatcatcaactacttcaagggcggcaagctgcggttcaagaagatcaaacctgaagccttcgaagccaacagattctacaccgtgatcaacaaaaagagcggcgagatcgtgcccatggaggtgaacttcaacttcgacgaccccaacctgatcatcctgcctctggcctttggcaagagacagggcagagaattcatctggaacgacctgctgtccctggaaaccggcagcctgaagctggccaacggaagagtgatcgagaagacactgtacaacagaagaacccggcaggatgagcctgccctgttcgtggccctgaccttcgagcggcgggaggtcctggactcctccaatatcaaaccaatgaacctgatcggcgtggcaagaggcgaaaacatccccgccgtgatcgccctgaccgaccccgagggctgcccactgagccggtttaaggatagcctgggaaacccaacccacatcctgagaatcggcgagagctataaggagaagcagcggaccatccaggccaagaaggaggtggagcagcggagagccggcggctacagccggaagtacgccagcaaagccaagaatctggcagacgatatggtgagaaacaccgctagagatctgctgtactacgccgtgacccaggatgccatgctgatcttcgccaacctgagccggggcttcggccggcagggcaagcggaccttcatggccgagagacagtacacacggatggaggactggctgaccgccaagctggcctacgagggcctgagcaagacctacctgtccaagacactggcccagtacacctccaagacatgcagcaactgtgggtttaccatcaccagcgccgactacgacagggtgctggagaagctgaagaagacagcaacaggctggatgaccacaattaacggcaaggagctgaaggtggagggccagattacctactacaacagatacaagagacagaacgtagtcaaggacctgtccgtcgagctggatagactgagcgaagaatctgtgaacaacgacatctcctcctggacaaagggcagaagcggagaagctctgagcctcctgaagaaaagattctcccatagacccgtgcaggagaagttcgtgtgcctgaactgcggcttcgagacacacgcagccgagcaagccgccctgaacatcgccagatcctggctgttcctgcggagccaggagtacaagaaataccagacaaacaagacaaccggcaacaccgataagagagccttcgtcgagacctggcagtccttttaccggaagaagcttaaggaggtgtggaaacctgccgtgcggtctggcggatctggcggaggctccaccagccccaagaaaaagagaaaagtctaagctgccttctgcggggcttgccttctggccatgcccttcttctctcccttgcacctgtacctcttggtctttgaataaagcctgagtaggaaggctagcaaaaaaaaaaaaaaaaaaaaaaaaaaaaaaaaaaaaaaaaaaaaaaaaaaaaaaaaaaaaaaaaaaaaaaaaaaaaaaaagcccagccggctccccaacctctaccgaggagggcacctctgagtccgccacccccgagagcggccctggcacctccaccgagcccagcgagggcagcgcacccggcagccctgccggcagccccacctccacagaggagggaaccagcaccgagcccagcgaaggcagcgccccaggcaccagcaccgagcctagtgagcaggagattaaacggatcaacaagatcagaagaagacttgtgaaagacagcaacaccaagaaggccggcaagacaggccccatgaaaaccctgctggttagagtgatgacacccgatctgagagagcggctggaaaacctgagaaagaagcctgaaaatatcccccagcccatcagcaatacatctagagccaacctgaataagctgctgaccgattacaccgaaatgaagaaggcgatcctgcatgtgtactgggaagagttccagaaggaccctgtgggcctgatgagccgggtggcccagcctgccagcaagaagatcgatcagaacaagctgaaacctgagatggacgagaagggcaacctgaccaccgccggctttgcctgctctcagtgtggccagcccctgttcgtgtacaagctggagcaggtgtctgagaagggcaaggcttacaccaactacttcggacggtgcaatgtggccgagcacgaaaagctgatcctgctggcccagctgaagcccgagaaggatagcgacgaagccgtgacatatagcctgggaaagtttgggcagagggccctggatttctacagcattcatgtgaccaaggagtccacccaccccgtgaagcccctggcccagatcgccggaaacagatacgcctccggacctgtgggaaaggccctgagcgacgcatgtatgggcacaatcgcctccttcctgtctaagtaccaggacatcatcatcgaacaccagaaggtggtgaagggcaaccagaagagactggagagcctgcgggagctggccggcaaggaaaacctggaataccctagcgtgaccctgccacctcagcctcacaccaaggagggcgttgatgcctacaacgaagtgatcgcccgggtgcgaatgtgggtgaacctgaacctgtggcagaagctgaagctaagcagagatgatgccaagcctctgctgagactgaagggattcccttcctttcctctggtcgagagacaggccaacgaagtggactggtgggacatggtgtgtaacgtgaagaagctgatcaacgagaaaaaggaggatggcaaggtgttttggcagaatctggctggctacaagagacaggaagccctgagaccatacctgagcagcgaggaagatcggaagaagggaaagaaattcgctcggtaccagctgggcgacctgctgctgcacctggaaaagaagcacggcgaggactggggaaaggtgtacgacgaggcctgggagcggattgacaagaaagtggaaggcctgagcaagcacatcaagctggaagaggaacggagaagcgaggacgcccagagcaaggccgccctgaccgactggctgcgggctaaggccagcttcgtgatcgagggcctgaaggaggccgacaaggacgagttctgcagatgcgagctgaagctgcagaagtggtacggggacctgcggggaaagcccttcgccatcgaagccgagaacagcatcctggacatcagcggcttcagcaagcagtacaactgtgccttcatctggcagaaggacggcgtgaagaagctgaacctgtacctgatcatcaactacttcaagggcggcaagctgcggttcaagaagatcaaacctgaagccttcgaagccaacagattctacaccgtgatcaacaaaaagagcggcgagatcgtgcccatggaggtgaacttcaacttcgacgaccccaacctgatcatcctgcctctggcctttggcaagagacagggcagagaattcatctggaacgacctgctgtccctggaaaccggcagcctgaagctggccaacggaagagtgatcgagaagacactgtacaacagaagaacccggcaggatgagcctgccctgttcgtggccctgaccttcgagcggcgggaggtcctggactcctccaatatcaaaccaatgaacctgatcggcgtggcaagaggcgaaaacatccccgccgtgatcgccctgaccgaccccgagggctgcccactgagccggtttaaggatagcctgggaaacccaacccacatcctgagaatcggcgagagctataaggagaagcagcggaccatccaggccaagaaggaggtggagcagcggagagccggcggctacagccggaagtacgccagcaaagccaagaatctggcagacgatatggtgagaaacaccgctagagatctgctgtactacgccgtgacccaggatgccatgctgatcttcgccaacctgagccggggcttcggccggcagggcaagcggaccttcatggccgagagacagtacacacggatggaggactggctgaccgccaagctggcctacgagggcctgagcaagacctacctgtccaagacactggcccagtacacctccaagacatgcagcaactgtgggtttaccatcaccagcgccgactacgacagggtgctggagaagctgaagaagacagcaacaggctggatgaccacaattaacggcaaggagctgaaggtggagggccagattacctactacaacagatacaagagacagaacgtagtcaaggacctgtccgtcgagctggatagactgagcgaagaatctgtgaacaacgacatctcctcctggacaaagggcagaagcggagaagctctgagcctcctgaagaaaagattctcccatagacccgtgcaggagaagttcgtgtgcctgaactgcggcttcgagacacacgcagccgagcaagccgccctgaacatcgccagatcctggctgttcctgcggagccaggagtacaagaaataccagacaaacaagacaaccggcaacaccgataagagagccttcgtcgagacctggcagtccttttaccggaagaagcttaaggaggtgtggaaacctgccgtgcggtctggcggatctggcggaggctccaccagccccaagaaaaagagaaaagtctaagctgccttctgcggggcttgccttctggccatgcccttcttctctcccttgcacctgtacctcttggtctttgaataaagcctgagtaggaaggctagcaaaaaaaaaaaaaaaaaaaaaaaaaaaaaaaaaaaaaaaaaaaaaaaaaaaaaaaaaaaaaaaaaaaaaaaaaaaaaaaa

SEQ ID NO: 10071 - RNA, 8787 nt, synthetic construct
  source 1..8787: mol_type = other RNA
aggaaataagagagaaaagaagagtaagaagaaatataagagccaccatggcccctaagaagaagcgtaaagtgagccggatgaaccacgaccaggagttcgacccccctaaggtgtaccctcccgtccccgccgagaagagaaagcccatccgggtcctgagcctgttcgatggcatcgccaccggtctgctggtgctgaaggacctgggcatccaggtggataggtacattgcctccgaggtgtgcgaggactccatcaccgtgggaatggtgcgtcatcagggcaagatcatgtacgtgggcgacgtgcggagcgtgacacagaagcatatccaggagtggggccctttcgacctggtgatcggcggcagcccttgcaatgacctgagcatcgtgaacccagcccggaagggcctgtacgagggaaccggcagactgttcttcgagttttacagactgctgcacgacgcccggcctaaggaaggcgacgaccggcccttcttttggctgttcgagaatgtggtggccatgggagtcagcgacaagcgggatattagccggttcctggagagcaaccccgtgatgatcgatgccaaggaagtgagcgccgcccaccgggccagatacttctggggcaatctgcctggcatgaacagacccctggccagcaccgtgaacgacaagctggagctgcaggagtgcctggagcacggccggatcgccaagttcagcaaggtgagaaccatcaccacccgaagcaacagcatcaaacaaggcaaggaccagcactttcctgtgttcatgaacgagaaggaggacatcctgtggtgtaccgagatggagagagtgttcgggttcccagtccactacacagatgtcagcaacatgtctagactggccagacagagactgctgggaagaagctggtccgtccctgtgatcagacacctgttcgcccctctgaaggagtacttcgcctgcgtgagcagcggcaacagcaacgccaacagccggggccccagcttctctagcggcctggtgccactgtccctgagagggagccacatgggccccatggagatctacaaaaccgtgagcgcctggaagcggcagcctgtgcgcgtgctgagcctgtttcggaatatcgataaagtcctgaaaagcctgggattcctggagagcggctctggctccggcggtggcaccctgaagtacgtggaggatgtgacaaacgtggtcagacgggatgtggagaagtggggccccttcgatctggtgtacggcagcacccaacccctgggcagctcttgtgaccggtgccctggctggtacatgtttcagttccaccggatcctgcagtacgccctgccgagacaggagtcccagcggccattcttttggattttcatggacaacttgctgctgaccgaggatgaccaggaaactaccactcggttcctgcagaccgaagccgtgaccctgcaggacgtgagaggccgggactaccagaacgccatgcgggtgtggtccaacatccctggactgaaaagcaagcacgcacctctgacccctaaagaagaggagtacctgcaggcccaggtgcggagcagaagcaagctggacgcccctaaggtggatctgctggtgaagaattgcctcctgcccctgagagagtacttcaagtatttcagccagaatagtctgcccctgggaggcagcggcggcggcttcgagagcgtggtgttcgaggacgtggccgtggacttcacccccgaggagtgggccctgctggaccccgcccagaggaacctgtacagggacgtgatgctggagaccttcaggaacctggccagcgtgggcgagaactggaagtgccacagcatcgaggaccagcacaagaaccagggcacccacctgaggtggagggtggtggagatccccagcgagaacaacgagagcaaccagtgcggcggcggcccaagcagcggcgcccctcctcccagcggcggcaggcggcccaagcagcggcgcccctcctcccagcggcggcagcccagccggctccccaacctctaccgaggagggcacctctgagtccgccacccccgagagcggccctggcacctccaccgagcccagcgagggcagcgcacccggcagccctgccggcagccccacctccacagaggagggaaccagcaccgagcccagcgaaggcagcgccccaggcaccagcaccgagcctagtgagcaggagattaaacggatcaacaagatcagaagaagacttgtgaaagacagcaacaccaagaaggccggcaagacaggccccatgaaaaccctgctggttagagtgatgacacccgatctgagagagcggctggaaaacctgagaaagaagcctgaaaatatcccccagcccatcagcaatacatctagagccaacctgaataagctgctgaccgattacaccgaaatgaagaaggcgatcctgcatgtgtactgggaagagttccagaaggaccctgtgggcctgatgagccgggtggcccagcctgccagcaagaagatcgatcagaacaagctgaaacctgagatggacgagaagggcaacctgaccaccgccggctttgcctgctctcagtgtggccagcccctgttcgtgtacaagctggagcaggtgtctgagaagggcaaggcttacaccaactacttcggacggtgcaatgtggccgagcacgaaaagctgatcctgctggcccagctgaagcccgagaaggatagcgacgaagccgtgacatatagcctgggaaagtttgggcagagggccctggatttctacagcattcatgtgaccaaggagtccacccaccccgtgaagcccctggcccagatcgccggaaacagatacgcctccggacctgtgggaaaggccctgagcgacgcatgtatgggcacaatcgcctccttcctgtctaagtaccaggacatcatcatcgaacaccagaaggtggtgaagggcaaccagaagagactggagagcctgcgggagctggccggcaaggaaaacctggaataccctagcgtgaccctgccacctcagcctcacaccaaggagggcgttgatgcctacaacgaagtgatcgcccgggtgcgaatgtgggtgaacctgaacctgtggcagaagctgaagctaagcagagatgatgccaagcctctgctgagactgaagggattcccttcctttcctctggtcgagagacaggccaacgaagtggactggtgggacatggtgtgtaacgtgaagaagctgatcaacgagaaaaaggaggatggcaaggtgttttggcagaatctggctggctacaagagacaggaagccctgagaccatacctgagcagcgaggaagatcggaagaagggaaagaaattcgctcggtaccagctgggcgacctgctgctgcacctggaaaagaagcacggcgaggactggggaaaggtgtacgacgaggcctgggagcggattgacaagaaagtggaaggcctgagcaagcacatcaagctggaagaggaacggagaagcgaggacgcccagagcaaggccgccctgaccgactggctgcgggctaaggccagcttcgtgatcgagggcctgaaggaggccgacaaggacgagttctgcagatgcgagctgaagctgcagaagtggtacggggacctgcggggaaagcccttcgccatcgaagccgagaacagcatcctggacatcagcggcttcagcaagcagtacaactgtgccttcatctggcagaaggacggcgtgaagaagctgaacctgtacctgatcatcaactacttcaagggcggcaagctgcggttcaagaagatcaaacctgaagccttcgaagccaacagattctacaccgtgatcaacaaaaagagcggcgagatcgtgcccatggaggtgaacttcaacttcgacgaccccaacctgatcatcctgcctctggcctttggcaagagacagggcagagaattcatctggaacgacctgctgtccctggaaaccggcagcctgaagctggccaacggaagagtgatcgagaagacactgtacaacagaagaacccggcaggatgagcctgccctgttcgtggccctgaccttcgagcggcgggaggtcctggactcctccaatatcaaaccaatgaacctgatcggcgtggcaagaggcgaaaacatccccgccgtgatcgccctgaccgaccccgagggctgcccactgagccggtttaaggatagcctgggaaacccaacccacatcctgagaatcggcgagagctataaggagaagcagcggaccatccaggccaagaaggaggtggagcagcggagagccggcggctacagccggaagtacgccagcaaagccaagaatctggcagacgatatggtgagaaacaccgctagagatctgctgtactacgccgtgacccaggatgccatgctgatcttcgccaacctgagccggggcttcggccggcagggcaagcggaccttcatggccgagagacagtacacacggatggaggactggctgaccgccaagctggcctacgagggcctgagcaagacctacctgtccaagacactggcccagtacacctccaagacatgcagcaactgtgggtttaccatcaccagcgccgactacgacagggtgctggagaagctgaagaagacagcaacaggctggatgaccacaattaacggcaaggagctgaaggtggagggccagattacctactacaacagatacaagagacagaacgtagtcaaggacctgtccgtcgagctggatagactgagcgaagaatctgtgaacaacgacatctcctcctggacaaagggcagaagcggagaagctctgagcctcctgaagaaaagattctcccatagacccgtgcaggagaagttcgtgtgcctgaactgcggcttcgagacacacgcagccgagcaagccgccctgaacatcgccagatcctggctgttcctgcggagccaggagtacaagaaataccagacaaacaagacaaccggcaacaccgataagagagccttcgtcgagacctggcagtccttttaccggaagaagcttaaggaggtgtggaaacctgccgtgcggtctggcggatctggcggaggctccaccagccccaagaaaaagagaaaagtctaagctgccttctgcggggcttgccttctggccatgcccttcttctctcccttgcacctgtacctcttggtctttgaataaagcctgagtaggaaggctagcaaaaaaaaaaaaaaaaaaaaaaaaaaaaaaaaaaaaaaaaaaaaaaaaaaaaaaaaaaaaaaaaaaaaaaaaaaaaaaaagcccagccggctccccaacctctaccgaggagggcacctctgagtccgccacccccgagagcggccctggcacctccaccgagcccagcgagggcagcgcacccggcagccctgccggcagccccacctccacagaggagggaaccagcaccgagcccagcgaaggcagcgccccaggcaccagcaccgagcctagtgagcaggagattaaacggatcaacaagatcagaagaagacttgtgaaagacagcaacaccaagaaggccggcaagacaggccccatgaaaaccctgctggttagagtgatgacacccgatctgagagagcggctggaaaacctgagaaagaagcctgaaaatatcccccagcccatcagcaatacatctagagccaacctgaataagctgctgaccgattacaccgaaatgaagaaggcgatcctgcatgtgtactgggaagagttccagaaggaccctgtgggcctgatgagccgggtggcccagcctgccagcaagaagatcgatcagaacaagctgaaacctgagatggacgagaagggcaacctgaccaccgccggctttgcctgctctcagtgtggccagcccctgttcgtgtacaagctggagcaggtgtctgagaagggcaaggcttacaccaactacttcggacggtgcaatgtggccgagcacgaaaagctgatcctgctggcccagctgaagcccgagaaggatagcgacgaagccgtgacatatagcctgggaaagtttgggcagagggccctggatttctacagcattcatgtgaccaaggagtccacccaccccgtgaagcccctggcccagatcgccggaaacagatacgcctccggacctgtgggaaaggccctgagcgacgcatgtatgggcacaatcgcctccttcctgtctaagtaccaggacatcatcatcgaacaccagaaggtggtgaagggcaaccagaagagactggagagcctgcgggagctggccggcaaggaaaacctggaataccctagcgtgaccctgccacctcagcctcacaccaaggagggcgttgatgcctacaacgaagtgatcgcccgggtgcgaatgtgggtgaacctgaacctgtggcagaagctgaagctaagcagagatgatgccaagcctctgctgagactgaagggattcccttcctttcctctggtcgagagacaggccaacgaagtggactggtgggacatggtgtgtaacgtgaagaagctgatcaacgagaaaaaggaggatggcaaggtgttttggcagaatctggctggctacaagagacaggaagccctgagaccatacctgagcagcgaggaagatcggaagaagggaaagaaattcgctcggtaccagctgggcgacctgctgctgcacctggaaaagaagcacggcgaggactggggaaaggtgtacgacgaggcctgggagcggattgacaagaaagtggaaggcctgagcaagcacatcaagctggaagaggaacggagaagcgaggacgcccagagcaaggccgccctgaccgactggctgcgggctaaggccagcttcgtgatcgagggcctgaaggaggccgacaaggacgagttctgcagatgcgagctgaagctgcagaagtggtacggggacctgcggggaaagcccttcgccatcgaagccgagaacagcatcctggacatcagcggcttcagcaagcagtacaactgtgccttcatctggcagaaggacggcgtgaagaagctgaacctgtacctgatcatcaactacttcaagggcggcaagctgcggttcaagaagatcaaacctgaagccttcgaagccaacagattctacaccgtgatcaacaaaaagagcggcgagatcgtgcccatggaggtgaacttcaacttcgacgaccccaacctgatcatcctgcctctggcctttggcaagagacagggcagagaattcatctggaacgacctgctgtccctggaaaccggcagcctgaagctggccaacggaagagtgatcgagaagacactgtacaacagaagaacccggcaggatgagcctgccctgttcgtggccctgaccttcgagcggcgggaggtcctggactcctccaatatcaaaccaatgaacctgatcggcgtggcaagaggcgaaaacatccccgccgtgatcgccctgaccgaccccgagggctgcccactgagccggtttaaggatagcctgggaaacccaacccacatcctgagaatcggcgagagctataaggagaagcagcggaccatccaggccaagaaggaggtggagcagcggagagccggcggctacagccggaagtacgccagcaaagccaagaatctggcagacgatatggtgagaaacaccgctagagatctgctgtactacgccgtgacccaggatgccatgctgatcttcgccaacctgagccggggcttcggccggcagggcaagcggaccttcatggccgagagacagtacacacggatggaggactggctgaccgccaagctggcctacgagggcctgagcaagacctacctgtccaagacactggcccagtacacctccaagacatgcagcaactgtgggtttaccatcaccagcgccgactacgacagggtgctggagaagctgaagaagacagcaacaggctggatgaccacaattaacggcaaggagctgaaggtggagggccagattacctactacaacagatacaagagacagaacgtagtcaaggacctgtccgtcgagctggatagactgagcgaagaatctgtgaacaacgacatctcctcctggacaaagggcagaagcggagaagctctgagcctcctgaagaaaagattctcccatagacccgtgcaggagaagttcgtgtgcctgaactgcggcttcgagacacacgcagccgagcaagccgccctgaacatcgccagatcctggctgttcctgcggagccaggagtacaagaaataccagacaaacaagacaaccggcaacaccgataagagagccttcgtcgagacctggcagtccttttaccggaagaagcttaaggaggtgtggaaacctgccgtgcggtctggcggatctggcggaggctccaccagccccaagaaaaagagaaaagtctaagctgccttctgcggggcttgccttctggccatgcccttcttctctcccttgcacctgtacctcttggtctttgaataaagcctgagtaggaaggctagcaaaaaaaaaaaaaaaaaaaaaaaaaaaaaaaaaaaaaaaaaaaaaaaaaaaaaaaaaaaaaaaaaaaaaaaaaaaaaaaa

SEQ ID NO: 10072 - RNA, 8787 nt, synthetic construct
  source 1..8787: mol_type = other RNA
aggaaataagagagaaaagaagagtaagaagaaatataagagccaccatggcccctaagaagaagcgtaaagtgagccggatgaaccacgaccaggagttcgacccccctaaggtgtaccctcccgtccccgccgagaagagaaagcccatccgggtcctgagcctgttcgatggcatcgccaccggtctgctggtgctgaaggacctgggcatccaggtggataggtacattgcctccgaggtgtgcgaggactccatcaccgtgggaatggtgcgtcatcagggcaagatcatgtacgtgggcgacgtgcggagcgtgacacagaagcatatccaggagtggggccctttcgacctggtgatcggcggcagcccttgcaatgacctgagcatcgtgaacccagcccggaagggcctgtacgagggaaccggcagactgttcttcgagttttacagactgctgcacgacgcccggcctaaggaaggcgacgaccggcccttcttttggctgttcgagaatgtggtggccatgggagtcagcgacaagcgggatattagccggttcctggagagcaaccccgtgatgatcgatgccaaggaagtgagcgccgcccaccgggccagatacttctggggcaatctgcctggcatgaacagacccctggccagcaccgtgaacgacaagctggagctgcaggagtgcctggagcacggccggatcgccaagttcagcaaggtgagaaccatcaccacccgaagcaacagcatcaaacaaggcaaggaccagcactttcctgtgttcatgaacgagaaggaggacatcctgtggtgtaccgagatggagagagtgttcgggttcccagtccactacacagatgtcagcaacatgtctagactggccagacagagactgctgggaagaagctggtccgtccctgtgatcagacacctgttcgcccctctgaaggagtacttcgcctgcgtgagcagcggcaacagcaacgccaacagccggggccccagcttctctagcggcctggtgccactgtccctgagagggagccacatgggccccatggagatctacaaaaccgtgagcgcctggaagcggcagcctgtgcgcgtgctgagcctgtttcggaatatcgataaagtcctgaaaagcctgggattcctggagagcggctctggctccggcggtggcaccctgaagtacgtggaggatgtgacaaacgtggtcagacgggatgtggagaagtggggccccttcgatctggtgtacggcagcacccaacccctgggcagctcttgtgaccggtgccctggctggtacatgtttcagttccaccggatcctgcagtacgccctgccgagacaggagtcccagcggccattcttttggattttcatggacaacttgctgctgaccgaggatgaccaggaaactaccactcggttcctgcagaccgaagccgtgaccctgcaggacgtgagaggccgggactaccagaacgccatgcgggtgtggtccaacatccctggactgaaaagcaagcacgcacctctgacccctaaagaagaggagtacctgcaggcccaggtgcggagcagaagcaagctggacgcccctaaggtggatctgctggtgaagaattgcctcctgcccctgagagagtacttcaagtatttcagccagaatagtctgcccctgggaggcagcggcggcggcaggcccagggccctgaagttcgccgacgtggccgtgtacttcagccccgaggagtggggctgcctgaggcccgcccagaggctgctgtacagggaggtgatgagggagacctacggcctgctgggcgccctgggctgcgccggccccacccccgccctgatcagctggctggagaggaacaccgacgactgggagcccgccgccctggacccccaggagtacaggaggtgggccaccttccagggcggcccaagcagcggcgcccctcctcccagcggcggcaggcggcccaagcagcggcgcccctcctcccagcggcggcagcccagccggctccccaacctctaccgaggagggcacctctgagtccgccacccccgagagcggccctggcacctccaccgagcccagcgagggcagcgcacccggcagccctgccggcagccccacctccacagaggagggaaccagcaccgagcccagcgaaggcagcgccccaggcaccagcaccgagcctagtgagcaggagattaaacggatcaacaagatcagaagaagacttgtgaaagacagcaacaccaagaaggccggcaagacaggccccatgaaaaccctgctggttagagtgatgacacccgatctgagagagcggctggaaaacctgagaaagaagcctgaaaatatcccccagcccatcagcaatacatctagagccaacctgaataagctgctgaccgattacaccgaaatgaagaaggcgatcctgcatgtgtactgggaagagttccagaaggaccctgtgggcctgatgagccgggtggcccagcctgccagcaagaagatcgatcagaacaagctgaaacctgagatggacgagaagggcaacctgaccaccgccggctttgcctgctctcagtgtggccagcccctgttcgtgtacaagctggagcaggtgtctgagaagggcaaggcttacaccaactacttcggacggtgcaatgtggccgagcacgaaaagctgatcctgctggcccagctgaagcccgagaaggatagcgacgaagccgtgacatatagcctgggaaagtttgggcagagggccctggatttctacagcattcatgtgaccaaggagtccacccaccccgtgaagcccctggcccagatcgccggaaacagatacgcctccggacctgtgggaaaggccctgagcgacgcatgtatgggcacaatcgcctccttcctgtctaagtaccaggacatcatcatcgaacaccagaaggtggtgaagggcaaccagaagagactggagagcctgcgggagctggccggcaaggaaaacctggaataccctagcgtgaccctgccacctcagcctcacaccaaggagggcgttgatgcctacaacgaagtgatcgcccgggtgcgaatgtgggtgaacctgaacctgtggcagaagctgaagctaagcagagatgatgccaagcctctgctgagactgaagggattcccttcctttcctctggtcgagagacaggccaacgaagtggactggtgggacatggtgtgtaacgtgaagaagctgatcaacgagaaaaaggaggatggcaaggtgttttggcagaatctggctggctacaagagacaggaagccctgagaccatacctgagcagcgaggaagatcggaagaagggaaagaaattcgctcggtaccagctgggcgacctgctgctgcacctggaaaagaagcacggcgaggactggggaaaggtgtacgacgaggcctgggagcggattgacaagaaagtggaaggcctgagcaagcacatcaagctggaagaggaacggagaagcgaggacgcccagagcaaggccgccctgaccgactggctgcgggctaaggccagcttcgtgatcgagggcctgaaggaggccgacaaggacgagttctgcagatgcgagctgaagctgcagaagtggtacggggacctgcggggaaagcccttcgccatcgaagccgagaacagcatcctggacatcagcggcttcagcaagcagtacaactgtgccttcatctggcagaaggacggcgtgaagaagctgaacctgtacctgatcatcaactacttcaagggcggcaagctgcggttcaagaagatcaaacctgaagccttcgaagccaacagattctacaccgtgatcaacaaaaagagcggcgagatcgtgcccatggaggtgaacttcaacttcgacgaccccaacctgatcatcctgcctctggcctttggcaagagacagggcagagaattcatctggaacgacctgctgtccctggaaaccggcagcctgaagctggccaacggaagagtgatcgagaagacactgtacaacagaagaacccggcaggatgagcctgccctgttcgtggccctgaccttcgagcggcgggaggtcctggactcctccaatatcaaaccaatgaacctgatcggcgtggcaagaggcgaaaacatccccgccgtgatcgccctgaccgaccccgagggctgcccactgagccggtttaaggatagcctgggaaacccaacccacatcctgagaatcggcgagagctataaggagaagcagcggaccatccaggccaagaaggaggtggagcagcggagagccggcggctacagccggaagtacgccagcaaagccaagaatctggcagacgatatggtgagaaacaccgctagagatctgctgtactacgccgtgacccaggatgccatgctgatcttcgccaacctgagccggggcttcggccggcagggcaagcggaccttcatggccgagagacagtacacacggatggaggactggctgaccgccaagctggcctacgagggcctgagcaagacctacctgtccaagacactggcccagtacacctccaagacatgcagcaactgtgggtttaccatcaccagcgccgactacgacagggtgctggagaagctgaagaagacagcaacaggctggatgaccacaattaacggcaaggagctgaaggtggagggccagattacctactacaacagatacaagagacagaacgtagtcaaggacctgtccgtcgagctggatagactgagcgaagaatctgtgaacaacgacatctcctcctggacaaagggcagaagcggagaagctctgagcctcctgaagaaaagattctcccatagacccgtgcaggagaagttcgtgtgcctgaactgcggcttcgagacacacgcagccgagcaagccgccctgaacatcgccagatcctggctgttcctgcggagccaggagtacaagaaataccagacaaacaagacaaccggcaacaccgataagagagccttcgtcgagacctggcagtccttttaccggaagaagcttaaggaggtgtggaaacctgccgtgcggtctggcggatctggcggaggctccaccagccccaagaaaaagagaaaagtctaagctgccttctgcggggcttgccttctggccatgcccttcttctctcccttgcacctgtacctcttggtctttgaataaagcctgagtaggaaggctagcaaaaaaaaaaaaaaaaaaaaaaaaaaaaaaaaaaaaaaaaaaaaaaaaaaaaaaaaaaaaaaaaaaaaaaaaaaaaaaaagcccagccggctccccaacctctaccgaggagggcacctctgagtccgccacccccgagagcggccctggcacctccaccgagcccagcgagggcagcgcacccggcagccctgccggcagccccacctccacagaggagggaaccagcaccgagcccagcgaaggcagcgccccaggcaccagcaccgagcctagtgagcaggagattaaacggatcaacaagatcagaagaagacttgtgaaagacagcaacaccaagaaggccggcaagacaggccccatgaaaaccctgctggttagagtgatgacacccgatctgagagagcggctggaaaacctgagaaagaagcctgaaaatatcccccagcccatcagcaatacatctagagccaacctgaataagctgctgaccgattacaccgaaatgaagaaggcgatcctgcatgtgtactgggaagagttccagaaggaccctgtgggcctgatgagccgggtggcccagcctgccagcaagaagatcgatcagaacaagctgaaacctgagatggacgagaagggcaacctgaccaccgccggctttgcctgctctcagtgtggccagcccctgttcgtgtacaagctggagcaggtgtctgagaagggcaaggcttacaccaactacttcggacggtgcaatgtggccgagcacgaaaagctgatcctgctggcccagctgaagcccgagaaggatagcgacgaagccgtgacatatagcctgggaaagtttgggcagagggccctggatttctacagcattcatgtgaccaaggagtccacccaccccgtgaagcccctggcccagatcgccggaaacagatacgcctccggacctgtgggaaaggccctgagcgacgcatgtatgggcacaatcgcctccttcctgtctaagtaccaggacatcatcatcgaacaccagaaggtggtgaagggcaaccagaagagactggagagcctgcgggagctggccggcaaggaaaacctggaataccctagcgtgaccctgccacctcagcctcacaccaaggagggcgttgatgcctacaacgaagtgatcgcccgggtgcgaatgtgggtgaacctgaacctgtggcagaagctgaagctaagcagagatgatgccaagcctctgctgagactgaagggattcccttcctttcctctggtcgagagacaggccaacgaagtggactggtgggacatggtgtgtaacgtgaagaagctgatcaacgagaaaaaggaggatggcaaggtgttttggcagaatctggctggctacaagagacaggaagccctgagaccatacctgagcagcgaggaagatcggaagaagggaaagaaattcgctcggtaccagctgggcgacctgctgctgcacctggaaaagaagcacggcgaggactggggaaaggtgtacgacgaggcctgggagcggattgacaagaaagtggaaggcctgagcaagcacatcaagctggaagaggaacggagaagcgaggacgcccagagcaaggccgccctgaccgactggctgcgggctaaggccagcttcgtgatcgagggcctgaaggaggccgacaaggacgagttctgcagatgcgagctgaagctgcagaagtggtacggggacctgcggggaaagcccttcgccatcgaagccgagaacagcatcctggacatcagcggcttcagcaagcagtacaactgtgccttcatctggcagaaggacggcgtgaagaagctgaacctgtacctgatcatcaactacttcaagggcggcaagctgcggttcaagaagatcaaacctgaagccttcgaagccaacagattctacaccgtgatcaacaaaaagagcggcgagatcgtgcccatggaggtgaacttcaacttcgacgaccccaacctgatcatcctgcctctggcctttggcaagagacagggcagagaattcatctggaacgacctgctgtccctggaaaccggcagcctgaagctggccaacggaagagtgatcgagaagacactgtacaacagaagaacccggcaggatgagcctgccctgttcgtggccctgaccttcgagcggcgggaggtcctggactcctccaatatcaaaccaatgaacctgatcggcgtggcaagaggcgaaaacatccccgccgtgatcgccctgaccgaccccgagggctgcccactgagccggtttaaggatagcctgggaaacccaacccacatcctgagaatcggcgagagctataaggagaagcagcggaccatccaggccaagaaggaggtggagcagcggagagccggcggctacagccggaagtacgccagcaaagccaagaatctggcagacgatatggtgagaaacaccgctagagatctgctgtactacgccgtgacccaggatgccatgctgatcttcgccaacctgagccggggcttcggccggcagggcaagcggaccttcatggccgagagacagtacacacggatggaggactggctgaccgccaagctggcctacgagggcctgagcaagacctacctgtccaagacactggcccagtacacctccaagacatgcagcaactgtgggtttaccatcaccagcgccgactacgacagggtgctggagaagctgaagaagacagcaacaggctggatgaccacaattaacggcaaggagctgaaggtggagggccagattacctactacaacagatacaagagacagaacgtagtcaaggacctgtccgtcgagctggatagactgagcgaagaatctgtgaacaacgacatctcctcctggacaaagggcagaagcggagaagctctgagcctcctgaagaaaagattctcccatagacccgtgcaggagaagttcgtgtgcctgaactgcggcttcgagacacacgcagccgagcaagccgccctgaacatcgccagatcctggctgttcctgcggagccaggagtacaagaaataccagacaaacaagacaaccggcaacaccgataagagagccttcgtcgagacctggcagtccttttaccggaagaagcttaaggaggtgtggaaacctgccgtgcggtctggcggatctggcggaggctccaccagccccaagaaaaagagaaaagtctaagctgccttctgcggggcttgccttctggccatgcccttcttctctcccttgcacctgtacctcttggtctttgaataaagcctgagtaggaaggctagcaaaaaaaaaaaaaaaaaaaaaaaaaaaaaaaaaaaaaaaaaaaaaaaaaaaaaaaaaaaaaaaaaaaaaaaaaaaaaaaa

SEQ ID NO: 10073 - RNA, 8787 nt, synthetic construct
  source 1..8787: mol_type = other RNA
aggaaataagagagaaaagaagagtaagaagaaatataagagccaccatggcccctaagaagaagcgtaaagtgagccggatgaaccacgaccaggagttcgacccccctaaggtgtaccctcccgtccccgccgagaagagaaagcccatccgggtcctgagcctgttcgatggcatcgccaccggtctgctggtgctgaaggacctgggcatccaggtggataggtacattgcctccgaggtgtgcgaggactccatcaccgtgggaatggtgcgtcatcagggcaagatcatgtacgtgggcgacgtgcggagcgtgacacagaagcatatccaggagtggggccctttcgacctggtgatcggcggcagcccttgcaatgacctgagcatcgtgaacccagcccggaagggcctgtacgagggaaccggcagactgttcttcgagttttacagactgctgcacgacgcccggcctaaggaaggcgacgaccggcccttcttttggctgttcgagaatgtggtggccatgggagtcagcgacaagcgggatattagccggttcctggagagcaaccccgtgatgatcgatgccaaggaagtgagcgccgcccaccgggccagatacttctggggcaatctgcctggcatgaacagacccctggccagcaccgtgaacgacaagctggagctgcaggagtgcctggagcacggccggatcgccaagttcagcaaggtgagaaccatcaccacccgaagcaacagcatcaaacaaggcaaggaccagcactttcctgtgttcatgaacgagaaggaggacatcctgtggtgtaccgagatggagagagtgttcgggttcccagtccactacacagatgtcagcaacatgtctagactggccagacagagactgctgggaagaagctggtccgtccctgtgatcagacacctgttcgcccctctgaaggagtacttcgcctgcgtgagcagcggcaacagcaacgccaacagccggggccccagcttctctagcggcctggtgccactgtccctgagagggagccacatgggccccatggagatctacaaaaccgtgagcgcctggaagcggcagcctgtgcgcgtgctgagcctgtttcggaatatcgataaagtcctgaaaagcctgggattcctggagagcggctctggctccggcggtggcaccctgaagtacgtggaggatgtgacaaacgtggtcagacgggatgtggagaagtggggccccttcgatctggtgtacggcagcacccaacccctgggcagctcttgtgaccggtgccctggctggtacatgtttcagttccaccggatcctgcagtacgccctgccgagacaggagtcccagcggccattcttttggattttcatggacaacttgctgctgaccgaggatgaccaggaaactaccactcggttcctgcagaccgaagccgtgaccctgcaggacgtgagaggccgggactaccagaacgccatgcgggtgtggtccaacatccctggactgaaaagcaagcacgcacctctgacccctaaagaagaggagtacctgcaggcccaggtgcggagcagaagcaagctggacgcccctaaggtggatctgctggtgaagaattgcctcctgcccctgagagagtacttcaagtatttcagccagaatagtctgcccctgggaggcagcggcggcggcatccacctgaccgcctggccccagaagagcgtgaccttcgaggacgtggccgtgtacttcacccaggccgagtgggacggcctgagccccgcccagaggaccctgtacagggacgtgatgctggagaactacggcaacgtggccagcctgggcttccccctgctgaagcccgccgtgatcagccagctggagggcggcggcgacctgggcggccccagccccctggccgccggcaccggcctgggcggcccaagcagcggcgcccctcctcccagcggcggcaggcggcccaagcagcggcgcccctcctcccagcggcggcagcccagccggctccccaacctctaccgaggagggcacctctgagtccgccacccccgagagcggccctggcacctccaccgagcccagcgagggcagcgcacccggcagccctgccggcagccccacctccacagaggagggaaccagcaccgagcccagcgaaggcagcgccccaggcaccagcaccgagcctagtgagcaggagattaaacggatcaacaagatcagaagaagacttgtgaaagacagcaacaccaagaaggccggcaagacaggccccatgaaaaccctgctggttagagtgatgacacccgatctgagagagcggctggaaaacctgagaaagaagcctgaaaatatcccccagcccatcagcaatacatctagagccaacctgaataagctgctgaccgattacaccgaaatgaagaaggcgatcctgcatgtgtactgggaagagttccagaaggaccctgtgggcctgatgagccgggtggcccagcctgccagcaagaagatcgatcagaacaagctgaaacctgagatggacgagaagggcaacctgaccaccgccggctttgcctgctctcagtgtggccagcccctgttcgtgtacaagctggagcaggtgtctgagaagggcaaggcttacaccaactacttcggacggtgcaatgtggccgagcacgaaaagctgatcctgctggcccagctgaagcccgagaaggatagcgacgaagccgtgacatatagcctgggaaagtttgggcagagggccctggatttctacagcattcatgtgaccaaggagtccacccaccccgtgaagcccctggcccagatcgccggaaacagatacgcctccggacctgtgggaaaggccctgagcgacgcatgtatgggcacaatcgcctccttcctgtctaagtaccaggacatcatcatcgaacaccagaaggtggtgaagggcaaccagaagagactggagagcctgcgggagctggccggcaaggaaaacctggaataccctagcgtgaccctgccacctcagcctcacaccaaggagggcgttgatgcctacaacgaagtgatcgcccgggtgcgaatgtgggtgaacctgaacctgtggcagaagctgaagctaagcagagatgatgccaagcctctgctgagactgaagggattcccttcctttcctctggtcgagagacaggccaacgaagtggactggtgggacatggtgtgtaacgtgaagaagctgatcaacgagaaaaaggaggatggcaaggtgttttggcagaatctggctggctacaagagacaggaagccctgagaccatacctgagcagcgaggaagatcggaagaagggaaagaaattcgctcggtaccagctgggcgacctgctgctgcacctggaaaagaagcacggcgaggactggggaaaggtgtacgacgaggcctgggagcggattgacaagaaagtggaaggcctgagcaagcacatcaagctggaagaggaacggagaagcgaggacgcccagagcaaggccgccctgaccgactggctgcgggctaaggccagcttcgtgatcgagggcctgaaggaggccgacaaggacgagttctgcagatgcgagctgaagctgcagaagtggtacggggacctgcggggaaagcccttcgccatcgaagccgagaacagcatcctggacatcagcggcttcagcaagcagtacaactgtgccttcatctggcagaaggacggcgtgaagaagctgaacctgtacctgatcatcaactacttcaagggcggcaagctgcggttcaagaagatcaaacctgaagccttcgaagccaacagattctacaccgtgatcaacaaaaagagcggcgagatcgtgcccatggaggtgaacttcaacttcgacgaccccaacctgatcatcctgcctctggcctttggcaagagacagggcagagaattcatctggaacgacctgctgtccctggaaaccggcagcctgaagctggccaacggaagagtgatcgagaagacactgtacaacagaagaacccggcaggatgagcctgccctgttcgtggccctgaccttcgagcggcgggaggtcctggactcctccaatatcaaaccaatgaacctgatcggcgtggcaagaggcgaaaacatccccgccgtgatcgccctgaccgaccccgagggctgcccactgagccggtttaaggatagcctgggaaacccaacccacatcctgagaatcggcgagagctataaggagaagcagcggaccatccaggccaagaaggaggtggagcagcggagagccggcggctacagccggaagtacgccagcaaagccaagaatctggcagacgatatggtgagaaacaccgctagagatctgctgtactacgccgtgacccaggatgccatgctgatcttcgccaacctgagccggggcttcggccggcagggcaagcggaccttcatggccgagagacagtacacacggatggaggactggctgaccgccaagctggcctacgagggcctgagcaagacctacctgtccaagacactggcccagtacacctccaagacatgcagcaactgtgggtttaccatcaccagcgccgactacgacagggtgctggagaagctgaagaagacagcaacaggctggatgaccacaattaacggcaaggagctgaaggtggagggccagattacctactacaacagatacaagagacagaacgtagtcaaggacctgtccgtcgagctggatagactgagcgaagaatctgtgaacaacgacatctcctcctggacaaagggcagaagcggagaagctctgagcctcctgaagaaaagattctcccatagacccgtgcaggagaagttcgtgtgcctgaactgcggcttcgagacacacgcagccgagcaagccgccctgaacatcgccagatcctggctgttcctgcggagccaggagtacaagaaataccagacaaacaagacaaccggcaacaccgataagagagccttcgtcgagacctggcagtccttttaccggaagaagcttaaggaggtgtggaaacctgccgtgcggtctggcggatctggcggaggctccaccagccccaagaaaaagagaaaagtctaagctgccttctgcggggcttgccttctggccatgcccttcttctctcccttgcacctgtacctcttggtctttgaataaagcctgagtaggaaggctagcaaaaaaaaaaaaaaaaaaaaaaaaaaaaaaaaaaaaaaaaaaaaaaaaaaaaaaaaaaaaaaaaaaaaaaaaaaaaaaaagcccagccggctccccaacctctaccgaggagggcacctctgagtccgccacccccgagagcggccctggcacctccaccgagcccagcgagggcagcgcacccggcagccctgccggcagccccacctccacagaggagggaaccagcaccgagcccagcgaaggcagcgccccaggcaccagcaccgagcctagtgagcaggagattaaacggatcaacaagatcagaagaagacttgtgaaagacagcaacaccaagaaggccggcaagacaggccccatgaaaaccctgctggttagagtgatgacacccgatctgagagagcggctggaaaacctgagaaagaagcctgaaaatatcccccagcccatcagcaatacatctagagccaacctgaataagctgctgaccgattacaccgaaatgaagaaggcgatcctgcatgtgtactgggaagagttccagaaggaccctgtgggcctgatgagccgggtggcccagcctgccagcaagaagatcgatcagaacaagctgaaacctgagatggacgagaagggcaacctgaccaccgccggctttgcctgctctcagtgtggccagcccctgttcgtgtacaagctggagcaggtgtctgagaagggcaaggcttacaccaactacttcggacggtgcaatgtggccgagcacgaaaagctgatcctgctggcccagctgaagcccgagaaggatagcgacgaagccgtgacatatagcctgggaaagtttgggcagagggccctggatttctacagcattcatgtgaccaaggagtccacccaccccgtgaagcccctggcccagatcgccggaaacagatacgcctccggacctgtgggaaaggccctgagcgacgcatgtatgggcacaatcgcctccttcctgtctaagtaccaggacatcatcatcgaacaccagaaggtggtgaagggcaaccagaagagactggagagcctgcgggagctggccggcaaggaaaacctggaataccctagcgtgaccctgccacctcagcctcacaccaaggagggcgttgatgcctacaacgaagtgatcgcccgggtgcgaatgtgggtgaacctgaacctgtggcagaagctgaagctaagcagagatgatgccaagcctctgctgagactgaagggattcccttcctttcctctggtcgagagacaggccaacgaagtggactggtgggacatggtgtgtaacgtgaagaagctgatcaacgagaaaaaggaggatggcaaggtgttttggcagaatctggctggctacaagagacaggaagccctgagaccatacctgagcagcgaggaagatcggaagaagggaaagaaattcgctcggtaccagctgggcgacctgctgctgcacctggaaaagaagcacggcgaggactggggaaaggtgtacgacgaggcctgggagcggattgacaagaaagtggaaggcctgagcaagcacatcaagctggaagaggaacggagaagcgaggacgcccagagcaaggccgccctgaccgactggctgcgggctaaggccagcttcgtgatcgagggcctgaaggaggccgacaaggacgagttctgcagatgcgagctgaagctgcagaagtggtacggggacctgcggggaaagcccttcgccatcgaagccgagaacagcatcctggacatcagcggcttcagcaagcagtacaactgtgccttcatctggcagaaggacggcgtgaagaagctgaacctgtacctgatcatcaactacttcaagggcggcaagctgcggttcaagaagatcaaacctgaagccttcgaagccaacagattctacaccgtgatcaacaaaaagagcggcgagatcgtgcccatggaggtgaacttcaacttcgacgaccccaacctgatcatcctgcctctggcctttggcaagagacagggcagagaattcatctggaacgacctgctgtccctggaaaccggcagcctgaagctggccaacggaagagtgatcgagaagacactgtacaacagaagaacccggcaggatgagcctgccctgttcgtggccctgaccttcgagcggcgggaggtcctggactcctccaatatcaaaccaatgaacctgatcggcgtggcaagaggcgaaaacatccccgccgtgatcgccctgaccgaccccgagggctgcccactgagccggtttaaggatagcctgggaaacccaacccacatcctgagaatcggcgagagctataaggagaagcagcggaccatccaggccaagaaggaggtggagcagcggagagccggcggctacagccggaagtacgccagcaaagccaagaatctggcagacgatatggtgagaaacaccgctagagatctgctgtactacgccgtgacccaggatgccatgctgatcttcgccaacctgagccggggcttcggccggcagggcaagcggaccttcatggccgagagacagtacacacggatggaggactggctgaccgccaagctggcctacgagggcctgagcaagacctacctgtccaagacactggcccagtacacctccaagacatgcagcaactgtgggtttaccatcaccagcgccgactacgacagggtgctggagaagctgaagaagacagcaacaggctggatgaccacaattaacggcaaggagctgaaggtggagggccagattacctactacaacagatacaagagacagaacgtagtcaaggacctgtccgtcgagctggatagactgagcgaagaatctgtgaacaacgacatctcctcctggacaaagggcagaagcggagaagctctgagcctcctgaagaaaagattctcccatagacccgtgcaggagaagttcgtgtgcctgaactgcggcttcgagacacacgcagccgagcaagccgccctgaacatcgccagatcctggctgttcctgcggagccaggagtacaagaaataccagacaaacaagacaaccggcaacaccgataagagagccttcgtcgagacctggcagtccttttaccggaagaagcttaaggaggtgtggaaacctgccgtgcggtctggcggatctggcggaggctccaccagccccaagaaaaagagaaaagtctaagctgccttctgcggggcttgccttctggccatgcccttcttctctcccttgcacctgtacctcttggtctttgaataaagcctgagtaggaaggctagcaaaaaaaaaaaaaaaaaaaaaaaaaaaaaaaaaaaaaaaaaaaaaaaaaaaaaaaaaaaaaaaaaaaaaaaaaaaaaaaa

SEQ ID NO: 10074 - RNA, 8787 nt, synthetic construct
  source 1..8787: mol_type = other RNA
aggaaataagagagaaaagaagagtaagaagaaatataagagccaccatggcccctaagaagaagcgtaaagtgagccggatgaaccacgaccaggagttcgacccccctaaggtgtaccctcccgtccccgccgagaagagaaagcccatccgggtcctgagcctgttcgatggcatcgccaccggtctgctggtgctgaaggacctgggcatccaggtggataggtacattgcctccgaggtgtgcgaggactccatcaccgtgggaatggtgcgtcatcagggcaagatcatgtacgtgggcgacgtgcggagcgtgacacagaagcatatccaggagtggggccctttcgacctggtgatcggcggcagcccttgcaatgacctgagcatcgtgaacccagcccggaagggcctgtacgagggaaccggcagactgttcttcgagttttacagactgctgcacgacgcccggcctaaggaaggcgacgaccggcccttcttttggctgttcgagaatgtggtggccatgggagtcagcgacaagcgggatattagccggttcctggagagcaaccccgtgatgatcgatgccaaggaagtgagcgccgcccaccgggccagatacttctggggcaatctgcctggcatgaacagacccctggccagcaccgtgaacgacaagctggagctgcaggagtgcctggagcacggccggatcgccaagttcagcaaggtgagaaccatcaccacccgaagcaacagcatcaaacaaggcaaggaccagcactttcctgtgttcatgaacgagaaggaggacatcctgtggtgtaccgagatggagagagtgttcgggttcccagtccactacacagatgtcagcaacatgtctagactggccagacagagactgctgggaagaagctggtccgtccctgtgatcagacacctgttcgcccctctgaaggagtacttcgcctgcgtgagcagcggcaacagcaacgccaacagccggggccccagcttctctagcggcctggtgccactgtccctgagagggagccacatgggccccatggagatctacaaaaccgtgagcgcctggaagcggcagcctgtgcgcgtgctgagcctgtttcggaatatcgataaagtcctgaaaagcctgggattcctggagagcggctctggctccggcggtggcaccctgaagtacgtggaggatgtgacaaacgtggtcagacgggatgtggagaagtggggccccttcgatctggtgtacggcagcacccaacccctgggcagctcttgtgaccggtgccctggctggtacatgtttcagttccaccggatcctgcagtacgccctgccgagacaggagtcccagcggccattcttttggattttcatggacaacttgctgctgaccgaggatgaccaggaaactaccactcggttcctgcagaccgaagccgtgaccctgcaggacgtgagaggccgggactaccagaacgccatgcgggtgtggtccaacatccctggactgaaaagcaagcacgcacctctgacccctaaagaagaggagtacctgcaggcccaggtgcggagcagaagcaagctggacgcccctaaggtggatctgctggtgaagaattgcctcctgcccctgagagagtacttcaagtatttcagccagaatagtctgcccctgggaggcagcggcggcggcgcccaggtgctggtgaccttccaggacgtggccgtggacttcacccaggaggagtggaggctgctggaccccggccagaaggagctgtacaaggaggtgatgctggagaacgccgagaacatgctgttcctgggcctgcccgtgcccagggaggactggttcttccacttccacgagggcggcgacccctggatgctggagggcaagggccccagcatcagcaggctggacgaggagaggcacggcggcccaagcagcggcgcccctcctcccagcggcggcaggcggcccaagcagcggcgcccctcctcccagcggcggcagcccagccggctccccaacctctaccgaggagggcacctctgagtccgccacccccgagagcggccctggcacctccaccgagcccagcgagggcagcgcacccggcagccctgccggcagccccacctccacagaggagggaaccagcaccgagcccagcgaaggcagcgccccaggcaccagcaccgagcctagtgagcaggagattaaacggatcaacaagatcagaagaagacttgtgaaagacagcaacaccaagaaggccggcaagacaggccccatgaaaaccctgctggttagagtgatgacacccgatctgagagagcggctggaaaacctgagaaagaagcctgaaaatatcccccagcccatcagcaatacatctagagccaacctgaataagctgctgaccgattacaccgaaatgaagaaggcgatcctgcatgtgtactgggaagagttccagaaggaccctgtgggcctgatgagccgggtggcccagcctgccagcaagaagatcgatcagaacaagctgaaacctgagatggacgagaagggcaacctgaccaccgccggctttgcctgctctcagtgtggccagcccctgttcgtgtacaagctggagcaggtgtctgagaagggcaaggcttacaccaactacttcggacggtgcaatgtggccgagcacgaaaagctgatcctgctggcccagctgaagcccgagaaggatagcgacgaagccgtgacatatagcctgggaaagtttgggcagagggccctggatttctacagcattcatgtgaccaaggagtccacccaccccgtgaagcccctggcccagatcgccggaaacagatacgcctccggacctgtgggaaaggccctgagcgacgcatgtatgggcacaatcgcctccttcctgtctaagtaccaggacatcatcatcgaacaccagaaggtggtgaagggcaaccagaagagactggagagcctgcgggagctggccggcaaggaaaacctggaataccctagcgtgaccctgccacctcagcctcacaccaaggagggcgttgatgcctacaacgaagtgatcgcccgggtgcgaatgtgggtgaacctgaacctgtggcagaagctgaagctaagcagagatgatgccaagcctctgctgagactgaagggattcccttcctttcctctggtcgagagacaggccaacgaagtggactggtgggacatggtgtgtaacgtgaagaagctgatcaacgagaaaaaggaggatggcaaggtgttttggcagaatctggctggctacaagagacaggaagccctgagaccatacctgagcagcgaggaagatcggaagaagggaaagaaattcgctcggtaccagctgggcgacctgctgctgcacctggaaaagaagcacggcgaggactggggaaaggtgtacgacgaggcctgggagcggattgacaagaaagtggaaggcctgagcaagcacatcaagctggaagaggaacggagaagcgaggacgcccagagcaaggccgccctgaccgactggctgcgggctaaggccagcttcgtgatcgagggcctgaaggaggccgacaaggacgagttctgcagatgcgagctgaagctgcagaagtggtacggggacctgcggggaaagcccttcgccatcgaagccgagaacagcatcctggacatcagcggcttcagcaagcagtacaactgtgccttcatctggcagaaggacggcgtgaagaagctgaacctgtacctgatcatcaactacttcaagggcggcaagctgcggttcaagaagatcaaacctgaagccttcgaagccaacagattctacaccgtgatcaacaaaaagagcggcgagatcgtgcccatggaggtgaacttcaacttcgacgaccccaacctgatcatcctgcctctggcctttggcaagagacagggcagagaattcatctggaacgacctgctgtccctggaaaccggcagcctgaagctggccaacggaagagtgatcgagaagacactgtacaacagaagaacccggcaggatgagcctgccctgttcgtggccctgaccttcgagcggcgggaggtcctggactcctccaatatcaaaccaatgaacctgatcggcgtggcaagaggcgaaaacatccccgccgtgatcgccctgaccgaccccgagggctgcccactgagccggtttaaggatagcctgggaaacccaacccacatcctgagaatcggcgagagctataaggagaagcagcggaccatccaggccaagaaggaggtggagcagcggagagccggcggctacagccggaagtacgccagcaaagccaagaatctggcagacgatatggtgagaaacaccgctagagatctgctgtactacgccgtgacccaggatgccatgctgatcttcgccaacctgagccggggcttcggccggcagggcaagcggaccttcatggccgagagacagtacacacggatggaggactggctgaccgccaagctggcctacgagggcctgagcaagacctacctgtccaagacactggcccagtacacctccaagacatgcagcaactgtgggtttaccatcaccagcgccgactacgacagggtgctggagaagctgaagaagacagcaacaggctggatgaccacaattaacggcaaggagctgaaggtggagggccagattacctactacaacagatacaagagacagaacgtagtcaaggacctgtccgtcgagctggatagactgagcgaagaatctgtgaacaacgacatctcctcctggacaaagggcagaagcggagaagctctgagcctcctgaagaaaagattctcccatagacccgtgcaggagaagttcgtgtgcctgaactgcggcttcgagacacacgcagccgagcaagccgccctgaacatcgccagatcctggctgttcctgcggagccaggagtacaagaaataccagacaaacaagacaaccggcaacaccgataagagagccttcgtcgagacctggcagtccttttaccggaagaagcttaaggaggtgtggaaacctgccgtgcggtctggcggatctggcggaggctccaccagccccaagaaaaagagaaaagtctaagctgccttctgcggggcttgccttctggccatgcccttcttctctcccttgcacctgtacctcttggtctttgaataaagcctgagtaggaaggctagcaaaaaaaaaaaaaaaaaaaaaaaaaaaaaaaaaaaaaaaaaaaaaaaaaaaaaaaaaaaaaaaaaaaaaaaaaaaaaaaagcccagccggctccccaacctctaccgaggagggcacctctgagtccgccacccccgagagcggccctggcacctccaccgagcccagcgagggcagcgcacccggcagccctgccggcagccccacctccacagaggagggaaccagcaccgagcccagcgaaggcagcgccccaggcaccagcaccgagcctagtgagcaggagattaaacggatcaacaagatcagaagaagacttgtgaaagacagcaacaccaagaaggccggcaagacaggccccatgaaaaccctgctggttagagtgatgacacccgatctgagagagcggctggaaaacctgagaaagaagcctgaaaatatcccccagcccatcagcaatacatctagagccaacctgaataagctgctgaccgattacaccgaaatgaagaaggcgatcctgcatgtgtactgggaagagttccagaaggaccctgtgggcctgatgagccgggtggcccagcctgccagcaagaagatcgatcagaacaagctgaaacctgagatggacgagaagggcaacctgaccaccgccggctttgcctgctctcagtgtggccagcccctgttcgtgtacaagctggagcaggtgtctgagaagggcaaggcttacaccaactacttcggacggtgcaatgtggccgagcacgaaaagctgatcctgctggcccagctgaagcccgagaaggatagcgacgaagccgtgacatatagcctgggaaagtttgggcagagggccctggatttctacagcattcatgtgaccaaggagtccacccaccccgtgaagcccctggcccagatcgccggaaacagatacgcctccggacctgtgggaaaggccctgagcgacgcatgtatgggcacaatcgcctccttcctgtctaagtaccaggacatcatcatcgaacaccagaaggtggtgaagggcaaccagaagagactggagagcctgcgggagctggccggcaaggaaaacctggaataccctagcgtgaccctgccacctcagcctcacaccaaggagggcgttgatgcctacaacgaagtgatcgcccgggtgcgaatgtgggtgaacctgaacctgtggcagaagctgaagctaagcagagatgatgccaagcctctgctgagactgaagggattcccttcctttcctctggtcgagagacaggccaacgaagtggactggtgggacatggtgtgtaacgtgaagaagctgatcaacgagaaaaaggaggatggcaaggtgttttggcagaatctggctggctacaagagacaggaagccctgagaccatacctgagcagcgaggaagatcggaagaagggaaagaaattcgctcggtaccagctgggcgacctgctgctgcacctggaaaagaagcacggcgaggactggggaaaggtgtacgacgaggcctgggagcggattgacaagaaagtggaaggcctgagcaagcacatcaagctggaagaggaacggagaagcgaggacgcccagagcaaggccgccctgaccgactggctgcgggctaaggccagcttcgtgatcgagggcctgaaggaggccgacaaggacgagttctgcagatgcgagctgaagctgcagaagtggtacggggacctgcggggaaagcccttcgccatcgaagccgagaacagcatcctggacatcagcggcttcagcaagcagtacaactgtgccttcatctggcagaaggacggcgtgaagaagctgaacctgtacctgatcatcaactacttcaagggcggcaagctgcggttcaagaagatcaaacctgaagccttcgaagccaacagattctacaccgtgatcaacaaaaagagcggcgagatcgtgcccatggaggtgaacttcaacttcgacgaccccaacctgatcatcctgcctctggcctttggcaagagacagggcagagaattcatctggaacgacctgctgtccctggaaaccggcagcctgaagctggccaacggaagagtgatcgagaagacactgtacaacagaagaacccggcaggatgagcctgccctgttcgtggccctgaccttcgagcggcgggaggtcctggactcctccaatatcaaaccaatgaacctgatcggcgtggcaagaggcgaaaacatccccgccgtgatcgccctgaccgaccccgagggctgcccactgagccggtttaaggatagcctgggaaacccaacccacatcctgagaatcggcgagagctataaggagaagcagcggaccatccaggccaagaaggaggtggagcagcggagagccggcggctacagccggaagtacgccagcaaagccaagaatctggcagacgatatggtgagaaacaccgctagagatctgctgtactacgccgtgacccaggatgccatgctgatcttcgccaacctgagccggggcttcggccggcagggcaagcggaccttcatggccgagagacagtacacacggatggaggactggctgaccgccaagctggcctacgagggcctgagcaagacctacctgtccaagacactggcccagtacacctccaagacatgcagcaactgtgggtttaccatcaccagcgccgactacgacagggtgctggagaagctgaagaagacagcaacaggctggatgaccacaattaacggcaaggagctgaaggtggagggccagattacctactacaacagatacaagagacagaacgtagtcaaggacctgtccgtcgagctggatagactgagcgaagaatctgtgaacaacgacatctcctcctggacaaagggcagaagcggagaagctctgagcctcctgaagaaaagattctcccatagacccgtgcaggagaagttcgtgtgcctgaactgcggcttcgagacacacgcagccgagcaagccgccctgaacatcgccagatcctggctgttcctgcggagccaggagtacaagaaataccagacaaacaagacaaccggcaacaccgataagagagccttcgtcgagacctggcagtccttttaccggaagaagcttaaggaggtgtggaaacctgccgtgcggtctggcggatctggcggaggctccaccagccccaagaaaaagagaaaagtctaagctgccttctgcggggcttgccttctggccatgcccttcttctctcccttgcacctgtacctcttggtctttgaataaagcctgagtaggaaggctagcaaaaaaaaaaaaaaaaaaaaaaaaaaaaaaaaaaaaaaaaaaaaaaaaaaaaaaaaaaaaaaaaaaaaaaaaaaaaaaaa

SEQ ID NO: 10075 - RNA, 8787 nt, synthetic construct
  source 1..8787: mol_type = other RNA
aggaaataagagagaaaagaagagtaagaagaaatataagagccaccatggcccctaagaagaagcgtaaagtgagccggatgaaccacgaccaggagttcgacccccctaaggtgtaccctcccgtccccgccgagaagagaaagcccatccgggtcctgagcctgttcgatggcatcgccaccggtctgctggtgctgaaggacctgggcatccaggtggataggtacattgcctccgaggtgtgcgaggactccatcaccgtgggaatggtgcgtcatcagggcaagatcatgtacgtgggcgacgtgcggagcgtgacacagaagcatatccaggagtggggccctttcgacctggtgatcggcggcagcccttgcaatgacctgagcatcgtgaacccagcccggaagggcctgtacgagggaaccggcagactgttcttcgagttttacagactgctgcacgacgcccggcctaaggaaggcgacgaccggcccttcttttggctgttcgagaatgtggtggccatgggagtcagcgacaagcgggatattagccggttcctggagagcaaccccgtgatgatcgatgccaaggaagtgagcgccgcccaccgggccagatacttctggggcaatctgcctggcatgaacagacccctggccagcaccgtgaacgacaagctggagctgcaggagtgcctggagcacggccggatcgccaagttcagcaaggtgagaaccatcaccacccgaagcaacagcatcaaacaaggcaaggaccagcactttcctgtgttcatgaacgagaaggaggacatcctgtggtgtaccgagatggagagagtgttcgggttcccagtccactacacagatgtcagcaacatgtctagactggccagacagagactgctgggaagaagctggtccgtccctgtgatcagacacctgttcgcccctctgaaggagtacttcgcctgcgtgagcagcggcaacagcaacgccaacagccggggccccagcttctctagcggcctggtgccactgtccctgagagggagccacatgggccccatggagatctacaaaaccgtgagcgcctggaagcggcagcctgtgcgcgtgctgagcctgtttcggaatatcgataaagtcctgaaaagcctgggattcctggagagcggctctggctccggcggtggcaccctgaagtacgtggaggatgtgacaaacgtggtcagacgggatgtggagaagtggggccccttcgatctggtgtacggcagcacccaacccctgggcagctcttgtgaccggtgccctggctggtacatgtttcagttccaccggatcctgcagtacgccctgccgagacaggagtcccagcggccattcttttggattttcatggacaacttgctgctgaccgaggatgaccaggaaactaccactcggttcctgcagaccgaagccgtgaccctgcaggacgtgagaggccgggactaccagaacgccatgcgggtgtggtccaacatccctggactgaaaagcaagcacgcacctctgacccctaaagaagaggagtacctgcaggcccaggtgcggagcagaagcaagctggacgcccctaaggtggatctgctggtgaagaattgcctcctgcccctgagagagtacttcaagtatttcagccagaatagtctgcccctgggaggcagcggcggcggcagcgaggacctggtgaccttcagggacgtggccgtggacttcagccaggaggagtgggagcagctgaacagcgcccagaggggcctgtacagggacgtgatgctggagaactacaggagcctggtgagcctgggcgtgagcgtgagcaagcccgacgtgatcagcctgctggagcagggcaaggagccctgggtggtgaaggagggcaccaggggcacctacagcgactggaagtacgccttcggcggcccaagcagcggcgcccctcctcccagcggcggcaggcggcccaagcagcggcgcccctcctcccagcggcggcagcccagccggctccccaacctctaccgaggagggcacctctgagtccgccacccccgagagcggccctggcacctccaccgagcccagcgagggcagcgcacccggcagccctgccggcagccccacctccacagaggagggaaccagcaccgagcccagcgaaggcagcgccccaggcaccagcaccgagcctagtgagcaggagattaaacggatcaacaagatcagaagaagacttgtgaaagacagcaacaccaagaaggccggcaagacaggccccatgaaaaccctgctggttagagtgatgacacccgatctgagagagcggctggaaaacctgagaaagaagcctgaaaatatcccccagcccatcagcaatacatctagagccaacctgaataagctgctgaccgattacaccgaaatgaagaaggcgatcctgcatgtgtactgggaagagttccagaaggaccctgtgggcctgatgagccgggtggcccagcctgccagcaagaagatcgatcagaacaagctgaaacctgagatggacgagaagggcaacctgaccaccgccggctttgcctgctctcagtgtggccagcccctgttcgtgtacaagctggagcaggtgtctgagaagggcaaggcttacaccaactacttcggacggtgcaatgtggccgagcacgaaaagctgatcctgctggcccagctgaagcccgagaaggatagcgacgaagccgtgacatatagcctgggaaagtttgggcagagggccctggatttctacagcattcatgtgaccaaggagtccacccaccccgtgaagcccctggcccagatcgccggaaacagatacgcctccggacctgtgggaaaggccctgagcgacgcatgtatgggcacaatcgcctccttcctgtctaagtaccaggacatcatcatcgaacaccagaaggtggtgaagggcaaccagaagagactggagagcctgcgggagctggccggcaaggaaaacctggaataccctagcgtgaccctgccacctcagcctcacaccaaggagggcgttgatgcctacaacgaagtgatcgcccgggtgcgaatgtgggtgaacctgaacctgtggcagaagctgaagctaagcagagatgatgccaagcctctgctgagactgaagggattcccttcctttcctctggtcgagagacaggccaacgaagtggactggtgggacatggtgtgtaacgtgaagaagctgatcaacgagaaaaaggaggatggcaaggtgttttggcagaatctggctggctacaagagacaggaagccctgagaccatacctgagcagcgaggaagatcggaagaagggaaagaaattcgctcggtaccagctgggcgacctgctgctgcacctggaaaagaagcacggcgaggactggggaaaggtgtacgacgaggcctgggagcggattgacaagaaagtggaaggcctgagcaagcacatcaagctggaagaggaacggagaagcgaggacgcccagagcaaggccgccctgaccgactggctgcgggctaaggccagcttcgtgatcgagggcctgaaggaggccgacaaggacgagttctgcagatgcgagctgaagctgcagaagtggtacggggacctgcggggaaagcccttcgccatcgaagccgagaacagcatcctggacatcagcggcttcagcaagcagtacaactgtgccttcatctggcagaaggacggcgtgaagaagctgaacctgtacctgatcatcaactacttcaagggcggcaagctgcggttcaagaagatcaaacctgaagccttcgaagccaacagattctacaccgtgatcaacaaaaagagcggcgagatcgtgcccatggaggtgaacttcaacttcgacgaccccaacctgatcatcctgcctctggcctttggcaagagacagggcagagaattcatctggaacgacctgctgtccctggaaaccggcagcctgaagctggccaacggaagagtgatcgagaagacactgtacaacagaagaacccggcaggatgagcctgccctgttcgtggccctgaccttcgagcggcgggaggtcctggactcctccaatatcaaaccaatgaacctgatcggcgtggcaagaggcgaaaacatccccgccgtgatcgccctgaccgaccccgagggctgcccactgagccggtttaaggatagcctgggaaacccaacccacatcctgagaatcggcgagagctataaggagaagcagcggaccatccaggccaagaaggaggtggagcagcggagagccggcggctacagccggaagtacgccagcaaagccaagaatctggcagacgatatggtgagaaacaccgctagagatctgctgtactacgccgtgacccaggatgccatgctgatcttcgccaacctgagccggggcttcggccggcagggcaagcggaccttcatggccgagagacagtacacacggatggaggactggctgaccgccaagctggcctacgagggcctgagcaagacctacctgtccaagacactggcccagtacacctccaagacatgcagcaactgtgggtttaccatcaccagcgccgactacgacagggtgctggagaagctgaagaagacagcaacaggctggatgaccacaattaacggcaaggagctgaaggtggagggccagattacctactacaacagatacaagagacagaacgtagtcaaggacctgtccgtcgagctggatagactgagcgaagaatctgtgaacaacgacatctcctcctggacaaagggcagaagcggagaagctctgagcctcctgaagaaaagattctcccatagacccgtgcaggagaagttcgtgtgcctgaactgcggcttcgagacacacgcagccgagcaagccgccctgaacatcgccagatcctggctgttcctgcggagccaggagtacaagaaataccagacaaacaagacaaccggcaacaccgataagagagccttcgtcgagacctggcagtccttttaccggaagaagcttaaggaggtgtggaaacctgccgtgcggtctggcggatctggcggaggctccaccagccccaagaaaaagagaaaagtctaagctgccttctgcggggcttgccttctggccatgcccttcttctctcccttgcacctgtacctcttggtctttgaataaagcctgagtaggaaggctagcaaaaaaaaaaaaaaaaaaaaaaaaaaaaaaaaaaaaaaaaaaaaaaaaaaaaaaaaaaaaaaaaaaaaaaaaaaaaaaaagcccagccggctccccaacctctaccgaggagggcacctctgagtccgccacccccgagagcggccctggcacctccaccgagcccagcgagggcagcgcacccggcagccctgccggcagccccacctccacagaggagggaaccagcaccgagcccagcgaaggcagcgccccaggcaccagcaccgagcctagtgagcaggagattaaacggatcaacaagatcagaagaagacttgtgaaagacagcaacaccaagaaggccggcaagacaggccccatgaaaaccctgctggttagagtgatgacacccgatctgagagagcggctggaaaacctgagaaagaagcctgaaaatatcccccagcccatcagcaatacatctagagccaacctgaataagctgctgaccgattacaccgaaatgaagaaggcgatcctgcatgtgtactgggaagagttccagaaggaccctgtgggcctgatgagccgggtggcccagcctgccagcaagaagatcgatcagaacaagctgaaacctgagatggacgagaagggcaacctgaccaccgccggctttgcctgctctcagtgtggccagcccctgttcgtgtacaagctggagcaggtgtctgagaagggcaaggcttacaccaactacttcggacggtgcaatgtggccgagcacgaaaagctgatcctgctggcccagctgaagcccgagaaggatagcgacgaagccgtgacatatagcctgggaaagtttgggcagagggccctggatttctacagcattcatgtgaccaaggagtccacccaccccgtgaagcccctggcccagatcgccggaaacagatacgcctccggacctgtgggaaaggccctgagcgacgcatgtatgggcacaatcgcctccttcctgtctaagtaccaggacatcatcatcgaacaccagaaggtggtgaagggcaaccagaagagactggagagcctgcgggagctggccggcaaggaaaacctggaataccctagcgtgaccctgccacctcagcctcacaccaaggagggcgttgatgcctacaacgaagtgatcgcccgggtgcgaatgtgggtgaacctgaacctgtggcagaagctgaagctaagcagagatgatgccaagcctctgctgagactgaagggattcccttcctttcctctggtcgagagacaggccaacgaagtggactggtgggacatggtgtgtaacgtgaagaagctgatcaacgagaaaaaggaggatggcaaggtgttttggcagaatctggctggctacaagagacaggaagccctgagaccatacctgagcagcgaggaagatcggaagaagggaaagaaattcgctcggtaccagctgggcgacctgctgctgcacctggaaaagaagcacggcgaggactggggaaaggtgtacgacgaggcctgggagcggattgacaagaaagtggaaggcctgagcaagcacatcaagctggaagaggaacggagaagcgaggacgcccagagcaaggccgccctgaccgactggctgcgggctaaggccagcttcgtgatcgagggcctgaaggaggccgacaaggacgagttctgcagatgcgagctgaagctgcagaagtggtacggggacctgcggggaaagcccttcgccatcgaagccgagaacagcatcctggacatcagcggcttcagcaagcagtacaactgtgccttcatctggcagaaggacggcgtgaagaagctgaacctgtacctgatcatcaactacttcaagggcggcaagctgcggttcaagaagatcaaacctgaagccttcgaagccaacagattctacaccgtgatcaacaaaaagagcggcgagatcgtgcccatggaggtgaacttcaacttcgacgaccccaacctgatcatcctgcctctggcctttggcaagagacagggcagagaattcatctggaacgacctgctgtccctggaaaccggcagcctgaagctggccaacggaagagtgatcgagaagacactgtacaacagaagaacccggcaggatgagcctgccctgttcgtggccctgaccttcgagcggcgggaggtcctggactcctccaatatcaaaccaatgaacctgatcggcgtggcaagaggcgaaaacatccccgccgtgatcgccctgaccgaccccgagggctgcccactgagccggtttaaggatagcctgggaaacccaacccacatcctgagaatcggcgagagctataaggagaagcagcggaccatccaggccaagaaggaggtggagcagcggagagccggcggctacagccggaagtacgccagcaaagccaagaatctggcagacgatatggtgagaaacaccgctagagatctgctgtactacgccgtgacccaggatgccatgctgatcttcgccaacctgagccggggcttcggccggcagggcaagcggaccttcatggccgagagacagtacacacggatggaggactggctgaccgccaagctggcctacgagggcctgagcaagacctacctgtccaagacactggcccagtacacctccaagacatgcagcaactgtgggtttaccatcaccagcgccgactacgacagggtgctggagaagctgaagaagacagcaacaggctggatgaccacaattaacggcaaggagctgaaggtggagggccagattacctactacaacagatacaagagacagaacgtagtcaaggacctgtccgtcgagctggatagactgagcgaagaatctgtgaacaacgacatctcctcctggacaaagggcagaagcggagaagctctgagcctcctgaagaaaagattctcccatagacccgtgcaggagaagttcgtgtgcctgaactgcggcttcgagacacacgcagccgagcaagccgccctgaacatcgccagatcctggctgttcctgcggagccaggagtacaagaaataccagacaaacaagacaaccggcaacaccgataagagagccttcgtcgagacctggcagtccttttaccggaagaagcttaaggaggtgtggaaacctgccgtgcggtctggcggatctggcggaggctccaccagccccaagaaaaagagaaaagtctaagctgccttctgcggggcttgccttctggccatgcccttcttctctcccttgcacctgtacctcttggtctttgaataaagcctgagtaggaaggctagcaaaaaaaaaaaaaaaaaaaaaaaaaaaaaaaaaaaaaaaaaaaaaaaaaaaaaaaaaaaaaaaaaaaaaaaaaaaaaaaa

SEQ ID NO: 10076 - RNA, 8787 nt, synthetic construct
  source 1..8787: mol_type = other RNA
aggaaataagagagaaaagaagagtaagaagaaatataagagccaccatggcccctaagaagaagcgtaaagtgagccggatgaaccacgaccaggagttcgacccccctaaggtgtaccctcccgtccccgccgagaagagaaagcccatccgggtcctgagcctgttcgatggcatcgccaccggtctgctggtgctgaaggacctgggcatccaggtggataggtacattgcctccgaggtgtgcgaggactccatcaccgtgggaatggtgcgtcatcagggcaagatcatgtacgtgggcgacgtgcggagcgtgacacagaagcatatccaggagtggggccctttcgacctggtgatcggcggcagcccttgcaatgacctgagcatcgtgaacccagcccggaagggcctgtacgagggaaccggcagactgttcttcgagttttacagactgctgcacgacgcccggcctaaggaaggcgacgaccggcccttcttttggctgttcgagaatgtggtggccatgggagtcagcgacaagcgggatattagccggttcctggagagcaaccccgtgatgatcgatgccaaggaagtgagcgccgcccaccgggccagatacttctggggcaatctgcctggcatgaacagacccctggccagcaccgtgaacgacaagctggagctgcaggagtgcctggagcacggccggatcgccaagttcagcaaggtgagaaccatcaccacccgaagcaacagcatcaaacaaggcaaggaccagcactttcctgtgttcatgaacgagaaggaggacatcctgtggtgtaccgagatggagagagtgttcgggttcccagtccactacacagatgtcagcaacatgtctagactggccagacagagactgctgggaagaagctggtccgtccctgtgatcagacacctgttcgcccctctgaaggagtacttcgcctgcgtgagcagcggcaacagcaacgccaacagccggggccccagcttctctagcggcctggtgccactgtccctgagagggagccacatgggccccatggagatctacaaaaccgtgagcgcctggaagcggcagcctgtgcgcgtgctgagcctgtttcggaatatcgataaagtcctgaaaagcctgggattcctggagagcggctctggctccggcggtggcaccctgaagtacgtggaggatgtgacaaacgtggtcagacgggatgtggagaagtggggccccttcgatctggtgtacggcagcacccaacccctgggcagctcttgtgaccggtgccctggctggtacatgtttcagttccaccggatcctgcagtacgccctgccgagacaggagtcccagcggccattcttttggattttcatggacaacttgctgctgaccgaggatgaccaggaaactaccactcggttcctgcagaccgaagccgtgaccctgcaggacgtgagaggccgggactaccagaacgccatgcgggtgtggtccaacatccctggactgaaaagcaagcacgcacctctgacccctaaagaagaggagtacctgcaggcccaggtgcggagcagaagcaagctggacgcccctaaggtggatctgctggtgaagaattgcctcctgcccctgagagagtacttcaagtatttcagccagaatagtctgcccctgggaggcagcggcggcggctgctggggcctgctgagcttcaaggacatcagcatggagttcacctgggacgagtggcagctgctggacagcacccagaagtacctgtacagggacgtgatcctggagaactaccacaacctgatcagcgtgggctaccacggcaccaagcccgacctgatcttcaagctggagcagggcgaggacccctggatcatcaacgccaagatcagcaggcagagcaggcccgacggctgggaggagggcggcccaagcagcggcgcccctcctcccagcggcggcaggcggcccaagcagcggcgcccctcctcccagcggcggcagcccagccggctccccaacctctaccgaggagggcacctctgagtccgccacccccgagagcggccctggcacctccaccgagcccagcgagggcagcgcacccggcagccctgccggcagccccacctccacagaggagggaaccagcaccgagcccagcgaaggcagcgccccaggcaccagcaccgagcctagtgagcaggagattaaacggatcaacaagatcagaagaagacttgtgaaagacagcaacaccaagaaggccggcaagacaggccccatgaaaaccctgctggttagagtgatgacacccgatctgagagagcggctggaaaacctgagaaagaagcctgaaaatatcccccagcccatcagcaatacatctagagccaacctgaataagctgctgaccgattacaccgaaatgaagaaggcgatcctgcatgtgtactgggaagagttccagaaggaccctgtgggcctgatgagccgggtggcccagcctgccagcaagaagatcgatcagaacaagctgaaacctgagatggacgagaagggcaacctgaccaccgccggctttgcctgctctcagtgtggccagcccctgttcgtgtacaagctggagcaggtgtctgagaagggcaaggcttacaccaactacttcggacggtgcaatgtggccgagcacgaaaagctgatcctgctggcccagctgaagcccgagaaggatagcgacgaagccgtgacatatagcctgggaaagtttgggcagagggccctggatttctacagcattcatgtgaccaaggagtccacccaccccgtgaagcccctggcccagatcgccggaaacagatacgcctccggacctgtgggaaaggccctgagcgacgcatgtatgggcacaatcgcctccttcctgtctaagtaccaggacatcatcatcgaacaccagaaggtggtgaagggcaaccagaagagactggagagcctgcgggagctggccggcaaggaaaacctggaataccctagcgtgaccctgccacctcagcctcacaccaaggagggcgttgatgcctacaacgaagtgatcgcccgggtgcgaatgtgggtgaacctgaacctgtggcagaagctgaagctaagcagagatgatgccaagcctctgctgagactgaagggattcccttcctttcctctggtcgagagacaggccaacgaagtggactggtgggacatggtgtgtaacgtgaagaagctgatcaacgagaaaaaggaggatggcaaggtgttttggcagaatctggctggctacaagagacaggaagccctgagaccatacctgagcagcgaggaagatcggaagaagggaaagaaattcgctcggtaccagctgggcgacctgctgctgcacctggaaaagaagcacggcgaggactggggaaaggtgtacgacgaggcctgggagcggattgacaagaaagtggaaggcctgagcaagcacatcaagctggaagaggaacggagaagcgaggacgcccagagcaaggccgccctgaccgactggctgcgggctaaggccagcttcgtgatcgagggcctgaaggaggccgacaaggacgagttctgcagatgcgagctgaagctgcagaagtggtacggggacctgcggggaaagcccttcgccatcgaagccgagaacagcatcctggacatcagcggcttcagcaagcagtacaactgtgccttcatctggcagaaggacggcgtgaagaagctgaacctgtacctgatcatcaactacttcaagggcggcaagctgcggttcaagaagatcaaacctgaagccttcgaagccaacagattctacaccgtgatcaacaaaaagagcggcgagatcgtgcccatggaggtgaacttcaacttcgacgaccccaacctgatcatcctgcctctggcctttggcaagagacagggcagagaattcatctggaacgacctgctgtccctggaaaccggcagcctgaagctggccaacggaagagtgatcgagaagacactgtacaacagaagaacccggcaggatgagcctgccctgttcgtggccctgaccttcgagcggcgggaggtcctggactcctccaatatcaaaccaatgaacctgatcggcgtggcaagaggcgaaaacatccccgccgtgatcgccctgaccgaccccgagggctgcccactgagccggtttaaggatagcctgggaaacccaacccacatcctgagaatcggcgagagctataaggagaagcagcggaccatccaggccaagaaggaggtggagcagcggagagccggcggctacagccggaagtacgccagcaaagccaagaatctggcagacgatatggtgagaaacaccgctagagatctgctgtactacgccgtgacccaggatgccatgctgatcttcgccaacctgagccggggcttcggccggcagggcaagcggaccttcatggccgagagacagtacacacggatggaggactggctgaccgccaagctggcctacgagggcctgagcaagacctacctgtccaagacactggcccagtacacctccaagacatgcagcaactgtgggtttaccatcaccagcgccgactacgacagggtgctggagaagctgaagaagacagcaacaggctggatgaccacaattaacggcaaggagctgaaggtggagggccagattacctactacaacagatacaagagacagaacgtagtcaaggacctgtccgtcgagctggatagactgagcgaagaatctgtgaacaacgacatctcctcctggacaaagggcagaagcggagaagctctgagcctcctgaagaaaagattctcccatagacccgtgcaggagaagttcgtgtgcctgaactgcggcttcgagacacacgcagccgagcaagccgccctgaacatcgccagatcctggctgttcctgcggagccaggagtacaagaaataccagacaaacaagacaaccggcaacaccgataagagagccttcgtcgagacctggcagtccttttaccggaagaagcttaaggaggtgtggaaacctgccgtgcggtctggcggatctggcggaggctccaccagccccaagaaaaagagaaaagtctaagctgccttctgcggggcttgccttctggccatgcccttcttctctcccttgcacctgtacctcttggtctttgaataaagcctgagtaggaaggctagcaaaaaaaaaaaaaaaaaaaaaaaaaaaaaaaaaaaaaaaaaaaaaaaaaaaaaaaaaaaaaaaaaaaaaaaaaaaaaaaagcccagccggctccccaacctctaccgaggagggcacctctgagtccgccacccccgagagcggccctggcacctccaccgagcccagcgagggcagcgcacccggcagccctgccggcagccccacctccacagaggagggaaccagcaccgagcccagcgaaggcagcgccccaggcaccagcaccgagcctagtgagcaggagattaaacggatcaacaagatcagaagaagacttgtgaaagacagcaacaccaagaaggccggcaagacaggccccatgaaaaccctgctggttagagtgatgacacccgatctgagagagcggctggaaaacctgagaaagaagcctgaaaatatcccccagcccatcagcaatacatctagagccaacctgaataagctgctgaccgattacaccgaaatgaagaaggcgatcctgcatgtgtactgggaagagttccagaaggaccctgtgggcctgatgagccgggtggcccagcctgccagcaagaagatcgatcagaacaagctgaaacctgagatggacgagaagggcaacctgaccaccgccggctttgcctgctctcagtgtggccagcccctgttcgtgtacaagctggagcaggtgtctgagaagggcaaggcttacaccaactacttcggacggtgcaatgtggccgagcacgaaaagctgatcctgctggcccagctgaagcccgagaaggatagcgacgaagccgtgacatatagcctgggaaagtttgggcagagggccctggatttctacagcattcatgtgaccaaggagtccacccaccccgtgaagcccctggcccagatcgccggaaacagatacgcctccggacctgtgggaaaggccctgagcgacgcatgtatgggcacaatcgcctccttcctgtctaagtaccaggacatcatcatcgaacaccagaaggtggtgaagggcaaccagaagagactggagagcctgcgggagctggccggcaaggaaaacctggaataccctagcgtgaccctgccacctcagcctcacaccaaggagggcgttgatgcctacaacgaagtgatcgcccgggtgcgaatgtgggtgaacctgaacctgtggcagaagctgaagctaagcagagatgatgccaagcctctgctgagactgaagggattcccttcctttcctctggtcgagagacaggccaacgaagtggactggtgggacatggtgtgtaacgtgaagaagctgatcaacgagaaaaaggaggatggcaaggtgttttggcagaatctggctggctacaagagacaggaagccctgagaccatacctgagcagcgaggaagatcggaagaagggaaagaaattcgctcggtaccagctgggcgacctgctgctgcacctggaaaagaagcacggcgaggactggggaaaggtgtacgacgaggcctgggagcggattgacaagaaagtggaaggcctgagcaagcacatcaagctggaagaggaacggagaagcgaggacgcccagagcaaggccgccctgaccgactggctgcgggctaaggccagcttcgtgatcgagggcctgaaggaggccgacaaggacgagttctgcagatgcgagctgaagctgcagaagtggtacggggacctgcggggaaagcccttcgccatcgaagccgagaacagcatcctggacatcagcggcttcagcaagcagtacaactgtgccttcatctggcagaaggacggcgtgaagaagctgaacctgtacctgatcatcaactacttcaagggcggcaagctgcggttcaagaagatcaaacctgaagccttcgaagccaacagattctacaccgtgatcaacaaaaagagcggcgagatcgtgcccatggaggtgaacttcaacttcgacgaccccaacctgatcatcctgcctctggcctttggcaagagacagggcagagaattcatctggaacgacctgctgtccctggaaaccggcagcctgaagctggccaacggaagagtgatcgagaagacactgtacaacagaagaacccggcaggatgagcctgccctgttcgtggccctgaccttcgagcggcgggaggtcctggactcctccaatatcaaaccaatgaacctgatcggcgtggcaagaggcgaaaacatccccgccgtgatcgccctgaccgaccccgagggctgcccactgagccggtttaaggatagcctgggaaacccaacccacatcctgagaatcggcgagagctataaggagaagcagcggaccatccaggccaagaaggaggtggagcagcggagagccggcggctacagccggaagtacgccagcaaagccaagaatctggcagacgatatggtgagaaacaccgctagagatctgctgtactacgccgtgacccaggatgccatgctgatcttcgccaacctgagccggggcttcggccggcagggcaagcggaccttcatggccgagagacagtacacacggatggaggactggctgaccgccaagctggcctacgagggcctgagcaagacctacctgtccaagacactggcccagtacacctccaagacatgcagcaactgtgggtttaccatcaccagcgccgactacgacagggtgctggagaagctgaagaagacagcaacaggctggatgaccacaattaacggcaaggagctgaaggtggagggccagattacctactacaacagatacaagagacagaacgtagtcaaggacctgtccgtcgagctggatagactgagcgaagaatctgtgaacaacgacatctcctcctggacaaagggcagaagcggagaagctctgagcctcctgaagaaaagattctcccatagacccgtgcaggagaagttcgtgtgcctgaactgcggcttcgagacacacgcagccgagcaagccgccctgaacatcgccagatcctggctgttcctgcggagccaggagtacaagaaataccagacaaacaagacaaccggcaacaccgataagagagccttcgtcgagacctggcagtccttttaccggaagaagcttaaggaggtgtggaaacctgccgtgcggtctggcggatctggcggaggctccaccagccccaagaaaaagagaaaagtctaagctgccttctgcggggcttgccttctggccatgcccttcttctctcccttgcacctgtacctcttggtctttgaataaagcctgagtaggaaggctagcaaaaaaaaaaaaaaaaaaaaaaaaaaaaaaaaaaaaaaaaaaaaaaaaaaaaaaaaaaaaaaaaaaaaaaaaaaaaaaaa

SEQ ID NO: 10077 - RNA, 8787 nt, synthetic construct
  source 1..8787: mol_type = other RNA
aggaaataagagagaaaagaagagtaagaagaaatataagagccaccatggcccctaagaagaagcgtaaagtgagccggatgaaccacgaccaggagttcgacccccctaaggtgtaccctcccgtccccgccgagaagagaaagcccatccgggtcctgagcctgttcgatggcatcgccaccggtctgctggtgctgaaggacctgggcatccaggtggataggtacattgcctccgaggtgtgcgaggactccatcaccgtgggaatggtgcgtcatcagggcaagatcatgtacgtgggcgacgtgcggagcgtgacacagaagcatatccaggagtggggccctttcgacctggtgatcggcggcagcccttgcaatgacctgagcatcgtgaacccagcccggaagggcctgtacgagggaaccggcagactgttcttcgagttttacagactgctgcacgacgcccggcctaaggaaggcgacgaccggcccttcttttggctgttcgagaatgtggtggccatgggagtcagcgacaagcgggatattagccggttcctggagagcaaccccgtgatgatcgatgccaaggaagtgagcgccgcccaccgggccagatacttctggggcaatctgcctggcatgaacagacccctggccagcaccgtgaacgacaagctggagctgcaggagtgcctggagcacggccggatcgccaagttcagcaaggtgagaaccatcaccacccgaagcaacagcatcaaacaaggcaaggaccagcactttcctgtgttcatgaacgagaaggaggacatcctgtggtgtaccgagatggagagagtgttcgggttcccagtccactacacagatgtcagcaacatgtctagactggccagacagagactgctgggaagaagctggtccgtccctgtgatcagacacctgttcgcccctctgaaggagtacttcgcctgcgtgagcagcggcaacagcaacgccaacagccggggccccagcttctctagcggcctggtgccactgtccctgagagggagccacatgggccccatggagatctacaaaaccgtgagcgcctggaagcggcagcctgtgcgcgtgctgagcctgtttcggaatatcgataaagtcctgaaaagcctgggattcctggagagcggctctggctccggcggtggcaccctgaagtacgtggaggatgtgacaaacgtggtcagacgggatgtggagaagtggggccccttcgatctggtgtacggcagcacccaacccctgggcagctcttgtgaccggtgccctggctggtacatgtttcagttccaccggatcctgcagtacgccctgccgagacaggagtcccagcggccattcttttggattttcatggacaacttgctgctgaccgaggatgaccaggaaactaccactcggttcctgcagaccgaagccgtgaccctgcaggacgtgagaggccgggactaccagaacgccatgcgggtgtggtccaacatccctggactgaaaagcaagcacgcacctctgacccctaaagaagaggagtacctgcaggcccaggtgcggagcagaagcaagctggacgcccctaaggtggatctgctggtgaagaattgcctcctgcccctgagagagtacttcaagtatttcagccagaatagtctgcccctgggaggcagcggcggcggccagatgaggctgaggttcgaggacatcagcgtgagcttcagccaggaggagtgggcctacctggacgaggagcagaaggagctgtacagggaggtgatgagggacaactaccagaccctgatcagcctgggcgtgggcttcagcagcgtgacccccgacatcatcagcaggatcgagcagggcgaggagccctacgtgagggacgagcccggcagcgaggagagggagaccggcaggagcagcggcggcccaagcagcggcgcccctcctcccagcggcggcaggcggcccaagcagcggcgcccctcctcccagcggcggcagcccagccggctccccaacctctaccgaggagggcacctctgagtccgccacccccgagagcggccctggcacctccaccgagcccagcgagggcagcgcacccggcagccctgccggcagccccacctccacagaggagggaaccagcaccgagcccagcgaaggcagcgccccaggcaccagcaccgagcctagtgagcaggagattaaacggatcaacaagatcagaagaagacttgtgaaagacagcaacaccaagaaggccggcaagacaggccccatgaaaaccctgctggttagagtgatgacacccgatctgagagagcggctggaaaacctgagaaagaagcctgaaaatatcccccagcccatcagcaatacatctagagccaacctgaataagctgctgaccgattacaccgaaatgaagaaggcgatcctgcatgtgtactgggaagagttccagaaggaccctgtgggcctgatgagccgggtggcccagcctgccagcaagaagatcgatcagaacaagctgaaacctgagatggacgagaagggcaacctgaccaccgccggctttgcctgctctcagtgtggccagcccctgttcgtgtacaagctggagcaggtgtctgagaagggcaaggcttacaccaactacttcggacggtgcaatgtggccgagcacgaaaagctgatcctgctggcccagctgaagcccgagaaggatagcgacgaagccgtgacatatagcctgggaaagtttgggcagagggccctggatttctacagcattcatgtgaccaaggagtccacccaccccgtgaagcccctggcccagatcgccggaaacagatacgcctccggacctgtgggaaaggccctgagcgacgcatgtatgggcacaatcgcctccttcctgtctaagtaccaggacatcatcatcgaacaccagaaggtggtgaagggcaaccagaagagactggagagcctgcgggagctggccggcaaggaaaacctggaataccctagcgtgaccctgccacctcagcctcacaccaaggagggcgttgatgcctacaacgaagtgatcgcccgggtgcgaatgtgggtgaacctgaacctgtggcagaagctgaagctaagcagagatgatgccaagcctctgctgagactgaagggattcccttcctttcctctggtcgagagacaggccaacgaagtggactggtgggacatggtgtgtaacgtgaagaagctgatcaacgagaaaaaggaggatggcaaggtgttttggcagaatctggctggctacaagagacaggaagccctgagaccatacctgagcagcgaggaagatcggaagaagggaaagaaattcgctcggtaccagctgggcgacctgctgctgcacctggaaaagaagcacggcgaggactggggaaaggtgtacgacgaggcctgggagcggattgacaagaaagtggaaggcctgagcaagcacatcaagctggaagaggaacggagaagcgaggacgcccagagcaaggccgccctgaccgactggctgcgggctaaggccagcttcgtgatcgagggcctgaaggaggccgacaaggacgagttctgcagatgcgagctgaagctgcagaagtggtacggggacctgcggggaaagcccttcgccatcgaagccgagaacagcatcctggacatcagcggcttcagcaagcagtacaactgtgccttcatctggcagaaggacggcgtgaagaagctgaacctgtacctgatcatcaactacttcaagggcggcaagctgcggttcaagaagatcaaacctgaagccttcgaagccaacagattctacaccgtgatcaacaaaaagagcggcgagatcgtgcccatggaggtgaacttcaacttcgacgaccccaacctgatcatcctgcctctggcctttggcaagagacagggcagagaattcatctggaacgacctgctgtccctggaaaccggcagcctgaagctggccaacggaagagtgatcgagaagacactgtacaacagaagaacccggcaggatgagcctgccctgttcgtggccctgaccttcgagcggcgggaggtcctggactcctccaatatcaaaccaatgaacctgatcggcgtggcaagaggcgaaaacatccccgccgtgatcgccctgaccgaccccgagggctgcccactgagccggtttaaggatagcctgggaaacccaacccacatcctgagaatcggcgagagctataaggagaagcagcggaccatccaggccaagaaggaggtggagcagcggagagccggcggctacagccggaagtacgccagcaaagccaagaatctggcagacgatatggtgagaaacaccgctagagatctgctgtactacgccgtgacccaggatgccatgctgatcttcgccaacctgagccggggcttcggccggcagggcaagcggaccttcatggccgagagacagtacacacggatggaggactggctgaccgccaagctggcctacgagggcctgagcaagacctacctgtccaagacactggcccagtacacctccaagacatgcagcaactgtgggtttaccatcaccagcgccgactacgacagggtgctggagaagctgaagaagacagcaacaggctggatgaccacaattaacggcaaggagctgaaggtggagggccagattacctactacaacagatacaagagacagaacgtagtcaaggacctgtccgtcgagctggatagactgagcgaagaatctgtgaacaacgacatctcctcctggacaaagggcagaagcggagaagctctgagcctcctgaagaaaagattctcccatagacccgtgcaggagaagttcgtgtgcctgaactgcggcttcgagacacacgcagccgagcaagccgccctgaacatcgccagatcctggctgttcctgcggagccaggagtacaagaaataccagacaaacaagacaaccggcaacaccgataagagagccttcgtcgagacctggcagtccttttaccggaagaagcttaaggaggtgtggaaacctgccgtgcggtctggcggatctggcggaggctccaccagccccaagaaaaagagaaaagtctaagctgccttctgcggggcttgccttctggccatgcccttcttctctcccttgcacctgtacctcttggtctttgaataaagcctgagtaggaaggctagcaaaaaaaaaaaaaaaaaaaaaaaaaaaaaaaaaaaaaaaaaaaaaaaaaaaaaaaaaaaaaaaaaaaaaaaaaaaaaaaagcccagccggctccccaacctctaccgaggagggcacctctgagtccgccacccccgagagcggccctggcacctccaccgagcccagcgagggcagcgcacccggcagccctgccggcagccccacctccacagaggagggaaccagcaccgagcccagcgaaggcagcgccccaggcaccagcaccgagcctagtgagcaggagattaaacggatcaacaagatcagaagaagacttgtgaaagacagcaacaccaagaaggccggcaagacaggccccatgaaaaccctgctggttagagtgatgacacccgatctgagagagcggctggaaaacctgagaaagaagcctgaaaatatcccccagcccatcagcaatacatctagagccaacctgaataagctgctgaccgattacaccgaaatgaagaaggcgatcctgcatgtgtactgggaagagttccagaaggaccctgtgggcctgatgagccgggtggcccagcctgccagcaagaagatcgatcagaacaagctgaaacctgagatggacgagaagggcaacctgaccaccgccggctttgcctgctctcagtgtggccagcccctgttcgtgtacaagctggagcaggtgtctgagaagggcaaggcttacaccaactacttcggacggtgcaatgtggccgagcacgaaaagctgatcctgctggcccagctgaagcccgagaaggatagcgacgaagccgtgacatatagcctgggaaagtttgggcagagggccctggatttctacagcattcatgtgaccaaggagtccacccaccccgtgaagcccctggcccagatcgccggaaacagatacgcctccggacctgtgggaaaggccctgagcgacgcatgtatgggcacaatcgcctccttcctgtctaagtaccaggacatcatcatcgaacaccagaaggtggtgaagggcaaccagaagagactggagagcctgcgggagctggccggcaaggaaaacctggaataccctagcgtgaccctgccacctcagcctcacaccaaggagggcgttgatgcctacaacgaagtgatcgcccgggtgcgaatgtgggtgaacctgaacctgtggcagaagctgaagctaagcagagatgatgccaagcctctgctgagactgaagggattcccttcctttcctctggtcgagagacaggccaacgaagtggactggtgggacatggtgtgtaacgtgaagaagctgatcaacgagaaaaaggaggatggcaaggtgttttggcagaatctggctggctacaagagacaggaagccctgagaccatacctgagcagcgaggaagatcggaagaagggaaagaaattcgctcggtaccagctgggcgacctgctgctgcacctggaaaagaagcacggcgaggactggggaaaggtgtacgacgaggcctgggagcggattgacaagaaagtggaaggcctgagcaagcacatcaagctggaagaggaacggagaagcgaggacgcccagagcaaggccgccctgaccgactggctgcgggctaaggccagcttcgtgatcgagggcctgaaggaggccgacaaggacgagttctgcagatgcgagctgaagctgcagaagtggtacggggacctgcggggaaagcccttcgccatcgaagccgagaacagcatcctggacatcagcggcttcagcaagcagtacaactgtgccttcatctggcagaaggacggcgtgaagaagctgaacctgtacctgatcatcaactacttcaagggcggcaagctgcggttcaagaagatcaaacctgaagccttcgaagccaacagattctacaccgtgatcaacaaaaagagcggcgagatcgtgcccatggaggtgaacttcaacttcgacgaccccaacctgatcatcctgcctctggcctttggcaagagacagggcagagaattcatctggaacgacctgctgtccctggaaaccggcagcctgaagctggccaacggaagagtgatcgagaagacactgtacaacagaagaacccggcaggatgagcctgccctgttcgtggccctgaccttcgagcggcgggaggtcctggactcctccaatatcaaaccaatgaacctgatcggcgtggcaagaggcgaaaacatccccgccgtgatcgccctgaccgaccccgagggctgcccactgagccggtttaaggatagcctgggaaacccaacccacatcctgagaatcggcgagagctataaggagaagcagcggaccatccaggccaagaaggaggtggagcagcggagagccggcggctacagccggaagtacgccagcaaagccaagaatctggcagacgatatggtgagaaacaccgctagagatctgctgtactacgccgtgacccaggatgccatgctgatcttcgccaacctgagccggggcttcggccggcagggcaagcggaccttcatggccgagagacagtacacacggatggaggactggctgaccgccaagctggcctacgagggcctgagcaagacctacctgtccaagacactggcccagtacacctccaagacatgcagcaactgtgggtttaccatcaccagcgccgactacgacagggtgctggagaagctgaagaagacagcaacaggctggatgaccacaattaacggcaaggagctgaaggtggagggccagattacctactacaacagatacaagagacagaacgtagtcaaggacctgtccgtcgagctggatagactgagcgaagaatctgtgaacaacgacatctcctcctggacaaagggcagaagcggagaagctctgagcctcctgaagaaaagattctcccatagacccgtgcaggagaagttcgtgtgcctgaactgcggcttcgagacacacgcagccgagcaagccgccctgaacatcgccagatcctggctgttcctgcggagccaggagtacaagaaataccagacaaacaagacaaccggcaacaccgataagagagccttcgtcgagacctggcagtccttttaccggaagaagcttaaggaggtgtggaaacctgccgtgcggtctggcggatctggcggaggctccaccagccccaagaaaaagagaaaagtctaagctgccttctgcggggcttgccttctggccatgcccttcttctctcccttgcacctgtacctcttggtctttgaataaagcctgagtaggaaggctagcaaaaaaaaaaaaaaaaaaaaaaaaaaaaaaaaaaaaaaaaaaaaaaaaaaaaaaaaaaaaaaaaaaaaaaaaaaaaaaaa

SEQ ID NO: 10078 - RNA, 8787 nt, synthetic construct
  source 1..8787: mol_type = other RNA
aggaaataagagagaaaagaagagtaagaagaaatataagagccaccatggcccctaagaagaagcgtaaagtgagccggatgaaccacgaccaggagttcgacccccctaaggtgtaccctcccgtccccgccgagaagagaaagcccatccgggtcctgagcctgttcgatggcatcgccaccggtctgctggtgctgaaggacctgggcatccaggtggataggtacattgcctccgaggtgtgcgaggactccatcaccgtgggaatggtgcgtcatcagggcaagatcatgtacgtgggcgacgtgcggagcgtgacacagaagcatatccaggagtggggccctttcgacctggtgatcggcggcagcccttgcaatgacctgagcatcgtgaacccagcccggaagggcctgtacgagggaaccggcagactgttcttcgagttttacagactgctgcacgacgcccggcctaaggaaggcgacgaccggcccttcttttggctgttcgagaatgtggtggccatgggagtcagcgacaagcgggatattagccggttcctggagagcaaccccgtgatgatcgatgccaaggaagtgagcgccgcccaccgggccagatacttctggggcaatctgcctggcatgaacagacccctggccagcaccgtgaacgacaagctggagctgcaggagtgcctggagcacggccggatcgccaagttcagcaaggtgagaaccatcaccacccgaagcaacagcatcaaacaaggcaaggaccagcactttcctgtgttcatgaacgagaaggaggacatcctgtggtgtaccgagatggagagagtgttcgggttcccagtccactacacagatgtcagcaacatgtctagactggccagacagagactgctgggaagaagctggtccgtccctgtgatcagacacctgttcgcccctctgaaggagtacttcgcctgcgtgagcagcggcaacagcaacgccaacagccggggccccagcttctctagcggcctggtgccactgtccctgagagggagccacatgggccccatggagatctacaaaaccgtgagcgcctggaagcggcagcctgtgcgcgtgctgagcctgtttcggaatatcgataaagtcctgaaaagcctgggattcctggagagcggctctggctccggcggtggcaccctgaagtacgtggaggatgtgacaaacgtggtcagacgggatgtggagaagtggggccccttcgatctggtgtacggcagcacccaacccctgggcagctcttgtgaccggtgccctggctggtacatgtttcagttccaccggatcctgcagtacgccctgccgagacaggagtcccagcggccattcttttggattttcatggacaacttgctgctgaccgaggatgaccaggaaactaccactcggttcctgcagaccgaagccgtgaccctgcaggacgtgagaggccgggactaccagaacgccatgcgggtgtggtccaacatccctggactgaaaagcaagcacgcacctctgacccctaaagaagaggagtacctgcaggcccaggtgcggagcagaagcaagctggacgcccctaaggtggatctgctggtgaagaattgcctcctgcccctgagagagtacttcaagtatttcagccagaatagtctgcccctgggaggcagcggcggcggcgtgaccttcgaggacgtggccgtgaacttcagcagggaggagtgggccctgctggaccccccccagaggaagctgtacagggacgtgatgtgggagaccctgaggcacctggccgccgtggacgaccagcagagcgaggacgagttcaggaacttccagaagagggtgaggagcgaggaggtggagaaggccagccagtacaccctgtggtaccagcacggcgagatggacagcaggacccccggcggcccaagcagcggcgcccctcctcccagcggcggcaggcggcccaagcagcggcgcccctcctcccagcggcggcagcccagccggctccccaacctctaccgaggagggcacctctgagtccgccacccccgagagcggccctggcacctccaccgagcccagcgagggcagcgcacccggcagccctgccggcagccccacctccacagaggagggaaccagcaccgagcccagcgaaggcagcgccccaggcaccagcaccgagcctagtgagcaggagattaaacggatcaacaagatcagaagaagacttgtgaaagacagcaacaccaagaaggccggcaagacaggccccatgaaaaccctgctggttagagtgatgacacccgatctgagagagcggctggaaaacctgagaaagaagcctgaaaatatcccccagcccatcagcaatacatctagagccaacctgaataagctgctgaccgattacaccgaaatgaagaaggcgatcctgcatgtgtactgggaagagttccagaaggaccctgtgggcctgatgagccgggtggcccagcctgccagcaagaagatcgatcagaacaagctgaaacctgagatggacgagaagggcaacctgaccaccgccggctttgcctgctctcagtgtggccagcccctgttcgtgtacaagctggagcaggtgtctgagaagggcaaggcttacaccaactacttcggacggtgcaatgtggccgagcacgaaaagctgatcctgctggcccagctgaagcccgagaaggatagcgacgaagccgtgacatatagcctgggaaagtttgggcagagggccctggatttctacagcattcatgtgaccaaggagtccacccaccccgtgaagcccctggcccagatcgccggaaacagatacgcctccggacctgtgggaaaggccctgagcgacgcatgtatgggcacaatcgcctccttcctgtctaagtaccaggacatcatcatcgaacaccagaaggtggtgaagggcaaccagaagagactggagagcctgcgggagctggccggcaaggaaaacctggaataccctagcgtgaccctgccacctcagcctcacaccaaggagggcgttgatgcctacaacgaagtgatcgcccgggtgcgaatgtgggtgaacctgaacctgtggcagaagctgaagctaagcagagatgatgccaagcctctgctgagactgaagggattcccttcctttcctctggtcgagagacaggccaacgaagtggactggtgggacatggtgtgtaacgtgaagaagctgatcaacgagaaaaaggaggatggcaaggtgttttggcagaatctggctggctacaagagacaggaagccctgagaccatacctgagcagcgaggaagatcggaagaagggaaagaaattcgctcggtaccagctgggcgacctgctgctgcacctggaaaagaagcacggcgaggactggggaaaggtgtacgacgaggcctgggagcggattgacaagaaagtggaaggcctgagcaagcacatcaagctggaagaggaacggagaagcgaggacgcccagagcaaggccgccctgaccgactggctgcgggctaaggccagcttcgtgatcgagggcctgaaggaggccgacaaggacgagttctgcagatgcgagctgaagctgcagaagtggtacggggacctgcggggaaagcccttcgccatcgaagccgagaacagcatcctggacatcagcggcttcagcaagcagtacaactgtgccttcatctggcagaaggacggcgtgaagaagctgaacctgtacctgatcatcaactacttcaagggcggcaagctgcggttcaagaagatcaaacctgaagccttcgaagccaacagattctacaccgtgatcaacaaaaagagcggcgagatcgtgcccatggaggtgaacttcaacttcgacgaccccaacctgatcatcctgcctctggcctttggcaagagacagggcagagaattcatctggaacgacctgctgtccctggaaaccggcagcctgaagctggccaacggaagagtgatcgagaagacactgtacaacagaagaacccggcaggatgagcctgccctgttcgtggccctgaccttcgagcggcgggaggtcctggactcctccaatatcaaaccaatgaacctgatcggcgtggcaagaggcgaaaacatccccgccgtgatcgccctgaccgaccccgagggctgcccactgagccggtttaaggatagcctgggaaacccaacccacatcctgagaatcggcgagagctataaggagaagcagcggaccatccaggccaagaaggaggtggagcagcggagagccggcggctacagccggaagtacgccagcaaagccaagaatctggcagacgatatggtgagaaacaccgctagagatctgctgtactacgccgtgacccaggatgccatgctgatcttcgccaacctgagccggggcttcggccggcagggcaagcggaccttcatggccgagagacagtacacacggatggaggactggctgaccgccaagctggcctacgagggcctgagcaagacctacctgtccaagacactggcccagtacacctccaagacatgcagcaactgtgggtttaccatcaccagcgccgactacgacagggtgctggagaagctgaagaagacagcaacaggctggatgaccacaattaacggcaaggagctgaaggtggagggccagattacctactacaacagatacaagagacagaacgtagtcaaggacctgtccgtcgagctggatagactgagcgaagaatctgtgaacaacgacatctcctcctggacaaagggcagaagcggagaagctctgagcctcctgaagaaaagattctcccatagacccgtgcaggagaagttcgtgtgcctgaactgcggcttcgagacacacgcagccgagcaagccgccctgaacatcgccagatcctggctgttcctgcggagccaggagtacaagaaataccagacaaacaagacaaccggcaacaccgataagagagccttcgtcgagacctggcagtccttttaccggaagaagcttaaggaggtgtggaaacctgccgtgcggtctggcggatctggcggaggctccaccagccccaagaaaaagagaaaagtctaagctgccttctgcggggcttgccttctggccatgcccttcttctctcccttgcacctgtacctcttggtctttgaataaagcctgagtaggaaggctagcaaaaaaaaaaaaaaaaaaaaaaaaaaaaaaaaaaaaaaaaaaaaaaaaaaaaaaaaaaaaaaaaaaaaaaaaaaaaaaaagcccagccggctccccaacctctaccgaggagggcacctctgagtccgccacccccgagagcggccctggcacctccaccgagcccagcgagggcagcgcacccggcagccctgccggcagccccacctccacagaggagggaaccagcaccgagcccagcgaaggcagcgccccaggcaccagcaccgagcctagtgagcaggagattaaacggatcaacaagatcagaagaagacttgtgaaagacagcaacaccaagaaggccggcaagacaggccccatgaaaaccctgctggttagagtgatgacacccgatctgagagagcggctggaaaacctgagaaagaagcctgaaaatatcccccagcccatcagcaatacatctagagccaacctgaataagctgctgaccgattacaccgaaatgaagaaggcgatcctgcatgtgtactgggaagagttccagaaggaccctgtgggcctgatgagccgggtggcccagcctgccagcaagaagatcgatcagaacaagctgaaacctgagatggacgagaagggcaacctgaccaccgccggctttgcctgctctcagtgtggccagcccctgttcgtgtacaagctggagcaggtgtctgagaagggcaaggcttacaccaactacttcggacggtgcaatgtggccgagcacgaaaagctgatcctgctggcccagctgaagcccgagaaggatagcgacgaagccgtgacatatagcctgggaaagtttgggcagagggccctggatttctacagcattcatgtgaccaaggagtccacccaccccgtgaagcccctggcccagatcgccggaaacagatacgcctccggacctgtgggaaaggccctgagcgacgcatgtatgggcacaatcgcctccttcctgtctaagtaccaggacatcatcatcgaacaccagaaggtggtgaagggcaaccagaagagactggagagcctgcgggagctggccggcaaggaaaacctggaataccctagcgtgaccctgccacctcagcctcacaccaaggagggcgttgatgcctacaacgaagtgatcgcccgggtgcgaatgtgggtgaacctgaacctgtggcagaagctgaagctaagcagagatgatgccaagcctctgctgagactgaagggattcccttcctttcctctggtcgagagacaggccaacgaagtggactggtgggacatggtgtgtaacgtgaagaagctgatcaacgagaaaaaggaggatggcaaggtgttttggcagaatctggctggctacaagagacaggaagccctgagaccatacctgagcagcgaggaagatcggaagaagggaaagaaattcgctcggtaccagctgggcgacctgctgctgcacctggaaaagaagcacggcgaggactggggaaaggtgtacgacgaggcctgggagcggattgacaagaaagtggaaggcctgagcaagcacatcaagctggaagaggaacggagaagcgaggacgcccagagcaaggccgccctgaccgactggctgcgggctaaggccagcttcgtgatcgagggcctgaaggaggccgacaaggacgagttctgcagatgcgagctgaagctgcagaagtggtacggggacctgcggggaaagcccttcgccatcgaagccgagaacagcatcctggacatcagcggcttcagcaagcagtacaactgtgccttcatctggcagaaggacggcgtgaagaagctgaacctgtacctgatcatcaactacttcaagggcggcaagctgcggttcaagaagatcaaacctgaagccttcgaagccaacagattctacaccgtgatcaacaaaaagagcggcgagatcgtgcccatggaggtgaacttcaacttcgacgaccccaacctgatcatcctgcctctggcctttggcaagagacagggcagagaattcatctggaacgacctgctgtccctggaaaccggcagcctgaagctggccaacggaagagtgatcgagaagacactgtacaacagaagaacccggcaggatgagcctgccctgttcgtggccctgaccttcgagcggcgggaggtcctggactcctccaatatcaaaccaatgaacctgatcggcgtggcaagaggcgaaaacatccccgccgtgatcgccctgaccgaccccgagggctgcccactgagccggtttaaggatagcctgggaaacccaacccacatcctgagaatcggcgagagctataaggagaagcagcggaccatccaggccaagaaggaggtggagcagcggagagccggcggctacagccggaagtacgccagcaaagccaagaatctggcagacgatatggtgagaaacaccgctagagatctgctgtactacgccgtgacccaggatgccatgctgatcttcgccaacctgagccggggcttcggccggcagggcaagcggaccttcatggccgagagacagtacacacggatggaggactggctgaccgccaagctggcctacgagggcctgagcaagacctacctgtccaagacactggcccagtacacctccaagacatgcagcaactgtgggtttaccatcaccagcgccgactacgacagggtgctggagaagctgaagaagacagcaacaggctggatgaccacaattaacggcaaggagctgaaggtggagggccagattacctactacaacagatacaagagacagaacgtagtcaaggacctgtccgtcgagctggatagactgagcgaagaatctgtgaacaacgacatctcctcctggacaaagggcagaagcggagaagctctgagcctcctgaagaaaagattctcccatagacccgtgcaggagaagttcgtgtgcctgaactgcggcttcgagacacacgcagccgagcaagccgccctgaacatcgccagatcctggctgttcctgcggagccaggagtacaagaaataccagacaaacaagacaaccggcaacaccgataagagagccttcgtcgagacctggcagtccttttaccggaagaagcttaaggaggtgtggaaacctgccgtgcggtctggcggatctggcggaggctccaccagccccaagaaaaagagaaaagtctaagctgccttctgcggggcttgccttctggccatgcccttcttctctcccttgcacctgtacctcttggtctttgaataaagcctgagtaggaaggctagcaaaaaaaaaaaaaaaaaaaaaaaaaaaaaaaaaaaaaaaaaaaaaaaaaaaaaaaaaaaaaaaaaaaaaaaaaaaaaaaa

SEQ ID NO: 10079 - RNA, 8787 nt, synthetic construct
  source 1..8787: mol_type = other RNA
aggaaataagagagaaaagaagagtaagaagaaatataagagccaccatggcccctaagaagaagcgtaaagtgagccggatgaaccacgaccaggagttcgacccccctaaggtgtaccctcccgtccccgccgagaagagaaagcccatccgggtcctgagcctgttcgatggcatcgccaccggtctgctggtgctgaaggacctgggcatccaggtggataggtacattgcctccgaggtgtgcgaggactccatcaccgtgggaatggtgcgtcatcagggcaagatcatgtacgtgggcgacgtgcggagcgtgacacagaagcatatccaggagtggggccctttcgacctggtgatcggcggcagcccttgcaatgacctgagcatcgtgaacccagcccggaagggcctgtacgagggaaccggcagactgttcttcgagttttacagactgctgcacgacgcccggcctaaggaaggcgacgaccggcccttcttttggctgttcgagaatgtggtggccatgggagtcagcgacaagcgggatattagccggttcctggagagcaaccccgtgatgatcgatgccaaggaagtgagcgccgcccaccgggccagatacttctggggcaatctgcctggcatgaacagacccctggccagcaccgtgaacgacaagctggagctgcaggagtgcctggagcacggccggatcgccaagttcagcaaggtgagaaccatcaccacccgaagcaacagcatcaaacaaggcaaggaccagcactttcctgtgttcatgaacgagaaggaggacatcctgtggtgtaccgagatggagagagtgttcgggttcccagtccactacacagatgtcagcaacatgtctagactggccagacagagactgctgggaagaagctggtccgtccctgtgatcagacacctgttcgcccctctgaaggagtacttcgcctgcgtgagcagcggcaacagcaacgccaacagccggggccccagcttctctagcggcctggtgccactgtccctgagagggagccacatgggccccatggagatctacaaaaccgtgagcgcctggaagcggcagcctgtgcgcgtgctgagcctgtttcggaatatcgataaagtcctgaaaagcctgggattcctggagagcggctctggctccggcggtggcaccctgaagtacgtggaggatgtgacaaacgtggtcagacgggatgtggagaagtggggccccttcgatctggtgtacggcagcacccaacccctgggcagctcttgtgaccggtgccctggctggtacatgtttcagttccaccggatcctgcagtacgccctgccgagacaggagtcccagcggccattcttttggattttcatggacaacttgctgctgaccgaggatgaccaggaaactaccactcggttcctgcagaccgaagccgtgaccctgcaggacgtgagaggccgggactaccagaacgccatgcgggtgtggtccaacatccctggactgaaaagcaagcacgcacctctgacccctaaagaagaggagtacctgcaggcccaggtgcggagcagaagcaagctggacgcccctaaggtggatctgctggtgaagaattgcctcctgcccctgagagagtacttcaagtatttcagccagaatagtctgcccctgggaggcagcggcggcggcgcccagggcctgatggccttcgaggacgtggccgtgtacttcagcagggaggagtggggcctgctggacgccgcccagagggccctgtacaggagggtgatgctggagaacttcaccctgctggccagcctgggcctgagcgtgagcaggccccacgtggtgatccagctggagtgcggcaaggagccctgggtgctgaacggcaccgacgtgaccctggccaggaacgcccagaggaggcccggcggcccaagcagcggcgcccctcctcccagcggcggcaggcggcccaagcagcggcgcccctcctcccagcggcggcagcccagccggctccccaacctctaccgaggagggcacctctgagtccgccacccccgagagcggccctggcacctccaccgagcccagcgagggcagcgcacccggcagccctgccggcagccccacctccacagaggagggaaccagcaccgagcccagcgaaggcagcgccccaggcaccagcaccgagcctagtgagcaggagattaaacggatcaacaagatcagaagaagacttgtgaaagacagcaacaccaagaaggccggcaagacaggccccatgaaaaccctgctggttagagtgatgacacccgatctgagagagcggctggaaaacctgagaaagaagcctgaaaatatcccccagcccatcagcaatacatctagagccaacctgaataagctgctgaccgattacaccgaaatgaagaaggcgatcctgcatgtgtactgggaagagttccagaaggaccctgtgggcctgatgagccgggtggcccagcctgccagcaagaagatcgatcagaacaagctgaaacctgagatggacgagaagggcaacctgaccaccgccggctttgcctgctctcagtgtggccagcccctgttcgtgtacaagctggagcaggtgtctgagaagggcaaggcttacaccaactacttcggacggtgcaatgtggccgagcacgaaaagctgatcctgctggcccagctgaagcccgagaaggatagcgacgaagccgtgacatatagcctgggaaagtttgggcagagggccctggatttctacagcattcatgtgaccaaggagtccacccaccccgtgaagcccctggcccagatcgccggaaacagatacgcctccggacctgtgggaaaggccctgagcgacgcatgtatgggcacaatcgcctccttcctgtctaagtaccaggacatcatcatcgaacaccagaaggtggtgaagggcaaccagaagagactggagagcctgcgggagctggccggcaaggaaaacctggaataccctagcgtgaccctgccacctcagcctcacaccaaggagggcgttgatgcctacaacgaagtgatcgcccgggtgcgaatgtgggtgaacctgaacctgtggcagaagctgaagctaagcagagatgatgccaagcctctgctgagactgaagggattcccttcctttcctctggtcgagagacaggccaacgaagtggactggtgggacatggtgtgtaacgtgaagaagctgatcaacgagaaaaaggaggatggcaaggtgttttggcagaatctggctggctacaagagacaggaagccctgagaccatacctgagcagcgaggaagatcggaagaagggaaagaaattcgctcggtaccagctgggcgacctgctgctgcacctggaaaagaagcacggcgaggactggggaaaggtgtacgacgaggcctgggagcggattgacaagaaagtggaaggcctgagcaagcacatcaagctggaagaggaacggagaagcgaggacgcccagagcaaggccgccctgaccgactggctgcgggctaaggccagcttcgtgatcgagggcctgaaggaggccgacaaggacgagttctgcagatgcgagctgaagctgcagaagtggtacggggacctgcggggaaagcccttcgccatcgaagccgagaacagcatcctggacatcagcggcttcagcaagcagtacaactgtgccttcatctggcagaaggacggcgtgaagaagctgaacctgtacctgatcatcaactacttcaagggcggcaagctgcggttcaagaagatcaaacctgaagccttcgaagccaacagattctacaccgtgatcaacaaaaagagcggcgagatcgtgcccatggaggtgaacttcaacttcgacgaccccaacctgatcatcctgcctctggcctttggcaagagacagggcagagaattcatctggaacgacctgctgtccctggaaaccggcagcctgaagctggccaacggaagagtgatcgagaagacactgtacaacagaagaacccggcaggatgagcctgccctgttcgtggccctgaccttcgagcggcgggaggtcctggactcctccaatatcaaaccaatgaacctgatcggcgtggcaagaggcgaaaacatccccgccgtgatcgccctgaccgaccccgagggctgcccactgagccggtttaaggatagcctgggaaacccaacccacatcctgagaatcggcgagagctataaggagaagcagcggaccatccaggccaagaaggaggtggagcagcggagagccggcggctacagccggaagtacgccagcaaagccaagaatctggcagacgatatggtgagaaacaccgctagagatctgctgtactacgccgtgacccaggatgccatgctgatcttcgccaacctgagccggggcttcggccggcagggcaagcggaccttcatggccgagagacagtacacacggatggaggactggctgaccgccaagctggcctacgagggcctgagcaagacctacctgtccaagacactggcccagtacacctccaagacatgcagcaactgtgggtttaccatcaccagcgccgactacgacagggtgctggagaagctgaagaagacagcaacaggctggatgaccacaattaacggcaaggagctgaaggtggagggccagattacctactacaacagatacaagagacagaacgtagtcaaggacctgtccgtcgagctggatagactgagcgaagaatctgtgaacaacgacatctcctcctggacaaagggcagaagcggagaagctctgagcctcctgaagaaaagattctcccatagacccgtgcaggagaagttcgtgtgcctgaactgcggcttcgagacacacgcagccgagcaagccgccctgaacatcgccagatcctggctgttcctgcggagccaggagtacaagaaataccagacaaacaagacaaccggcaacaccgataagagagccttcgtcgagacctggcagtccttttaccggaagaagcttaaggaggtgtggaaacctgccgtgcggtctggcggatctggcggaggctccaccagccccaagaaaaagagaaaagtctaagctgccttctgcggggcttgccttctggccatgcccttcttctctcccttgcacctgtacctcttggtctttgaataaagcctgagtaggaaggctagcaaaaaaaaaaaaaaaaaaaaaaaaaaaaaaaaaaaaaaaaaaaaaaaaaaaaaaaaaaaaaaaaaaaaaaaaaaaaaaaagcccagccggctccccaacctctaccgaggagggcacctctgagtccgccacccccgagagcggccctggcacctccaccgagcccagcgagggcagcgcacccggcagccctgccggcagccccacctccacagaggagggaaccagcaccgagcccagcgaaggcagcgccccaggcaccagcaccgagcctagtgagcaggagattaaacggatcaacaagatcagaagaagacttgtgaaagacagcaacaccaagaaggccggcaagacaggccccatgaaaaccctgctggttagagtgatgacacccgatctgagagagcggctggaaaacctgagaaagaagcctgaaaatatcccccagcccatcagcaatacatctagagccaacctgaataagctgctgaccgattacaccgaaatgaagaaggcgatcctgcatgtgtactgggaagagttccagaaggaccctgtgggcctgatgagccgggtggcccagcctgccagcaagaagatcgatcagaacaagctgaaacctgagatggacgagaagggcaacctgaccaccgccggctttgcctgctctcagtgtggccagcccctgttcgtgtacaagctggagcaggtgtctgagaagggcaaggcttacaccaactacttcggacggtgcaatgtggccgagcacgaaaagctgatcctgctggcccagctgaagcccgagaaggatagcgacgaagccgtgacatatagcctgggaaagtttgggcagagggccctggatttctacagcattcatgtgaccaaggagtccacccaccccgtgaagcccctggcccagatcgccggaaacagatacgcctccggacctgtgggaaaggccctgagcgacgcatgtatgggcacaatcgcctccttcctgtctaagtaccaggacatcatcatcgaacaccagaaggtggtgaagggcaaccagaagagactggagagcctgcgggagctggccggcaaggaaaacctggaataccctagcgtgaccctgccacctcagcctcacaccaaggagggcgttgatgcctacaacgaagtgatcgcccgggtgcgaatgtgggtgaacctgaacctgtggcagaagctgaagctaagcagagatgatgccaagcctctgctgagactgaagggattcccttcctttcctctggtcgagagacaggccaacgaagtggactggtgggacatggtgtgtaacgtgaagaagctgatcaacgagaaaaaggaggatggcaaggtgttttggcagaatctggctggctacaagagacaggaagccctgagaccatacctgagcagcgaggaagatcggaagaagggaaagaaattcgctcggtaccagctgggcgacctgctgctgcacctggaaaagaagcacggcgaggactggggaaaggtgtacgacgaggcctgggagcggattgacaagaaagtggaaggcctgagcaagcacatcaagctggaagaggaacggagaagcgaggacgcccagagcaaggccgccctgaccgactggctgcgggctaaggccagcttcgtgatcgagggcctgaaggaggccgacaaggacgagttctgcagatgcgagctgaagctgcagaagtggtacggggacctgcggggaaagcccttcgccatcgaagccgagaacagcatcctggacatcagcggcttcagcaagcagtacaactgtgccttcatctggcagaaggacggcgtgaagaagctgaacctgtacctgatcatcaactacttcaagggcggcaagctgcggttcaagaagatcaaacctgaagccttcgaagccaacagattctacaccgtgatcaacaaaaagagcggcgagatcgtgcccatggaggtgaacttcaacttcgacgaccccaacctgatcatcctgcctctggcctttggcaagagacagggcagagaattcatctggaacgacctgctgtccctggaaaccggcagcctgaagctggccaacggaagagtgatcgagaagacactgtacaacagaagaacccggcaggatgagcctgccctgttcgtggccctgaccttcgagcggcgggaggtcctggactcctccaatatcaaaccaatgaacctgatcggcgtggcaagaggcgaaaacatccccgccgtgatcgccctgaccgaccccgagggctgcccactgagccggtttaaggatagcctgggaaacccaacccacatcctgagaatcggcgagagctataaggagaagcagcggaccatccaggccaagaaggaggtggagcagcggagagccggcggctacagccggaagtacgccagcaaagccaagaatctggcagacgatatggtgagaaacaccgctagagatctgctgtactacgccgtgacccaggatgccatgctgatcttcgccaacctgagccggggcttcggccggcagggcaagcggaccttcatggccgagagacagtacacacggatggaggactggctgaccgccaagctggcctacgagggcctgagcaagacctacctgtccaagacactggcccagtacacctccaagacatgcagcaactgtgggtttaccatcaccagcgccgactacgacagggtgctggagaagctgaagaagacagcaacaggctggatgaccacaattaacggcaaggagctgaaggtggagggccagattacctactacaacagatacaagagacagaacgtagtcaaggacctgtccgtcgagctggatagactgagcgaagaatctgtgaacaacgacatctcctcctggacaaagggcagaagcggagaagctctgagcctcctgaagaaaagattctcccatagacccgtgcaggagaagttcgtgtgcctgaactgcggcttcgagacacacgcagccgagcaagccgccctgaacatcgccagatcctggctgttcctgcggagccaggagtacaagaaataccagacaaacaagacaaccggcaacaccgataagagagccttcgtcgagacctggcagtccttttaccggaagaagcttaaggaggtgtggaaacctgccgtgcggtctggcggatctggcggaggctccaccagccccaagaaaaagagaaaagtctaagctgccttctgcggggcttgccttctggccatgcccttcttctctcccttgcacctgtacctcttggtctttgaataaagcctgagtaggaaggctagcaaaaaaaaaaaaaaaaaaaaaaaaaaaaaaaaaaaaaaaaaaaaaaaaaaaaaaaaaaaaaaaaaaaaaaaaaaaaaaaa

SEQ ID NO: 10080 - RNA, 8787 nt, synthetic construct
  source 1..8787: mol_type = other RNA
aggaaataagagagaaaagaagagtaagaagaaatataagagccaccatggcccctaagaagaagcgtaaagtgagccggatgaaccacgaccaggagttcgacccccctaaggtgtaccctcccgtccccgccgagaagagaaagcccatccgggtcctgagcctgttcgatggcatcgccaccggtctgctggtgctgaaggacctgggcatccaggtggataggtacattgcctccgaggtgtgcgaggactccatcaccgtgggaatggtgcgtcatcagggcaagatcatgtacgtgggcgacgtgcggagcgtgacacagaagcatatccaggagtggggccctttcgacctggtgatcggcggcagcccttgcaatgacctgagcatcgtgaacccagcccggaagggcctgtacgagggaaccggcagactgttcttcgagttttacagactgctgcacgacgcccggcctaaggaaggcgacgaccggcccttcttttggctgttcgagaatgtggtggccatgggagtcagcgacaagcgggatattagccggttcctggagagcaaccccgtgatgatcgatgccaaggaagtgagcgccgcccaccgggccagatacttctggggcaatctgcctggcatgaacagacccctggccagcaccgtgaacgacaagctggagctgcaggagtgcctggagcacggccggatcgccaagttcagcaaggtgagaaccatcaccacccgaagcaacagcatcaaacaaggcaaggaccagcactttcctgtgttcatgaacgagaaggaggacatcctgtggtgtaccgagatggagagagtgttcgggttcccagtccactacacagatgtcagcaacatgtctagactggccagacagagactgctgggaagaagctggtccgtccctgtgatcagacacctgttcgcccctctgaaggagtacttcgcctgcgtgagcagcggcaacagcaacgccaacagccggggccccagcttctctagcggcctggtgccactgtccctgagagggagccacatgggccccatggagatctacaaaaccgtgagcgcctggaagcggcagcctgtgcgcgtgctgagcctgtttcggaatatcgataaagtcctgaaaagcctgggattcctggagagcggctctggctccggcggtggcaccctgaagtacgtggaggatgtgacaaacgtggtcagacgggatgtggagaagtggggccccttcgatctggtgtacggcagcacccaacccctgggcagctcttgtgaccggtgccctggctggtacatgtttcagttccaccggatcctgcagtacgccctgccgagacaggagtcccagcggccattcttttggattttcatggacaacttgctgctgaccgaggatgaccaggaaactaccactcggttcctgcagaccgaagccgtgaccctgcaggacgtgagaggccgggactaccagaacgccatgcgggtgtggtccaacatccctggactgaaaagcaagcacgcacctctgacccctaaagaagaggagtacctgcaggcccaggtgcggagcagaagcaagctggacgcccctaaggtggatctgctggtgaagaattgcctcctgcccctgagagagtacttcaagtatttcagccagaatagtctgcccctgggaggcagcggcggcggccccgagaccgtggtgagcttcgaggacgtggccgtgaggttcagccccgacgagtggcacctgctggacgacggccagaggaggctgtacagggacgtgctgagggagaactacagccacgtgaggagcctgggcttccccgtgcccgacctggccgtgatcttcaggatggagaggggcgaggagccctggccccccggcctgcccgccggcaccaagagcgacgaccaggaggaggagaggggcggcccaagcagcggcgcccctcctcccagcggcggcaggcggcccaagcagcggcgcccctcctcccagcggcggcagcccagccggctccccaacctctaccgaggagggcacctctgagtccgccacccccgagagcggccctggcacctccaccgagcccagcgagggcagcgcacccggcagccctgccggcagccccacctccacagaggagggaaccagcaccgagcccagcgaaggcagcgccccaggcaccagcaccgagcctagtgagcaggagattaaacggatcaacaagatcagaagaagacttgtgaaagacagcaacaccaagaaggccggcaagacaggccccatgaaaaccctgctggttagagtgatgacacccgatctgagagagcggctggaaaacctgagaaagaagcctgaaaatatcccccagcccatcagcaatacatctagagccaacctgaataagctgctgaccgattacaccgaaatgaagaaggcgatcctgcatgtgtactgggaagagttccagaaggaccctgtgggcctgatgagccgggtggcccagcctgccagcaagaagatcgatcagaacaagctgaaacctgagatggacgagaagggcaacctgaccaccgccggctttgcctgctctcagtgtggccagcccctgttcgtgtacaagctggagcaggtgtctgagaagggcaaggcttacaccaactacttcggacggtgcaatgtggccgagcacgaaaagctgatcctgctggcccagctgaagcccgagaaggatagcgacgaagccgtgacatatagcctgggaaagtttgggcagagggccctggatttctacagcattcatgtgaccaaggagtccacccaccccgtgaagcccctggcccagatcgccggaaacagatacgcctccggacctgtgggaaaggccctgagcgacgcatgtatgggcacaatcgcctccttcctgtctaagtaccaggacatcatcatcgaacaccagaaggtggtgaagggcaaccagaagagactggagagcctgcgggagctggccggcaaggaaaacctggaataccctagcgtgaccctgccacctcagcctcacaccaaggagggcgttgatgcctacaacgaagtgatcgcccgggtgcgaatgtgggtgaacctgaacctgtggcagaagctgaagctaagcagagatgatgccaagcctctgctgagactgaagggattcccttcctttcctctggtcgagagacaggccaacgaagtggactggtgggacatggtgtgtaacgtgaagaagctgatcaacgagaaaaaggaggatggcaaggtgttttggcagaatctggctggctacaagagacaggaagccctgagaccatacctgagcagcgaggaagatcggaagaagggaaagaaattcgctcggtaccagctgggcgacctgctgctgcacctggaaaagaagcacggcgaggactggggaaaggtgtacgacgaggcctgggagcggattgacaagaaagtggaaggcctgagcaagcacatcaagctggaagaggaacggagaagcgaggacgcccagagcaaggccgccctgaccgactggctgcgggctaaggccagcttcgtgatcgagggcctgaaggaggccgacaaggacgagttctgcagatgcgagctgaagctgcagaagtggtacggggacctgcggggaaagcccttcgccatcgaagccgagaacagcatcctggacatcagcggcttcagcaagcagtacaactgtgccttcatctggcagaaggacggcgtgaagaagctgaacctgtacctgatcatcaactacttcaagggcggcaagctgcggttcaagaagatcaaacctgaagccttcgaagccaacagattctacaccgtgatcaacaaaaagagcggcgagatcgtgcccatggaggtgaacttcaacttcgacgaccccaacctgatcatcctgcctctggcctttggcaagagacagggcagagaattcatctggaacgacctgctgtccctggaaaccggcagcctgaagctggccaacggaagagtgatcgagaagacactgtacaacagaagaacccggcaggatgagcctgccctgttcgtggccctgaccttcgagcggcgggaggtcctggactcctccaatatcaaaccaatgaacctgatcggcgtggcaagaggcgaaaacatccccgccgtgatcgccctgaccgaccccgagggctgcccactgagccggtttaaggatagcctgggaaacccaacccacatcctgagaatcggcgagagctataaggagaagcagcggaccatccaggccaagaaggaggtggagcagcggagagccggcggctacagccggaagtacgccagcaaagccaagaatctggcagacgatatggtgagaaacaccgctagagatctgctgtactacgccgtgacccaggatgccatgctgatcttcgccaacctgagccggggcttcggccggcagggcaagcggaccttcatggccgagagacagtacacacggatggaggactggctgaccgccaagctggcctacgagggcctgagcaagacctacctgtccaagacactggcccagtacacctccaagacatgcagcaactgtgggtttaccatcaccagcgccgactacgacagggtgctggagaagctgaagaagacagcaacaggctggatgaccacaattaacggcaaggagctgaaggtggagggccagattacctactacaacagatacaagagacagaacgtagtcaaggacctgtccgtcgagctggatagactgagcgaagaatctgtgaacaacgacatctcctcctggacaaagggcagaagcggagaagctctgagcctcctgaagaaaagattctcccatagacccgtgcaggagaagttcgtgtgcctgaactgcggcttcgagacacacgcagccgagcaagccgccctgaacatcgccagatcctggctgttcctgcggagccaggagtacaagaaataccagacaaacaagacaaccggcaacaccgataagagagccttcgtcgagacctggcagtccttttaccggaagaagcttaaggaggtgtggaaacctgccgtgcggtctggcggatctggcggaggctccaccagccccaagaaaaagagaaaagtctaagctgccttctgcggggcttgccttctggccatgcccttcttctctcccttgcacctgtacctcttggtctttgaataaagcctgagtaggaaggctagcaaaaaaaaaaaaaaaaaaaaaaaaaaaaaaaaaaaaaaaaaaaaaaaaaaaaaaaaaaaaaaaaaaaaaaaaaaaaaaaagcccagccggctccccaacctctaccgaggagggcacctctgagtccgccacccccgagagcggccctggcacctccaccgagcccagcgagggcagcgcacccggcagccctgccggcagccccacctccacagaggagggaaccagcaccgagcccagcgaaggcagcgccccaggcaccagcaccgagcctagtgagcaggagattaaacggatcaacaagatcagaagaagacttgtgaaagacagcaacaccaagaaggccggcaagacaggccccatgaaaaccctgctggttagagtgatgacacccgatctgagagagcggctggaaaacctgagaaagaagcctgaaaatatcccccagcccatcagcaatacatctagagccaacctgaataagctgctgaccgattacaccgaaatgaagaaggcgatcctgcatgtgtactgggaagagttccagaaggaccctgtgggcctgatgagccgggtggcccagcctgccagcaagaagatcgatcagaacaagctgaaacctgagatggacgagaagggcaacctgaccaccgccggctttgcctgctctcagtgtggccagcccctgttcgtgtacaagctggagcaggtgtctgagaagggcaaggcttacaccaactacttcggacggtgcaatgtggccgagcacgaaaagctgatcctgctggcccagctgaagcccgagaaggatagcgacgaagccgtgacatatagcctgggaaagtttgggcagagggccctggatttctacagcattcatgtgaccaaggagtccacccaccccgtgaagcccctggcccagatcgccggaaacagatacgcctccggacctgtgggaaaggccctgagcgacgcatgtatgggcacaatcgcctccttcctgtctaagtaccaggacatcatcatcgaacaccagaaggtggtgaagggcaaccagaagagactggagagcctgcgggagctggccggcaaggaaaacctggaataccctagcgtgaccctgccacctcagcctcacaccaaggagggcgttgatgcctacaacgaagtgatcgcccgggtgcgaatgtgggtgaacctgaacctgtggcagaagctgaagctaagcagagatgatgccaagcctctgctgagactgaagggattcccttcctttcctctggtcgagagacaggccaacgaagtggactggtgggacatggtgtgtaacgtgaagaagctgatcaacgagaaaaaggaggatggcaaggtgttttggcagaatctggctggctacaagagacaggaagccctgagaccatacctgagcagcgaggaagatcggaagaagggaaagaaattcgctcggtaccagctgggcgacctgctgctgcacctggaaaagaagcacggcgaggactggggaaaggtgtacgacgaggcctgggagcggattgacaagaaagtggaaggcctgagcaagcacatcaagctggaagaggaacggagaagcgaggacgcccagagcaaggccgccctgaccgactggctgcgggctaaggccagcttcgtgatcgagggcctgaaggaggccgacaaggacgagttctgcagatgcgagctgaagctgcagaagtggtacggggacctgcggggaaagcccttcgccatcgaagccgagaacagcatcctggacatcagcggcttcagcaagcagtacaactgtgccttcatctggcagaaggacggcgtgaagaagctgaacctgtacctgatcatcaactacttcaagggcggcaagctgcggttcaagaagatcaaacctgaagccttcgaagccaacagattctacaccgtgatcaacaaaaagagcggcgagatcgtgcccatggaggtgaacttcaacttcgacgaccccaacctgatcatcctgcctctggcctttggcaagagacagggcagagaattcatctggaacgacctgctgtccctggaaaccggcagcctgaagctggccaacggaagagtgatcgagaagacactgtacaacagaagaacccggcaggatgagcctgccctgttcgtggccctgaccttcgagcggcgggaggtcctggactcctccaatatcaaaccaatgaacctgatcggcgtggcaagaggcgaaaacatccccgccgtgatcgccctgaccgaccccgagggctgcccactgagccggtttaaggatagcctgggaaacccaacccacatcctgagaatcggcgagagctataaggagaagcagcggaccatccaggccaagaaggaggtggagcagcggagagccggcggctacagccggaagtacgccagcaaagccaagaatctggcagacgatatggtgagaaacaccgctagagatctgctgtactacgccgtgacccaggatgccatgctgatcttcgccaacctgagccggggcttcggccggcagggcaagcggaccttcatggccgagagacagtacacacggatggaggactggctgaccgccaagctggcctacgagggcctgagcaagacctacctgtccaagacactggcccagtacacctccaagacatgcagcaactgtgggtttaccatcaccagcgccgactacgacagggtgctggagaagctgaagaagacagcaacaggctggatgaccacaattaacggcaaggagctgaaggtggagggccagattacctactacaacagatacaagagacagaacgtagtcaaggacctgtccgtcgagctggatagactgagcgaagaatctgtgaacaacgacatctcctcctggacaaagggcagaagcggagaagctctgagcctcctgaagaaaagattctcccatagacccgtgcaggagaagttcgtgtgcctgaactgcggcttcgagacacacgcagccgagcaagccgccctgaacatcgccagatcctggctgttcctgcggagccaggagtacaagaaataccagacaaacaagacaaccggcaacaccgataagagagccttcgtcgagacctggcagtccttttaccggaagaagcttaaggaggtgtggaaacctgccgtgcggtctggcggatctggcggaggctccaccagccccaagaaaaagagaaaagtctaagctgccttctgcggggcttgccttctggccatgcccttcttctctcccttgcacctgtacctcttggtctttgaataaagcctgagtaggaaggctagcaaaaaaaaaaaaaaaaaaaaaaaaaaaaaaaaaaaaaaaaaaaaaaaaaaaaaaaaaaaaaaaaaaaaaaaaaaaaaaaa

SEQ ID NO: 10081 - RNA, 8787 nt, synthetic construct
  source 1..8787: mol_type = other RNA
aggaaataagagagaaaagaagagtaagaagaaatataagagccaccatggcccctaagaagaagcgtaaagtgagccggatgaaccacgaccaggagttcgacccccctaaggtgtaccctcccgtccccgccgagaagagaaagcccatccgggtcctgagcctgttcgatggcatcgccaccggtctgctggtgctgaaggacctgggcatccaggtggataggtacattgcctccgaggtgtgcgaggactccatcaccgtgggaatggtgcgtcatcagggcaagatcatgtacgtgggcgacgtgcggagcgtgacacagaagcatatccaggagtggggccctttcgacctggtgatcggcggcagcccttgcaatgacctgagcatcgtgaacccagcccggaagggcctgtacgagggaaccggcagactgttcttcgagttttacagactgctgcacgacgcccggcctaaggaaggcgacgaccggcccttcttttggctgttcgagaatgtggtggccatgggagtcagcgacaagcgggatattagccggttcctggagagcaaccccgtgatgatcgatgccaaggaagtgagcgccgcccaccgggccagatacttctggggcaatctgcctggcatgaacagacccctggccagcaccgtgaacgacaagctggagctgcaggagtgcctggagcacggccggatcgccaagttcagcaaggtgagaaccatcaccacccgaagcaacagcatcaaacaaggcaaggaccagcactttcctgtgttcatgaacgagaaggaggacatcctgtggtgtaccgagatggagagagtgttcgggttcccagtccactacacagatgtcagcaacatgtctagactggccagacagagactgctgggaagaagctggtccgtccctgtgatcagacacctgttcgcccctctgaaggagtacttcgcctgcgtgagcagcggcaacagcaacgccaacagccggggccccagcttctctagcggcctggtgccactgtccctgagagggagccacatgggccccatggagatctacaaaaccgtgagcgcctggaagcggcagcctgtgcgcgtgctgagcctgtttcggaatatcgataaagtcctgaaaagcctgggattcctggagagcggctctggctccggcggtggcaccctgaagtacgtggaggatgtgacaaacgtggtcagacgggatgtggagaagtggggccccttcgatctggtgtacggcagcacccaacccctgggcagctcttgtgaccggtgccctggctggtacatgtttcagttccaccggatcctgcagtacgccctgccgagacaggagtcccagcggccattcttttggattttcatggacaacttgctgctgaccgaggatgaccaggaaactaccactcggttcctgcagaccgaagccgtgaccctgcaggacgtgagaggccgggactaccagaacgccatgcgggtgtggtccaacatccctggactgaaaagcaagcacgcacctctgacccctaaagaagaggagtacctgcaggcccaggtgcggagcagaagcaagctggacgcccctaaggtggatctgctggtgaagaattgcctcctgcccctgagagagtacttcaagtatttcagccagaatagtctgcccctgggaggcagcggcggcggcaggcccagggccgtgaagttcggcgacgtggccctgtacttcagcagggaggagtggggctgcctgaggcccgcccagagggccctgtacagggacgtgatgcaggagacctacggccacctgggcgccctgggctgcgccggccccaagcccgccctgatcagctggctggagaggaacaccgacgactgggagaccgccgccctggacccccaggagtgccccaagggcgtggccgtgcagggcggcccaagcagcggcgcccctcctcccagcggcggcaggcggcccaagcagcggcgcccctcctcccagcggcggcagcccagccggctccccaacctctaccgaggagggcacctctgagtccgccacccccgagagcggccctggcacctccaccgagcccagcgagggcagcgcacccggcagccctgccggcagccccacctccacagaggagggaaccagcaccgagcccagcgaaggcagcgccccaggcaccagcaccgagcctagtgagcaggagattaaacggatcaacaagatcagaagaagacttgtgaaagacagcaacaccaagaaggccggcaagacaggccccatgaaaaccctgctggttagagtgatgacacccgatctgagagagcggctggaaaacctgagaaagaagcctgaaaatatcccccagcccatcagcaatacatctagagccaacctgaataagctgctgaccgattacaccgaaatgaagaaggcgatcctgcatgtgtactgggaagagttccagaaggaccctgtgggcctgatgagccgggtggcccagcctgccagcaagaagatcgatcagaacaagctgaaacctgagatggacgagaagggcaacctgaccaccgccggctttgcctgctctcagtgtggccagcccctgttcgtgtacaagctggagcaggtgtctgagaagggcaaggcttacaccaactacttcggacggtgcaatgtggccgagcacgaaaagctgatcctgctggcccagctgaagcccgagaaggatagcgacgaagccgtgacatatagcctgggaaagtttgggcagagggccctggatttctacagcattcatgtgaccaaggagtccacccaccccgtgaagcccctggcccagatcgccggaaacagatacgcctccggacctgtgggaaaggccctgagcgacgcatgtatgggcacaatcgcctccttcctgtctaagtaccaggacatcatcatcgaacaccagaaggtggtgaagggcaaccagaagagactggagagcctgcgggagctggccggcaaggaaaacctggaataccctagcgtgaccctgccacctcagcctcacaccaaggagggcgttgatgcctacaacgaagtgatcgcccgggtgcgaatgtgggtgaacctgaacctgtggcagaagctgaagctaagcagagatgatgccaagcctctgctgagactgaagggattcccttcctttcctctggtcgagagacaggccaacgaagtggactggtgggacatggtgtgtaacgtgaagaagctgatcaacgagaaaaaggaggatggcaaggtgttttggcagaatctggctggctacaagagacaggaagccctgagaccatacctgagcagcgaggaagatcggaagaagggaaagaaattcgctcggtaccagctgggcgacctgctgctgcacctggaaaagaagcacggcgaggactggggaaaggtgtacgacgaggcctgggagcggattgacaagaaagtggaaggcctgagcaagcacatcaagctggaagaggaacggagaagcgaggacgcccagagcaaggccgccctgaccgactggctgcgggctaaggccagcttcgtgatcgagggcctgaaggaggccgacaaggacgagttctgcagatgcgagctgaagctgcagaagtggtacggggacctgcggggaaagcccttcgccatcgaagccgagaacagcatcctggacatcagcggcttcagcaagcagtacaactgtgccttcatctggcagaaggacggcgtgaagaagctgaacctgtacctgatcatcaactacttcaagggcggcaagctgcggttcaagaagatcaaacctgaagccttcgaagccaacagattctacaccgtgatcaacaaaaagagcggcgagatcgtgcccatggaggtgaacttcaacttcgacgaccccaacctgatcatcctgcctctggcctttggcaagagacagggcagagaattcatctggaacgacctgctgtccctggaaaccggcagcctgaagctggccaacggaagagtgatcgagaagacactgtacaacagaagaacccggcaggatgagcctgccctgttcgtggccctgaccttcgagcggcgggaggtcctggactcctccaatatcaaaccaatgaacctgatcggcgtggcaagaggcgaaaacatccccgccgtgatcgccctgaccgaccccgagggctgcccactgagccggtttaaggatagcctgggaaacccaacccacatcctgagaatcggcgagagctataaggagaagcagcggaccatccaggccaagaaggaggtggagcagcggagagccggcggctacagccggaagtacgccagcaaagccaagaatctggcagacgatatggtgagaaacaccgctagagatctgctgtactacgccgtgacccaggatgccatgctgatcttcgccaacctgagccggggcttcggccggcagggcaagcggaccttcatggccgagagacagtacacacggatggaggactggctgaccgccaagctggcctacgagggcctgagcaagacctacctgtccaagacactggcccagtacacctccaagacatgcagcaactgtgggtttaccatcaccagcgccgactacgacagggtgctggagaagctgaagaagacagcaacaggctggatgaccacaattaacggcaaggagctgaaggtggagggccagattacctactacaacagatacaagagacagaacgtagtcaaggacctgtccgtcgagctggatagactgagcgaagaatctgtgaacaacgacatctcctcctggacaaagggcagaagcggagaagctctgagcctcctgaagaaaagattctcccatagacccgtgcaggagaagttcgtgtgcctgaactgcggcttcgagacacacgcagccgagcaagccgccctgaacatcgccagatcctggctgttcctgcggagccaggagtacaagaaataccagacaaacaagacaaccggcaacaccgataagagagccttcgtcgagacctggcagtccttttaccggaagaagcttaaggaggtgtggaaacctgccgtgcggtctggcggatctggcggaggctccaccagccccaagaaaaagagaaaagtctaagctgccttctgcggggcttgccttctggccatgcccttcttctctcccttgcacctgtacctcttggtctttgaataaagcctgagtaggaaggctagcaaaaaaaaaaaaaaaaaaaaaaaaaaaaaaaaaaaaaaaaaaaaaaaaaaaaaaaaaaaaaaaaaaaaaaaaaaaaaaaagcccagccggctccccaacctctaccgaggagggcacctctgagtccgccacccccgagagcggccctggcacctccaccgagcccagcgagggcagcgcacccggcagccctgccggcagccccacctccacagaggagggaaccagcaccgagcccagcgaaggcagcgccccaggcaccagcaccgagcctagtgagcaggagattaaacggatcaacaagatcagaagaagacttgtgaaagacagcaacaccaagaaggccggcaagacaggccccatgaaaaccctgctggttagagtgatgacacccgatctgagagagcggctggaaaacctgagaaagaagcctgaaaatatcccccagcccatcagcaatacatctagagccaacctgaataagctgctgaccgattacaccgaaatgaagaaggcgatcctgcatgtgtactgggaagagttccagaaggaccctgtgggcctgatgagccgggtggcccagcctgccagcaagaagatcgatcagaacaagctgaaacctgagatggacgagaagggcaacctgaccaccgccggctttgcctgctctcagtgtggccagcccctgttcgtgtacaagctggagcaggtgtctgagaagggcaaggcttacaccaactacttcggacggtgcaatgtggccgagcacgaaaagctgatcctgctggcccagctgaagcccgagaaggatagcgacgaagccgtgacatatagcctgggaaagtttgggcagagggccctggatttctacagcattcatgtgaccaaggagtccacccaccccgtgaagcccctggcccagatcgccggaaacagatacgcctccggacctgtgggaaaggccctgagcgacgcatgtatgggcacaatcgcctccttcctgtctaagtaccaggacatcatcatcgaacaccagaaggtggtgaagggcaaccagaagagactggagagcctgcgggagctggccggcaaggaaaacctggaataccctagcgtgaccctgccacctcagcctcacaccaaggagggcgttgatgcctacaacgaagtgatcgcccgggtgcgaatgtgggtgaacctgaacctgtggcagaagctgaagctaagcagagatgatgccaagcctctgctgagactgaagggattcccttcctttcctctggtcgagagacaggccaacgaagtggactggtgggacatggtgtgtaacgtgaagaagctgatcaacgagaaaaaggaggatggcaaggtgttttggcagaatctggctggctacaagagacaggaagccctgagaccatacctgagcagcgaggaagatcggaagaagggaaagaaattcgctcggtaccagctgggcgacctgctgctgcacctggaaaagaagcacggcgaggactggggaaaggtgtacgacgaggcctgggagcggattgacaagaaagtggaaggcctgagcaagcacatcaagctggaagaggaacggagaagcgaggacgcccagagcaaggccgccctgaccgactggctgcgggctaaggccagcttcgtgatcgagggcctgaaggaggccgacaaggacgagttctgcagatgcgagctgaagctgcagaagtggtacggggacctgcggggaaagcccttcgccatcgaagccgagaacagcatcctggacatcagcggcttcagcaagcagtacaactgtgccttcatctggcagaaggacggcgtgaagaagctgaacctgtacctgatcatcaactacttcaagggcggcaagctgcggttcaagaagatcaaacctgaagccttcgaagccaacagattctacaccgtgatcaacaaaaagagcggcgagatcgtgcccatggaggtgaacttcaacttcgacgaccccaacctgatcatcctgcctctggcctttggcaagagacagggcagagaattcatctggaacgacctgctgtccctggaaaccggcagcctgaagctggccaacggaagagtgatcgagaagacactgtacaacagaagaacccggcaggatgagcctgccctgttcgtggccctgaccttcgagcggcgggaggtcctggactcctccaatatcaaaccaatgaacctgatcggcgtggcaagaggcgaaaacatccccgccgtgatcgccctgaccgaccccgagggctgcccactgagccggtttaaggatagcctgggaaacccaacccacatcctgagaatcggcgagagctataaggagaagcagcggaccatccaggccaagaaggaggtggagcagcggagagccggcggctacagccggaagtacgccagcaaagccaagaatctggcagacgatatggtgagaaacaccgctagagatctgctgtactacgccgtgacccaggatgccatgctgatcttcgccaacctgagccggggcttcggccggcagggcaagcggaccttcatggccgagagacagtacacacggatggaggactggctgaccgccaagctggcctacgagggcctgagcaagacctacctgtccaagacactggcccagtacacctccaagacatgcagcaactgtgggtttaccatcaccagcgccgactacgacagggtgctggagaagctgaagaagacagcaacaggctggatgaccacaattaacggcaaggagctgaaggtggagggccagattacctactacaacagatacaagagacagaacgtagtcaaggacctgtccgtcgagctggatagactgagcgaagaatctgtgaacaacgacatctcctcctggacaaagggcagaagcggagaagctctgagcctcctgaagaaaagattctcccatagacccgtgcaggagaagttcgtgtgcctgaactgcggcttcgagacacacgcagccgagcaagccgccctgaacatcgccagatcctggctgttcctgcggagccaggagtacaagaaataccagacaaacaagacaaccggcaacaccgataagagagccttcgtcgagacctggcagtccttttaccggaagaagcttaaggaggtgtggaaacctgccgtgcggtctggcggatctggcggaggctccaccagccccaagaaaaagagaaaagtctaagctgccttctgcggggcttgccttctggccatgcccttcttctctcccttgcacctgtacctcttggtctttgaataaagcctgagtaggaaggctagcaaaaaaaaaaaaaaaaaaaaaaaaaaaaaaaaaaaaaaaaaaaaaaaaaaaaaaaaaaaaaaaaaaaaaaaaaaaaaaaa

SEQ ID NO: 10082 - RNA, 8787 nt, synthetic construct
  source 1..8787: mol_type = other RNA
aggaaataagagagaaaagaagagtaagaagaaatataagagccaccatggcccctaagaagaagcgtaaagtgagccggatgaaccacgaccaggagttcgacccccctaaggtgtaccctcccgtccccgccgagaagagaaagcccatccgggtcctgagcctgttcgatggcatcgccaccggtctgctggtgctgaaggacctgggcatccaggtggataggtacattgcctccgaggtgtgcgaggactccatcaccgtgggaatggtgcgtcatcagggcaagatcatgtacgtgggcgacgtgcggagcgtgacacagaagcatatccaggagtggggccctttcgacctggtgatcggcggcagcccttgcaatgacctgagcatcgtgaacccagcccggaagggcctgtacgagggaaccggcagactgttcttcgagttttacagactgctgcacgacgcccggcctaaggaaggcgacgaccggcccttcttttggctgttcgagaatgtggtggccatgggagtcagcgacaagcgggatattagccggttcctggagagcaaccccgtgatgatcgatgccaaggaagtgagcgccgcccaccgggccagatacttctggggcaatctgcctggcatgaacagacccctggccagcaccgtgaacgacaagctggagctgcaggagtgcctggagcacggccggatcgccaagttcagcaaggtgagaaccatcaccacccgaagcaacagcatcaaacaaggcaaggaccagcactttcctgtgttcatgaacgagaaggaggacatcctgtggtgtaccgagatggagagagtgttcgggttcccagtccactacacagatgtcagcaacatgtctagactggccagacagagactgctgggaagaagctggtccgtccctgtgatcagacacctgttcgcccctctgaaggagtacttcgcctgcgtgagcagcggcaacagcaacgccaacagccggggccccagcttctctagcggcctggtgccactgtccctgagagggagccacatgggccccatggagatctacaaaaccgtgagcgcctggaagcggcagcctgtgcgcgtgctgagcctgtttcggaatatcgataaagtcctgaaaagcctgggattcctggagagcggctctggctccggcggtggcaccctgaagtacgtggaggatgtgacaaacgtggtcagacgggatgtggagaagtggggccccttcgatctggtgtacggcagcacccaacccctgggcagctcttgtgaccggtgccctggctggtacatgtttcagttccaccggatcctgcagtacgccctgccgagacaggagtcccagcggccattcttttggattttcatggacaacttgctgctgaccgaggatgaccaggaaactaccactcggttcctgcagaccgaagccgtgaccctgcaggacgtgagaggccgggactaccagaacgccatgcgggtgtggtccaacatccctggactgaaaagcaagcacgcacctctgacccctaaagaagaggagtacctgcaggcccaggtgcggagcagaagcaagctggacgcccctaaggtggatctgctggtgaagaattgcctcctgcccctgagagagtacttcaagtatttcagccagaatagtctgcccctgggaggcagcggcggcggcaagcccggcgccctgagcttcgccgacgtggccgtgtacttcagccccgaggagtggggctgcctgaggcccgcccagagggccctgtacagggacgtgatgagggagacctacggccacctgggcgccctgggcttccccggccccaagcccgccctgatcagctggatggagcaggagagcgaggcctggagcagcgccgcccaggaccccgagaagggcgagagcctgggcggcgccaggggcggcccaagcagcggcgcccctcctcccagcggcggcaggcggcccaagcagcggcgcccctcctcccagcggcggcagcccagccggctccccaacctctaccgaggagggcacctctgagtccgccacccccgagagcggccctggcacctccaccgagcccagcgagggcagcgcacccggcagccctgccggcagccccacctccacagaggagggaaccagcaccgagcccagcgaaggcagcgccccaggcaccagcaccgagcctagtgagcaggagattaaacggatcaacaagatcagaagaagacttgtgaaagacagcaacaccaagaaggccggcaagacaggccccatgaaaaccctgctggttagagtgatgacacccgatctgagagagcggctggaaaacctgagaaagaagcctgaaaatatcccccagcccatcagcaatacatctagagccaacctgaataagctgctgaccgattacaccgaaatgaagaaggcgatcctgcatgtgtactgggaagagttccagaaggaccctgtgggcctgatgagccgggtggcccagcctgccagcaagaagatcgatcagaacaagctgaaacctgagatggacgagaagggcaacctgaccaccgccggctttgcctgctctcagtgtggccagcccctgttcgtgtacaagctggagcaggtgtctgagaagggcaaggcttacaccaactacttcggacggtgcaatgtggccgagcacgaaaagctgatcctgctggcccagctgaagcccgagaaggatagcgacgaagccgtgacatatagcctgggaaagtttgggcagagggccctggatttctacagcattcatgtgaccaaggagtccacccaccccgtgaagcccctggcccagatcgccggaaacagatacgcctccggacctgtgggaaaggccctgagcgacgcatgtatgggcacaatcgcctccttcctgtctaagtaccaggacatcatcatcgaacaccagaaggtggtgaagggcaaccagaagagactggagagcctgcgggagctggccggcaaggaaaacctggaataccctagcgtgaccctgccacctcagcctcacaccaaggagggcgttgatgcctacaacgaagtgatcgcccgggtgcgaatgtgggtgaacctgaacctgtggcagaagctgaagctaagcagagatgatgccaagcctctgctgagactgaagggattcccttcctttcctctggtcgagagacaggccaacgaagtggactggtgggacatggtgtgtaacgtgaagaagctgatcaacgagaaaaaggaggatggcaaggtgttttggcagaatctggctggctacaagagacaggaagccctgagaccatacctgagcagcgaggaagatcggaagaagggaaagaaattcgctcggtaccagctgggcgacctgctgctgcacctggaaaagaagcacggcgaggactggggaaaggtgtacgacgaggcctgggagcggattgacaagaaagtggaaggcctgagcaagcacatcaagctggaagaggaacggagaagcgaggacgcccagagcaaggccgccctgaccgactggctgcgggctaaggccagcttcgtgatcgagggcctgaaggaggccgacaaggacgagttctgcagatgcgagctgaagctgcagaagtggtacggggacctgcggggaaagcccttcgccatcgaagccgagaacagcatcctggacatcagcggcttcagcaagcagtacaactgtgccttcatctggcagaaggacggcgtgaagaagctgaacctgtacctgatcatcaactacttcaagggcggcaagctgcggttcaagaagatcaaacctgaagccttcgaagccaacagattctacaccgtgatcaacaaaaagagcggcgagatcgtgcccatggaggtgaacttcaacttcgacgaccccaacctgatcatcctgcctctggcctttggcaagagacagggcagagaattcatctggaacgacctgctgtccctggaaaccggcagcctgaagctggccaacggaagagtgatcgagaagacactgtacaacagaagaacccggcaggatgagcctgccctgttcgtggccctgaccttcgagcggcgggaggtcctggactcctccaatatcaaaccaatgaacctgatcggcgtggcaagaggcgaaaacatccccgccgtgatcgccctgaccgaccccgagggctgcccactgagccggtttaaggatagcctgggaaacccaacccacatcctgagaatcggcgagagctataaggagaagcagcggaccatccaggccaagaaggaggtggagcagcggagagccggcggctacagccggaagtacgccagcaaagccaagaatctggcagacgatatggtgagaaacaccgctagagatctgctgtactacgccgtgacccaggatgccatgctgatcttcgccaacctgagccggggcttcggccggcagggcaagcggaccttcatggccgagagacagtacacacggatggaggactggctgaccgccaagctggcctacgagggcctgagcaagacctacctgtccaagacactggcccagtacacctccaagacatgcagcaactgtgggtttaccatcaccagcgccgactacgacagggtgctggagaagctgaagaagacagcaacaggctggatgaccacaattaacggcaaggagctgaaggtggagggccagattacctactacaacagatacaagagacagaacgtagtcaaggacctgtccgtcgagctggatagactgagcgaagaatctgtgaacaacgacatctcctcctggacaaagggcagaagcggagaagctctgagcctcctgaagaaaagattctcccatagacccgtgcaggagaagttcgtgtgcctgaactgcggcttcgagacacacgcagccgagcaagccgccctgaacatcgccagatcctggctgttcctgcggagccaggagtacaagaaataccagacaaacaagacaaccggcaacaccgataagagagccttcgtcgagacctggcagtccttttaccggaagaagcttaaggaggtgtggaaacctgccgtgcggtctggcggatctggcggaggctccaccagccccaagaaaaagagaaaagtctaagctgccttctgcggggcttgccttctggccatgcccttcttctctcccttgcacctgtacctcttggtctttgaataaagcctgagtaggaaggctagcaaaaaaaaaaaaaaaaaaaaaaaaaaaaaaaaaaaaaaaaaaaaaaaaaaaaaaaaaaaaaaaaaaaaaaaaaaaaaaaagcccagccggctccccaacctctaccgaggagggcacctctgagtccgccacccccgagagcggccctggcacctccaccgagcccagcgagggcagcgcacccggcagccctgccggcagccccacctccacagaggagggaaccagcaccgagcccagcgaaggcagcgccccaggcaccagcaccgagcctagtgagcaggagattaaacggatcaacaagatcagaagaagacttgtgaaagacagcaacaccaagaaggccggcaagacaggccccatgaaaaccctgctggttagagtgatgacacccgatctgagagagcggctggaaaacctgagaaagaagcctgaaaatatcccccagcccatcagcaatacatctagagccaacctgaataagctgctgaccgattacaccgaaatgaagaaggcgatcctgcatgtgtactgggaagagttccagaaggaccctgtgggcctgatgagccgggtggcccagcctgccagcaagaagatcgatcagaacaagctgaaacctgagatggacgagaagggcaacctgaccaccgccggctttgcctgctctcagtgtggccagcccctgttcgtgtacaagctggagcaggtgtctgagaagggcaaggcttacaccaactacttcggacggtgcaatgtggccgagcacgaaaagctgatcctgctggcccagctgaagcccgagaaggatagcgacgaagccgtgacatatagcctgggaaagtttgggcagagggccctggatttctacagcattcatgtgaccaaggagtccacccaccccgtgaagcccctggcccagatcgccggaaacagatacgcctccggacctgtgggaaaggccctgagcgacgcatgtatgggcacaatcgcctccttcctgtctaagtaccaggacatcatcatcgaacaccagaaggtggtgaagggcaaccagaagagactggagagcctgcgggagctggccggcaaggaaaacctggaataccctagcgtgaccctgccacctcagcctcacaccaaggagggcgttgatgcctacaacgaagtgatcgcccgggtgcgaatgtgggtgaacctgaacctgtggcagaagctgaagctaagcagagatgatgccaagcctctgctgagactgaagggattcccttcctttcctctggtcgagagacaggccaacgaagtggactggtgggacatggtgtgtaacgtgaagaagctgatcaacgagaaaaaggaggatggcaaggtgttttggcagaatctggctggctacaagagacaggaagccctgagaccatacctgagcagcgaggaagatcggaagaagggaaagaaattcgctcggtaccagctgggcgacctgctgctgcacctggaaaagaagcacggcgaggactggggaaaggtgtacgacgaggcctgggagcggattgacaagaaagtggaaggcctgagcaagcacatcaagctggaagaggaacggagaagcgaggacgcccagagcaaggccgccctgaccgactggctgcgggctaaggccagcttcgtgatcgagggcctgaaggaggccgacaaggacgagttctgcagatgcgagctgaagctgcagaagtggtacggggacctgcggggaaagcccttcgccatcgaagccgagaacagcatcctggacatcagcggcttcagcaagcagtacaactgtgccttcatctggcagaaggacggcgtgaagaagctgaacctgtacctgatcatcaactacttcaagggcggcaagctgcggttcaagaagatcaaacctgaagccttcgaagccaacagattctacaccgtgatcaacaaaaagagcggcgagatcgtgcccatggaggtgaacttcaacttcgacgaccccaacctgatcatcctgcctctggcctttggcaagagacagggcagagaattcatctggaacgacctgctgtccctggaaaccggcagcctgaagctggccaacggaagagtgatcgagaagacactgtacaacagaagaacccggcaggatgagcctgccctgttcgtggccctgaccttcgagcggcgggaggtcctggactcctccaatatcaaaccaatgaacctgatcggcgtggcaagaggcgaaaacatccccgccgtgatcgccctgaccgaccccgagggctgcccactgagccggtttaaggatagcctgggaaacccaacccacatcctgagaatcggcgagagctataaggagaagcagcggaccatccaggccaagaaggaggtggagcagcggagagccggcggctacagccggaagtacgccagcaaagccaagaatctggcagacgatatggtgagaaacaccgctagagatctgctgtactacgccgtgacccaggatgccatgctgatcttcgccaacctgagccggggcttcggccggcagggcaagcggaccttcatggccgagagacagtacacacggatggaggactggctgaccgccaagctggcctacgagggcctgagcaagacctacctgtccaagacactggcccagtacacctccaagacatgcagcaactgtgggtttaccatcaccagcgccgactacgacagggtgctggagaagctgaagaagacagcaacaggctggatgaccacaattaacggcaaggagctgaaggtggagggccagattacctactacaacagatacaagagacagaacgtagtcaaggacctgtccgtcgagctggatagactgagcgaagaatctgtgaacaacgacatctcctcctggacaaagggcagaagcggagaagctctgagcctcctgaagaaaagattctcccatagacccgtgcaggagaagttcgtgtgcctgaactgcggcttcgagacacacgcagccgagcaagccgccctgaacatcgccagatcctggctgttcctgcggagccaggagtacaagaaataccagacaaacaagacaaccggcaacaccgataagagagccttcgtcgagacctggcagtccttttaccggaagaagcttaaggaggtgtggaaacctgccgtgcggtctggcggatctggcggaggctccaccagccccaagaaaaagagaaaagtctaagctgccttctgcggggcttgccttctggccatgcccttcttctctcccttgcacctgtacctcttggtctttgaataaagcctgagtaggaaggctagcaaaaaaaaaaaaaaaaaaaaaaaaaaaaaaaaaaaaaaaaaaaaaaaaaaaaaaaaaaaaaaaaaaaaaaaaaaaaaaaa

SEQ ID NO: 10083 - RNA, 8787 nt, synthetic construct
  source 1..8787: mol_type = other RNA
aggaaataagagagaaaagaagagtaagaagaaatataagagccaccatggcccctaagaagaagcgtaaagtgagccggatgaaccacgaccaggagttcgacccccctaaggtgtaccctcccgtccccgccgagaagagaaagcccatccgggtcctgagcctgttcgatggcatcgccaccggtctgctggtgctgaaggacctgggcatccaggtggataggtacattgcctccgaggtgtgcgaggactccatcaccgtgggaatggtgcgtcatcagggcaagatcatgtacgtgggcgacgtgcggagcgtgacacagaagcatatccaggagtggggccctttcgacctggtgatcggcggcagcccttgcaatgacctgagcatcgtgaacccagcccggaagggcctgtacgagggaaccggcagactgttcttcgagttttacagactgctgcacgacgcccggcctaaggaaggcgacgaccggcccttcttttggctgttcgagaatgtggtggccatgggagtcagcgacaagcgggatattagccggttcctggagagcaaccccgtgatgatcgatgccaaggaagtgagcgccgcccaccgggccagatacttctggggcaatctgcctggcatgaacagacccctggccagcaccgtgaacgacaagctggagctgcaggagtgcctggagcacggccggatcgccaagttcagcaaggtgagaaccatcaccacccgaagcaacagcatcaaacaaggcaaggaccagcactttcctgtgttcatgaacgagaaggaggacatcctgtggtgtaccgagatggagagagtgttcgggttcccagtccactacacagatgtcagcaacatgtctagactggccagacagagactgctgggaagaagctggtccgtccctgtgatcagacacctgttcgcccctctgaaggagtacttcgcctgcgtgagcagcggcaacagcaacgccaacagccggggccccagcttctctagcggcctggtgccactgtccctgagagggagccacatgggccccatggagatctacaaaaccgtgagcgcctggaagcggcagcctgtgcgcgtgctgagcctgtttcggaatatcgataaagtcctgaaaagcctgggattcctggagagcggctctggctccggcggtggcaccctgaagtacgtggaggatgtgacaaacgtggtcagacgggatgtggagaagtggggccccttcgatctggtgtacggcagcacccaacccctgggcagctcttgtgaccggtgccctggctggtacatgtttcagttccaccggatcctgcagtacgccctgccgagacaggagtcccagcggccattcttttggattttcatggacaacttgctgctgaccgaggatgaccaggaaactaccactcggttcctgcagaccgaagccgtgaccctgcaggacgtgagaggccgggactaccagaacgccatgcgggtgtggtccaacatccctggactgaaaagcaagcacgcacctctgacccctaaagaagaggagtacctgcaggcccaggtgcggagcagaagcaagctggacgcccctaaggtggatctgctggtgaagaattgcctcctgcccctgagagagtacttcaagtatttcagccagaatagtctgcccctgggaggcagcggcggcggcgagcccggcgccgtgagcttcgccgacgtggccgtgtacttcagccccgaggagtggggctgcctgaggcccgcccagagggtgctgtacagggacgtgatgagggagacctacggccacctgggcgccctgggcttccccggccccaagcccgccctgatcagctggatggagcaggagagcgaggcctggagcagcgccgcccaggaccccgaggagggcgagagcctgggcggcgccctgggcggcccaagcagcggcgcccctcctcccagcggcggcaggcggcccaagcagcggcgcccctcctcccagcggcggcagcccagccggctccccaacctctaccgaggagggcacctctgagtccgccacccccgagagcggccctggcacctccaccgagcccagcgagggcagcgcacccggcagccctgccggcagccccacctccacagaggagggaaccagcaccgagcccagcgaaggcagcgccccaggcaccagcaccgagcctagtgagcaggagattaaacggatcaacaagatcagaagaagacttgtgaaagacagcaacaccaagaaggccggcaagacaggccccatgaaaaccctgctggttagagtgatgacacccgatctgagagagcggctggaaaacctgagaaagaagcctgaaaatatcccccagcccatcagcaatacatctagagccaacctgaataagctgctgaccgattacaccgaaatgaagaaggcgatcctgcatgtgtactgggaagagttccagaaggaccctgtgggcctgatgagccgggtggcccagcctgccagcaagaagatcgatcagaacaagctgaaacctgagatggacgagaagggcaacctgaccaccgccggctttgcctgctctcagtgtggccagcccctgttcgtgtacaagctggagcaggtgtctgagaagggcaaggcttacaccaactacttcggacggtgcaatgtggccgagcacgaaaagctgatcctgctggcccagctgaagcccgagaaggatagcgacgaagccgtgacatatagcctgggaaagtttgggcagagggccctggatttctacagcattcatgtgaccaaggagtccacccaccccgtgaagcccctggcccagatcgccggaaacagatacgcctccggacctgtgggaaaggccctgagcgacgcatgtatgggcacaatcgcctccttcctgtctaagtaccaggacatcatcatcgaacaccagaaggtggtgaagggcaaccagaagagactggagagcctgcgggagctggccggcaaggaaaacctggaataccctagcgtgaccctgccacctcagcctcacaccaaggagggcgttgatgcctacaacgaagtgatcgcccgggtgcgaatgtgggtgaacctgaacctgtggcagaagctgaagctaagcagagatgatgccaagcctctgctgagactgaagggattcccttcctttcctctggtcgagagacaggccaacgaagtggactggtgggacatggtgtgtaacgtgaagaagctgatcaacgagaaaaaggaggatggcaaggtgttttggcagaatctggctggctacaagagacaggaagccctgagaccatacctgagcagcgaggaagatcggaagaagggaaagaaattcgctcggtaccagctgggcgacctgctgctgcacctggaaaagaagcacggcgaggactggggaaaggtgtacgacgaggcctgggagcggattgacaagaaagtggaaggcctgagcaagcacatcaagctggaagaggaacggagaagcgaggacgcccagagcaaggccgccctgaccgactggctgcgggctaaggccagcttcgtgatcgagggcctgaaggaggccgacaaggacgagttctgcagatgcgagctgaagctgcagaagtggtacggggacctgcggggaaagcccttcgccatcgaagccgagaacagcatcctggacatcagcggcttcagcaagcagtacaactgtgccttcatctggcagaaggacggcgtgaagaagctgaacctgtacctgatcatcaactacttcaagggcggcaagctgcggttcaagaagatcaaacctgaagccttcgaagccaacagattctacaccgtgatcaacaaaaagagcggcgagatcgtgcccatggaggtgaacttcaacttcgacgaccccaacctgatcatcctgcctctggcctttggcaagagacagggcagagaattcatctggaacgacctgctgtccctggaaaccggcagcctgaagctggccaacggaagagtgatcgagaagacactgtacaacagaagaacccggcaggatgagcctgccctgttcgtggccctgaccttcgagcggcgggaggtcctggactcctccaatatcaaaccaatgaacctgatcggcgtggcaagaggcgaaaacatccccgccgtgatcgccctgaccgaccccgagggctgcccactgagccggtttaaggatagcctgggaaacccaacccacatcctgagaatcggcgagagctataaggagaagcagcggaccatccaggccaagaaggaggtggagcagcggagagccggcggctacagccggaagtacgccagcaaagccaagaatctggcagacgatatggtgagaaacaccgctagagatctgctgtactacgccgtgacccaggatgccatgctgatcttcgccaacctgagccggggcttcggccggcagggcaagcggaccttcatggccgagagacagtacacacggatggaggactggctgaccgccaagctggcctacgagggcctgagcaagacctacctgtccaagacactggcccagtacacctccaagacatgcagcaactgtgggtttaccatcaccagcgccgactacgacagggtgctggagaagctgaagaagacagcaacaggctggatgaccacaattaacggcaaggagctgaaggtggagggccagattacctactacaacagatacaagagacagaacgtagtcaaggacctgtccgtcgagctggatagactgagcgaagaatctgtgaacaacgacatctcctcctggacaaagggcagaagcggagaagctctgagcctcctgaagaaaagattctcccatagacccgtgcaggagaagttcgtgtgcctgaactgcggcttcgagacacacgcagccgagcaagccgccctgaacatcgccagatcctggctgttcctgcggagccaggagtacaagaaataccagacaaacaagacaaccggcaacaccgataagagagccttcgtcgagacctggcagtccttttaccggaagaagcttaaggaggtgtggaaacctgccgtgcggtctggcggatctggcggaggctccaccagccccaagaaaaagagaaaagtctaagctgccttctgcggggcttgccttctggccatgcccttcttctctcccttgcacctgtacctcttggtctttgaataaagcctgagtaggaaggctagcaaaaaaaaaaaaaaaaaaaaaaaaaaaaaaaaaaaaaaaaaaaaaaaaaaaaaaaaaaaaaaaaaaaaaaaaaaaaaaaagcccagccggctccccaacctctaccgaggagggcacctctgagtccgccacccccgagagcggccctggcacctccaccgagcccagcgagggcagcgcacccggcagccctgccggcagccccacctccacagaggagggaaccagcaccgagcccagcgaaggcagcgccccaggcaccagcaccgagcctagtgagcaggagattaaacggatcaacaagatcagaagaagacttgtgaaagacagcaacaccaagaaggccggcaagacaggccccatgaaaaccctgctggttagagtgatgacacccgatctgagagagcggctggaaaacctgagaaagaagcctgaaaatatcccccagcccatcagcaatacatctagagccaacctgaataagctgctgaccgattacaccgaaatgaagaaggcgatcctgcatgtgtactgggaagagttccagaaggaccctgtgggcctgatgagccgggtggcccagcctgccagcaagaagatcgatcagaacaagctgaaacctgagatggacgagaagggcaacctgaccaccgccggctttgcctgctctcagtgtggccagcccctgttcgtgtacaagctggagcaggtgtctgagaagggcaaggcttacaccaactacttcggacggtgcaatgtggccgagcacgaaaagctgatcctgctggcccagctgaagcccgagaaggatagcgacgaagccgtgacatatagcctgggaaagtttgggcagagggccctggatttctacagcattcatgtgaccaaggagtccacccaccccgtgaagcccctggcccagatcgccggaaacagatacgcctccggacctgtgggaaaggccctgagcgacgcatgtatgggcacaatcgcctccttcctgtctaagtaccaggacatcatcatcgaacaccagaaggtggtgaagggcaaccagaagagactggagagcctgcgggagctggccggcaaggaaaacctggaataccctagcgtgaccctgccacctcagcctcacaccaaggagggcgttgatgcctacaacgaagtgatcgcccgggtgcgaatgtgggtgaacctgaacctgtggcagaagctgaagctaagcagagatgatgccaagcctctgctgagactgaagggattcccttcctttcctctggtcgagagacaggccaacgaagtggactggtgggacatggtgtgtaacgtgaagaagctgatcaacgagaaaaaggaggatggcaaggtgttttggcagaatctggctggctacaagagacaggaagccctgagaccatacctgagcagcgaggaagatcggaagaagggaaagaaattcgctcggtaccagctgggcgacctgctgctgcacctggaaaagaagcacggcgaggactggggaaaggtgtacgacgaggcctgggagcggattgacaagaaagtggaaggcctgagcaagcacatcaagctggaagaggaacggagaagcgaggacgcccagagcaaggccgccctgaccgactggctgcgggctaaggccagcttcgtgatcgagggcctgaaggaggccgacaaggacgagttctgcagatgcgagctgaagctgcagaagtggtacggggacctgcggggaaagcccttcgccatcgaagccgagaacagcatcctggacatcagcggcttcagcaagcagtacaactgtgccttcatctggcagaaggacggcgtgaagaagctgaacctgtacctgatcatcaactacttcaagggcggcaagctgcggttcaagaagatcaaacctgaagccttcgaagccaacagattctacaccgtgatcaacaaaaagagcggcgagatcgtgcccatggaggtgaacttcaacttcgacgaccccaacctgatcatcctgcctctggcctttggcaagagacagggcagagaattcatctggaacgacctgctgtccctggaaaccggcagcctgaagctggccaacggaagagtgatcgagaagacactgtacaacagaagaacccggcaggatgagcctgccctgttcgtggccctgaccttcgagcggcgggaggtcctggactcctccaatatcaaaccaatgaacctgatcggcgtggcaagaggcgaaaacatccccgccgtgatcgccctgaccgaccccgagggctgcccactgagccggtttaaggatagcctgggaaacccaacccacatcctgagaatcggcgagagctataaggagaagcagcggaccatccaggccaagaaggaggtggagcagcggagagccggcggctacagccggaagtacgccagcaaagccaagaatctggcagacgatatggtgagaaacaccgctagagatctgctgtactacgccgtgacccaggatgccatgctgatcttcgccaacctgagccggggcttcggccggcagggcaagcggaccttcatggccgagagacagtacacacggatggaggactggctgaccgccaagctggcctacgagggcctgagcaagacctacctgtccaagacactggcccagtacacctccaagacatgcagcaactgtgggtttaccatcaccagcgccgactacgacagggtgctggagaagctgaagaagacagcaacaggctggatgaccacaattaacggcaaggagctgaaggtggagggccagattacctactacaacagatacaagagacagaacgtagtcaaggacctgtccgtcgagctggatagactgagcgaagaatctgtgaacaacgacatctcctcctggacaaagggcagaagcggagaagctctgagcctcctgaagaaaagattctcccatagacccgtgcaggagaagttcgtgtgcctgaactgcggcttcgagacacacgcagccgagcaagccgccctgaacatcgccagatcctggctgttcctgcggagccaggagtacaagaaataccagacaaacaagacaaccggcaacaccgataagagagccttcgtcgagacctggcagtccttttaccggaagaagcttaaggaggtgtggaaacctgccgtgcggtctggcggatctggcggaggctccaccagccccaagaaaaagagaaaagtctaagctgccttctgcggggcttgccttctggccatgcccttcttctctcccttgcacctgtacctcttggtctttgaataaagcctgagtaggaaggctagcaaaaaaaaaaaaaaaaaaaaaaaaaaaaaaaaaaaaaaaaaaaaaaaaaaaaaaaaaaaaaaaaaaaaaaaaaaaaaaaa

SEQ ID NO: 10084 - RNA, 8790 nt, synthetic construct
  source 1..8790: mol_type = other RNA
aggaaataagagagaaaagaagagtaagaagaaatataagagccaccatggcccctaagaagaagcgtaaagtgagccggatgaaccacgaccaggagttcgacccccctaaggtgtaccctcccgtccccgccgagaagagaaagcccatccgggtcctgagcctgttcgatggcatcgccaccggtctgctggtgctgaaggacctgggcatccaggtggataggtacattgcctccgaggtgtgcgaggactccatcaccgtgggaatggtgcgtcatcagggcaagatcatgtacgtgggcgacgtgcggagcgtgacacagaagcatatccaggagtggggccctttcgacctggtgatcggcggcagcccttgcaatgacctgagcatcgtgaacccagcccggaagggcctgtacgagggaaccggcagactgttcttcgagttttacagactgctgcacgacgcccggcctaaggaaggcgacgaccggcccttcttttggctgttcgagaatgtggtggccatgggagtcagcgacaagcgggatattagccggttcctggagagcaaccccgtgatgatcgatgccaaggaagtgagcgccgcccaccgggccagatacttctggggcaatctgcctggcatgaacagacccctggccagcaccgtgaacgacaagctggagctgcaggagtgcctggagcacggccggatcgccaagttcagcaaggtgagaaccatcaccacccgaagcaacagcatcaaacaaggcaaggaccagcactttcctgtgttcatgaacgagaaggaggacatcctgtggtgtaccgagatggagagagtgttcgggttcccagtccactacacagatgtcagcaacatgtctagactggccagacagagactgctgggaagaagctggtccgtccctgtgatcagacacctgttcgcccctctgaaggagtacttcgcctgcgtgagcagcggcaacagcaacgccaacagccggggccccagcttctctagcggcctggtgccactgtccctgagagggagccacatgggccccatggagatctacaaaaccgtgagcgcctggaagcggcagcctgtgcgcgtgctgagcctgtttcggaatatcgataaagtcctgaaaagcctgggattcctggagagcggctctggctccggcggtggcaccctgaagtacgtggaggatgtgacaaacgtggtcagacgggatgtggagaagtggggccccttcgatctggtgtacggcagcacccaacccctgggcagctcttgtgaccggtgccctggctggtacatgtttcagttccaccggatcctgcagtacgccctgccgagacaggagtcccagcggccattcttttggattttcatggacaacttgctgctgaccgaggatgaccaggaaactaccactcggttcctgcagaccgaagccgtgaccctgcaggacgtgagaggccgggactaccagaacgccatgcgggtgtggtccaacatccctggactgaaaagcaagcacgcacctctgacccctaaagaagaggagtacctgcaggcccaggtgcggagcagaagcaagctggacgcccctaaggtggatctgctggtgaagaattgcctcctgcccctgagagagtacttcaagtatttcagccagaatagtctgcccctgggaggcagcggcggcggcgtgaccttcgaggacgtggccgtgaacttcaccagcggcgagtgggccctgctggacagcagccagaagaagctgtacagggacgtgatgaaggagaccttcctgaacctgatcagcatcgagaagggcctggagcccaacatcgaggagcactacaaggacttctgcaggaacctgaggacccagctggtggagaaggactggggctacgagtacaacaggcagtgggacgacaacctgcagaccggcggcccaagcagcggcgcccctcctcccagcggcggcaggcggcccaagcagcggcgcccctcctcccagcggcggcagcccagccggctccccaacctctaccgaggagggcacctctgagtccgccacccccgagagcggccctggcacctccaccgagcccagcgagggcagcgcacccggcagccctgccggcagccccacctccacagaggagggaaccagcaccgagcccagcgaaggcagcgccccaggcaccagcaccgagcctagtgagcaggagattaaacggatcaacaagatcagaagaagacttgtgaaagacagcaacaccaagaaggccggcaagacaggccccatgaaaaccctgctggttagagtgatgacacccgatctgagagagcggctggaaaacctgagaaagaagcctgaaaatatcccccagcccatcagcaatacatctagagccaacctgaataagctgctgaccgattacaccgaaatgaagaaggcgatcctgcatgtgtactgggaagagttccagaaggaccctgtgggcctgatgagccgggtggcccagcctgccagcaagaagatcgatcagaacaagctgaaacctgagatggacgagaagggcaacctgaccaccgccggctttgcctgctctcagtgtggccagcccctgttcgtgtacaagctggagcaggtgtctgagaagggcaaggcttacaccaactacttcggacggtgcaatgtggccgagcacgaaaagctgatcctgctggcccagctgaagcccgagaaggatagcgacgaagccgtgacatatagcctgggaaagtttgggcagagggccctggatttctacagcattcatgtgaccaaggagtccacccaccccgtgaagcccctggcccagatcgccggaaacagatacgcctccggacctgtgggaaaggccctgagcgacgcatgtatgggcacaatcgcctccttcctgtctaagtaccaggacatcatcatcgaacaccagaaggtggtgaagggcaaccagaagagactggagagcctgcgggagctggccggcaaggaaaacctggaataccctagcgtgaccctgccacctcagcctcacaccaaggagggcgttgatgcctacaacgaagtgatcgcccgggtgcgaatgtgggtgaacctgaacctgtggcagaagctgaagctaagcagagatgatgccaagcctctgctgagactgaagggattcccttcctttcctctggtcgagagacaggccaacgaagtggactggtgggacatggtgtgtaacgtgaagaagctgatcaacgagaaaaaggaggatggcaaggtgttttggcagaatctggctggctacaagagacaggaagccctgagaccatacctgagcagcgaggaagatcggaagaagggaaagaaattcgctcggtaccagctgggcgacctgctgctgcacctggaaaagaagcacggcgaggactggggaaaggtgtacgacgaggcctgggagcggattgacaagaaagtggaaggcctgagcaagcacatcaagctggaagaggaacggagaagcgaggacgcccagagcaaggccgccctgaccgactggctgcgggctaaggccagcttcgtgatcgagggcctgaaggaggccgacaaggacgagttctgcagatgcgagctgaagctgcagaagtggtacggggacctgcggggaaagcccttcgccatcgaagccgagaacagcatcctggacatcagcggcttcagcaagcagtacaactgtgccttcatctggcagaaggacggcgtgaagaagctgaacctgtacctgatcatcaactacttcaagggcggcaagctgcggttcaagaagatcaaacctgaagccttcgaagccaacagattctacaccgtgatcaacaaaaagagcggcgagatcgtgcccatggaggtgaacttcaacttcgacgaccccaacctgatcatcctgcctctggcctttggcaagagacagggcagagaattcatctggaacgacctgctgtccctggaaaccggcagcctgaagctggccaacggaagagtgatcgagaagacactgtacaacagaagaacccggcaggatgagcctgccctgttcgtggccctgaccttcgagcggcgggaggtcctggactcctccaatatcaaaccaatgaacctgatcggcgtggcaagaggcgaaaacatccccgccgtgatcgccctgaccgaccccgagggctgcccactgagccggtttaaggatagcctgggaaacccaacccacatcctgagaatcggcgagagctataaggagaagcagcggaccatccaggccaagaaggaggtggagcagcggagagccggcggctacagccggaagtacgccagcaaagccaagaatctggcagacgatatggtgagaaacaccgctagagatctgctgtactacgccgtgacccaggatgccatgctgatcttcgccaacctgagccggggcttcggccggcagggcaagcggaccttcatggccgagagacagtacacacggatggaggactggctgaccgccaagctggcctacgagggcctgagcaagacctacctgtccaagacactggcccagtacacctccaagacatgcagcaactgtgggtttaccatcaccagcgccgactacgacagggtgctggagaagctgaagaagacagcaacaggctggatgaccacaattaacggcaaggagctgaaggtggagggccagattacctactacaacagatacaagagacagaacgtagtcaaggacctgtccgtcgagctggatagactgagcgaagaatctgtgaacaacgacatctcctcctggacaaagggcagaagcggagaagctctgagcctcctgaagaaaagattctcccatagacccgtgcaggagaagttcgtgtgcctgaactgcggcttcgagacacacgcagccgagcaagccgccctgaacatcgccagatcctggctgttcctgcggagccaggagtacaagaaataccagacaaacaagacaaccggcaacaccgataagagagccttcgtcgagacctggcagtccttttaccggaagaagcttaaggaggtgtggaaacctgccgtgcggtctggcggatctggcggaggctccaccagccccaagaaaaagagaaaagtctaagctgccttctgcggggcttgccttctggccatgcccttcttctctcccttgcacctgtacctcttggtctttgaataaagcctgagtaggaaggctagcaaaaaaaaaaaaaaaaaaaaaaaaaaaaaaaaaaaaaaaaaaaaaaaaaaaaaaaaaaaaaaaaaaaaaaaaaaaaaaaagcccagccggctccccaacctctaccgaggagggcacctctgagtccgccacccccgagagcggccctggcacctccaccgagcccagcgagggcagcgcacccggcagccctgccggcagccccacctccacagaggagggaaccagcaccgagcccagcgaaggcagcgccccaggcaccagcaccgagcctagtgagcaggagattaaacggatcaacaagatcagaagaagacttgtgaaagacagcaacaccaagaaggccggcaagacaggccccatgaaaaccctgctggttagagtgatgacacccgatctgagagagcggctggaaaacctgagaaagaagcctgaaaatatcccccagcccatcagcaatacatctagagccaacctgaataagctgctgaccgattacaccgaaatgaagaaggcgatcctgcatgtgtactgggaagagttccagaaggaccctgtgggcctgatgagccgggtggcccagcctgccagcaagaagatcgatcagaacaagctgaaacctgagatggacgagaagggcaacctgaccaccgccggctttgcctgctctcagtgtggccagcccctgttcgtgtacaagctggagcaggtgtctgagaagggcaaggcttacaccaactacttcggacggtgcaatgtggccgagcacgaaaagctgatcctgctggcccagctgaagcccgagaaggatagcgacgaagccgtgacatatagcctgggaaagtttgggcagagggccctggatttctacagcattcatgtgaccaaggagtccacccaccccgtgaagcccctggcccagatcgccggaaacagatacgcctccggacctgtgggaaaggccctgagcgacgcatgtatgggcacaatcgcctccttcctgtctaagtaccaggacatcatcatcgaacaccagaaggtggtgaagggcaaccagaagagactggagagcctgcgggagctggccggcaaggaaaacctggaataccctagcgtgaccctgccacctcagcctcacaccaaggagggcgttgatgcctacaacgaagtgatcgcccgggtgcgaatgtgggtgaacctgaacctgtggcagaagctgaagctaagcagagatgatgccaagcctctgctgagactgaagggattcccttcctttcctctggtcgagagacaggccaacgaagtggactggtgggacatggtgtgtaacgtgaagaagctgatcaacgagaaaaaggaggatggcaaggtgttttggcagaatctggctggctacaagagacaggaagccctgagaccatacctgagcagcgaggaagatcggaagaagggaaagaaattcgctcggtaccagctgggcgacctgctgctgcacctggaaaagaagcacggcgaggactggggaaaggtgtacgacgaggcctgggagcggattgacaagaaagtggaaggcctgagcaagcacatcaagctggaagaggaacggagaagcgaggacgcccagagcaaggccgccctgaccgactggctgcgggctaaggccagcttcgtgatcgagggcctgaaggaggccgacaaggacgagttctgcagatgcgagctgaagctgcagaagtggtacggggacctgcggggaaagcccttcgccatcgaagccgagaacagcatcctggacatcagcggcttcagcaagcagtacaactgtgccttcatctggcagaaggacggcgtgaagaagctgaacctgtacctgatcatcaactacttcaagggcggcaagctgcggttcaagaagatcaaacctgaagccttcgaagccaacagattctacaccgtgatcaacaaaaagagcggcgagatcgtgcccatggaggtgaacttcaacttcgacgaccccaacctgatcatcctgcctctggcctttggcaagagacagggcagagaattcatctggaacgacctgctgtccctggaaaccggcagcctgaagctggccaacggaagagtgatcgagaagacactgtacaacagaagaacccggcaggatgagcctgccctgttcgtggccctgaccttcgagcggcgggaggtcctggactcctccaatatcaaaccaatgaacctgatcggcgtggcaagaggcgaaaacatccccgccgtgatcgccctgaccgaccccgagggctgcccactgagccggtttaaggatagcctgggaaacccaacccacatcctgagaatcggcgagagctataaggagaagcagcggaccatccaggccaagaaggaggtggagcagcggagagccggcggctacagccggaagtacgccagcaaagccaagaatctggcagacgatatggtgagaaacaccgctagagatctgctgtactacgccgtgacccaggatgccatgctgatcttcgccaacctgagccggggcttcggccggcagggcaagcggaccttcatggccgagagacagtacacacggatggaggactggctgaccgccaagctggcctacgagggcctgagcaagacctacctgtccaagacactggcccagtacacctccaagacatgcagcaactgtgggtttaccatcaccagcgccgactacgacagggtgctggagaagctgaagaagacagcaacaggctggatgaccacaattaacggcaaggagctgaaggtggagggccagattacctactacaacagatacaagagacagaacgtagtcaaggacctgtccgtcgagctggatagactgagcgaagaatctgtgaacaacgacatctcctcctggacaaagggcagaagcggagaagctctgagcctcctgaagaaaagattctcccatagacccgtgcaggagaagttcgtgtgcctgaactgcggcttcgagacacacgcagccgagcaagccgccctgaacatcgccagatcctggctgttcctgcggagccaggagtacaagaaataccagacaaacaagacaaccggcaacaccgataagagagccttcgtcgagacctggcagtccttttaccggaagaagcttaaggaggtgtggaaacctgccgtgcggtctggcggatctggcggaggctccaccagccccaagaaaaagagaaaagtctaagctgccttctgcggggcttgccttctggccatgcccttcttctctcccttgcacctgtacctcttggtctttgaataaagcctgagtaggaaggctagcaaaaaaaaaaaaaaaaaaaaaaaaaaaaaaaaaaaaaaaaaaaaaaaaaaaaaaaaaaaaaaaaaaaaaaaaaaaaaaaa

SEQ ID NO: 10085 - RNA, 8787 nt, synthetic construct
  source 1..8787: mol_type = other RNA
aggaaataagagagaaaagaagagtaagaagaaatataagagccaccatggcccctaagaagaagcgtaaagtgagccggatgaaccacgaccaggagttcgacccccctaaggtgtaccctcccgtccccgccgagaagagaaagcccatccgggtcctgagcctgttcgatggcatcgccaccggtctgctggtgctgaaggacctgggcatccaggtggataggtacattgcctccgaggtgtgcgaggactccatcaccgtgggaatggtgcgtcatcagggcaagatcatgtacgtgggcgacgtgcggagcgtgacacagaagcatatccaggagtggggccctttcgacctggtgatcggcggcagcccttgcaatgacctgagcatcgtgaacccagcccggaagggcctgtacgagggaaccggcagactgttcttcgagttttacagactgctgcacgacgcccggcctaaggaaggcgacgaccggcccttcttttggctgttcgagaatgtggtggccatgggagtcagcgacaagcgggatattagccggttcctggagagcaaccccgtgatgatcgatgccaaggaagtgagcgccgcccaccgggccagatacttctggggcaatctgcctggcatgaacagacccctggccagcaccgtgaacgacaagctggagctgcaggagtgcctggagcacggccggatcgccaagttcagcaaggtgagaaccatcaccacccgaagcaacagcatcaaacaaggcaaggaccagcactttcctgtgttcatgaacgagaaggaggacatcctgtggtgtaccgagatggagagagtgttcgggttcccagtccactacacagatgtcagcaacatgtctagactggccagacagagactgctgggaagaagctggtccgtccctgtgatcagacacctgttcgcccctctgaaggagtacttcgcctgcgtgagcagcggcaacagcaacgccaacagccggggccccagcttctctagcggcctggtgccactgtccctgagagggagccacatgggccccatggagatctacaaaaccgtgagcgcctggaagcggcagcctgtgcgcgtgctgagcctgtttcggaatatcgataaagtcctgaaaagcctgggattcctggagagcggctctggctccggcggtggcaccctgaagtacgtggaggatgtgacaaacgtggtcagacgggatgtggagaagtggggccccttcgatctggtgtacggcagcacccaacccctgggcagctcttgtgaccggtgccctggctggtacatgtttcagttccaccggatcctgcagtacgccctgccgagacaggagtcccagcggccattcttttggattttcatggacaacttgctgctgaccgaggatgaccaggaaactaccactcggttcctgcagaccgaagccgtgaccctgcaggacgtgagaggccgggactaccagaacgccatgcgggtgtggtccaacatccctggactgaaaagcaagcacgcacctctgacccctaaagaagaggagtacctgcaggcccaggtgcggagcagaagcaagctggacgcccctaaggtggatctgctggtgaagaattgcctcctgcccctgagagagtacttcaagtatttcagccagaatagtctgcccctgggaggcagcggcggcggcatgatgggcctggtgaccttcgaggacgtggccgtggacttcacccaggaggagtggcagtacctgaaccccccccagaggatcctgtacaggggcgtgatgatggagacctacaggaacctggtgttcgtggccggccagcaggccaccaagcccgacctgatcctgaagatggaggtggaggagccctacctggccgaggacaagatccccatctggagctgccccgaggaggcctgccagggcggcccaagcagcggcgcccctcctcccagcggcggcaggcggcccaagcagcggcgcccctcctcccagcggcggcagcccagccggctccccaacctctaccgaggagggcacctctgagtccgccacccccgagagcggccctggcacctccaccgagcccagcgagggcagcgcacccggcagccctgccggcagccccacctccacagaggagggaaccagcaccgagcccagcgaaggcagcgccccaggcaccagcaccgagcctagtgagcaggagattaaacggatcaacaagatcagaagaagacttgtgaaagacagcaacaccaagaaggccggcaagacaggccccatgaaaaccctgctggttagagtgatgacacccgatctgagagagcggctggaaaacctgagaaagaagcctgaaaatatcccccagcccatcagcaatacatctagagccaacctgaataagctgctgaccgattacaccgaaatgaagaaggcgatcctgcatgtgtactgggaagagttccagaaggaccctgtgggcctgatgagccgggtggcccagcctgccagcaagaagatcgatcagaacaagctgaaacctgagatggacgagaagggcaacctgaccaccgccggctttgcctgctctcagtgtggccagcccctgttcgtgtacaagctggagcaggtgtctgagaagggcaaggcttacaccaactacttcggacggtgcaatgtggccgagcacgaaaagctgatcctgctggcccagctgaagcccgagaaggatagcgacgaagccgtgacatatagcctgggaaagtttgggcagagggccctggatttctacagcattcatgtgaccaaggagtccacccaccccgtgaagcccctggcccagatcgccggaaacagatacgcctccggacctgtgggaaaggccctgagcgacgcatgtatgggcacaatcgcctccttcctgtctaagtaccaggacatcatcatcgaacaccagaaggtggtgaagggcaaccagaagagactggagagcctgcgggagctggccggcaaggaaaacctggaataccctagcgtgaccctgccacctcagcctcacaccaaggagggcgttgatgcctacaacgaagtgatcgcccgggtgcgaatgtgggtgaacctgaacctgtggcagaagctgaagctaagcagagatgatgccaagcctctgctgagactgaagggattcccttcctttcctctggtcgagagacaggccaacgaagtggactggtgggacatggtgtgtaacgtgaagaagctgatcaacgagaaaaaggaggatggcaaggtgttttggcagaatctggctggctacaagagacaggaagccctgagaccatacctgagcagcgaggaagatcggaagaagggaaagaaattcgctcggtaccagctgggcgacctgctgctgcacctggaaaagaagcacggcgaggactggggaaaggtgtacgacgaggcctgggagcggattgacaagaaagtggaaggcctgagcaagcacatcaagctggaagaggaacggagaagcgaggacgcccagagcaaggccgccctgaccgactggctgcgggctaaggccagcttcgtgatcgagggcctgaaggaggccgacaaggacgagttctgcagatgcgagctgaagctgcagaagtggtacggggacctgcggggaaagcccttcgccatcgaagccgagaacagcatcctggacatcagcggcttcagcaagcagtacaactgtgccttcatctggcagaaggacggcgtgaagaagctgaacctgtacctgatcatcaactacttcaagggcggcaagctgcggttcaagaagatcaaacctgaagccttcgaagccaacagattctacaccgtgatcaacaaaaagagcggcgagatcgtgcccatggaggtgaacttcaacttcgacgaccccaacctgatcatcctgcctctggcctttggcaagagacagggcagagaattcatctggaacgacctgctgtccctggaaaccggcagcctgaagctggccaacggaagagtgatcgagaagacactgtacaacagaagaacccggcaggatgagcctgccctgttcgtggccctgaccttcgagcggcgggaggtcctggactcctccaatatcaaaccaatgaacctgatcggcgtggcaagaggcgaaaacatccccgccgtgatcgccctgaccgaccccgagggctgcccactgagccggtttaaggatagcctgggaaacccaacccacatcctgagaatcggcgagagctataaggagaagcagcggaccatccaggccaagaaggaggtggagcagcggagagccggcggctacagccggaagtacgccagcaaagccaagaatctggcagacgatatggtgagaaacaccgctagagatctgctgtactacgccgtgacccaggatgccatgctgatcttcgccaacctgagccggggcttcggccggcagggcaagcggaccttcatggccgagagacagtacacacggatggaggactggctgaccgccaagctggcctacgagggcctgagcaagacctacctgtccaagacactggcccagtacacctccaagacatgcagcaactgtgggtttaccatcaccagcgccgactacgacagggtgctggagaagctgaagaagacagcaacaggctggatgaccacaattaacggcaaggagctgaaggtggagggccagattacctactacaacagatacaagagacagaacgtagtcaaggacctgtccgtcgagctggatagactgagcgaagaatctgtgaacaacgacatctcctcctggacaaagggcagaagcggagaagctctgagcctcctgaagaaaagattctcccatagacccgtgcaggagaagttcgtgtgcctgaactgcggcttcgagacacacgcagccgagcaagccgccctgaacatcgccagatcctggctgttcctgcggagccaggagtacaagaaataccagacaaacaagacaaccggcaacaccgataagagagccttcgtcgagacctggcagtccttttaccggaagaagcttaaggaggtgtggaaacctgccgtgcggtctggcggatctggcggaggctccaccagccccaagaaaaagagaaaagtctaagctgccttctgcggggcttgccttctggccatgcccttcttctctcccttgcacctgtacctcttggtctttgaataaagcctgagtaggaaggctagcaaaaaaaaaaaaaaaaaaaaaaaaaaaaaaaaaaaaaaaaaaaaaaaaaaaaaaaaaaaaaaaaaaaaaaaaaaaaaaaagcccagccggctccccaacctctaccgaggagggcacctctgagtccgccacccccgagagcggccctggcacctccaccgagcccagcgagggcagcgcacccggcagccctgccggcagccccacctccacagaggagggaaccagcaccgagcccagcgaaggcagcgccccaggcaccagcaccgagcctagtgagcaggagattaaacggatcaacaagatcagaagaagacttgtgaaagacagcaacaccaagaaggccggcaagacaggccccatgaaaaccctgctggttagagtgatgacacccgatctgagagagcggctggaaaacctgagaaagaagcctgaaaatatcccccagcccatcagcaatacatctagagccaacctgaataagctgctgaccgattacaccgaaatgaagaaggcgatcctgcatgtgtactgggaagagttccagaaggaccctgtgggcctgatgagccgggtggcccagcctgccagcaagaagatcgatcagaacaagctgaaacctgagatggacgagaagggcaacctgaccaccgccggctttgcctgctctcagtgtggccagcccctgttcgtgtacaagctggagcaggtgtctgagaagggcaaggcttacaccaactacttcggacggtgcaatgtggccgagcacgaaaagctgatcctgctggcccagctgaagcccgagaaggatagcgacgaagccgtgacatatagcctgggaaagtttgggcagagggccctggatttctacagcattcatgtgaccaaggagtccacccaccccgtgaagcccctggcccagatcgccggaaacagatacgcctccggacctgtgggaaaggccctgagcgacgcatgtatgggcacaatcgcctccttcctgtctaagtaccaggacatcatcatcgaacaccagaaggtggtgaagggcaaccagaagagactggagagcctgcgggagctggccggcaaggaaaacctggaataccctagcgtgaccctgccacctcagcctcacaccaaggagggcgttgatgcctacaacgaagtgatcgcccgggtgcgaatgtgggtgaacctgaacctgtggcagaagctgaagctaagcagagatgatgccaagcctctgctgagactgaagggattcccttcctttcctctggtcgagagacaggccaacgaagtggactggtgggacatggtgtgtaacgtgaagaagctgatcaacgagaaaaaggaggatggcaaggtgttttggcagaatctggctggctacaagagacaggaagccctgagaccatacctgagcagcgaggaagatcggaagaagggaaagaaattcgctcggtaccagctgggcgacctgctgctgcacctggaaaagaagcacggcgaggactggggaaaggtgtacgacgaggcctgggagcggattgacaagaaagtggaaggcctgagcaagcacatcaagctggaagaggaacggagaagcgaggacgcccagagcaaggccgccctgaccgactggctgcgggctaaggccagcttcgtgatcgagggcctgaaggaggccgacaaggacgagttctgcagatgcgagctgaagctgcagaagtggtacggggacctgcggggaaagcccttcgccatcgaagccgagaacagcatcctggacatcagcggcttcagcaagcagtacaactgtgccttcatctggcagaaggacggcgtgaagaagctgaacctgtacctgatcatcaactacttcaagggcggcaagctgcggttcaagaagatcaaacctgaagccttcgaagccaacagattctacaccgtgatcaacaaaaagagcggcgagatcgtgcccatggaggtgaacttcaacttcgacgaccccaacctgatcatcctgcctctggcctttggcaagagacagggcagagaattcatctggaacgacctgctgtccctggaaaccggcagcctgaagctggccaacggaagagtgatcgagaagacactgtacaacagaagaacccggcaggatgagcctgccctgttcgtggccctgaccttcgagcggcgggaggtcctggactcctccaatatcaaaccaatgaacctgatcggcgtggcaagaggcgaaaacatccccgccgtgatcgccctgaccgaccccgagggctgcccactgagccggtttaaggatagcctgggaaacccaacccacatcctgagaatcggcgagagctataaggagaagcagcggaccatccaggccaagaaggaggtggagcagcggagagccggcggctacagccggaagtacgccagcaaagccaagaatctggcagacgatatggtgagaaacaccgctagagatctgctgtactacgccgtgacccaggatgccatgctgatcttcgccaacctgagccggggcttcggccggcagggcaagcggaccttcatggccgagagacagtacacacggatggaggactggctgaccgccaagctggcctacgagggcctgagcaagacctacctgtccaagacactggcccagtacacctccaagacatgcagcaactgtgggtttaccatcaccagcgccgactacgacagggtgctggagaagctgaagaagacagcaacaggctggatgaccacaattaacggcaaggagctgaaggtggagggccagattacctactacaacagatacaagagacagaacgtagtcaaggacctgtccgtcgagctggatagactgagcgaagaatctgtgaacaacgacatctcctcctggacaaagggcagaagcggagaagctctgagcctcctgaagaaaagattctcccatagacccgtgcaggagaagttcgtgtgcctgaactgcggcttcgagacacacgcagccgagcaagccgccctgaacatcgccagatcctggctgttcctgcggagccaggagtacaagaaataccagacaaacaagacaaccggcaacaccgataagagagccttcgtcgagacctggcagtccttttaccggaagaagcttaaggaggtgtggaaacctgccgtgcggtctggcggatctggcggaggctccaccagccccaagaaaaagagaaaagtctaagctgccttctgcggggcttgccttctggccatgcccttcttctctcccttgcacctgtacctcttggtctttgaataaagcctgagtaggaaggctagcaaaaaaaaaaaaaaaaaaaaaaaaaaaaaaaaaaaaaaaaaaaaaaaaaaaaaaaaaaaaaaaaaaaaaaaaaaaaaaaa

SEQ ID NO: 10086 - RNA, 8787 nt, synthetic construct
  source 1..8787: mol_type = other RNA
aggaaataagagagaaaagaagagtaagaagaaatataagagccaccatggcccctaagaagaagcgtaaagtgagccggatgaaccacgaccaggagttcgacccccctaaggtgtaccctcccgtccccgccgagaagagaaagcccatccgggtcctgagcctgttcgatggcatcgccaccggtctgctggtgctgaaggacctgggcatccaggtggataggtacattgcctccgaggtgtgcgaggactccatcaccgtgggaatggtgcgtcatcagggcaagatcatgtacgtgggcgacgtgcggagcgtgacacagaagcatatccaggagtggggccctttcgacctggtgatcggcggcagcccttgcaatgacctgagcatcgtgaacccagcccggaagggcctgtacgagggaaccggcagactgttcttcgagttttacagactgctgcacgacgcccggcctaaggaaggcgacgaccggcccttcttttggctgttcgagaatgtggtggccatgggagtcagcgacaagcgggatattagccggttcctggagagcaaccccgtgatgatcgatgccaaggaagtgagcgccgcccaccgggccagatacttctggggcaatctgcctggcatgaacagacccctggccagcaccgtgaacgacaagctggagctgcaggagtgcctggagcacggccggatcgccaagttcagcaaggtgagaaccatcaccacccgaagcaacagcatcaaacaaggcaaggaccagcactttcctgtgttcatgaacgagaaggaggacatcctgtggtgtaccgagatggagagagtgttcgggttcccagtccactacacagatgtcagcaacatgtctagactggccagacagagactgctgggaagaagctggtccgtccctgtgatcagacacctgttcgcccctctgaaggagtacttcgcctgcgtgagcagcggcaacagcaacgccaacagccggggccccagcttctctagcggcctggtgccactgtccctgagagggagccacatgggccccatggagatctacaaaaccgtgagcgcctggaagcggcagcctgtgcgcgtgctgagcctgtttcggaatatcgataaagtcctgaaaagcctgggattcctggagagcggctctggctccggcggtggcaccctgaagtacgtggaggatgtgacaaacgtggtcagacgggatgtggagaagtggggccccttcgatctggtgtacggcagcacccaacccctgggcagctcttgtgaccggtgccctggctggtacatgtttcagttccaccggatcctgcagtacgccctgccgagacaggagtcccagcggccattcttttggattttcatggacaacttgctgctgaccgaggatgaccaggaaactaccactcggttcctgcagaccgaagccgtgaccctgcaggacgtgagaggccgggactaccagaacgccatgcgggtgtggtccaacatccctggactgaaaagcaagcacgcacctctgacccctaaagaagaggagtacctgcaggcccaggtgcggagcagaagcaagctggacgcccctaaggtggatctgctggtgaagaattgcctcctgcccctgagagagtacttcaagtatttcagccagaatagtctgcccctgggaggcagcggcggcggcagccaggagcccgtgaccttcgaggacgtggccgtgtacttcacccagaaccagtgggccaacctggacttcacccagagggccctgtacagggaggtgatgctggagaactacgccaacgtggccagcctggccttccccttccccaagcccgacctggtgagccagctggagaggggcgaggccccctggggccccgacccctgggaggccgaggtgctgaggggcgtgtgccccggcggcggcggcccaagcagcggcgcccctcctcccagcggcggcaggcggcccaagcagcggcgcccctcctcccagcggcggcagcccagccggctccccaacctctaccgaggagggcacctctgagtccgccacccccgagagcggccctggcacctccaccgagcccagcgagggcagcgcacccggcagccctgccggcagccccacctccacagaggagggaaccagcaccgagcccagcgaaggcagcgccccaggcaccagcaccgagcctagtgagcaggagattaaacggatcaacaagatcagaagaagacttgtgaaagacagcaacaccaagaaggccggcaagacaggccccatgaaaaccctgctggttagagtgatgacacccgatctgagagagcggctggaaaacctgagaaagaagcctgaaaatatcccccagcccatcagcaatacatctagagccaacctgaataagctgctgaccgattacaccgaaatgaagaaggcgatcctgcatgtgtactgggaagagttccagaaggaccctgtgggcctgatgagccgggtggcccagcctgccagcaagaagatcgatcagaacaagctgaaacctgagatggacgagaagggcaacctgaccaccgccggctttgcctgctctcagtgtggccagcccctgttcgtgtacaagctggagcaggtgtctgagaagggcaaggcttacaccaactacttcggacggtgcaatgtggccgagcacgaaaagctgatcctgctggcccagctgaagcccgagaaggatagcgacgaagccgtgacatatagcctgggaaagtttgggcagagggccctggatttctacagcattcatgtgaccaaggagtccacccaccccgtgaagcccctggcccagatcgccggaaacagatacgcctccggacctgtgggaaaggccctgagcgacgcatgtatgggcacaatcgcctccttcctgtctaagtaccaggacatcatcatcgaacaccagaaggtggtgaagggcaaccagaagagactggagagcctgcgggagctggccggcaaggaaaacctggaataccctagcgtgaccctgccacctcagcctcacaccaaggagggcgttgatgcctacaacgaagtgatcgcccgggtgcgaatgtgggtgaacctgaacctgtggcagaagctgaagctaagcagagatgatgccaagcctctgctgagactgaagggattcccttcctttcctctggtcgagagacaggccaacgaagtggactggtgggacatggtgtgtaacgtgaagaagctgatcaacgagaaaaaggaggatggcaaggtgttttggcagaatctggctggctacaagagacaggaagccctgagaccatacctgagcagcgaggaagatcggaagaagggaaagaaattcgctcggtaccagctgggcgacctgctgctgcacctggaaaagaagcacggcgaggactggggaaaggtgtacgacgaggcctgggagcggattgacaagaaagtggaaggcctgagcaagcacatcaagctggaagaggaacggagaagcgaggacgcccagagcaaggccgccctgaccgactggctgcgggctaaggccagcttcgtgatcgagggcctgaaggaggccgacaaggacgagttctgcagatgcgagctgaagctgcagaagtggtacggggacctgcggggaaagcccttcgccatcgaagccgagaacagcatcctggacatcagcggcttcagcaagcagtacaactgtgccttcatctggcagaaggacggcgtgaagaagctgaacctgtacctgatcatcaactacttcaagggcggcaagctgcggttcaagaagatcaaacctgaagccttcgaagccaacagattctacaccgtgatcaacaaaaagagcggcgagatcgtgcccatggaggtgaacttcaacttcgacgaccccaacctgatcatcctgcctctggcctttggcaagagacagggcagagaattcatctggaacgacctgctgtccctggaaaccggcagcctgaagctggccaacggaagagtgatcgagaagacactgtacaacagaagaacccggcaggatgagcctgccctgttcgtggccctgaccttcgagcggcgggaggtcctggactcctccaatatcaaaccaatgaacctgatcggcgtggcaagaggcgaaaacatccccgccgtgatcgccctgaccgaccccgagggctgcccactgagccggtttaaggatagcctgggaaacccaacccacatcctgagaatcggcgagagctataaggagaagcagcggaccatccaggccaagaaggaggtggagcagcggagagccggcggctacagccggaagtacgccagcaaagccaagaatctggcagacgatatggtgagaaacaccgctagagatctgctgtactacgccgtgacccaggatgccatgctgatcttcgccaacctgagccggggcttcggccggcagggcaagcggaccttcatggccgagagacagtacacacggatggaggactggctgaccgccaagctggcctacgagggcctgagcaagacctacctgtccaagacactggcccagtacacctccaagacatgcagcaactgtgggtttaccatcaccagcgccgactacgacagggtgctggagaagctgaagaagacagcaacaggctggatgaccacaattaacggcaaggagctgaaggtggagggccagattacctactacaacagatacaagagacagaacgtagtcaaggacctgtccgtcgagctggatagactgagcgaagaatctgtgaacaacgacatctcctcctggacaaagggcagaagcggagaagctctgagcctcctgaagaaaagattctcccatagacccgtgcaggagaagttcgtgtgcctgaactgcggcttcgagacacacgcagccgagcaagccgccctgaacatcgccagatcctggctgttcctgcggagccaggagtacaagaaataccagacaaacaagacaaccggcaacaccgataagagagccttcgtcgagacctggcagtccttttaccggaagaagcttaaggaggtgtggaaacctgccgtgcggtctggcggatctggcggaggctccaccagccccaagaaaaagagaaaagtctaagctgccttctgcggggcttgccttctggccatgcccttcttctctcccttgcacctgtacctcttggtctttgaataaagcctgagtaggaaggctagcaaaaaaaaaaaaaaaaaaaaaaaaaaaaaaaaaaaaaaaaaaaaaaaaaaaaaaaaaaaaaaaaaaaaaaaaaaaaaaaagcccagccggctccccaacctctaccgaggagggcacctctgagtccgccacccccgagagcggccctggcacctccaccgagcccagcgagggcagcgcacccggcagccctgccggcagccccacctccacagaggagggaaccagcaccgagcccagcgaaggcagcgccccaggcaccagcaccgagcctagtgagcaggagattaaacggatcaacaagatcagaagaagacttgtgaaagacagcaacaccaagaaggccggcaagacaggccccatgaaaaccctgctggttagagtgatgacacccgatctgagagagcggctggaaaacctgagaaagaagcctgaaaatatcccccagcccatcagcaatacatctagagccaacctgaataagctgctgaccgattacaccgaaatgaagaaggcgatcctgcatgtgtactgggaagagttccagaaggaccctgtgggcctgatgagccgggtggcccagcctgccagcaagaagatcgatcagaacaagctgaaacctgagatggacgagaagggcaacctgaccaccgccggctttgcctgctctcagtgtggccagcccctgttcgtgtacaagctggagcaggtgtctgagaagggcaaggcttacaccaactacttcggacggtgcaatgtggccgagcacgaaaagctgatcctgctggcccagctgaagcccgagaaggatagcgacgaagccgtgacatatagcctgggaaagtttgggcagagggccctggatttctacagcattcatgtgaccaaggagtccacccaccccgtgaagcccctggcccagatcgccggaaacagatacgcctccggacctgtgggaaaggccctgagcgacgcatgtatgggcacaatcgcctccttcctgtctaagtaccaggacatcatcatcgaacaccagaaggtggtgaagggcaaccagaagagactggagagcctgcgggagctggccggcaaggaaaacctggaataccctagcgtgaccctgccacctcagcctcacaccaaggagggcgttgatgcctacaacgaagtgatcgcccgggtgcgaatgtgggtgaacctgaacctgtggcagaagctgaagctaagcagagatgatgccaagcctctgctgagactgaagggattcccttcctttcctctggtcgagagacaggccaacgaagtggactggtgggacatggtgtgtaacgtgaagaagctgatcaacgagaaaaaggaggatggcaaggtgttttggcagaatctggctggctacaagagacaggaagccctgagaccatacctgagcagcgaggaagatcggaagaagggaaagaaattcgctcggtaccagctgggcgacctgctgctgcacctggaaaagaagcacggcgaggactggggaaaggtgtacgacgaggcctgggagcggattgacaagaaagtggaaggcctgagcaagcacatcaagctggaagaggaacggagaagcgaggacgcccagagcaaggccgccctgaccgactggctgcgggctaaggccagcttcgtgatcgagggcctgaaggaggccgacaaggacgagttctgcagatgcgagctgaagctgcagaagtggtacggggacctgcggggaaagcccttcgccatcgaagccgagaacagcatcctggacatcagcggcttcagcaagcagtacaactgtgccttcatctggcagaaggacggcgtgaagaagctgaacctgtacctgatcatcaactacttcaagggcggcaagctgcggttcaagaagatcaaacctgaagccttcgaagccaacagattctacaccgtgatcaacaaaaagagcggcgagatcgtgcccatggaggtgaacttcaacttcgacgaccccaacctgatcatcctgcctctggcctttggcaagagacagggcagagaattcatctggaacgacctgctgtccctggaaaccggcagcctgaagctggccaacggaagagtgatcgagaagacactgtacaacagaagaacccggcaggatgagcctgccctgttcgtggccctgaccttcgagcggcgggaggtcctggactcctccaatatcaaaccaatgaacctgatcggcgtggcaagaggcgaaaacatccccgccgtgatcgccctgaccgaccccgagggctgcccactgagccggtttaaggatagcctgggaaacccaacccacatcctgagaatcggcgagagctataaggagaagcagcggaccatccaggccaagaaggaggtggagcagcggagagccggcggctacagccggaagtacgccagcaaagccaagaatctggcagacgatatggtgagaaacaccgctagagatctgctgtactacgccgtgacccaggatgccatgctgatcttcgccaacctgagccggggcttcggccggcagggcaagcggaccttcatggccgagagacagtacacacggatggaggactggctgaccgccaagctggcctacgagggcctgagcaagacctacctgtccaagacactggcccagtacacctccaagacatgcagcaactgtgggtttaccatcaccagcgccgactacgacagggtgctggagaagctgaagaagacagcaacaggctggatgaccacaattaacggcaaggagctgaaggtggagggccagattacctactacaacagatacaagagacagaacgtagtcaaggacctgtccgtcgagctggatagactgagcgaagaatctgtgaacaacgacatctcctcctggacaaagggcagaagcggagaagctctgagcctcctgaagaaaagattctcccatagacccgtgcaggagaagttcgtgtgcctgaactgcggcttcgagacacacgcagccgagcaagccgccctgaacatcgccagatcctggctgttcctgcggagccaggagtacaagaaataccagacaaacaagacaaccggcaacaccgataagagagccttcgtcgagacctggcagtccttttaccggaagaagcttaaggaggtgtggaaacctgccgtgcggtctggcggatctggcggaggctccaccagccccaagaaaaagagaaaagtctaagctgccttctgcggggcttgccttctggccatgcccttcttctctcccttgcacctgtacctcttggtctttgaataaagcctgagtaggaaggctagcaaaaaaaaaaaaaaaaaaaaaaaaaaaaaaaaaaaaaaaaaaaaaaaaaaaaaaaaaaaaaaaaaaaaaaaaaaaaaaaa

SEQ ID NO: 10087 - RNA, 8787 nt, synthetic construct
  source 1..8787: mol_type = other RNA
aggaaataagagagaaaagaagagtaagaagaaatataagagccaccatggcccctaagaagaagcgtaaagtgagccggatgaaccacgaccaggagttcgacccccctaaggtgtaccctcccgtccccgccgagaagagaaagcccatccgggtcctgagcctgttcgatggcatcgccaccggtctgctggtgctgaaggacctgggcatccaggtggataggtacattgcctccgaggtgtgcgaggactccatcaccgtgggaatggtgcgtcatcagggcaagatcatgtacgtgggcgacgtgcggagcgtgacacagaagcatatccaggagtggggccctttcgacctggtgatcggcggcagcccttgcaatgacctgagcatcgtgaacccagcccggaagggcctgtacgagggaaccggcagactgttcttcgagttttacagactgctgcacgacgcccggcctaaggaaggcgacgaccggcccttcttttggctgttcgagaatgtggtggccatgggagtcagcgacaagcgggatattagccggttcctggagagcaaccccgtgatgatcgatgccaaggaagtgagcgccgcccaccgggccagatacttctggggcaatctgcctggcatgaacagacccctggccagcaccgtgaacgacaagctggagctgcaggagtgcctggagcacggccggatcgccaagttcagcaaggtgagaaccatcaccacccgaagcaacagcatcaaacaaggcaaggaccagcactttcctgtgttcatgaacgagaaggaggacatcctgtggtgtaccgagatggagagagtgttcgggttcccagtccactacacagatgtcagcaacatgtctagactggccagacagagactgctgggaagaagctggtccgtccctgtgatcagacacctgttcgcccctctgaaggagtacttcgcctgcgtgagcagcggcaacagcaacgccaacagccggggccccagcttctctagcggcctggtgccactgtccctgagagggagccacatgggccccatggagatctacaaaaccgtgagcgcctggaagcggcagcctgtgcgcgtgctgagcctgtttcggaatatcgataaagtcctgaaaagcctgggattcctggagagcggctctggctccggcggtggcaccctgaagtacgtggaggatgtgacaaacgtggtcagacgggatgtggagaagtggggccccttcgatctggtgtacggcagcacccaacccctgggcagctcttgtgaccggtgccctggctggtacatgtttcagttccaccggatcctgcagtacgccctgccgagacaggagtcccagcggccattcttttggattttcatggacaacttgctgctgaccgaggatgaccaggaaactaccactcggttcctgcagaccgaagccgtgaccctgcaggacgtgagaggccgggactaccagaacgccatgcgggtgtggtccaacatccctggactgaaaagcaagcacgcacctctgacccctaaagaagaggagtacctgcaggcccaggtgcggagcagaagcaagctggacgcccctaaggtggatctgctggtgaagaattgcctcctgcccctgagagagtacttcaagtatttcagccagaatagtctgcccctgggaggcagcggcggcggcatggccgccgccgccgccctgagggcccacgcccagagcagcgtgaccttcgaggacgtggccgtgaacttcagcatggaggagtggagcctgctgaacgaggcccagaggtgcctgtacagggacgtgatgctggagaccctgaccctgatcagcagcctgggctgctggcacggcggcgaggacgaggccgcccccagcaagcagagcacctgcatctacatctacaaggagcagggcggcggcggcccaagcagcggcgcccctcctcccagcggcggcaggcggcccaagcagcggcgcccctcctcccagcggcggcagcccagccggctccccaacctctaccgaggagggcacctctgagtccgccacccccgagagcggccctggcacctccaccgagcccagcgagggcagcgcacccggcagccctgccggcagccccacctccacagaggagggaaccagcaccgagcccagcgaaggcagcgccccaggcaccagcaccgagcctagtgagcaggagattaaacggatcaacaagatcagaagaagacttgtgaaagacagcaacaccaagaaggccggcaagacaggccccatgaaaaccctgctggttagagtgatgacacccgatctgagagagcggctggaaaacctgagaaagaagcctgaaaatatcccccagcccatcagcaatacatctagagccaacctgaataagctgctgaccgattacaccgaaatgaagaaggcgatcctgcatgtgtactgggaagagttccagaaggaccctgtgggcctgatgagccgggtggcccagcctgccagcaagaagatcgatcagaacaagctgaaacctgagatggacgagaagggcaacctgaccaccgccggctttgcctgctctcagtgtggccagcccctgttcgtgtacaagctggagcaggtgtctgagaagggcaaggcttacaccaactacttcggacggtgcaatgtggccgagcacgaaaagctgatcctgctggcccagctgaagcccgagaaggatagcgacgaagccgtgacatatagcctgggaaagtttgggcagagggccctggatttctacagcattcatgtgaccaaggagtccacccaccccgtgaagcccctggcccagatcgccggaaacagatacgcctccggacctgtgggaaaggccctgagcgacgcatgtatgggcacaatcgcctccttcctgtctaagtaccaggacatcatcatcgaacaccagaaggtggtgaagggcaaccagaagagactggagagcctgcgggagctggccggcaaggaaaacctggaataccctagcgtgaccctgccacctcagcctcacaccaaggagggcgttgatgcctacaacgaagtgatcgcccgggtgcgaatgtgggtgaacctgaacctgtggcagaagctgaagctaagcagagatgatgccaagcctctgctgagactgaagggattcccttcctttcctctggtcgagagacaggccaacgaagtggactggtgggacatggtgtgtaacgtgaagaagctgatcaacgagaaaaaggaggatggcaaggtgttttggcagaatctggctggctacaagagacaggaagccctgagaccatacctgagcagcgaggaagatcggaagaagggaaagaaattcgctcggtaccagctgggcgacctgctgctgcacctggaaaagaagcacggcgaggactggggaaaggtgtacgacgaggcctgggagcggattgacaagaaagtggaaggcctgagcaagcacatcaagctggaagaggaacggagaagcgaggacgcccagagcaaggccgccctgaccgactggctgcgggctaaggccagcttcgtgatcgagggcctgaaggaggccgacaaggacgagttctgcagatgcgagctgaagctgcagaagtggtacggggacctgcggggaaagcccttcgccatcgaagccgagaacagcatcctggacatcagcggcttcagcaagcagtacaactgtgccttcatctggcagaaggacggcgtgaagaagctgaacctgtacctgatcatcaactacttcaagggcggcaagctgcggttcaagaagatcaaacctgaagccttcgaagccaacagattctacaccgtgatcaacaaaaagagcggcgagatcgtgcccatggaggtgaacttcaacttcgacgaccccaacctgatcatcctgcctctggcctttggcaagagacagggcagagaattcatctggaacgacctgctgtccctggaaaccggcagcctgaagctggccaacggaagagtgatcgagaagacactgtacaacagaagaacccggcaggatgagcctgccctgttcgtggccctgaccttcgagcggcgggaggtcctggactcctccaatatcaaaccaatgaacctgatcggcgtggcaagaggcgaaaacatccccgccgtgatcgccctgaccgaccccgagggctgcccactgagccggtttaaggatagcctgggaaacccaacccacatcctgagaatcggcgagagctataaggagaagcagcggaccatccaggccaagaaggaggtggagcagcggagagccggcggctacagccggaagtacgccagcaaagccaagaatctggcagacgatatggtgagaaacaccgctagagatctgctgtactacgccgtgacccaggatgccatgctgatcttcgccaacctgagccggggcttcggccggcagggcaagcggaccttcatggccgagagacagtacacacggatggaggactggctgaccgccaagctggcctacgagggcctgagcaagacctacctgtccaagacactggcccagtacacctccaagacatgcagcaactgtgggtttaccatcaccagcgccgactacgacagggtgctggagaagctgaagaagacagcaacaggctggatgaccacaattaacggcaaggagctgaaggtggagggccagattacctactacaacagatacaagagacagaacgtagtcaaggacctgtccgtcgagctggatagactgagcgaagaatctgtgaacaacgacatctcctcctggacaaagggcagaagcggagaagctctgagcctcctgaagaaaagattctcccatagacccgtgcaggagaagttcgtgtgcctgaactgcggcttcgagacacacgcagccgagcaagccgccctgaacatcgccagatcctggctgttcctgcggagccaggagtacaagaaataccagacaaacaagacaaccggcaacaccgataagagagccttcgtcgagacctggcagtccttttaccggaagaagcttaaggaggtgtggaaacctgccgtgcggtctggcggatctggcggaggctccaccagccccaagaaaaagagaaaagtctaagctgccttctgcggggcttgccttctggccatgcccttcttctctcccttgcacctgtacctcttggtctttgaataaagcctgagtaggaaggctagcaaaaaaaaaaaaaaaaaaaaaaaaaaaaaaaaaaaaaaaaaaaaaaaaaaaaaaaaaaaaaaaaaaaaaaaaaaaaaaaagcccagccggctccccaacctctaccgaggagggcacctctgagtccgccacccccgagagcggccctggcacctccaccgagcccagcgagggcagcgcacccggcagccctgccggcagccccacctccacagaggagggaaccagcaccgagcccagcgaaggcagcgccccaggcaccagcaccgagcctagtgagcaggagattaaacggatcaacaagatcagaagaagacttgtgaaagacagcaacaccaagaaggccggcaagacaggccccatgaaaaccctgctggttagagtgatgacacccgatctgagagagcggctggaaaacctgagaaagaagcctgaaaatatcccccagcccatcagcaatacatctagagccaacctgaataagctgctgaccgattacaccgaaatgaagaaggcgatcctgcatgtgtactgggaagagttccagaaggaccctgtgggcctgatgagccgggtggcccagcctgccagcaagaagatcgatcagaacaagctgaaacctgagatggacgagaagggcaacctgaccaccgccggctttgcctgctctcagtgtggccagcccctgttcgtgtacaagctggagcaggtgtctgagaagggcaaggcttacaccaactacttcggacggtgcaatgtggccgagcacgaaaagctgatcctgctggcccagctgaagcccgagaaggatagcgacgaagccgtgacatatagcctgggaaagtttgggcagagggccctggatttctacagcattcatgtgaccaaggagtccacccaccccgtgaagcccctggcccagatcgccggaaacagatacgcctccggacctgtgggaaaggccctgagcgacgcatgtatgggcacaatcgcctccttcctgtctaagtaccaggacatcatcatcgaacaccagaaggtggtgaagggcaaccagaagagactggagagcctgcgggagctggccggcaaggaaaacctggaataccctagcgtgaccctgccacctcagcctcacaccaaggagggcgttgatgcctacaacgaagtgatcgcccgggtgcgaatgtgggtgaacctgaacctgtggcagaagctgaagctaagcagagatgatgccaagcctctgctgagactgaagggattcccttcctttcctctggtcgagagacaggccaacgaagtggactggtgggacatggtgtgtaacgtgaagaagctgatcaacgagaaaaaggaggatggcaaggtgttttggcagaatctggctggctacaagagacaggaagccctgagaccatacctgagcagcgaggaagatcggaagaagggaaagaaattcgctcggtaccagctgggcgacctgctgctgcacctggaaaagaagcacggcgaggactggggaaaggtgtacgacgaggcctgggagcggattgacaagaaagtggaaggcctgagcaagcacatcaagctggaagaggaacggagaagcgaggacgcccagagcaaggccgccctgaccgactggctgcgggctaaggccagcttcgtgatcgagggcctgaaggaggccgacaaggacgagttctgcagatgcgagctgaagctgcagaagtggtacggggacctgcggggaaagcccttcgccatcgaagccgagaacagcatcctggacatcagcggcttcagcaagcagtacaactgtgccttcatctggcagaaggacggcgtgaagaagctgaacctgtacctgatcatcaactacttcaagggcggcaagctgcggttcaagaagatcaaacctgaagccttcgaagccaacagattctacaccgtgatcaacaaaaagagcggcgagatcgtgcccatggaggtgaacttcaacttcgacgaccccaacctgatcatcctgcctctggcctttggcaagagacagggcagagaattcatctggaacgacctgctgtccctggaaaccggcagcctgaagctggccaacggaagagtgatcgagaagacactgtacaacagaagaacccggcaggatgagcctgccctgttcgtggccctgaccttcgagcggcgggaggtcctggactcctccaatatcaaaccaatgaacctgatcggcgtggcaagaggcgaaaacatccccgccgtgatcgccctgaccgaccccgagggctgcccactgagccggtttaaggatagcctgggaaacccaacccacatcctgagaatcggcgagagctataaggagaagcagcggaccatccaggccaagaaggaggtggagcagcggagagccggcggctacagccggaagtacgccagcaaagccaagaatctggcagacgatatggtgagaaacaccgctagagatctgctgtactacgccgtgacccaggatgccatgctgatcttcgccaacctgagccggggcttcggccggcagggcaagcggaccttcatggccgagagacagtacacacggatggaggactggctgaccgccaagctggcctacgagggcctgagcaagacctacctgtccaagacactggcccagtacacctccaagacatgcagcaactgtgggtttaccatcaccagcgccgactacgacagggtgctggagaagctgaagaagacagcaacaggctggatgaccacaattaacggcaaggagctgaaggtggagggccagattacctactacaacagatacaagagacagaacgtagtcaaggacctgtccgtcgagctggatagactgagcgaagaatctgtgaacaacgacatctcctcctggacaaagggcagaagcggagaagctctgagcctcctgaagaaaagattctcccatagacccgtgcaggagaagttcgtgtgcctgaactgcggcttcgagacacacgcagccgagcaagccgccctgaacatcgccagatcctggctgttcctgcggagccaggagtacaagaaataccagacaaacaagacaaccggcaacaccgataagagagccttcgtcgagacctggcagtccttttaccggaagaagcttaaggaggtgtggaaacctgccgtgcggtctggcggatctggcggaggctccaccagccccaagaaaaagagaaaagtctaagctgccttctgcggggcttgccttctggccatgcccttcttctctcccttgcacctgtacctcttggtctttgaataaagcctgagtaggaaggctagcaaaaaaaaaaaaaaaaaaaaaaaaaaaaaaaaaaaaaaaaaaaaaaaaaaaaaaaaaaaaaaaaaaaaaaaaaaaaaaaa

SEQ ID NO: 10088 - RNA, 8787 nt, synthetic construct
  source 1..8787: mol_type = other RNA
aggaaataagagagaaaagaagagtaagaagaaatataagagccaccatggcccctaagaagaagcgtaaagtgagccggatgaaccacgaccaggagttcgacccccctaaggtgtaccctcccgtccccgccgagaagagaaagcccatccgggtcctgagcctgttcgatggcatcgccaccggtctgctggtgctgaaggacctgggcatccaggtggataggtacattgcctccgaggtgtgcgaggactccatcaccgtgggaatggtgcgtcatcagggcaagatcatgtacgtgggcgacgtgcggagcgtgacacagaagcatatccaggagtggggccctttcgacctggtgatcggcggcagcccttgcaatgacctgagcatcgtgaacccagcccggaagggcctgtacgagggaaccggcagactgttcttcgagttttacagactgctgcacgacgcccggcctaaggaaggcgacgaccggcccttcttttggctgttcgagaatgtggtggccatgggagtcagcgacaagcgggatattagccggttcctggagagcaaccccgtgatgatcgatgccaaggaagtgagcgccgcccaccgggccagatacttctggggcaatctgcctggcatgaacagacccctggccagcaccgtgaacgacaagctggagctgcaggagtgcctggagcacggccggatcgccaagttcagcaaggtgagaaccatcaccacccgaagcaacagcatcaaacaaggcaaggaccagcactttcctgtgttcatgaacgagaaggaggacatcctgtggtgtaccgagatggagagagtgttcgggttcccagtccactacacagatgtcagcaacatgtctagactggccagacagagactgctgggaagaagctggtccgtccctgtgatcagacacctgttcgcccctctgaaggagtacttcgcctgcgtgagcagcggcaacagcaacgccaacagccggggccccagcttctctagcggcctggtgccactgtccctgagagggagccacatgggccccatggagatctacaaaaccgtgagcgcctggaagcggcagcctgtgcgcgtgctgagcctgtttcggaatatcgataaagtcctgaaaagcctgggattcctggagagcggctctggctccggcggtggcaccctgaagtacgtggaggatgtgacaaacgtggtcagacgggatgtggagaagtggggccccttcgatctggtgtacggcagcacccaacccctgggcagctcttgtgaccggtgccctggctggtacatgtttcagttccaccggatcctgcagtacgccctgccgagacaggagtcccagcggccattcttttggattttcatggacaacttgctgctgaccgaggatgaccaggaaactaccactcggttcctgcagaccgaagccgtgaccctgcaggacgtgagaggccgggactaccagaacgccatgcgggtgtggtccaacatccctggactgaaaagcaagcacgcacctctgacccctaaagaagaggagtacctgcaggcccaggtgcggagcagaagcaagctggacgcccctaaggtggatctgctggtgaagaattgcctcctgcccctgagagagtacttcaagtatttcagccagaatagtctgcccctgggaggcagcggcggcggcgccgacatcaccctgatgagccaggcccaggacagcaggagcatcctgttccaggagagcgtgaccttcgaggacgtggccgtgaacttcaccaacagggagtggcagtgcctgacctacgcccagaggcacctgtacaaggacgtgatgctggagaactacggcaacatggtgagcctgggcttccccttccccaagccccccctgatcagccacctggagagggaggtggacccctgcgtgggcggcccaagcagcggcgcccctcctcccagcggcggcaggcggcccaagcagcggcgcccctcctcccagcggcggcagcccagccggctccccaacctctaccgaggagggcacctctgagtccgccacccccgagagcggccctggcacctccaccgagcccagcgagggcagcgcacccggcagccctgccggcagccccacctccacagaggagggaaccagcaccgagcccagcgaaggcagcgccccaggcaccagcaccgagcctagtgagcaggagattaaacggatcaacaagatcagaagaagacttgtgaaagacagcaacaccaagaaggccggcaagacaggccccatgaaaaccctgctggttagagtgatgacacccgatctgagagagcggctggaaaacctgagaaagaagcctgaaaatatcccccagcccatcagcaatacatctagagccaacctgaataagctgctgaccgattacaccgaaatgaagaaggcgatcctgcatgtgtactgggaagagttccagaaggaccctgtgggcctgatgagccgggtggcccagcctgccagcaagaagatcgatcagaacaagctgaaacctgagatggacgagaagggcaacctgaccaccgccggctttgcctgctctcagtgtggccagcccctgttcgtgtacaagctggagcaggtgtctgagaagggcaaggcttacaccaactacttcggacggtgcaatgtggccgagcacgaaaagctgatcctgctggcccagctgaagcccgagaaggatagcgacgaagccgtgacatatagcctgggaaagtttgggcagagggccctggatttctacagcattcatgtgaccaaggagtccacccaccccgtgaagcccctggcccagatcgccggaaacagatacgcctccggacctgtgggaaaggccctgagcgacgcatgtatgggcacaatcgcctccttcctgtctaagtaccaggacatcatcatcgaacaccagaaggtggtgaagggcaaccagaagagactggagagcctgcgggagctggccggcaaggaaaacctggaataccctagcgtgaccctgccacctcagcctcacaccaaggagggcgttgatgcctacaacgaagtgatcgcccgggtgcgaatgtgggtgaacctgaacctgtggcagaagctgaagctaagcagagatgatgccaagcctctgctgagactgaagggattcccttcctttcctctggtcgagagacaggccaacgaagtggactggtgggacatggtgtgtaacgtgaagaagctgatcaacgagaaaaaggaggatggcaaggtgttttggcagaatctggctggctacaagagacaggaagccctgagaccatacctgagcagcgaggaagatcggaagaagggaaagaaattcgctcggtaccagctgggcgacctgctgctgcacctggaaaagaagcacggcgaggactggggaaaggtgtacgacgaggcctgggagcggattgacaagaaagtggaaggcctgagcaagcacatcaagctggaagaggaacggagaagcgaggacgcccagagcaaggccgccctgaccgactggctgcgggctaaggccagcttcgtgatcgagggcctgaaggaggccgacaaggacgagttctgcagatgcgagctgaagctgcagaagtggtacggggacctgcggggaaagcccttcgccatcgaagccgagaacagcatcctggacatcagcggcttcagcaagcagtacaactgtgccttcatctggcagaaggacggcgtgaagaagctgaacctgtacctgatcatcaactacttcaagggcggcaagctgcggttcaagaagatcaaacctgaagccttcgaagccaacagattctacaccgtgatcaacaaaaagagcggcgagatcgtgcccatggaggtgaacttcaacttcgacgaccccaacctgatcatcctgcctctggcctttggcaagagacagggcagagaattcatctggaacgacctgctgtccctggaaaccggcagcctgaagctggccaacggaagagtgatcgagaagacactgtacaacagaagaacccggcaggatgagcctgccctgttcgtggccctgaccttcgagcggcgggaggtcctggactcctccaatatcaaaccaatgaacctgatcggcgtggcaagaggcgaaaacatccccgccgtgatcgccctgaccgaccccgagggctgcccactgagccggtttaaggatagcctgggaaacccaacccacatcctgagaatcggcgagagctataaggagaagcagcggaccatccaggccaagaaggaggtggagcagcggagagccggcggctacagccggaagtacgccagcaaagccaagaatctggcagacgatatggtgagaaacaccgctagagatctgctgtactacgccgtgacccaggatgccatgctgatcttcgccaacctgagccggggcttcggccggcagggcaagcggaccttcatggccgagagacagtacacacggatggaggactggctgaccgccaagctggcctacgagggcctgagcaagacctacctgtccaagacactggcccagtacacctccaagacatgcagcaactgtgggtttaccatcaccagcgccgactacgacagggtgctggagaagctgaagaagacagcaacaggctggatgaccacaattaacggcaaggagctgaaggtggagggccagattacctactacaacagatacaagagacagaacgtagtcaaggacctgtccgtcgagctggatagactgagcgaagaatctgtgaacaacgacatctcctcctggacaaagggcagaagcggagaagctctgagcctcctgaagaaaagattctcccatagacccgtgcaggagaagttcgtgtgcctgaactgcggcttcgagacacacgcagccgagcaagccgccctgaacatcgccagatcctggctgttcctgcggagccaggagtacaagaaataccagacaaacaagacaaccggcaacaccgataagagagccttcgtcgagacctggcagtccttttaccggaagaagcttaaggaggtgtggaaacctgccgtgcggtctggcggatctggcggaggctccaccagccccaagaaaaagagaaaagtctaagctgccttctgcggggcttgccttctggccatgcccttcttctctcccttgcacctgtacctcttggtctttgaataaagcctgagtaggaaggctagcaaaaaaaaaaaaaaaaaaaaaaaaaaaaaaaaaaaaaaaaaaaaaaaaaaaaaaaaaaaaaaaaaaaaaaaaaaaaaaaagcccagccggctccccaacctctaccgaggagggcacctctgagtccgccacccccgagagcggccctggcacctccaccgagcccagcgagggcagcgcacccggcagccctgccggcagccccacctccacagaggagggaaccagcaccgagcccagcgaaggcagcgccccaggcaccagcaccgagcctagtgagcaggagattaaacggatcaacaagatcagaagaagacttgtgaaagacagcaacaccaagaaggccggcaagacaggccccatgaaaaccctgctggttagagtgatgacacccgatctgagagagcggctggaaaacctgagaaagaagcctgaaaatatcccccagcccatcagcaatacatctagagccaacctgaataagctgctgaccgattacaccgaaatgaagaaggcgatcctgcatgtgtactgggaagagttccagaaggaccctgtgggcctgatgagccgggtggcccagcctgccagcaagaagatcgatcagaacaagctgaaacctgagatggacgagaagggcaacctgaccaccgccggctttgcctgctctcagtgtggccagcccctgttcgtgtacaagctggagcaggtgtctgagaagggcaaggcttacaccaactacttcggacggtgcaatgtggccgagcacgaaaagctgatcctgctggcccagctgaagcccgagaaggatagcgacgaagccgtgacatatagcctgggaaagtttgggcagagggccctggatttctacagcattcatgtgaccaaggagtccacccaccccgtgaagcccctggcccagatcgccggaaacagatacgcctccggacctgtgggaaaggccctgagcgacgcatgtatgggcacaatcgcctccttcctgtctaagtaccaggacatcatcatcgaacaccagaaggtggtgaagggcaaccagaagagactggagagcctgcgggagctggccggcaaggaaaacctggaataccctagcgtgaccctgccacctcagcctcacaccaaggagggcgttgatgcctacaacgaagtgatcgcccgggtgcgaatgtgggtgaacctgaacctgtggcagaagctgaagctaagcagagatgatgccaagcctctgctgagactgaagggattcccttcctttcctctggtcgagagacaggccaacgaagtggactggtgggacatggtgtgtaacgtgaagaagctgatcaacgagaaaaaggaggatggcaaggtgttttggcagaatctggctggctacaagagacaggaagccctgagaccatacctgagcagcgaggaagatcggaagaagggaaagaaattcgctcggtaccagctgggcgacctgctgctgcacctggaaaagaagcacggcgaggactggggaaaggtgtacgacgaggcctgggagcggattgacaagaaagtggaaggcctgagcaagcacatcaagctggaagaggaacggagaagcgaggacgcccagagcaaggccgccctgaccgactggctgcgggctaaggccagcttcgtgatcgagggcctgaaggaggccgacaaggacgagttctgcagatgcgagctgaagctgcagaagtggtacggggacctgcggggaaagcccttcgccatcgaagccgagaacagcatcctggacatcagcggcttcagcaagcagtacaactgtgccttcatctggcagaaggacggcgtgaagaagctgaacctgtacctgatcatcaactacttcaagggcggcaagctgcggttcaagaagatcaaacctgaagccttcgaagccaacagattctacaccgtgatcaacaaaaagagcggcgagatcgtgcccatggaggtgaacttcaacttcgacgaccccaacctgatcatcctgcctctggcctttggcaagagacagggcagagaattcatctggaacgacctgctgtccctggaaaccggcagcctgaagctggccaacggaagagtgatcgagaagacactgtacaacagaagaacccggcaggatgagcctgccctgttcgtggccctgaccttcgagcggcgggaggtcctggactcctccaatatcaaaccaatgaacctgatcggcgtggcaagaggcgaaaacatccccgccgtgatcgccctgaccgaccccgagggctgcccactgagccggtttaaggatagcctgggaaacccaacccacatcctgagaatcggcgagagctataaggagaagcagcggaccatccaggccaagaaggaggtggagcagcggagagccggcggctacagccggaagtacgccagcaaagccaagaatctggcagacgatatggtgagaaacaccgctagagatctgctgtactacgccgtgacccaggatgccatgctgatcttcgccaacctgagccggggcttcggccggcagggcaagcggaccttcatggccgagagacagtacacacggatggaggactggctgaccgccaagctggcctacgagggcctgagcaagacctacctgtccaagacactggcccagtacacctccaagacatgcagcaactgtgggtttaccatcaccagcgccgactacgacagggtgctggagaagctgaagaagacagcaacaggctggatgaccacaattaacggcaaggagctgaaggtggagggccagattacctactacaacagatacaagagacagaacgtagtcaaggacctgtccgtcgagctggatagactgagcgaagaatctgtgaacaacgacatctcctcctggacaaagggcagaagcggagaagctctgagcctcctgaagaaaagattctcccatagacccgtgcaggagaagttcgtgtgcctgaactgcggcttcgagacacacgcagccgagcaagccgccctgaacatcgccagatcctggctgttcctgcggagccaggagtacaagaaataccagacaaacaagacaaccggcaacaccgataagagagccttcgtcgagacctggcagtccttttaccggaagaagcttaaggaggtgtggaaacctgccgtgcggtctggcggatctggcggaggctccaccagccccaagaaaaagagaaaagtctaagctgccttctgcggggcttgccttctggccatgcccttcttctctcccttgcacctgtacctcttggtctttgaataaagcctgagtaggaaggctagcaaaaaaaaaaaaaaaaaaaaaaaaaaaaaaaaaaaaaaaaaaaaaaaaaaaaaaaaaaaaaaaaaaaaaaaaaaaaaaaa

SEQ ID NO: 10089 - RNA, 8787 nt, synthetic construct
  source 1..8787: mol_type = other RNA
aggaaataagagagaaaagaagagtaagaagaaatataagagccaccatggcccctaagaagaagcgtaaagtgagccggatgaaccacgaccaggagttcgacccccctaaggtgtaccctcccgtccccgccgagaagagaaagcccatccgggtcctgagcctgttcgatggcatcgccaccggtctgctggtgctgaaggacctgggcatccaggtggataggtacattgcctccgaggtgtgcgaggactccatcaccgtgggaatggtgcgtcatcagggcaagatcatgtacgtgggcgacgtgcggagcgtgacacagaagcatatccaggagtggggccctttcgacctggtgatcggcggcagcccttgcaatgacctgagcatcgtgaacccagcccggaagggcctgtacgagggaaccggcagactgttcttcgagttttacagactgctgcacgacgcccggcctaaggaaggcgacgaccggcccttcttttggctgttcgagaatgtggtggccatgggagtcagcgacaagcgggatattagccggttcctggagagcaaccccgtgatgatcgatgccaaggaagtgagcgccgcccaccgggccagatacttctggggcaatctgcctggcatgaacagacccctggccagcaccgtgaacgacaagctggagctgcaggagtgcctggagcacggccggatcgccaagttcagcaaggtgagaaccatcaccacccgaagcaacagcatcaaacaaggcaaggaccagcactttcctgtgttcatgaacgagaaggaggacatcctgtggtgtaccgagatggagagagtgttcgggttcccagtccactacacagatgtcagcaacatgtctagactggccagacagagactgctgggaagaagctggtccgtccctgtgatcagacacctgttcgcccctctgaaggagtacttcgcctgcgtgagcagcggcaacagcaacgccaacagccggggccccagcttctctagcggcctggtgccactgtccctgagagggagccacatgggccccatggagatctacaaaaccgtgagcgcctggaagcggcagcctgtgcgcgtgctgagcctgtttcggaatatcgataaagtcctgaaaagcctgggattcctggagagcggctctggctccggcggtggcaccctgaagtacgtggaggatgtgacaaacgtggtcagacgggatgtggagaagtggggccccttcgatctggtgtacggcagcacccaacccctgggcagctcttgtgaccggtgccctggctggtacatgtttcagttccaccggatcctgcagtacgccctgccgagacaggagtcccagcggccattcttttggattttcatggacaacttgctgctgaccgaggatgaccaggaaactaccactcggttcctgcagaccgaagccgtgaccctgcaggacgtgagaggccgggactaccagaacgccatgcgggtgtggtccaacatccctggactgaaaagcaagcacgcacctctgacccctaaagaagaggagtacctgcaggcccaggtgcggagcagaagcaagctggacgcccctaaggtggatctgctggtgaagaattgcctcctgcccctgagagagtacttcaagtatttcagccagaatagtctgcccctgggaggcagcggcggcggcgtgttcgacgccgtgaccttcaccgacgtggccgtggacttcagccaggacgagtgggagaggctgaccctggcccagaggaccctgtacaagaaggtgatgctggagaactacagcaacctggccagcctgggcctgtgcatcagcaagcccgacgtgatcagcagcctggagcaggacaaggagccctggaccatgaagggcgagctgaccaggggcccctgcgccgacctggagtacgtgggcggcccaagcagcggcgcccctcctcccagcggcggcaggcggcccaagcagcggcgcccctcctcccagcggcggcagcccagccggctccccaacctctaccgaggagggcacctctgagtccgccacccccgagagcggccctggcacctccaccgagcccagcgagggcagcgcacccggcagccctgccggcagccccacctccacagaggagggaaccagcaccgagcccagcgaaggcagcgccccaggcaccagcaccgagcctagtgagcaggagattaaacggatcaacaagatcagaagaagacttgtgaaagacagcaacaccaagaaggccggcaagacaggccccatgaaaaccctgctggttagagtgatgacacccgatctgagagagcggctggaaaacctgagaaagaagcctgaaaatatcccccagcccatcagcaatacatctagagccaacctgaataagctgctgaccgattacaccgaaatgaagaaggcgatcctgcatgtgtactgggaagagttccagaaggaccctgtgggcctgatgagccgggtggcccagcctgccagcaagaagatcgatcagaacaagctgaaacctgagatggacgagaagggcaacctgaccaccgccggctttgcctgctctcagtgtggccagcccctgttcgtgtacaagctggagcaggtgtctgagaagggcaaggcttacaccaactacttcggacggtgcaatgtggccgagcacgaaaagctgatcctgctggcccagctgaagcccgagaaggatagcgacgaagccgtgacatatagcctgggaaagtttgggcagagggccctggatttctacagcattcatgtgaccaaggagtccacccaccccgtgaagcccctggcccagatcgccggaaacagatacgcctccggacctgtgggaaaggccctgagcgacgcatgtatgggcacaatcgcctccttcctgtctaagtaccaggacatcatcatcgaacaccagaaggtggtgaagggcaaccagaagagactggagagcctgcgggagctggccggcaaggaaaacctggaataccctagcgtgaccctgccacctcagcctcacaccaaggagggcgttgatgcctacaacgaagtgatcgcccgggtgcgaatgtgggtgaacctgaacctgtggcagaagctgaagctaagcagagatgatgccaagcctctgctgagactgaagggattcccttcctttcctctggtcgagagacaggccaacgaagtggactggtgggacatggtgtgtaacgtgaagaagctgatcaacgagaaaaaggaggatggcaaggtgttttggcagaatctggctggctacaagagacaggaagccctgagaccatacctgagcagcgaggaagatcggaagaagggaaagaaattcgctcggtaccagctgggcgacctgctgctgcacctggaaaagaagcacggcgaggactggggaaaggtgtacgacgaggcctgggagcggattgacaagaaagtggaaggcctgagcaagcacatcaagctggaagaggaacggagaagcgaggacgcccagagcaaggccgccctgaccgactggctgcgggctaaggccagcttcgtgatcgagggcctgaaggaggccgacaaggacgagttctgcagatgcgagctgaagctgcagaagtggtacggggacctgcggggaaagcccttcgccatcgaagccgagaacagcatcctggacatcagcggcttcagcaagcagtacaactgtgccttcatctggcagaaggacggcgtgaagaagctgaacctgtacctgatcatcaactacttcaagggcggcaagctgcggttcaagaagatcaaacctgaagccttcgaagccaacagattctacaccgtgatcaacaaaaagagcggcgagatcgtgcccatggaggtgaacttcaacttcgacgaccccaacctgatcatcctgcctctggcctttggcaagagacagggcagagaattcatctggaacgacctgctgtccctggaaaccggcagcctgaagctggccaacggaagagtgatcgagaagacactgtacaacagaagaacccggcaggatgagcctgccctgttcgtggccctgaccttcgagcggcgggaggtcctggactcctccaatatcaaaccaatgaacctgatcggcgtggcaagaggcgaaaacatccccgccgtgatcgccctgaccgaccccgagggctgcccactgagccggtttaaggatagcctgggaaacccaacccacatcctgagaatcggcgagagctataaggagaagcagcggaccatccaggccaagaaggaggtggagcagcggagagccggcggctacagccggaagtacgccagcaaagccaagaatctggcagacgatatggtgagaaacaccgctagagatctgctgtactacgccgtgacccaggatgccatgctgatcttcgccaacctgagccggggcttcggccggcagggcaagcggaccttcatggccgagagacagtacacacggatggaggactggctgaccgccaagctggcctacgagggcctgagcaagacctacctgtccaagacactggcccagtacacctccaagacatgcagcaactgtgggtttaccatcaccagcgccgactacgacagggtgctggagaagctgaagaagacagcaacaggctggatgaccacaattaacggcaaggagctgaaggtggagggccagattacctactacaacagatacaagagacagaacgtagtcaaggacctgtccgtcgagctggatagactgagcgaagaatctgtgaacaacgacatctcctcctggacaaagggcagaagcggagaagctctgagcctcctgaagaaaagattctcccatagacccgtgcaggagaagttcgtgtgcctgaactgcggcttcgagacacacgcagccgagcaagccgccctgaacatcgccagatcctggctgttcctgcggagccaggagtacaagaaataccagacaaacaagacaaccggcaacaccgataagagagccttcgtcgagacctggcagtccttttaccggaagaagcttaaggaggtgtggaaacctgccgtgcggtctggcggatctggcggaggctccaccagccccaagaaaaagagaaaagtctaagctgccttctgcggggcttgccttctggccatgcccttcttctctcccttgcacctgtacctcttggtctttgaataaagcctgagtaggaaggctagcaaaaaaaaaaaaaaaaaaaaaaaaaaaaaaaaaaaaaaaaaaaaaaaaaaaaaaaaaaaaaaaaaaaaaaaaaaaaaaaagcccagccggctccccaacctctaccgaggagggcacctctgagtccgccacccccgagagcggccctggcacctccaccgagcccagcgagggcagcgcacccggcagccctgccggcagccccacctccacagaggagggaaccagcaccgagcccagcgaaggcagcgccccaggcaccagcaccgagcctagtgagcaggagattaaacggatcaacaagatcagaagaagacttgtgaaagacagcaacaccaagaaggccggcaagacaggccccatgaaaaccctgctggttagagtgatgacacccgatctgagagagcggctggaaaacctgagaaagaagcctgaaaatatcccccagcccatcagcaatacatctagagccaacctgaataagctgctgaccgattacaccgaaatgaagaaggcgatcctgcatgtgtactgggaagagttccagaaggaccctgtgggcctgatgagccgggtggcccagcctgccagcaagaagatcgatcagaacaagctgaaacctgagatggacgagaagggcaacctgaccaccgccggctttgcctgctctcagtgtggccagcccctgttcgtgtacaagctggagcaggtgtctgagaagggcaaggcttacaccaactacttcggacggtgcaatgtggccgagcacgaaaagctgatcctgctggcccagctgaagcccgagaaggatagcgacgaagccgtgacatatagcctgggaaagtttgggcagagggccctggatttctacagcattcatgtgaccaaggagtccacccaccccgtgaagcccctggcccagatcgccggaaacagatacgcctccggacctgtgggaaaggccctgagcgacgcatgtatgggcacaatcgcctccttcctgtctaagtaccaggacatcatcatcgaacaccagaaggtggtgaagggcaaccagaagagactggagagcctgcgggagctggccggcaaggaaaacctggaataccctagcgtgaccctgccacctcagcctcacaccaaggagggcgttgatgcctacaacgaagtgatcgcccgggtgcgaatgtgggtgaacctgaacctgtggcagaagctgaagctaagcagagatgatgccaagcctctgctgagactgaagggattcccttcctttcctctggtcgagagacaggccaacgaagtggactggtgggacatggtgtgtaacgtgaagaagctgatcaacgagaaaaaggaggatggcaaggtgttttggcagaatctggctggctacaagagacaggaagccctgagaccatacctgagcagcgaggaagatcggaagaagggaaagaaattcgctcggtaccagctgggcgacctgctgctgcacctggaaaagaagcacggcgaggactggggaaaggtgtacgacgaggcctgggagcggattgacaagaaagtggaaggcctgagcaagcacatcaagctggaagaggaacggagaagcgaggacgcccagagcaaggccgccctgaccgactggctgcgggctaaggccagcttcgtgatcgagggcctgaaggaggccgacaaggacgagttctgcagatgcgagctgaagctgcagaagtggtacggggacctgcggggaaagcccttcgccatcgaagccgagaacagcatcctggacatcagcggcttcagcaagcagtacaactgtgccttcatctggcagaaggacggcgtgaagaagctgaacctgtacctgatcatcaactacttcaagggcggcaagctgcggttcaagaagatcaaacctgaagccttcgaagccaacagattctacaccgtgatcaacaaaaagagcggcgagatcgtgcccatggaggtgaacttcaacttcgacgaccccaacctgatcatcctgcctctggcctttggcaagagacagggcagagaattcatctggaacgacctgctgtccctggaaaccggcagcctgaagctggccaacggaagagtgatcgagaagacactgtacaacagaagaacccggcaggatgagcctgccctgttcgtggccctgaccttcgagcggcgggaggtcctggactcctccaatatcaaaccaatgaacctgatcggcgtggcaagaggcgaaaacatccccgccgtgatcgccctgaccgaccccgagggctgcccactgagccggtttaaggatagcctgggaaacccaacccacatcctgagaatcggcgagagctataaggagaagcagcggaccatccaggccaagaaggaggtggagcagcggagagccggcggctacagccggaagtacgccagcaaagccaagaatctggcagacgatatggtgagaaacaccgctagagatctgctgtactacgccgtgacccaggatgccatgctgatcttcgccaacctgagccggggcttcggccggcagggcaagcggaccttcatggccgagagacagtacacacggatggaggactggctgaccgccaagctggcctacgagggcctgagcaagacctacctgtccaagacactggcccagtacacctccaagacatgcagcaactgtgggtttaccatcaccagcgccgactacgacagggtgctggagaagctgaagaagacagcaacaggctggatgaccacaattaacggcaaggagctgaaggtggagggccagattacctactacaacagatacaagagacagaacgtagtcaaggacctgtccgtcgagctggatagactgagcgaagaatctgtgaacaacgacatctcctcctggacaaagggcagaagcggagaagctctgagcctcctgaagaaaagattctcccatagacccgtgcaggagaagttcgtgtgcctgaactgcggcttcgagacacacgcagccgagcaagccgccctgaacatcgccagatcctggctgttcctgcggagccaggagtacaagaaataccagacaaacaagacaaccggcaacaccgataagagagccttcgtcgagacctggcagtccttttaccggaagaagcttaaggaggtgtggaaacctgccgtgcggtctggcggatctggcggaggctccaccagccccaagaaaaagagaaaagtctaagctgccttctgcggggcttgccttctggccatgcccttcttctctcccttgcacctgtacctcttggtctttgaataaagcctgagtaggaaggctagcaaaaaaaaaaaaaaaaaaaaaaaaaaaaaaaaaaaaaaaaaaaaaaaaaaaaaaaaaaaaaaaaaaaaaaaaaaaaaaaa

SEQ ID NO: 10090 - RNA, 8787 nt, synthetic construct
  source 1..8787: mol_type = other RNA
aggaaataagagagaaaagaagagtaagaagaaatataagagccaccatggcccctaagaagaagcgtaaagtgagccggatgaaccacgaccaggagttcgacccccctaaggtgtaccctcccgtccccgccgagaagagaaagcccatccgggtcctgagcctgttcgatggcatcgccaccggtctgctggtgctgaaggacctgggcatccaggtggataggtacattgcctccgaggtgtgcgaggactccatcaccgtgggaatggtgcgtcatcagggcaagatcatgtacgtgggcgacgtgcggagcgtgacacagaagcatatccaggagtggggccctttcgacctggtgatcggcggcagcccttgcaatgacctgagcatcgtgaacccagcccggaagggcctgtacgagggaaccggcagactgttcttcgagttttacagactgctgcacgacgcccggcctaaggaaggcgacgaccggcccttcttttggctgttcgagaatgtggtggccatgggagtcagcgacaagcgggatattagccggttcctggagagcaaccccgtgatgatcgatgccaaggaagtgagcgccgcccaccgggccagatacttctggggcaatctgcctggcatgaacagacccctggccagcaccgtgaacgacaagctggagctgcaggagtgcctggagcacggccggatcgccaagttcagcaaggtgagaaccatcaccacccgaagcaacagcatcaaacaaggcaaggaccagcactttcctgtgttcatgaacgagaaggaggacatcctgtggtgtaccgagatggagagagtgttcgggttcccagtccactacacagatgtcagcaacatgtctagactggccagacagagactgctgggaagaagctggtccgtccctgtgatcagacacctgttcgcccctctgaaggagtacttcgcctgcgtgagcagcggcaacagcaacgccaacagccggggccccagcttctctagcggcctggtgccactgtccctgagagggagccacatgggccccatggagatctacaaaaccgtgagcgcctggaagcggcagcctgtgcgcgtgctgagcctgtttcggaatatcgataaagtcctgaaaagcctgggattcctggagagcggctctggctccggcggtggcaccctgaagtacgtggaggatgtgacaaacgtggtcagacgggatgtggagaagtggggccccttcgatctggtgtacggcagcacccaacccctgggcagctcttgtgaccggtgccctggctggtacatgtttcagttccaccggatcctgcagtacgccctgccgagacaggagtcccagcggccattcttttggattttcatggacaacttgctgctgaccgaggatgaccaggaaactaccactcggttcctgcagaccgaagccgtgaccctgcaggacgtgagaggccgggactaccagaacgccatgcgggtgtggtccaacatccctggactgaaaagcaagcacgcacctctgacccctaaagaagaggagtacctgcaggcccaggtgcggagcagaagcaagctggacgcccctaaggtggatctgctggtgaagaattgcctcctgcccctgagagagtacttcaagtatttcagccagaatagtctgcccctgggaggcagcggcggcggcaggcaggagcccgtgaccttcgaggacgtggccgtgtacttcacccagaacgagtgggccagcctggacagcgtgcagagggccctgtacagggaggtgatgctggagaactacgccaacgtggccagcctggccttccccttcatcacccccgtgctggtgagccagctggagcagggcgagctgccctggggcctggacccctgggagcccatgggcagggaggccctgaggggcatctgcggcggcccaagcagcggcgcccctcctcccagcggcggcaggcggcccaagcagcggcgcccctcctcccagcggcggcagcccagccggctccccaacctctaccgaggagggcacctctgagtccgccacccccgagagcggccctggcacctccaccgagcccagcgagggcagcgcacccggcagccctgccggcagccccacctccacagaggagggaaccagcaccgagcccagcgaaggcagcgccccaggcaccagcaccgagcctagtgagcaggagattaaacggatcaacaagatcagaagaagacttgtgaaagacagcaacaccaagaaggccggcaagacaggccccatgaaaaccctgctggttagagtgatgacacccgatctgagagagcggctggaaaacctgagaaagaagcctgaaaatatcccccagcccatcagcaatacatctagagccaacctgaataagctgctgaccgattacaccgaaatgaagaaggcgatcctgcatgtgtactgggaagagttccagaaggaccctgtgggcctgatgagccgggtggcccagcctgccagcaagaagatcgatcagaacaagctgaaacctgagatggacgagaagggcaacctgaccaccgccggctttgcctgctctcagtgtggccagcccctgttcgtgtacaagctggagcaggtgtctgagaagggcaaggcttacaccaactacttcggacggtgcaatgtggccgagcacgaaaagctgatcctgctggcccagctgaagcccgagaaggatagcgacgaagccgtgacatatagcctgggaaagtttgggcagagggccctggatttctacagcattcatgtgaccaaggagtccacccaccccgtgaagcccctggcccagatcgccggaaacagatacgcctccggacctgtgggaaaggccctgagcgacgcatgtatgggcacaatcgcctccttcctgtctaagtaccaggacatcatcatcgaacaccagaaggtggtgaagggcaaccagaagagactggagagcctgcgggagctggccggcaaggaaaacctggaataccctagcgtgaccctgccacctcagcctcacaccaaggagggcgttgatgcctacaacgaagtgatcgcccgggtgcgaatgtgggtgaacctgaacctgtggcagaagctgaagctaagcagagatgatgccaagcctctgctgagactgaagggattcccttcctttcctctggtcgagagacaggccaacgaagtggactggtgggacatggtgtgtaacgtgaagaagctgatcaacgagaaaaaggaggatggcaaggtgttttggcagaatctggctggctacaagagacaggaagccctgagaccatacctgagcagcgaggaagatcggaagaagggaaagaaattcgctcggtaccagctgggcgacctgctgctgcacctggaaaagaagcacggcgaggactggggaaaggtgtacgacgaggcctgggagcggattgacaagaaagtggaaggcctgagcaagcacatcaagctggaagaggaacggagaagcgaggacgcccagagcaaggccgccctgaccgactggctgcgggctaaggccagcttcgtgatcgagggcctgaaggaggccgacaaggacgagttctgcagatgcgagctgaagctgcagaagtggtacggggacctgcggggaaagcccttcgccatcgaagccgagaacagcatcctggacatcagcggcttcagcaagcagtacaactgtgccttcatctggcagaaggacggcgtgaagaagctgaacctgtacctgatcatcaactacttcaagggcggcaagctgcggttcaagaagatcaaacctgaagccttcgaagccaacagattctacaccgtgatcaacaaaaagagcggcgagatcgtgcccatggaggtgaacttcaacttcgacgaccccaacctgatcatcctgcctctggcctttggcaagagacagggcagagaattcatctggaacgacctgctgtccctggaaaccggcagcctgaagctggccaacggaagagtgatcgagaagacactgtacaacagaagaacccggcaggatgagcctgccctgttcgtggccctgaccttcgagcggcgggaggtcctggactcctccaatatcaaaccaatgaacctgatcggcgtggcaagaggcgaaaacatccccgccgtgatcgccctgaccgaccccgagggctgcccactgagccggtttaaggatagcctgggaaacccaacccacatcctgagaatcggcgagagctataaggagaagcagcggaccatccaggccaagaaggaggtggagcagcggagagccggcggctacagccggaagtacgccagcaaagccaagaatctggcagacgatatggtgagaaacaccgctagagatctgctgtactacgccgtgacccaggatgccatgctgatcttcgccaacctgagccggggcttcggccggcagggcaagcggaccttcatggccgagagacagtacacacggatggaggactggctgaccgccaagctggcctacgagggcctgagcaagacctacctgtccaagacactggcccagtacacctccaagacatgcagcaactgtgggtttaccatcaccagcgccgactacgacagggtgctggagaagctgaagaagacagcaacaggctggatgaccacaattaacggcaaggagctgaaggtggagggccagattacctactacaacagatacaagagacagaacgtagtcaaggacctgtccgtcgagctggatagactgagcgaagaatctgtgaacaacgacatctcctcctggacaaagggcagaagcggagaagctctgagcctcctgaagaaaagattctcccatagacccgtgcaggagaagttcgtgtgcctgaactgcggcttcgagacacacgcagccgagcaagccgccctgaacatcgccagatcctggctgttcctgcggagccaggagtacaagaaataccagacaaacaagacaaccggcaacaccgataagagagccttcgtcgagacctggcagtccttttaccggaagaagcttaaggaggtgtggaaacctgccgtgcggtctggcggatctggcggaggctccaccagccccaagaaaaagagaaaagtctaagctgccttctgcggggcttgccttctggccatgcccttcttctctcccttgcacctgtacctcttggtctttgaataaagcctgagtaggaaggctagcaaaaaaaaaaaaaaaaaaaaaaaaaaaaaaaaaaaaaaaaaaaaaaaaaaaaaaaaaaaaaaaaaaaaaaaaaaaaaaaagcccagccggctccccaacctctaccgaggagggcacctctgagtccgccacccccgagagcggccctggcacctccaccgagcccagcgagggcagcgcacccggcagccctgccggcagccccacctccacagaggagggaaccagcaccgagcccagcgaaggcagcgccccaggcaccagcaccgagcctagtgagcaggagattaaacggatcaacaagatcagaagaagacttgtgaaagacagcaacaccaagaaggccggcaagacaggccccatgaaaaccctgctggttagagtgatgacacccgatctgagagagcggctggaaaacctgagaaagaagcctgaaaatatcccccagcccatcagcaatacatctagagccaacctgaataagctgctgaccgattacaccgaaatgaagaaggcgatcctgcatgtgtactgggaagagttccagaaggaccctgtgggcctgatgagccgggtggcccagcctgccagcaagaagatcgatcagaacaagctgaaacctgagatggacgagaagggcaacctgaccaccgccggctttgcctgctctcagtgtggccagcccctgttcgtgtacaagctggagcaggtgtctgagaagggcaaggcttacaccaactacttcggacggtgcaatgtggccgagcacgaaaagctgatcctgctggcccagctgaagcccgagaaggatagcgacgaagccgtgacatatagcctgggaaagtttgggcagagggccctggatttctacagcattcatgtgaccaaggagtccacccaccccgtgaagcccctggcccagatcgccggaaacagatacgcctccggacctgtgggaaaggccctgagcgacgcatgtatgggcacaatcgcctccttcctgtctaagtaccaggacatcatcatcgaacaccagaaggtggtgaagggcaaccagaagagactggagagcctgcgggagctggccggcaaggaaaacctggaataccctagcgtgaccctgccacctcagcctcacaccaaggagggcgttgatgcctacaacgaagtgatcgcccgggtgcgaatgtgggtgaacctgaacctgtggcagaagctgaagctaagcagagatgatgccaagcctctgctgagactgaagggattcccttcctttcctctggtcgagagacaggccaacgaagtggactggtgggacatggtgtgtaacgtgaagaagctgatcaacgagaaaaaggaggatggcaaggtgttttggcagaatctggctggctacaagagacaggaagccctgagaccatacctgagcagcgaggaagatcggaagaagggaaagaaattcgctcggtaccagctgggcgacctgctgctgcacctggaaaagaagcacggcgaggactggggaaaggtgtacgacgaggcctgggagcggattgacaagaaagtggaaggcctgagcaagcacatcaagctggaagaggaacggagaagcgaggacgcccagagcaaggccgccctgaccgactggctgcgggctaaggccagcttcgtgatcgagggcctgaaggaggccgacaaggacgagttctgcagatgcgagctgaagctgcagaagtggtacggggacctgcggggaaagcccttcgccatcgaagccgagaacagcatcctggacatcagcggcttcagcaagcagtacaactgtgccttcatctggcagaaggacggcgtgaagaagctgaacctgtacctgatcatcaactacttcaagggcggcaagctgcggttcaagaagatcaaacctgaagccttcgaagccaacagattctacaccgtgatcaacaaaaagagcggcgagatcgtgcccatggaggtgaacttcaacttcgacgaccccaacctgatcatcctgcctctggcctttggcaagagacagggcagagaattcatctggaacgacctgctgtccctggaaaccggcagcctgaagctggccaacggaagagtgatcgagaagacactgtacaacagaagaacccggcaggatgagcctgccctgttcgtggccctgaccttcgagcggcgggaggtcctggactcctccaatatcaaaccaatgaacctgatcggcgtggcaagaggcgaaaacatccccgccgtgatcgccctgaccgaccccgagggctgcccactgagccggtttaaggatagcctgggaaacccaacccacatcctgagaatcggcgagagctataaggagaagcagcggaccatccaggccaagaaggaggtggagcagcggagagccggcggctacagccggaagtacgccagcaaagccaagaatctggcagacgatatggtgagaaacaccgctagagatctgctgtactacgccgtgacccaggatgccatgctgatcttcgccaacctgagccggggcttcggccggcagggcaagcggaccttcatggccgagagacagtacacacggatggaggactggctgaccgccaagctggcctacgagggcctgagcaagacctacctgtccaagacactggcccagtacacctccaagacatgcagcaactgtgggtttaccatcaccagcgccgactacgacagggtgctggagaagctgaagaagacagcaacaggctggatgaccacaattaacggcaaggagctgaaggtggagggccagattacctactacaacagatacaagagacagaacgtagtcaaggacctgtccgtcgagctggatagactgagcgaagaatctgtgaacaacgacatctcctcctggacaaagggcagaagcggagaagctctgagcctcctgaagaaaagattctcccatagacccgtgcaggagaagttcgtgtgcctgaactgcggcttcgagacacacgcagccgagcaagccgccctgaacatcgccagatcctggctgttcctgcggagccaggagtacaagaaataccagacaaacaagacaaccggcaacaccgataagagagccttcgtcgagacctggcagtccttttaccggaagaagcttaaggaggtgtggaaacctgccgtgcggtctggcggatctggcggaggctccaccagccccaagaaaaagagaaaagtctaagctgccttctgcggggcttgccttctggccatgcccttcttctctcccttgcacctgtacctcttggtctttgaataaagcctgagtaggaaggctagcaaaaaaaaaaaaaaaaaaaaaaaaaaaaaaaaaaaaaaaaaaaaaaaaaaaaaaaaaaaaaaaaaaaaaaaaaaaaaaaa

SEQ ID NO: 10091 - RNA, 8787 nt, synthetic construct
  source 1..8787: mol_type = other RNA
aggaaataagagagaaaagaagagtaagaagaaatataagagccaccatggcccctaagaagaagcgtaaagtgagccggatgaaccacgaccaggagttcgacccccctaaggtgtaccctcccgtccccgccgagaagagaaagcccatccgggtcctgagcctgttcgatggcatcgccaccggtctgctggtgctgaaggacctgggcatccaggtggataggtacattgcctccgaggtgtgcgaggactccatcaccgtgggaatggtgcgtcatcagggcaagatcatgtacgtgggcgacgtgcggagcgtgacacagaagcatatccaggagtggggccctttcgacctggtgatcggcggcagcccttgcaatgacctgagcatcgtgaacccagcccggaagggcctgtacgagggaaccggcagactgttcttcgagttttacagactgctgcacgacgcccggcctaaggaaggcgacgaccggcccttcttttggctgttcgagaatgtggtggccatgggagtcagcgacaagcgggatattagccggttcctggagagcaaccccgtgatgatcgatgccaaggaagtgagcgccgcccaccgggccagatacttctggggcaatctgcctggcatgaacagacccctggccagcaccgtgaacgacaagctggagctgcaggagtgcctggagcacggccggatcgccaagttcagcaaggtgagaaccatcaccacccgaagcaacagcatcaaacaaggcaaggaccagcactttcctgtgttcatgaacgagaaggaggacatcctgtggtgtaccgagatggagagagtgttcgggttcccagtccactacacagatgtcagcaacatgtctagactggccagacagagactgctgggaagaagctggtccgtccctgtgatcagacacctgttcgcccctctgaaggagtacttcgcctgcgtgagcagcggcaacagcaacgccaacagccggggccccagcttctctagcggcctggtgccactgtccctgagagggagccacatgggccccatggagatctacaaaaccgtgagcgcctggaagcggcagcctgtgcgcgtgctgagcctgtttcggaatatcgataaagtcctgaaaagcctgggattcctggagagcggctctggctccggcggtggcaccctgaagtacgtggaggatgtgacaaacgtggtcagacgggatgtggagaagtggggccccttcgatctggtgtacggcagcacccaacccctgggcagctcttgtgaccggtgccctggctggtacatgtttcagttccaccggatcctgcagtacgccctgccgagacaggagtcccagcggccattcttttggattttcatggacaacttgctgctgaccgaggatgaccaggaaactaccactcggttcctgcagaccgaagccgtgaccctgcaggacgtgagaggccgggactaccagaacgccatgcgggtgtggtccaacatccctggactgaaaagcaagcacgcacctctgacccctaaagaagaggagtacctgcaggcccaggtgcggagcagaagcaagctggacgcccctaaggtggatctgctggtgaagaattgcctcctgcccctgagagagtacttcaagtatttcagccagaatagtctgcccctgggaggcagcggcggcggcccccagaagagcgtgaccttcgaggacgtggccgtgtacttcacccaggccgagtgggacggcctgagccccgcccagaggaccctgtacagggacgtgatgctggagaactacggcaacgtggccagcctgggcttccccctgctgaagcccgccgtgatcagccagctggagggcggcggcgagctgggcggccccagccccctggccgccggcaccggcctgcacgtgctgaggaccgtgggcggcccaagcagcggcgcccctcctcccagcggcggcaggcggcccaagcagcggcgcccctcctcccagcggcggcagcccagccggctccccaacctctaccgaggagggcacctctgagtccgccacccccgagagcggccctggcacctccaccgagcccagcgagggcagcgcacccggcagccctgccggcagccccacctccacagaggagggaaccagcaccgagcccagcgaaggcagcgccccaggcaccagcaccgagcctagtgagcaggagattaaacggatcaacaagatcagaagaagacttgtgaaagacagcaacaccaagaaggccggcaagacaggccccatgaaaaccctgctggttagagtgatgacacccgatctgagagagcggctggaaaacctgagaaagaagcctgaaaatatcccccagcccatcagcaatacatctagagccaacctgaataagctgctgaccgattacaccgaaatgaagaaggcgatcctgcatgtgtactgggaagagttccagaaggaccctgtgggcctgatgagccgggtggcccagcctgccagcaagaagatcgatcagaacaagctgaaacctgagatggacgagaagggcaacctgaccaccgccggctttgcctgctctcagtgtggccagcccctgttcgtgtacaagctggagcaggtgtctgagaagggcaaggcttacaccaactacttcggacggtgcaatgtggccgagcacgaaaagctgatcctgctggcccagctgaagcccgagaaggatagcgacgaagccgtgacatatagcctgggaaagtttgggcagagggccctggatttctacagcattcatgtgaccaaggagtccacccaccccgtgaagcccctggcccagatcgccggaaacagatacgcctccggacctgtgggaaaggccctgagcgacgcatgtatgggcacaatcgcctccttcctgtctaagtaccaggacatcatcatcgaacaccagaaggtggtgaagggcaaccagaagagactggagagcctgcgggagctggccggcaaggaaaacctggaataccctagcgtgaccctgccacctcagcctcacaccaaggagggcgttgatgcctacaacgaagtgatcgcccgggtgcgaatgtgggtgaacctgaacctgtggcagaagctgaagctaagcagagatgatgccaagcctctgctgagactgaagggattcccttcctttcctctggtcgagagacaggccaacgaagtggactggtgggacatggtgtgtaacgtgaagaagctgatcaacgagaaaaaggaggatggcaaggtgttttggcagaatctggctggctacaagagacaggaagccctgagaccatacctgagcagcgaggaagatcggaagaagggaaagaaattcgctcggtaccagctgggcgacctgctgctgcacctggaaaagaagcacggcgaggactggggaaaggtgtacgacgaggcctgggagcggattgacaagaaagtggaaggcctgagcaagcacatcaagctggaagaggaacggagaagcgaggacgcccagagcaaggccgccctgaccgactggctgcgggctaaggccagcttcgtgatcgagggcctgaaggaggccgacaaggacgagttctgcagatgcgagctgaagctgcagaagtggtacggggacctgcggggaaagcccttcgccatcgaagccgagaacagcatcctggacatcagcggcttcagcaagcagtacaactgtgccttcatctggcagaaggacggcgtgaagaagctgaacctgtacctgatcatcaactacttcaagggcggcaagctgcggttcaagaagatcaaacctgaagccttcgaagccaacagattctacaccgtgatcaacaaaaagagcggcgagatcgtgcccatggaggtgaacttcaacttcgacgaccccaacctgatcatcctgcctctggcctttggcaagagacagggcagagaattcatctggaacgacctgctgtccctggaaaccggcagcctgaagctggccaacggaagagtgatcgagaagacactgtacaacagaagaacccggcaggatgagcctgccctgttcgtggccctgaccttcgagcggcgggaggtcctggactcctccaatatcaaaccaatgaacctgatcggcgtggcaagaggcgaaaacatccccgccgtgatcgccctgaccgaccccgagggctgcccactgagccggtttaaggatagcctgggaaacccaacccacatcctgagaatcggcgagagctataaggagaagcagcggaccatccaggccaagaaggaggtggagcagcggagagccggcggctacagccggaagtacgccagcaaagccaagaatctggcagacgatatggtgagaaacaccgctagagatctgctgtactacgccgtgacccaggatgccatgctgatcttcgccaacctgagccggggcttcggccggcagggcaagcggaccttcatggccgagagacagtacacacggatggaggactggctgaccgccaagctggcctacgagggcctgagcaagacctacctgtccaagacactggcccagtacacctccaagacatgcagcaactgtgggtttaccatcaccagcgccgactacgacagggtgctggagaagctgaagaagacagcaacaggctggatgaccacaattaacggcaaggagctgaaggtggagggccagattacctactacaacagatacaagagacagaacgtagtcaaggacctgtccgtcgagctggatagactgagcgaagaatctgtgaacaacgacatctcctcctggacaaagggcagaagcggagaagctctgagcctcctgaagaaaagattctcccatagacccgtgcaggagaagttcgtgtgcctgaactgcggcttcgagacacacgcagccgagcaagccgccctgaacatcgccagatcctggctgttcctgcggagccaggagtacaagaaataccagacaaacaagacaaccggcaacaccgataagagagccttcgtcgagacctggcagtccttttaccggaagaagcttaaggaggtgtggaaacctgccgtgcggtctggcggatctggcggaggctccaccagccccaagaaaaagagaaaagtctaagctgccttctgcggggcttgccttctggccatgcccttcttctctcccttgcacctgtacctcttggtctttgaataaagcctgagtaggaaggctagcaaaaaaaaaaaaaaaaaaaaaaaaaaaaaaaaaaaaaaaaaaaaaaaaaaaaaaaaaaaaaaaaaaaaaaaaaaaaaaaagcccagccggctccccaacctctaccgaggagggcacctctgagtccgccacccccgagagcggccctggcacctccaccgagcccagcgagggcagcgcacccggcagccctgccggcagccccacctccacagaggagggaaccagcaccgagcccagcgaaggcagcgccccaggcaccagcaccgagcctagtgagcaggagattaaacggatcaacaagatcagaagaagacttgtgaaagacagcaacaccaagaaggccggcaagacaggccccatgaaaaccctgctggttagagtgatgacacccgatctgagagagcggctggaaaacctgagaaagaagcctgaaaatatcccccagcccatcagcaatacatctagagccaacctgaataagctgctgaccgattacaccgaaatgaagaaggcgatcctgcatgtgtactgggaagagttccagaaggaccctgtgggcctgatgagccgggtggcccagcctgccagcaagaagatcgatcagaacaagctgaaacctgagatggacgagaagggcaacctgaccaccgccggctttgcctgctctcagtgtggccagcccctgttcgtgtacaagctggagcaggtgtctgagaagggcaaggcttacaccaactacttcggacggtgcaatgtggccgagcacgaaaagctgatcctgctggcccagctgaagcccgagaaggatagcgacgaagccgtgacatatagcctgggaaagtttgggcagagggccctggatttctacagcattcatgtgaccaaggagtccacccaccccgtgaagcccctggcccagatcgccggaaacagatacgcctccggacctgtgggaaaggccctgagcgacgcatgtatgggcacaatcgcctccttcctgtctaagtaccaggacatcatcatcgaacaccagaaggtggtgaagggcaaccagaagagactggagagcctgcgggagctggccggcaaggaaaacctggaataccctagcgtgaccctgccacctcagcctcacaccaaggagggcgttgatgcctacaacgaagtgatcgcccgggtgcgaatgtgggtgaacctgaacctgtggcagaagctgaagctaagcagagatgatgccaagcctctgctgagactgaagggattcccttcctttcctctggtcgagagacaggccaacgaagtggactggtgggacatggtgtgtaacgtgaagaagctgatcaacgagaaaaaggaggatggcaaggtgttttggcagaatctggctggctacaagagacaggaagccctgagaccatacctgagcagcgaggaagatcggaagaagggaaagaaattcgctcggtaccagctgggcgacctgctgctgcacctggaaaagaagcacggcgaggactggggaaaggtgtacgacgaggcctgggagcggattgacaagaaagtggaaggcctgagcaagcacatcaagctggaagaggaacggagaagcgaggacgcccagagcaaggccgccctgaccgactggctgcgggctaaggccagcttcgtgatcgagggcctgaaggaggccgacaaggacgagttctgcagatgcgagctgaagctgcagaagtggtacggggacctgcggggaaagcccttcgccatcgaagccgagaacagcatcctggacatcagcggcttcagcaagcagtacaactgtgccttcatctggcagaaggacggcgtgaagaagctgaacctgtacctgatcatcaactacttcaagggcggcaagctgcggttcaagaagatcaaacctgaagccttcgaagccaacagattctacaccgtgatcaacaaaaagagcggcgagatcgtgcccatggaggtgaacttcaacttcgacgaccccaacctgatcatcctgcctctggcctttggcaagagacagggcagagaattcatctggaacgacctgctgtccctggaaaccggcagcctgaagctggccaacggaagagtgatcgagaagacactgtacaacagaagaacccggcaggatgagcctgccctgttcgtggccctgaccttcgagcggcgggaggtcctggactcctccaatatcaaaccaatgaacctgatcggcgtggcaagaggcgaaaacatccccgccgtgatcgccctgaccgaccccgagggctgcccactgagccggtttaaggatagcctgggaaacccaacccacatcctgagaatcggcgagagctataaggagaagcagcggaccatccaggccaagaaggaggtggagcagcggagagccggcggctacagccggaagtacgccagcaaagccaagaatctggcagacgatatggtgagaaacaccgctagagatctgctgtactacgccgtgacccaggatgccatgctgatcttcgccaacctgagccggggcttcggccggcagggcaagcggaccttcatggccgagagacagtacacacggatggaggactggctgaccgccaagctggcctacgagggcctgagcaagacctacctgtccaagacactggcccagtacacctccaagacatgcagcaactgtgggtttaccatcaccagcgccgactacgacagggtgctggagaagctgaagaagacagcaacaggctggatgaccacaattaacggcaaggagctgaaggtggagggccagattacctactacaacagatacaagagacagaacgtagtcaaggacctgtccgtcgagctggatagactgagcgaagaatctgtgaacaacgacatctcctcctggacaaagggcagaagcggagaagctctgagcctcctgaagaaaagattctcccatagacccgtgcaggagaagttcgtgtgcctgaactgcggcttcgagacacacgcagccgagcaagccgccctgaacatcgccagatcctggctgttcctgcggagccaggagtacaagaaataccagacaaacaagacaaccggcaacaccgataagagagccttcgtcgagacctggcagtccttttaccggaagaagcttaaggaggtgtggaaacctgccgtgcggtctggcggatctggcggaggctccaccagccccaagaaaaagagaaaagtctaagctgccttctgcggggcttgccttctggccatgcccttcttctctcccttgcacctgtacctcttggtctttgaataaagcctgagtaggaaggctagcaaaaaaaaaaaaaaaaaaaaaaaaaaaaaaaaaaaaaaaaaaaaaaaaaaaaaaaaaaaaaaaaaaaaaaaaaaaaaaaa

SEQ ID NO: 10092 - RNA, 8787 nt, synthetic construct
  source 1..8787: mol_type = other RNA
aggaaataagagagaaaagaagagtaagaagaaatataagagccaccatggcccctaagaagaagcgtaaagtgagccggatgaaccacgaccaggagttcgacccccctaaggtgtaccctcccgtccccgccgagaagagaaagcccatccgggtcctgagcctgttcgatggcatcgccaccggtctgctggtgctgaaggacctgggcatccaggtggataggtacattgcctccgaggtgtgcgaggactccatcaccgtgggaatggtgcgtcatcagggcaagatcatgtacgtgggcgacgtgcggagcgtgacacagaagcatatccaggagtggggccctttcgacctggtgatcggcggcagcccttgcaatgacctgagcatcgtgaacccagcccggaagggcctgtacgagggaaccggcagactgttcttcgagttttacagactgctgcacgacgcccggcctaaggaaggcgacgaccggcccttcttttggctgttcgagaatgtggtggccatgggagtcagcgacaagcgggatattagccggttcctggagagcaaccccgtgatgatcgatgccaaggaagtgagcgccgcccaccgggccagatacttctggggcaatctgcctggcatgaacagacccctggccagcaccgtgaacgacaagctggagctgcaggagtgcctggagcacggccggatcgccaagttcagcaaggtgagaaccatcaccacccgaagcaacagcatcaaacaaggcaaggaccagcactttcctgtgttcatgaacgagaaggaggacatcctgtggtgtaccgagatggagagagtgttcgggttcccagtccactacacagatgtcagcaacatgtctagactggccagacagagactgctgggaagaagctggtccgtccctgtgatcagacacctgttcgcccctctgaaggagtacttcgcctgcgtgagcagcggcaacagcaacgccaacagccggggccccagcttctctagcggcctggtgccactgtccctgagagggagccacatgggccccatggagatctacaaaaccgtgagcgcctggaagcggcagcctgtgcgcgtgctgagcctgtttcggaatatcgataaagtcctgaaaagcctgggattcctggagagcggctctggctccggcggtggcaccctgaagtacgtggaggatgtgacaaacgtggtcagacgggatgtggagaagtggggccccttcgatctggtgtacggcagcacccaacccctgggcagctcttgtgaccggtgccctggctggtacatgtttcagttccaccggatcctgcagtacgccctgccgagacaggagtcccagcggccattcttttggattttcatggacaacttgctgctgaccgaggatgaccaggaaactaccactcggttcctgcagaccgaagccgtgaccctgcaggacgtgagaggccgggactaccagaacgccatgcgggtgtggtccaacatccctggactgaaaagcaagcacgcacctctgacccctaaagaagaggagtacctgcaggcccaggtgcggagcagaagcaagctggacgcccctaaggtggatctgctggtgaagaattgcctcctgcccctgagagagtacttcaagtatttcagccagaatagtctgcccctgggaggcagcggcggcggcaagcccgaggacgtgagcttcgccgaggtggccgtgtacttcagcctggacgagtggggctacctgtggcccgcccagagggccctgtacagggacgtgatgagggagacctacggccacttcggcgagctgggcttccccggccccaagcccgccctgatcagctggatggagcaggagagcgaggcctggagccccgccgcccaggaccccgaggagggcgagagcgtgggcggcgccgtgggcggcccaagcagcggcgcccctcctcccagcggcggcaggcggcccaagcagcggcgcccctcctcccagcggcggcagcccagccggctccccaacctctaccgaggagggcacctctgagtccgccacccccgagagcggccctggcacctccaccgagcccagcgagggcagcgcacccggcagccctgccggcagccccacctccacagaggagggaaccagcaccgagcccagcgaaggcagcgccccaggcaccagcaccgagcctagtgagcaggagattaaacggatcaacaagatcagaagaagacttgtgaaagacagcaacaccaagaaggccggcaagacaggccccatgaaaaccctgctggttagagtgatgacacccgatctgagagagcggctggaaaacctgagaaagaagcctgaaaatatcccccagcccatcagcaatacatctagagccaacctgaataagctgctgaccgattacaccgaaatgaagaaggcgatcctgcatgtgtactgggaagagttccagaaggaccctgtgggcctgatgagccgggtggcccagcctgccagcaagaagatcgatcagaacaagctgaaacctgagatggacgagaagggcaacctgaccaccgccggctttgcctgctctcagtgtggccagcccctgttcgtgtacaagctggagcaggtgtctgagaagggcaaggcttacaccaactacttcggacggtgcaatgtggccgagcacgaaaagctgatcctgctggcccagctgaagcccgagaaggatagcgacgaagccgtgacatatagcctgggaaagtttgggcagagggccctggatttctacagcattcatgtgaccaaggagtccacccaccccgtgaagcccctggcccagatcgccggaaacagatacgcctccggacctgtgggaaaggccctgagcgacgcatgtatgggcacaatcgcctccttcctgtctaagtaccaggacatcatcatcgaacaccagaaggtggtgaagggcaaccagaagagactggagagcctgcgggagctggccggcaaggaaaacctggaataccctagcgtgaccctgccacctcagcctcacaccaaggagggcgttgatgcctacaacgaagtgatcgcccgggtgcgaatgtgggtgaacctgaacctgtggcagaagctgaagctaagcagagatgatgccaagcctctgctgagactgaagggattcccttcctttcctctggtcgagagacaggccaacgaagtggactggtgggacatggtgtgtaacgtgaagaagctgatcaacgagaaaaaggaggatggcaaggtgttttggcagaatctggctggctacaagagacaggaagccctgagaccatacctgagcagcgaggaagatcggaagaagggaaagaaattcgctcggtaccagctgggcgacctgctgctgcacctggaaaagaagcacggcgaggactggggaaaggtgtacgacgaggcctgggagcggattgacaagaaagtggaaggcctgagcaagcacatcaagctggaagaggaacggagaagcgaggacgcccagagcaaggccgccctgaccgactggctgcgggctaaggccagcttcgtgatcgagggcctgaaggaggccgacaaggacgagttctgcagatgcgagctgaagctgcagaagtggtacggggacctgcggggaaagcccttcgccatcgaagccgagaacagcatcctggacatcagcggcttcagcaagcagtacaactgtgccttcatctggcagaaggacggcgtgaagaagctgaacctgtacctgatcatcaactacttcaagggcggcaagctgcggttcaagaagatcaaacctgaagccttcgaagccaacagattctacaccgtgatcaacaaaaagagcggcgagatcgtgcccatggaggtgaacttcaacttcgacgaccccaacctgatcatcctgcctctggcctttggcaagagacagggcagagaattcatctggaacgacctgctgtccctggaaaccggcagcctgaagctggccaacggaagagtgatcgagaagacactgtacaacagaagaacccggcaggatgagcctgccctgttcgtggccctgaccttcgagcggcgggaggtcctggactcctccaatatcaaaccaatgaacctgatcggcgtggcaagaggcgaaaacatccccgccgtgatcgccctgaccgaccccgagggctgcccactgagccggtttaaggatagcctgggaaacccaacccacatcctgagaatcggcgagagctataaggagaagcagcggaccatccaggccaagaaggaggtggagcagcggagagccggcggctacagccggaagtacgccagcaaagccaagaatctggcagacgatatggtgagaaacaccgctagagatctgctgtactacgccgtgacccaggatgccatgctgatcttcgccaacctgagccggggcttcggccggcagggcaagcggaccttcatggccgagagacagtacacacggatggaggactggctgaccgccaagctggcctacgagggcctgagcaagacctacctgtccaagacactggcccagtacacctccaagacatgcagcaactgtgggtttaccatcaccagcgccgactacgacagggtgctggagaagctgaagaagacagcaacaggctggatgaccacaattaacggcaaggagctgaaggtggagggccagattacctactacaacagatacaagagacagaacgtagtcaaggacctgtccgtcgagctggatagactgagcgaagaatctgtgaacaacgacatctcctcctggacaaagggcagaagcggagaagctctgagcctcctgaagaaaagattctcccatagacccgtgcaggagaagttcgtgtgcctgaactgcggcttcgagacacacgcagccgagcaagccgccctgaacatcgccagatcctggctgttcctgcggagccaggagtacaagaaataccagacaaacaagacaaccggcaacaccgataagagagccttcgtcgagacctggcagtccttttaccggaagaagcttaaggaggtgtggaaacctgccgtgcggtctggcggatctggcggaggctccaccagccccaagaaaaagagaaaagtctaagctgccttctgcggggcttgccttctggccatgcccttcttctctcccttgcacctgtacctcttggtctttgaataaagcctgagtaggaaggctagcaaaaaaaaaaaaaaaaaaaaaaaaaaaaaaaaaaaaaaaaaaaaaaaaaaaaaaaaaaaaaaaaaaaaaaaaaaaaaaaagcccagccggctccccaacctctaccgaggagggcacctctgagtccgccacccccgagagcggccctggcacctccaccgagcccagcgagggcagcgcacccggcagccctgccggcagccccacctccacagaggagggaaccagcaccgagcccagcgaaggcagcgccccaggcaccagcaccgagcctagtgagcaggagattaaacggatcaacaagatcagaagaagacttgtgaaagacagcaacaccaagaaggccggcaagacaggccccatgaaaaccctgctggttagagtgatgacacccgatctgagagagcggctggaaaacctgagaaagaagcctgaaaatatcccccagcccatcagcaatacatctagagccaacctgaataagctgctgaccgattacaccgaaatgaagaaggcgatcctgcatgtgtactgggaagagttccagaaggaccctgtgggcctgatgagccgggtggcccagcctgccagcaagaagatcgatcagaacaagctgaaacctgagatggacgagaagggcaacctgaccaccgccggctttgcctgctctcagtgtggccagcccctgttcgtgtacaagctggagcaggtgtctgagaagggcaaggcttacaccaactacttcggacggtgcaatgtggccgagcacgaaaagctgatcctgctggcccagctgaagcccgagaaggatagcgacgaagccgtgacatatagcctgggaaagtttgggcagagggccctggatttctacagcattcatgtgaccaaggagtccacccaccccgtgaagcccctggcccagatcgccggaaacagatacgcctccggacctgtgggaaaggccctgagcgacgcatgtatgggcacaatcgcctccttcctgtctaagtaccaggacatcatcatcgaacaccagaaggtggtgaagggcaaccagaagagactggagagcctgcgggagctggccggcaaggaaaacctggaataccctagcgtgaccctgccacctcagcctcacaccaaggagggcgttgatgcctacaacgaagtgatcgcccgggtgcgaatgtgggtgaacctgaacctgtggcagaagctgaagctaagcagagatgatgccaagcctctgctgagactgaagggattcccttcctttcctctggtcgagagacaggccaacgaagtggactggtgggacatggtgtgtaacgtgaagaagctgatcaacgagaaaaaggaggatggcaaggtgttttggcagaatctggctggctacaagagacaggaagccctgagaccatacctgagcagcgaggaagatcggaagaagggaaagaaattcgctcggtaccagctgggcgacctgctgctgcacctggaaaagaagcacggcgaggactggggaaaggtgtacgacgaggcctgggagcggattgacaagaaagtggaaggcctgagcaagcacatcaagctggaagaggaacggagaagcgaggacgcccagagcaaggccgccctgaccgactggctgcgggctaaggccagcttcgtgatcgagggcctgaaggaggccgacaaggacgagttctgcagatgcgagctgaagctgcagaagtggtacggggacctgcggggaaagcccttcgccatcgaagccgagaacagcatcctggacatcagcggcttcagcaagcagtacaactgtgccttcatctggcagaaggacggcgtgaagaagctgaacctgtacctgatcatcaactacttcaagggcggcaagctgcggttcaagaagatcaaacctgaagccttcgaagccaacagattctacaccgtgatcaacaaaaagagcggcgagatcgtgcccatggaggtgaacttcaacttcgacgaccccaacctgatcatcctgcctctggcctttggcaagagacagggcagagaattcatctggaacgacctgctgtccctggaaaccggcagcctgaagctggccaacggaagagtgatcgagaagacactgtacaacagaagaacccggcaggatgagcctgccctgttcgtggccctgaccttcgagcggcgggaggtcctggactcctccaatatcaaaccaatgaacctgatcggcgtggcaagaggcgaaaacatccccgccgtgatcgccctgaccgaccccgagggctgcccactgagccggtttaaggatagcctgggaaacccaacccacatcctgagaatcggcgagagctataaggagaagcagcggaccatccaggccaagaaggaggtggagcagcggagagccggcggctacagccggaagtacgccagcaaagccaagaatctggcagacgatatggtgagaaacaccgctagagatctgctgtactacgccgtgacccaggatgccatgctgatcttcgccaacctgagccggggcttcggccggcagggcaagcggaccttcatggccgagagacagtacacacggatggaggactggctgaccgccaagctggcctacgagggcctgagcaagacctacctgtccaagacactggcccagtacacctccaagacatgcagcaactgtgggtttaccatcaccagcgccgactacgacagggtgctggagaagctgaagaagacagcaacaggctggatgaccacaattaacggcaaggagctgaaggtggagggccagattacctactacaacagatacaagagacagaacgtagtcaaggacctgtccgtcgagctggatagactgagcgaagaatctgtgaacaacgacatctcctcctggacaaagggcagaagcggagaagctctgagcctcctgaagaaaagattctcccatagacccgtgcaggagaagttcgtgtgcctgaactgcggcttcgagacacacgcagccgagcaagccgccctgaacatcgccagatcctggctgttcctgcggagccaggagtacaagaaataccagacaaacaagacaaccggcaacaccgataagagagccttcgtcgagacctggcagtccttttaccggaagaagcttaaggaggtgtggaaacctgccgtgcggtctggcggatctggcggaggctccaccagccccaagaaaaagagaaaagtctaagctgccttctgcggggcttgccttctggccatgcccttcttctctcccttgcacctgtacctcttggtctttgaataaagcctgagtaggaaggctagcaaaaaaaaaaaaaaaaaaaaaaaaaaaaaaaaaaaaaaaaaaaaaaaaaaaaaaaaaaaaaaaaaaaaaaaaaaaaaaaa

SEQ ID NO: 10093 - RNA, 8787 nt, synthetic construct
  source 1..8787: mol_type = other RNA
aggaaataagagagaaaagaagagtaagaagaaatataagagccaccatggcccctaagaagaagcgtaaagtgagccggatgaaccacgaccaggagttcgacccccctaaggtgtaccctcccgtccccgccgagaagagaaagcccatccgggtcctgagcctgttcgatggcatcgccaccggtctgctggtgctgaaggacctgggcatccaggtggataggtacattgcctccgaggtgtgcgaggactccatcaccgtgggaatggtgcgtcatcagggcaagatcatgtacgtgggcgacgtgcggagcgtgacacagaagcatatccaggagtggggccctttcgacctggtgatcggcggcagcccttgcaatgacctgagcatcgtgaacccagcccggaagggcctgtacgagggaaccggcagactgttcttcgagttttacagactgctgcacgacgcccggcctaaggaaggcgacgaccggcccttcttttggctgttcgagaatgtggtggccatgggagtcagcgacaagcgggatattagccggttcctggagagcaaccccgtgatgatcgatgccaaggaagtgagcgccgcccaccgggccagatacttctggggcaatctgcctggcatgaacagacccctggccagcaccgtgaacgacaagctggagctgcaggagtgcctggagcacggccggatcgccaagttcagcaaggtgagaaccatcaccacccgaagcaacagcatcaaacaaggcaaggaccagcactttcctgtgttcatgaacgagaaggaggacatcctgtggtgtaccgagatggagagagtgttcgggttcccagtccactacacagatgtcagcaacatgtctagactggccagacagagactgctgggaagaagctggtccgtccctgtgatcagacacctgttcgcccctctgaaggagtacttcgcctgcgtgagcagcggcaacagcaacgccaacagccggggccccagcttctctagcggcctggtgccactgtccctgagagggagccacatgggccccatggagatctacaaaaccgtgagcgcctggaagcggcagcctgtgcgcgtgctgagcctgtttcggaatatcgataaagtcctgaaaagcctgggattcctggagagcggctctggctccggcggtggcaccctgaagtacgtggaggatgtgacaaacgtggtcagacgggatgtggagaagtggggccccttcgatctggtgtacggcagcacccaacccctgggcagctcttgtgaccggtgccctggctggtacatgtttcagttccaccggatcctgcagtacgccctgccgagacaggagtcccagcggccattcttttggattttcatggacaacttgctgctgaccgaggatgaccaggaaactaccactcggttcctgcagaccgaagccgtgaccctgcaggacgtgagaggccgggactaccagaacgccatgcgggtgtggtccaacatccctggactgaaaagcaagcacgcacctctgacccctaaagaagaggagtacctgcaggcccaggtgcggagcagaagcaagctggacgcccctaaggtggatctgctggtgaagaattgcctcctgcccctgagagagtacttcaagtatttcagccagaatagtctgcccctgggaggcagcggcggcggcagccagggcagcgtgaccttcagggacgtggccatcgacttcagccaggaggagtggaagtggctgcagcccgcccagagggacctgtacaggtgcgtgatgctggagaactacggccacctggtgagcctgggcctgagcatcagcaagcccgacgtggtgagcctgctggagcagggcaaggagccctggctgggcaagagggaggtgaagagggacctgttcagcgtgagcgagagcagcggcggcccaagcagcggcgcccctcctcccagcggcggcaggcggcccaagcagcggcgcccctcctcccagcggcggcagcccagccggctccccaacctctaccgaggagggcacctctgagtccgccacccccgagagcggccctggcacctccaccgagcccagcgagggcagcgcacccggcagccctgccggcagccccacctccacagaggagggaaccagcaccgagcccagcgaaggcagcgccccaggcaccagcaccgagcctagtgagcaggagattaaacggatcaacaagatcagaagaagacttgtgaaagacagcaacaccaagaaggccggcaagacaggccccatgaaaaccctgctggttagagtgatgacacccgatctgagagagcggctggaaaacctgagaaagaagcctgaaaatatcccccagcccatcagcaatacatctagagccaacctgaataagctgctgaccgattacaccgaaatgaagaaggcgatcctgcatgtgtactgggaagagttccagaaggaccctgtgggcctgatgagccgggtggcccagcctgccagcaagaagatcgatcagaacaagctgaaacctgagatggacgagaagggcaacctgaccaccgccggctttgcctgctctcagtgtggccagcccctgttcgtgtacaagctggagcaggtgtctgagaagggcaaggcttacaccaactacttcggacggtgcaatgtggccgagcacgaaaagctgatcctgctggcccagctgaagcccgagaaggatagcgacgaagccgtgacatatagcctgggaaagtttgggcagagggccctggatttctacagcattcatgtgaccaaggagtccacccaccccgtgaagcccctggcccagatcgccggaaacagatacgcctccggacctgtgggaaaggccctgagcgacgcatgtatgggcacaatcgcctccttcctgtctaagtaccaggacatcatcatcgaacaccagaaggtggtgaagggcaaccagaagagactggagagcctgcgggagctggccggcaaggaaaacctggaataccctagcgtgaccctgccacctcagcctcacaccaaggagggcgttgatgcctacaacgaagtgatcgcccgggtgcgaatgtgggtgaacctgaacctgtggcagaagctgaagctaagcagagatgatgccaagcctctgctgagactgaagggattcccttcctttcctctggtcgagagacaggccaacgaagtggactggtgggacatggtgtgtaacgtgaagaagctgatcaacgagaaaaaggaggatggcaaggtgttttggcagaatctggctggctacaagagacaggaagccctgagaccatacctgagcagcgaggaagatcggaagaagggaaagaaattcgctcggtaccagctgggcgacctgctgctgcacctggaaaagaagcacggcgaggactggggaaaggtgtacgacgaggcctgggagcggattgacaagaaagtggaaggcctgagcaagcacatcaagctggaagaggaacggagaagcgaggacgcccagagcaaggccgccctgaccgactggctgcgggctaaggccagcttcgtgatcgagggcctgaaggaggccgacaaggacgagttctgcagatgcgagctgaagctgcagaagtggtacggggacctgcggggaaagcccttcgccatcgaagccgagaacagcatcctggacatcagcggcttcagcaagcagtacaactgtgccttcatctggcagaaggacggcgtgaagaagctgaacctgtacctgatcatcaactacttcaagggcggcaagctgcggttcaagaagatcaaacctgaagccttcgaagccaacagattctacaccgtgatcaacaaaaagagcggcgagatcgtgcccatggaggtgaacttcaacttcgacgaccccaacctgatcatcctgcctctggcctttggcaagagacagggcagagaattcatctggaacgacctgctgtccctggaaaccggcagcctgaagctggccaacggaagagtgatcgagaagacactgtacaacagaagaacccggcaggatgagcctgccctgttcgtggccctgaccttcgagcggcgggaggtcctggactcctccaatatcaaaccaatgaacctgatcggcgtggcaagaggcgaaaacatccccgccgtgatcgccctgaccgaccccgagggctgcccactgagccggtttaaggatagcctgggaaacccaacccacatcctgagaatcggcgagagctataaggagaagcagcggaccatccaggccaagaaggaggtggagcagcggagagccggcggctacagccggaagtacgccagcaaagccaagaatctggcagacgatatggtgagaaacaccgctagagatctgctgtactacgccgtgacccaggatgccatgctgatcttcgccaacctgagccggggcttcggccggcagggcaagcggaccttcatggccgagagacagtacacacggatggaggactggctgaccgccaagctggcctacgagggcctgagcaagacctacctgtccaagacactggcccagtacacctccaagacatgcagcaactgtgggtttaccatcaccagcgccgactacgacagggtgctggagaagctgaagaagacagcaacaggctggatgaccacaattaacggcaaggagctgaaggtggagggccagattacctactacaacagatacaagagacagaacgtagtcaaggacctgtccgtcgagctggatagactgagcgaagaatctgtgaacaacgacatctcctcctggacaaagggcagaagcggagaagctctgagcctcctgaagaaaagattctcccatagacccgtgcaggagaagttcgtgtgcctgaactgcggcttcgagacacacgcagccgagcaagccgccctgaacatcgccagatcctggctgttcctgcggagccaggagtacaagaaataccagacaaacaagacaaccggcaacaccgataagagagccttcgtcgagacctggcagtccttttaccggaagaagcttaaggaggtgtggaaacctgccgtgcggtctggcggatctggcggaggctccaccagccccaagaaaaagagaaaagtctaagctgccttctgcggggcttgccttctggccatgcccttcttctctcccttgcacctgtacctcttggtctttgaataaagcctgagtaggaaggctagcaaaaaaaaaaaaaaaaaaaaaaaaaaaaaaaaaaaaaaaaaaaaaaaaaaaaaaaaaaaaaaaaaaaaaaaaaaaaaaaagcccagccggctccccaacctctaccgaggagggcacctctgagtccgccacccccgagagcggccctggcacctccaccgagcccagcgagggcagcgcacccggcagccctgccggcagccccacctccacagaggagggaaccagcaccgagcccagcgaaggcagcgccccaggcaccagcaccgagcctagtgagcaggagattaaacggatcaacaagatcagaagaagacttgtgaaagacagcaacaccaagaaggccggcaagacaggccccatgaaaaccctgctggttagagtgatgacacccgatctgagagagcggctggaaaacctgagaaagaagcctgaaaatatcccccagcccatcagcaatacatctagagccaacctgaataagctgctgaccgattacaccgaaatgaagaaggcgatcctgcatgtgtactgggaagagttccagaaggaccctgtgggcctgatgagccgggtggcccagcctgccagcaagaagatcgatcagaacaagctgaaacctgagatggacgagaagggcaacctgaccaccgccggctttgcctgctctcagtgtggccagcccctgttcgtgtacaagctggagcaggtgtctgagaagggcaaggcttacaccaactacttcggacggtgcaatgtggccgagcacgaaaagctgatcctgctggcccagctgaagcccgagaaggatagcgacgaagccgtgacatatagcctgggaaagtttgggcagagggccctggatttctacagcattcatgtgaccaaggagtccacccaccccgtgaagcccctggcccagatcgccggaaacagatacgcctccggacctgtgggaaaggccctgagcgacgcatgtatgggcacaatcgcctccttcctgtctaagtaccaggacatcatcatcgaacaccagaaggtggtgaagggcaaccagaagagactggagagcctgcgggagctggccggcaaggaaaacctggaataccctagcgtgaccctgccacctcagcctcacaccaaggagggcgttgatgcctacaacgaagtgatcgcccgggtgcgaatgtgggtgaacctgaacctgtggcagaagctgaagctaagcagagatgatgccaagcctctgctgagactgaagggattcccttcctttcctctggtcgagagacaggccaacgaagtggactggtgggacatggtgtgtaacgtgaagaagctgatcaacgagaaaaaggaggatggcaaggtgttttggcagaatctggctggctacaagagacaggaagccctgagaccatacctgagcagcgaggaagatcggaagaagggaaagaaattcgctcggtaccagctgggcgacctgctgctgcacctggaaaagaagcacggcgaggactggggaaaggtgtacgacgaggcctgggagcggattgacaagaaagtggaaggcctgagcaagcacatcaagctggaagaggaacggagaagcgaggacgcccagagcaaggccgccctgaccgactggctgcgggctaaggccagcttcgtgatcgagggcctgaaggaggccgacaaggacgagttctgcagatgcgagctgaagctgcagaagtggtacggggacctgcggggaaagcccttcgccatcgaagccgagaacagcatcctggacatcagcggcttcagcaagcagtacaactgtgccttcatctggcagaaggacggcgtgaagaagctgaacctgtacctgatcatcaactacttcaagggcggcaagctgcggttcaagaagatcaaacctgaagccttcgaagccaacagattctacaccgtgatcaacaaaaagagcggcgagatcgtgcccatggaggtgaacttcaacttcgacgaccccaacctgatcatcctgcctctggcctttggcaagagacagggcagagaattcatctggaacgacctgctgtccctggaaaccggcagcctgaagctggccaacggaagagtgatcgagaagacactgtacaacagaagaacccggcaggatgagcctgccctgttcgtggccctgaccttcgagcggcgggaggtcctggactcctccaatatcaaaccaatgaacctgatcggcgtggcaagaggcgaaaacatccccgccgtgatcgccctgaccgaccccgagggctgcccactgagccggtttaaggatagcctgggaaacccaacccacatcctgagaatcggcgagagctataaggagaagcagcggaccatccaggccaagaaggaggtggagcagcggagagccggcggctacagccggaagtacgccagcaaagccaagaatctggcagacgatatggtgagaaacaccgctagagatctgctgtactacgccgtgacccaggatgccatgctgatcttcgccaacctgagccggggcttcggccggcagggcaagcggaccttcatggccgagagacagtacacacggatggaggactggctgaccgccaagctggcctacgagggcctgagcaagacctacctgtccaagacactggcccagtacacctccaagacatgcagcaactgtgggtttaccatcaccagcgccgactacgacagggtgctggagaagctgaagaagacagcaacaggctggatgaccacaattaacggcaaggagctgaaggtggagggccagattacctactacaacagatacaagagacagaacgtagtcaaggacctgtccgtcgagctggatagactgagcgaagaatctgtgaacaacgacatctcctcctggacaaagggcagaagcggagaagctctgagcctcctgaagaaaagattctcccatagacccgtgcaggagaagttcgtgtgcctgaactgcggcttcgagacacacgcagccgagcaagccgccctgaacatcgccagatcctggctgttcctgcggagccaggagtacaagaaataccagacaaacaagacaaccggcaacaccgataagagagccttcgtcgagacctggcagtccttttaccggaagaagcttaaggaggtgtggaaacctgccgtgcggtctggcggatctggcggaggctccaccagccccaagaaaaagagaaaagtctaagctgccttctgcggggcttgccttctggccatgcccttcttctctcccttgcacctgtacctcttggtctttgaataaagcctgagtaggaaggctagcaaaaaaaaaaaaaaaaaaaaaaaaaaaaaaaaaaaaaaaaaaaaaaaaaaaaaaaaaaaaaaaaaaaaaaaaaaaaaaaa

SEQ ID NO: 10094 - RNA, 8787 nt, synthetic construct
  source 1..8787: mol_type = other RNA
aggaaataagagagaaaagaagagtaagaagaaatataagagccaccatggcccctaagaagaagcgtaaagtgagccggatgaaccacgaccaggagttcgacccccctaaggtgtaccctcccgtccccgccgagaagagaaagcccatccgggtcctgagcctgttcgatggcatcgccaccggtctgctggtgctgaaggacctgggcatccaggtggataggtacattgcctccgaggtgtgcgaggactccatcaccgtgggaatggtgcgtcatcagggcaagatcatgtacgtgggcgacgtgcggagcgtgacacagaagcatatccaggagtggggccctttcgacctggtgatcggcggcagcccttgcaatgacctgagcatcgtgaacccagcccggaagggcctgtacgagggaaccggcagactgttcttcgagttttacagactgctgcacgacgcccggcctaaggaaggcgacgaccggcccttcttttggctgttcgagaatgtggtggccatgggagtcagcgacaagcgggatattagccggttcctggagagcaaccccgtgatgatcgatgccaaggaagtgagcgccgcccaccgggccagatacttctggggcaatctgcctggcatgaacagacccctggccagcaccgtgaacgacaagctggagctgcaggagtgcctggagcacggccggatcgccaagttcagcaaggtgagaaccatcaccacccgaagcaacagcatcaaacaaggcaaggaccagcactttcctgtgttcatgaacgagaaggaggacatcctgtggtgtaccgagatggagagagtgttcgggttcccagtccactacacagatgtcagcaacatgtctagactggccagacagagactgctgggaagaagctggtccgtccctgtgatcagacacctgttcgcccctctgaaggagtacttcgcctgcgtgagcagcggcaacagcaacgccaacagccggggccccagcttctctagcggcctggtgccactgtccctgagagggagccacatgggccccatggagatctacaaaaccgtgagcgcctggaagcggcagcctgtgcgcgtgctgagcctgtttcggaatatcgataaagtcctgaaaagcctgggattcctggagagcggctctggctccggcggtggcaccctgaagtacgtggaggatgtgacaaacgtggtcagacgggatgtggagaagtggggccccttcgatctggtgtacggcagcacccaacccctgggcagctcttgtgaccggtgccctggctggtacatgtttcagttccaccggatcctgcagtacgccctgccgagacaggagtcccagcggccattcttttggattttcatggacaacttgctgctgaccgaggatgaccaggaaactaccactcggttcctgcagaccgaagccgtgaccctgcaggacgtgagaggccgggactaccagaacgccatgcgggtgtggtccaacatccctggactgaaaagcaagcacgcacctctgacccctaaagaagaggagtacctgcaggcccaggtgcggagcagaagcaagctggacgcccctaaggtggatctgctggtgaagaattgcctcctgcccctgagagagtacttcaagtatttcagccagaatagtctgcccctgggaggcagcggcggcggcatgggcccccagggcgccaggaggcaggccttcctggccttcggcgacgtgaccgtggacttcacccagaaggagtggaggctgctgagccccacccagagggccctgtacagggaggtgaccctggagaactacagccacctggtgagcctgggcatcctgcacagcaagcccgagctgatcaggaggctggagcagggcgaggccccctggggcgaggagaggaggaggaggcccggccccggcggcccaagcagcggcgcccctcctcccagcggcggcaggcggcccaagcagcggcgcccctcctcccagcggcggcagcccagccggctccccaacctctaccgaggagggcacctctgagtccgccacccccgagagcggccctggcacctccaccgagcccagcgagggcagcgcacccggcagccctgccggcagccccacctccacagaggagggaaccagcaccgagcccagcgaaggcagcgccccaggcaccagcaccgagcctagtgagcaggagattaaacggatcaacaagatcagaagaagacttgtgaaagacagcaacaccaagaaggccggcaagacaggccccatgaaaaccctgctggttagagtgatgacacccgatctgagagagcggctggaaaacctgagaaagaagcctgaaaatatcccccagcccatcagcaatacatctagagccaacctgaataagctgctgaccgattacaccgaaatgaagaaggcgatcctgcatgtgtactgggaagagttccagaaggaccctgtgggcctgatgagccgggtggcccagcctgccagcaagaagatcgatcagaacaagctgaaacctgagatggacgagaagggcaacctgaccaccgccggctttgcctgctctcagtgtggccagcccctgttcgtgtacaagctggagcaggtgtctgagaagggcaaggcttacaccaactacttcggacggtgcaatgtggccgagcacgaaaagctgatcctgctggcccagctgaagcccgagaaggatagcgacgaagccgtgacatatagcctgggaaagtttgggcagagggccctggatttctacagcattcatgtgaccaaggagtccacccaccccgtgaagcccctggcccagatcgccggaaacagatacgcctccggacctgtgggaaaggccctgagcgacgcatgtatgggcacaatcgcctccttcctgtctaagtaccaggacatcatcatcgaacaccagaaggtggtgaagggcaaccagaagagactggagagcctgcgggagctggccggcaaggaaaacctggaataccctagcgtgaccctgccacctcagcctcacaccaaggagggcgttgatgcctacaacgaagtgatcgcccgggtgcgaatgtgggtgaacctgaacctgtggcagaagctgaagctaagcagagatgatgccaagcctctgctgagactgaagggattcccttcctttcctctggtcgagagacaggccaacgaagtggactggtgggacatggtgtgtaacgtgaagaagctgatcaacgagaaaaaggaggatggcaaggtgttttggcagaatctggctggctacaagagacaggaagccctgagaccatacctgagcagcgaggaagatcggaagaagggaaagaaattcgctcggtaccagctgggcgacctgctgctgcacctggaaaagaagcacggcgaggactggggaaaggtgtacgacgaggcctgggagcggattgacaagaaagtggaaggcctgagcaagcacatcaagctggaagaggaacggagaagcgaggacgcccagagcaaggccgccctgaccgactggctgcgggctaaggccagcttcgtgatcgagggcctgaaggaggccgacaaggacgagttctgcagatgcgagctgaagctgcagaagtggtacggggacctgcggggaaagcccttcgccatcgaagccgagaacagcatcctggacatcagcggcttcagcaagcagtacaactgtgccttcatctggcagaaggacggcgtgaagaagctgaacctgtacctgatcatcaactacttcaagggcggcaagctgcggttcaagaagatcaaacctgaagccttcgaagccaacagattctacaccgtgatcaacaaaaagagcggcgagatcgtgcccatggaggtgaacttcaacttcgacgaccccaacctgatcatcctgcctctggcctttggcaagagacagggcagagaattcatctggaacgacctgctgtccctggaaaccggcagcctgaagctggccaacggaagagtgatcgagaagacactgtacaacagaagaacccggcaggatgagcctgccctgttcgtggccctgaccttcgagcggcgggaggtcctggactcctccaatatcaaaccaatgaacctgatcggcgtggcaagaggcgaaaacatccccgccgtgatcgccctgaccgaccccgagggctgcccactgagccggtttaaggatagcctgggaaacccaacccacatcctgagaatcggcgagagctataaggagaagcagcggaccatccaggccaagaaggaggtggagcagcggagagccggcggctacagccggaagtacgccagcaaagccaagaatctggcagacgatatggtgagaaacaccgctagagatctgctgtactacgccgtgacccaggatgccatgctgatcttcgccaacctgagccggggcttcggccggcagggcaagcggaccttcatggccgagagacagtacacacggatggaggactggctgaccgccaagctggcctacgagggcctgagcaagacctacctgtccaagacactggcccagtacacctccaagacatgcagcaactgtgggtttaccatcaccagcgccgactacgacagggtgctggagaagctgaagaagacagcaacaggctggatgaccacaattaacggcaaggagctgaaggtggagggccagattacctactacaacagatacaagagacagaacgtagtcaaggacctgtccgtcgagctggatagactgagcgaagaatctgtgaacaacgacatctcctcctggacaaagggcagaagcggagaagctctgagcctcctgaagaaaagattctcccatagacccgtgcaggagaagttcgtgtgcctgaactgcggcttcgagacacacgcagccgagcaagccgccctgaacatcgccagatcctggctgttcctgcggagccaggagtacaagaaataccagacaaacaagacaaccggcaacaccgataagagagccttcgtcgagacctggcagtccttttaccggaagaagcttaaggaggtgtggaaacctgccgtgcggtctggcggatctggcggaggctccaccagccccaagaaaaagagaaaagtctaagctgccttctgcggggcttgccttctggccatgcccttcttctctcccttgcacctgtacctcttggtctttgaataaagcctgagtaggaaggctagcaaaaaaaaaaaaaaaaaaaaaaaaaaaaaaaaaaaaaaaaaaaaaaaaaaaaaaaaaaaaaaaaaaaaaaaaaaaaaaaagcccagccggctccccaacctctaccgaggagggcacctctgagtccgccacccccgagagcggccctggcacctccaccgagcccagcgagggcagcgcacccggcagccctgccggcagccccacctccacagaggagggaaccagcaccgagcccagcgaaggcagcgccccaggcaccagcaccgagcctagtgagcaggagattaaacggatcaacaagatcagaagaagacttgtgaaagacagcaacaccaagaaggccggcaagacaggccccatgaaaaccctgctggttagagtgatgacacccgatctgagagagcggctggaaaacctgagaaagaagcctgaaaatatcccccagcccatcagcaatacatctagagccaacctgaataagctgctgaccgattacaccgaaatgaagaaggcgatcctgcatgtgtactgggaagagttccagaaggaccctgtgggcctgatgagccgggtggcccagcctgccagcaagaagatcgatcagaacaagctgaaacctgagatggacgagaagggcaacctgaccaccgccggctttgcctgctctcagtgtggccagcccctgttcgtgtacaagctggagcaggtgtctgagaagggcaaggcttacaccaactacttcggacggtgcaatgtggccgagcacgaaaagctgatcctgctggcccagctgaagcccgagaaggatagcgacgaagccgtgacatatagcctgggaaagtttgggcagagggccctggatttctacagcattcatgtgaccaaggagtccacccaccccgtgaagcccctggcccagatcgccggaaacagatacgcctccggacctgtgggaaaggccctgagcgacgcatgtatgggcacaatcgcctccttcctgtctaagtaccaggacatcatcatcgaacaccagaaggtggtgaagggcaaccagaagagactggagagcctgcgggagctggccggcaaggaaaacctggaataccctagcgtgaccctgccacctcagcctcacaccaaggagggcgttgatgcctacaacgaagtgatcgcccgggtgcgaatgtgggtgaacctgaacctgtggcagaagctgaagctaagcagagatgatgccaagcctctgctgagactgaagggattcccttcctttcctctggtcgagagacaggccaacgaagtggactggtgggacatggtgtgtaacgtgaagaagctgatcaacgagaaaaaggaggatggcaaggtgttttggcagaatctggctggctacaagagacaggaagccctgagaccatacctgagcagcgaggaagatcggaagaagggaaagaaattcgctcggtaccagctgggcgacctgctgctgcacctggaaaagaagcacggcgaggactggggaaaggtgtacgacgaggcctgggagcggattgacaagaaagtggaaggcctgagcaagcacatcaagctggaagaggaacggagaagcgaggacgcccagagcaaggccgccctgaccgactggctgcgggctaaggccagcttcgtgatcgagggcctgaaggaggccgacaaggacgagttctgcagatgcgagctgaagctgcagaagtggtacggggacctgcggggaaagcccttcgccatcgaagccgagaacagcatcctggacatcagcggcttcagcaagcagtacaactgtgccttcatctggcagaaggacggcgtgaagaagctgaacctgtacctgatcatcaactacttcaagggcggcaagctgcggttcaagaagatcaaacctgaagccttcgaagccaacagattctacaccgtgatcaacaaaaagagcggcgagatcgtgcccatggaggtgaacttcaacttcgacgaccccaacctgatcatcctgcctctggcctttggcaagagacagggcagagaattcatctggaacgacctgctgtccctggaaaccggcagcctgaagctggccaacggaagagtgatcgagaagacactgtacaacagaagaacccggcaggatgagcctgccctgttcgtggccctgaccttcgagcggcgggaggtcctggactcctccaatatcaaaccaatgaacctgatcggcgtggcaagaggcgaaaacatccccgccgtgatcgccctgaccgaccccgagggctgcccactgagccggtttaaggatagcctgggaaacccaacccacatcctgagaatcggcgagagctataaggagaagcagcggaccatccaggccaagaaggaggtggagcagcggagagccggcggctacagccggaagtacgccagcaaagccaagaatctggcagacgatatggtgagaaacaccgctagagatctgctgtactacgccgtgacccaggatgccatgctgatcttcgccaacctgagccggggcttcggccggcagggcaagcggaccttcatggccgagagacagtacacacggatggaggactggctgaccgccaagctggcctacgagggcctgagcaagacctacctgtccaagacactggcccagtacacctccaagacatgcagcaactgtgggtttaccatcaccagcgccgactacgacagggtgctggagaagctgaagaagacagcaacaggctggatgaccacaattaacggcaaggagctgaaggtggagggccagattacctactacaacagatacaagagacagaacgtagtcaaggacctgtccgtcgagctggatagactgagcgaagaatctgtgaacaacgacatctcctcctggacaaagggcagaagcggagaagctctgagcctcctgaagaaaagattctcccatagacccgtgcaggagaagttcgtgtgcctgaactgcggcttcgagacacacgcagccgagcaagccgccctgaacatcgccagatcctggctgttcctgcggagccaggagtacaagaaataccagacaaacaagacaaccggcaacaccgataagagagccttcgtcgagacctggcagtccttttaccggaagaagcttaaggaggtgtggaaacctgccgtgcggtctggcggatctggcggaggctccaccagccccaagaaaaagagaaaagtctaagctgccttctgcggggcttgccttctggccatgcccttcttctctcccttgcacctgtacctcttggtctttgaataaagcctgagtaggaaggctagcaaaaaaaaaaaaaaaaaaaaaaaaaaaaaaaaaaaaaaaaaaaaaaaaaaaaaaaaaaaaaaaaaaaaaaaaaaaaaaaa

SEQ ID NO: 10095 - RNA, 8787 nt, synthetic construct
  source 1..8787: mol_type = other RNA
aggaaataagagagaaaagaagagtaagaagaaatataagagccaccatggcccctaagaagaagcgtaaagtgagccggatgaaccacgaccaggagttcgacccccctaaggtgtaccctcccgtccccgccgagaagagaaagcccatccgggtcctgagcctgttcgatggcatcgccaccggtctgctggtgctgaaggacctgggcatccaggtggataggtacattgcctccgaggtgtgcgaggactccatcaccgtgggaatggtgcgtcatcagggcaagatcatgtacgtgggcgacgtgcggagcgtgacacagaagcatatccaggagtggggccctttcgacctggtgatcggcggcagcccttgcaatgacctgagcatcgtgaacccagcccggaagggcctgtacgagggaaccggcagactgttcttcgagttttacagactgctgcacgacgcccggcctaaggaaggcgacgaccggcccttcttttggctgttcgagaatgtggtggccatgggagtcagcgacaagcgggatattagccggttcctggagagcaaccccgtgatgatcgatgccaaggaagtgagcgccgcccaccgggccagatacttctggggcaatctgcctggcatgaacagacccctggccagcaccgtgaacgacaagctggagctgcaggagtgcctggagcacggccggatcgccaagttcagcaaggtgagaaccatcaccacccgaagcaacagcatcaaacaaggcaaggaccagcactttcctgtgttcatgaacgagaaggaggacatcctgtggtgtaccgagatggagagagtgttcgggttcccagtccactacacagatgtcagcaacatgtctagactggccagacagagactgctgggaagaagctggtccgtccctgtgatcagacacctgttcgcccctctgaaggagtacttcgcctgcgtgagcagcggcaacagcaacgccaacagccggggccccagcttctctagcggcctggtgccactgtccctgagagggagccacatgggccccatggagatctacaaaaccgtgagcgcctggaagcggcagcctgtgcgcgtgctgagcctgtttcggaatatcgataaagtcctgaaaagcctgggattcctggagagcggctctggctccggcggtggcaccctgaagtacgtggaggatgtgacaaacgtggtcagacgggatgtggagaagtggggccccttcgatctggtgtacggcagcacccaacccctgggcagctcttgtgaccggtgccctggctggtacatgtttcagttccaccggatcctgcagtacgccctgccgagacaggagtcccagcggccattcttttggattttcatggacaacttgctgctgaccgaggatgaccaggaaactaccactcggttcctgcagaccgaagccgtgaccctgcaggacgtgagaggccgggactaccagaacgccatgcgggtgtggtccaacatccctggactgaaaagcaagcacgcacctctgacccctaaagaagaggagtacctgcaggcccaggtgcggagcagaagcaagctggacgcccctaaggtggatctgctggtgaagaattgcctcctgcccctgagagagtacttcaagtatttcagccagaatagtctgcccctgggaggcagcggcggcggcagccaggtgagcgtgaccttcgaggacgtggccgtgctgttcagcagggacgagtggaggaggctgggccccagccagaagaacctgtaccaggacgtgatgctggagaactacagcaacctggtgagcctgggcctgcccttcagcaagcccaaggtgatcagcctgctgcagcagggcgaggacccctggaaggtggagaaggagagccccggcagcttccccggctgcaagagcagccccggcggcccaagcagcggcgcccctcctcccagcggcggcaggcggcccaagcagcggcgcccctcctcccagcggcggcagcccagccggctccccaacctctaccgaggagggcacctctgagtccgccacccccgagagcggccctggcacctccaccgagcccagcgagggcagcgcacccggcagccctgccggcagccccacctccacagaggagggaaccagcaccgagcccagcgaaggcagcgccccaggcaccagcaccgagcctagtgagcaggagattaaacggatcaacaagatcagaagaagacttgtgaaagacagcaacaccaagaaggccggcaagacaggccccatgaaaaccctgctggttagagtgatgacacccgatctgagagagcggctggaaaacctgagaaagaagcctgaaaatatcccccagcccatcagcaatacatctagagccaacctgaataagctgctgaccgattacaccgaaatgaagaaggcgatcctgcatgtgtactgggaagagttccagaaggaccctgtgggcctgatgagccgggtggcccagcctgccagcaagaagatcgatcagaacaagctgaaacctgagatggacgagaagggcaacctgaccaccgccggctttgcctgctctcagtgtggccagcccctgttcgtgtacaagctggagcaggtgtctgagaagggcaaggcttacaccaactacttcggacggtgcaatgtggccgagcacgaaaagctgatcctgctggcccagctgaagcccgagaaggatagcgacgaagccgtgacatatagcctgggaaagtttgggcagagggccctggatttctacagcattcatgtgaccaaggagtccacccaccccgtgaagcccctggcccagatcgccggaaacagatacgcctccggacctgtgggaaaggccctgagcgacgcatgtatgggcacaatcgcctccttcctgtctaagtaccaggacatcatcatcgaacaccagaaggtggtgaagggcaaccagaagagactggagagcctgcgggagctggccggcaaggaaaacctggaataccctagcgtgaccctgccacctcagcctcacaccaaggagggcgttgatgcctacaacgaagtgatcgcccgggtgcgaatgtgggtgaacctgaacctgtggcagaagctgaagctaagcagagatgatgccaagcctctgctgagactgaagggattcccttcctttcctctggtcgagagacaggccaacgaagtggactggtgggacatggtgtgtaacgtgaagaagctgatcaacgagaaaaaggaggatggcaaggtgttttggcagaatctggctggctacaagagacaggaagccctgagaccatacctgagcagcgaggaagatcggaagaagggaaagaaattcgctcggtaccagctgggcgacctgctgctgcacctggaaaagaagcacggcgaggactggggaaaggtgtacgacgaggcctgggagcggattgacaagaaagtggaaggcctgagcaagcacatcaagctggaagaggaacggagaagcgaggacgcccagagcaaggccgccctgaccgactggctgcgggctaaggccagcttcgtgatcgagggcctgaaggaggccgacaaggacgagttctgcagatgcgagctgaagctgcagaagtggtacggggacctgcggggaaagcccttcgccatcgaagccgagaacagcatcctggacatcagcggcttcagcaagcagtacaactgtgccttcatctggcagaaggacggcgtgaagaagctgaacctgtacctgatcatcaactacttcaagggcggcaagctgcggttcaagaagatcaaacctgaagccttcgaagccaacagattctacaccgtgatcaacaaaaagagcggcgagatcgtgcccatggaggtgaacttcaacttcgacgaccccaacctgatcatcctgcctctggcctttggcaagagacagggcagagaattcatctggaacgacctgctgtccctggaaaccggcagcctgaagctggccaacggaagagtgatcgagaagacactgtacaacagaagaacccggcaggatgagcctgccctgttcgtggccctgaccttcgagcggcgggaggtcctggactcctccaatatcaaaccaatgaacctgatcggcgtggcaagaggcgaaaacatccccgccgtgatcgccctgaccgaccccgagggctgcccactgagccggtttaaggatagcctgggaaacccaacccacatcctgagaatcggcgagagctataaggagaagcagcggaccatccaggccaagaaggaggtggagcagcggagagccggcggctacagccggaagtacgccagcaaagccaagaatctggcagacgatatggtgagaaacaccgctagagatctgctgtactacgccgtgacccaggatgccatgctgatcttcgccaacctgagccggggcttcggccggcagggcaagcggaccttcatggccgagagacagtacacacggatggaggactggctgaccgccaagctggcctacgagggcctgagcaagacctacctgtccaagacactggcccagtacacctccaagacatgcagcaactgtgggtttaccatcaccagcgccgactacgacagggtgctggagaagctgaagaagacagcaacaggctggatgaccacaattaacggcaaggagctgaaggtggagggccagattacctactacaacagatacaagagacagaacgtagtcaaggacctgtccgtcgagctggatagactgagcgaagaatctgtgaacaacgacatctcctcctggacaaagggcagaagcggagaagctctgagcctcctgaagaaaagattctcccatagacccgtgcaggagaagttcgtgtgcctgaactgcggcttcgagacacacgcagccgagcaagccgccctgaacatcgccagatcctggctgttcctgcggagccaggagtacaagaaataccagacaaacaagacaaccggcaacaccgataagagagccttcgtcgagacctggcagtccttttaccggaagaagcttaaggaggtgtggaaacctgccgtgcggtctggcggatctggcggaggctccaccagccccaagaaaaagagaaaagtctaagctgccttctgcggggcttgccttctggccatgcccttcttctctcccttgcacctgtacctcttggtctttgaataaagcctgagtaggaaggctagcaaaaaaaaaaaaaaaaaaaaaaaaaaaaaaaaaaaaaaaaaaaaaaaaaaaaaaaaaaaaaaaaaaaaaaaaaaaaaaaagcccagccggctccccaacctctaccgaggagggcacctctgagtccgccacccccgagagcggccctggcacctccaccgagcccagcgagggcagcgcacccggcagccctgccggcagccccacctccacagaggagggaaccagcaccgagcccagcgaaggcagcgccccaggcaccagcaccgagcctagtgagcaggagattaaacggatcaacaagatcagaagaagacttgtgaaagacagcaacaccaagaaggccggcaagacaggccccatgaaaaccctgctggttagagtgatgacacccgatctgagagagcggctggaaaacctgagaaagaagcctgaaaatatcccccagcccatcagcaatacatctagagccaacctgaataagctgctgaccgattacaccgaaatgaagaaggcgatcctgcatgtgtactgggaagagttccagaaggaccctgtgggcctgatgagccgggtggcccagcctgccagcaagaagatcgatcagaacaagctgaaacctgagatggacgagaagggcaacctgaccaccgccggctttgcctgctctcagtgtggccagcccctgttcgtgtacaagctggagcaggtgtctgagaagggcaaggcttacaccaactacttcggacggtgcaatgtggccgagcacgaaaagctgatcctgctggcccagctgaagcccgagaaggatagcgacgaagccgtgacatatagcctgggaaagtttgggcagagggccctggatttctacagcattcatgtgaccaaggagtccacccaccccgtgaagcccctggcccagatcgccggaaacagatacgcctccggacctgtgggaaaggccctgagcgacgcatgtatgggcacaatcgcctccttcctgtctaagtaccaggacatcatcatcgaacaccagaaggtggtgaagggcaaccagaagagactggagagcctgcgggagctggccggcaaggaaaacctggaataccctagcgtgaccctgccacctcagcctcacaccaaggagggcgttgatgcctacaacgaagtgatcgcccgggtgcgaatgtgggtgaacctgaacctgtggcagaagctgaagctaagcagagatgatgccaagcctctgctgagactgaagggattcccttcctttcctctggtcgagagacaggccaacgaagtggactggtgggacatggtgtgtaacgtgaagaagctgatcaacgagaaaaaggaggatggcaaggtgttttggcagaatctggctggctacaagagacaggaagccctgagaccatacctgagcagcgaggaagatcggaagaagggaaagaaattcgctcggtaccagctgggcgacctgctgctgcacctggaaaagaagcacggcgaggactggggaaaggtgtacgacgaggcctgggagcggattgacaagaaagtggaaggcctgagcaagcacatcaagctggaagaggaacggagaagcgaggacgcccagagcaaggccgccctgaccgactggctgcgggctaaggccagcttcgtgatcgagggcctgaaggaggccgacaaggacgagttctgcagatgcgagctgaagctgcagaagtggtacggggacctgcggggaaagcccttcgccatcgaagccgagaacagcatcctggacatcagcggcttcagcaagcagtacaactgtgccttcatctggcagaaggacggcgtgaagaagctgaacctgtacctgatcatcaactacttcaagggcggcaagctgcggttcaagaagatcaaacctgaagccttcgaagccaacagattctacaccgtgatcaacaaaaagagcggcgagatcgtgcccatggaggtgaacttcaacttcgacgaccccaacctgatcatcctgcctctggcctttggcaagagacagggcagagaattcatctggaacgacctgctgtccctggaaaccggcagcctgaagctggccaacggaagagtgatcgagaagacactgtacaacagaagaacccggcaggatgagcctgccctgttcgtggccctgaccttcgagcggcgggaggtcctggactcctccaatatcaaaccaatgaacctgatcggcgtggcaagaggcgaaaacatccccgccgtgatcgccctgaccgaccccgagggctgcccactgagccggtttaaggatagcctgggaaacccaacccacatcctgagaatcggcgagagctataaggagaagcagcggaccatccaggccaagaaggaggtggagcagcggagagccggcggctacagccggaagtacgccagcaaagccaagaatctggcagacgatatggtgagaaacaccgctagagatctgctgtactacgccgtgacccaggatgccatgctgatcttcgccaacctgagccggggcttcggccggcagggcaagcggaccttcatggccgagagacagtacacacggatggaggactggctgaccgccaagctggcctacgagggcctgagcaagacctacctgtccaagacactggcccagtacacctccaagacatgcagcaactgtgggtttaccatcaccagcgccgactacgacagggtgctggagaagctgaagaagacagcaacaggctggatgaccacaattaacggcaaggagctgaaggtggagggccagattacctactacaacagatacaagagacagaacgtagtcaaggacctgtccgtcgagctggatagactgagcgaagaatctgtgaacaacgacatctcctcctggacaaagggcagaagcggagaagctctgagcctcctgaagaaaagattctcccatagacccgtgcaggagaagttcgtgtgcctgaactgcggcttcgagacacacgcagccgagcaagccgccctgaacatcgccagatcctggctgttcctgcggagccaggagtacaagaaataccagacaaacaagacaaccggcaacaccgataagagagccttcgtcgagacctggcagtccttttaccggaagaagcttaaggaggtgtggaaacctgccgtgcggtctggcggatctggcggaggctccaccagccccaagaaaaagagaaaagtctaagctgccttctgcggggcttgccttctggccatgcccttcttctctcccttgcacctgtacctcttggtctttgaataaagcctgagtaggaaggctagcaaaaaaaaaaaaaaaaaaaaaaaaaaaaaaaaaaaaaaaaaaaaaaaaaaaaaaaaaaaaaaaaaaaaaaaaaaaaaaaa

SEQ ID NO: 10096 - RNA, 8787 nt, synthetic construct
  source 1..8787: mol_type = other RNA
aggaaataagagagaaaagaagagtaagaagaaatataagagccaccatggcccctaagaagaagcgtaaagtgagccggatgaaccacgaccaggagttcgacccccctaaggtgtaccctcccgtccccgccgagaagagaaagcccatccgggtcctgagcctgttcgatggcatcgccaccggtctgctggtgctgaaggacctgggcatccaggtggataggtacattgcctccgaggtgtgcgaggactccatcaccgtgggaatggtgcgtcatcagggcaagatcatgtacgtgggcgacgtgcggagcgtgacacagaagcatatccaggagtggggccctttcgacctggtgatcggcggcagcccttgcaatgacctgagcatcgtgaacccagcccggaagggcctgtacgagggaaccggcagactgttcttcgagttttacagactgctgcacgacgcccggcctaaggaaggcgacgaccggcccttcttttggctgttcgagaatgtggtggccatgggagtcagcgacaagcgggatattagccggttcctggagagcaaccccgtgatgatcgatgccaaggaagtgagcgccgcccaccgggccagatacttctggggcaatctgcctggcatgaacagacccctggccagcaccgtgaacgacaagctggagctgcaggagtgcctggagcacggccggatcgccaagttcagcaaggtgagaaccatcaccacccgaagcaacagcatcaaacaaggcaaggaccagcactttcctgtgttcatgaacgagaaggaggacatcctgtggtgtaccgagatggagagagtgttcgggttcccagtccactacacagatgtcagcaacatgtctagactggccagacagagactgctgggaagaagctggtccgtccctgtgatcagacacctgttcgcccctctgaaggagtacttcgcctgcgtgagcagcggcaacagcaacgccaacagccggggccccagcttctctagcggcctggtgccactgtccctgagagggagccacatgggccccatggagatctacaaaaccgtgagcgcctggaagcggcagcctgtgcgcgtgctgagcctgtttcggaatatcgataaagtcctgaaaagcctgggattcctggagagcggctctggctccggcggtggcaccctgaagtacgtggaggatgtgacaaacgtggtcagacgggatgtggagaagtggggccccttcgatctggtgtacggcagcacccaacccctgggcagctcttgtgaccggtgccctggctggtacatgtttcagttccaccggatcctgcagtacgccctgccgagacaggagtcccagcggccattcttttggattttcatggacaacttgctgctgaccgaggatgaccaggaaactaccactcggttcctgcagaccgaagccgtgaccctgcaggacgtgagaggccgggactaccagaacgccatgcgggtgtggtccaacatccctggactgaaaagcaagcacgcacctctgacccctaaagaagaggagtacctgcaggcccaggtgcggagcagaagcaagctggacgcccctaaggtggatctgctggtgaagaattgcctcctgcccctgagagagtacttcaagtatttcagccagaatagtctgcccctgggaggcagcggcggcggcaagcccggcaccgtgagcttcgccgacgtggccgtgtacttcagcagggaggagtggggctacctgaggcccgcccagagggccctgtacagggacgtgatgagggagacctactgccacctgggcgccctgggcgtgggcggcagcaagcccgccctgatcagctgggtggaggaggaggccgagctgtgggaccccgccgccagggaccccgaggtgaccaagggcctgaccgagaccgacggcggcccaagcagcggcgcccctcctcccagcggcggcaggcggcccaagcagcggcgcccctcctcccagcggcggcagcccagccggctccccaacctctaccgaggagggcacctctgagtccgccacccccgagagcggccctggcacctccaccgagcccagcgagggcagcgcacccggcagccctgccggcagccccacctccacagaggagggaaccagcaccgagcccagcgaaggcagcgccccaggcaccagcaccgagcctagtgagcaggagattaaacggatcaacaagatcagaagaagacttgtgaaagacagcaacaccaagaaggccggcaagacaggccccatgaaaaccctgctggttagagtgatgacacccgatctgagagagcggctggaaaacctgagaaagaagcctgaaaatatcccccagcccatcagcaatacatctagagccaacctgaataagctgctgaccgattacaccgaaatgaagaaggcgatcctgcatgtgtactgggaagagttccagaaggaccctgtgggcctgatgagccgggtggcccagcctgccagcaagaagatcgatcagaacaagctgaaacctgagatggacgagaagggcaacctgaccaccgccggctttgcctgctctcagtgtggccagcccctgttcgtgtacaagctggagcaggtgtctgagaagggcaaggcttacaccaactacttcggacggtgcaatgtggccgagcacgaaaagctgatcctgctggcccagctgaagcccgagaaggatagcgacgaagccgtgacatatagcctgggaaagtttgggcagagggccctggatttctacagcattcatgtgaccaaggagtccacccaccccgtgaagcccctggcccagatcgccggaaacagatacgcctccggacctgtgggaaaggccctgagcgacgcatgtatgggcacaatcgcctccttcctgtctaagtaccaggacatcatcatcgaacaccagaaggtggtgaagggcaaccagaagagactggagagcctgcgggagctggccggcaaggaaaacctggaataccctagcgtgaccctgccacctcagcctcacaccaaggagggcgttgatgcctacaacgaagtgatcgcccgggtgcgaatgtgggtgaacctgaacctgtggcagaagctgaagctaagcagagatgatgccaagcctctgctgagactgaagggattcccttcctttcctctggtcgagagacaggccaacgaagtggactggtgggacatggtgtgtaacgtgaagaagctgatcaacgagaaaaaggaggatggcaaggtgttttggcagaatctggctggctacaagagacaggaagccctgagaccatacctgagcagcgaggaagatcggaagaagggaaagaaattcgctcggtaccagctgggcgacctgctgctgcacctggaaaagaagcacggcgaggactggggaaaggtgtacgacgaggcctgggagcggattgacaagaaagtggaaggcctgagcaagcacatcaagctggaagaggaacggagaagcgaggacgcccagagcaaggccgccctgaccgactggctgcgggctaaggccagcttcgtgatcgagggcctgaaggaggccgacaaggacgagttctgcagatgcgagctgaagctgcagaagtggtacggggacctgcggggaaagcccttcgccatcgaagccgagaacagcatcctggacatcagcggcttcagcaagcagtacaactgtgccttcatctggcagaaggacggcgtgaagaagctgaacctgtacctgatcatcaactacttcaagggcggcaagctgcggttcaagaagatcaaacctgaagccttcgaagccaacagattctacaccgtgatcaacaaaaagagcggcgagatcgtgcccatggaggtgaacttcaacttcgacgaccccaacctgatcatcctgcctctggcctttggcaagagacagggcagagaattcatctggaacgacctgctgtccctggaaaccggcagcctgaagctggccaacggaagagtgatcgagaagacactgtacaacagaagaacccggcaggatgagcctgccctgttcgtggccctgaccttcgagcggcgggaggtcctggactcctccaatatcaaaccaatgaacctgatcggcgtggcaagaggcgaaaacatccccgccgtgatcgccctgaccgaccccgagggctgcccactgagccggtttaaggatagcctgggaaacccaacccacatcctgagaatcggcgagagctataaggagaagcagcggaccatccaggccaagaaggaggtggagcagcggagagccggcggctacagccggaagtacgccagcaaagccaagaatctggcagacgatatggtgagaaacaccgctagagatctgctgtactacgccgtgacccaggatgccatgctgatcttcgccaacctgagccggggcttcggccggcagggcaagcggaccttcatggccgagagacagtacacacggatggaggactggctgaccgccaagctggcctacgagggcctgagcaagacctacctgtccaagacactggcccagtacacctccaagacatgcagcaactgtgggtttaccatcaccagcgccgactacgacagggtgctggagaagctgaagaagacagcaacaggctggatgaccacaattaacggcaaggagctgaaggtggagggccagattacctactacaacagatacaagagacagaacgtagtcaaggacctgtccgtcgagctggatagactgagcgaagaatctgtgaacaacgacatctcctcctggacaaagggcagaagcggagaagctctgagcctcctgaagaaaagattctcccatagacccgtgcaggagaagttcgtgtgcctgaactgcggcttcgagacacacgcagccgagcaagccgccctgaacatcgccagatcctggctgttcctgcggagccaggagtacaagaaataccagacaaacaagacaaccggcaacaccgataagagagccttcgtcgagacctggcagtccttttaccggaagaagcttaaggaggtgtggaaacctgccgtgcggtctggcggatctggcggaggctccaccagccccaagaaaaagagaaaagtctaagctgccttctgcggggcttgccttctggccatgcccttcttctctcccttgcacctgtacctcttggtctttgaataaagcctgagtaggaaggctagcaaaaaaaaaaaaaaaaaaaaaaaaaaaaaaaaaaaaaaaaaaaaaaaaaaaaaaaaaaaaaaaaaaaaaaaaaaaaaaaagcccagccggctccccaacctctaccgaggagggcacctctgagtccgccacccccgagagcggccctggcacctccaccgagcccagcgagggcagcgcacccggcagccctgccggcagccccacctccacagaggagggaaccagcaccgagcccagcgaaggcagcgccccaggcaccagcaccgagcctagtgagcaggagattaaacggatcaacaagatcagaagaagacttgtgaaagacagcaacaccaagaaggccggcaagacaggccccatgaaaaccctgctggttagagtgatgacacccgatctgagagagcggctggaaaacctgagaaagaagcctgaaaatatcccccagcccatcagcaatacatctagagccaacctgaataagctgctgaccgattacaccgaaatgaagaaggcgatcctgcatgtgtactgggaagagttccagaaggaccctgtgggcctgatgagccgggtggcccagcctgccagcaagaagatcgatcagaacaagctgaaacctgagatggacgagaagggcaacctgaccaccgccggctttgcctgctctcagtgtggccagcccctgttcgtgtacaagctggagcaggtgtctgagaagggcaaggcttacaccaactacttcggacggtgcaatgtggccgagcacgaaaagctgatcctgctggcccagctgaagcccgagaaggatagcgacgaagccgtgacatatagcctgggaaagtttgggcagagggccctggatttctacagcattcatgtgaccaaggagtccacccaccccgtgaagcccctggcccagatcgccggaaacagatacgcctccggacctgtgggaaaggccctgagcgacgcatgtatgggcacaatcgcctccttcctgtctaagtaccaggacatcatcatcgaacaccagaaggtggtgaagggcaaccagaagagactggagagcctgcgggagctggccggcaaggaaaacctggaataccctagcgtgaccctgccacctcagcctcacaccaaggagggcgttgatgcctacaacgaagtgatcgcccgggtgcgaatgtgggtgaacctgaacctgtggcagaagctgaagctaagcagagatgatgccaagcctctgctgagactgaagggattcccttcctttcctctggtcgagagacaggccaacgaagtggactggtgggacatggtgtgtaacgtgaagaagctgatcaacgagaaaaaggaggatggcaaggtgttttggcagaatctggctggctacaagagacaggaagccctgagaccatacctgagcagcgaggaagatcggaagaagggaaagaaattcgctcggtaccagctgggcgacctgctgctgcacctggaaaagaagcacggcgaggactggggaaaggtgtacgacgaggcctgggagcggattgacaagaaagtggaaggcctgagcaagcacatcaagctggaagaggaacggagaagcgaggacgcccagagcaaggccgccctgaccgactggctgcgggctaaggccagcttcgtgatcgagggcctgaaggaggccgacaaggacgagttctgcagatgcgagctgaagctgcagaagtggtacggggacctgcggggaaagcccttcgccatcgaagccgagaacagcatcctggacatcagcggcttcagcaagcagtacaactgtgccttcatctggcagaaggacggcgtgaagaagctgaacctgtacctgatcatcaactacttcaagggcggcaagctgcggttcaagaagatcaaacctgaagccttcgaagccaacagattctacaccgtgatcaacaaaaagagcggcgagatcgtgcccatggaggtgaacttcaacttcgacgaccccaacctgatcatcctgcctctggcctttggcaagagacagggcagagaattcatctggaacgacctgctgtccctggaaaccggcagcctgaagctggccaacggaagagtgatcgagaagacactgtacaacagaagaacccggcaggatgagcctgccctgttcgtggccctgaccttcgagcggcgggaggtcctggactcctccaatatcaaaccaatgaacctgatcggcgtggcaagaggcgaaaacatccccgccgtgatcgccctgaccgaccccgagggctgcccactgagccggtttaaggatagcctgggaaacccaacccacatcctgagaatcggcgagagctataaggagaagcagcggaccatccaggccaagaaggaggtggagcagcggagagccggcggctacagccggaagtacgccagcaaagccaagaatctggcagacgatatggtgagaaacaccgctagagatctgctgtactacgccgtgacccaggatgccatgctgatcttcgccaacctgagccggggcttcggccggcagggcaagcggaccttcatggccgagagacagtacacacggatggaggactggctgaccgccaagctggcctacgagggcctgagcaagacctacctgtccaagacactggcccagtacacctccaagacatgcagcaactgtgggtttaccatcaccagcgccgactacgacagggtgctggagaagctgaagaagacagcaacaggctggatgaccacaattaacggcaaggagctgaaggtggagggccagattacctactacaacagatacaagagacagaacgtagtcaaggacctgtccgtcgagctggatagactgagcgaagaatctgtgaacaacgacatctcctcctggacaaagggcagaagcggagaagctctgagcctcctgaagaaaagattctcccatagacccgtgcaggagaagttcgtgtgcctgaactgcggcttcgagacacacgcagccgagcaagccgccctgaacatcgccagatcctggctgttcctgcggagccaggagtacaagaaataccagacaaacaagacaaccggcaacaccgataagagagccttcgtcgagacctggcagtccttttaccggaagaagcttaaggaggtgtggaaacctgccgtgcggtctggcggatctggcggaggctccaccagccccaagaaaaagagaaaagtctaagctgccttctgcggggcttgccttctggccatgcccttcttctctcccttgcacctgtacctcttggtctttgaataaagcctgagtaggaaggctagcaaaaaaaaaaaaaaaaaaaaaaaaaaaaaaaaaaaaaaaaaaaaaaaaaaaaaaaaaaaaaaaaaaaaaaaaaaaaaaaa

SEQ ID NO: 10097 - RNA, 8787 nt, synthetic construct
  source 1..8787: mol_type = other RNA
aggaaataagagagaaaagaagagtaagaagaaatataagagccaccatggcccctaagaagaagcgtaaagtgagccggatgaaccacgaccaggagttcgacccccctaaggtgtaccctcccgtccccgccgagaagagaaagcccatccgggtcctgagcctgttcgatggcatcgccaccggtctgctggtgctgaaggacctgggcatccaggtggataggtacattgcctccgaggtgtgcgaggactccatcaccgtgggaatggtgcgtcatcagggcaagatcatgtacgtgggcgacgtgcggagcgtgacacagaagcatatccaggagtggggccctttcgacctggtgatcggcggcagcccttgcaatgacctgagcatcgtgaacccagcccggaagggcctgtacgagggaaccggcagactgttcttcgagttttacagactgctgcacgacgcccggcctaaggaaggcgacgaccggcccttcttttggctgttcgagaatgtggtggccatgggagtcagcgacaagcgggatattagccggttcctggagagcaaccccgtgatgatcgatgccaaggaagtgagcgccgcccaccgggccagatacttctggggcaatctgcctggcatgaacagacccctggccagcaccgtgaacgacaagctggagctgcaggagtgcctggagcacggccggatcgccaagttcagcaaggtgagaaccatcaccacccgaagcaacagcatcaaacaaggcaaggaccagcactttcctgtgttcatgaacgagaaggaggacatcctgtggtgtaccgagatggagagagtgttcgggttcccagtccactacacagatgtcagcaacatgtctagactggccagacagagactgctgggaagaagctggtccgtccctgtgatcagacacctgttcgcccctctgaaggagtacttcgcctgcgtgagcagcggcaacagcaacgccaacagccggggccccagcttctctagcggcctggtgccactgtccctgagagggagccacatgggccccatggagatctacaaaaccgtgagcgcctggaagcggcagcctgtgcgcgtgctgagcctgtttcggaatatcgataaagtcctgaaaagcctgggattcctggagagcggctctggctccggcggtggcaccctgaagtacgtggaggatgtgacaaacgtggtcagacgggatgtggagaagtggggccccttcgatctggtgtacggcagcacccaacccctgggcagctcttgtgaccggtgccctggctggtacatgtttcagttccaccggatcctgcagtacgccctgccgagacaggagtcccagcggccattcttttggattttcatggacaacttgctgctgaccgaggatgaccaggaaactaccactcggttcctgcagaccgaagccgtgaccctgcaggacgtgagaggccgggactaccagaacgccatgcgggtgtggtccaacatccctggactgaaaagcaagcacgcacctctgacccctaaagaagaggagtacctgcaggcccaggtgcggagcagaagcaagctggacgcccctaaggtggatctgctggtgaagaattgcctcctgcccctgagagagtacttcaagtatttcagccagaatagtctgcccctgggaggcagcggcggcggcatgttcagcgacgtgagcgtggacttcagccaggaggagtgggagtgcctggaccccggccagagggacctgtacagggacgtgatgctggagaactacagcaacctgctgagcatgggcctgtacatccccaagccccaggtgatcagcctgctggagcagggcaaggagccctggatggtgggcagggagctgaccaggggcctgtgcagcgacctggagagcatgtgcgagaccaagctgggcggcccaagcagcggcgcccctcctcccagcggcggcaggcggcccaagcagcggcgcccctcctcccagcggcggcagcccagccggctccccaacctctaccgaggagggcacctctgagtccgccacccccgagagcggccctggcacctccaccgagcccagcgagggcagcgcacccggcagccctgccggcagccccacctccacagaggagggaaccagcaccgagcccagcgaaggcagcgccccaggcaccagcaccgagcctagtgagcaggagattaaacggatcaacaagatcagaagaagacttgtgaaagacagcaacaccaagaaggccggcaagacaggccccatgaaaaccctgctggttagagtgatgacacccgatctgagagagcggctggaaaacctgagaaagaagcctgaaaatatcccccagcccatcagcaatacatctagagccaacctgaataagctgctgaccgattacaccgaaatgaagaaggcgatcctgcatgtgtactgggaagagttccagaaggaccctgtgggcctgatgagccgggtggcccagcctgccagcaagaagatcgatcagaacaagctgaaacctgagatggacgagaagggcaacctgaccaccgccggctttgcctgctctcagtgtggccagcccctgttcgtgtacaagctggagcaggtgtctgagaagggcaaggcttacaccaactacttcggacggtgcaatgtggccgagcacgaaaagctgatcctgctggcccagctgaagcccgagaaggatagcgacgaagccgtgacatatagcctgggaaagtttgggcagagggccctggatttctacagcattcatgtgaccaaggagtccacccaccccgtgaagcccctggcccagatcgccggaaacagatacgcctccggacctgtgggaaaggccctgagcgacgcatgtatgggcacaatcgcctccttcctgtctaagtaccaggacatcatcatcgaacaccagaaggtggtgaagggcaaccagaagagactggagagcctgcgggagctggccggcaaggaaaacctggaataccctagcgtgaccctgccacctcagcctcacaccaaggagggcgttgatgcctacaacgaagtgatcgcccgggtgcgaatgtgggtgaacctgaacctgtggcagaagctgaagctaagcagagatgatgccaagcctctgctgagactgaagggattcccttcctttcctctggtcgagagacaggccaacgaagtggactggtgggacatggtgtgtaacgtgaagaagctgatcaacgagaaaaaggaggatggcaaggtgttttggcagaatctggctggctacaagagacaggaagccctgagaccatacctgagcagcgaggaagatcggaagaagggaaagaaattcgctcggtaccagctgggcgacctgctgctgcacctggaaaagaagcacggcgaggactggggaaaggtgtacgacgaggcctgggagcggattgacaagaaagtggaaggcctgagcaagcacatcaagctggaagaggaacggagaagcgaggacgcccagagcaaggccgccctgaccgactggctgcgggctaaggccagcttcgtgatcgagggcctgaaggaggccgacaaggacgagttctgcagatgcgagctgaagctgcagaagtggtacggggacctgcggggaaagcccttcgccatcgaagccgagaacagcatcctggacatcagcggcttcagcaagcagtacaactgtgccttcatctggcagaaggacggcgtgaagaagctgaacctgtacctgatcatcaactacttcaagggcggcaagctgcggttcaagaagatcaaacctgaagccttcgaagccaacagattctacaccgtgatcaacaaaaagagcggcgagatcgtgcccatggaggtgaacttcaacttcgacgaccccaacctgatcatcctgcctctggcctttggcaagagacagggcagagaattcatctggaacgacctgctgtccctggaaaccggcagcctgaagctggccaacggaagagtgatcgagaagacactgtacaacagaagaacccggcaggatgagcctgccctgttcgtggccctgaccttcgagcggcgggaggtcctggactcctccaatatcaaaccaatgaacctgatcggcgtggcaagaggcgaaaacatccccgccgtgatcgccctgaccgaccccgagggctgcccactgagccggtttaaggatagcctgggaaacccaacccacatcctgagaatcggcgagagctataaggagaagcagcggaccatccaggccaagaaggaggtggagcagcggagagccggcggctacagccggaagtacgccagcaaagccaagaatctggcagacgatatggtgagaaacaccgctagagatctgctgtactacgccgtgacccaggatgccatgctgatcttcgccaacctgagccggggcttcggccggcagggcaagcggaccttcatggccgagagacagtacacacggatggaggactggctgaccgccaagctggcctacgagggcctgagcaagacctacctgtccaagacactggcccagtacacctccaagacatgcagcaactgtgggtttaccatcaccagcgccgactacgacagggtgctggagaagctgaagaagacagcaacaggctggatgaccacaattaacggcaaggagctgaaggtggagggccagattacctactacaacagatacaagagacagaacgtagtcaaggacctgtccgtcgagctggatagactgagcgaagaatctgtgaacaacgacatctcctcctggacaaagggcagaagcggagaagctctgagcctcctgaagaaaagattctcccatagacccgtgcaggagaagttcgtgtgcctgaactgcggcttcgagacacacgcagccgagcaagccgccctgaacatcgccagatcctggctgttcctgcggagccaggagtacaagaaataccagacaaacaagacaaccggcaacaccgataagagagccttcgtcgagacctggcagtccttttaccggaagaagcttaaggaggtgtggaaacctgccgtgcggtctggcggatctggcggaggctccaccagccccaagaaaaagagaaaagtctaagctgccttctgcggggcttgccttctggccatgcccttcttctctcccttgcacctgtacctcttggtctttgaataaagcctgagtaggaaggctagcaaaaaaaaaaaaaaaaaaaaaaaaaaaaaaaaaaaaaaaaaaaaaaaaaaaaaaaaaaaaaaaaaaaaaaaaaaaaaaaagcccagccggctccccaacctctaccgaggagggcacctctgagtccgccacccccgagagcggccctggcacctccaccgagcccagcgagggcagcgcacccggcagccctgccggcagccccacctccacagaggagggaaccagcaccgagcccagcgaaggcagcgccccaggcaccagcaccgagcctagtgagcaggagattaaacggatcaacaagatcagaagaagacttgtgaaagacagcaacaccaagaaggccggcaagacaggccccatgaaaaccctgctggttagagtgatgacacccgatctgagagagcggctggaaaacctgagaaagaagcctgaaaatatcccccagcccatcagcaatacatctagagccaacctgaataagctgctgaccgattacaccgaaatgaagaaggcgatcctgcatgtgtactgggaagagttccagaaggaccctgtgggcctgatgagccgggtggcccagcctgccagcaagaagatcgatcagaacaagctgaaacctgagatggacgagaagggcaacctgaccaccgccggctttgcctgctctcagtgtggccagcccctgttcgtgtacaagctggagcaggtgtctgagaagggcaaggcttacaccaactacttcggacggtgcaatgtggccgagcacgaaaagctgatcctgctggcccagctgaagcccgagaaggatagcgacgaagccgtgacatatagcctgggaaagtttgggcagagggccctggatttctacagcattcatgtgaccaaggagtccacccaccccgtgaagcccctggcccagatcgccggaaacagatacgcctccggacctgtgggaaaggccctgagcgacgcatgtatgggcacaatcgcctccttcctgtctaagtaccaggacatcatcatcgaacaccagaaggtggtgaagggcaaccagaagagactggagagcctgcgggagctggccggcaaggaaaacctggaataccctagcgtgaccctgccacctcagcctcacaccaaggagggcgttgatgcctacaacgaagtgatcgcccgggtgcgaatgtgggtgaacctgaacctgtggcagaagctgaagctaagcagagatgatgccaagcctctgctgagactgaagggattcccttcctttcctctggtcgagagacaggccaacgaagtggactggtgggacatggtgtgtaacgtgaagaagctgatcaacgagaaaaaggaggatggcaaggtgttttggcagaatctggctggctacaagagacaggaagccctgagaccatacctgagcagcgaggaagatcggaagaagggaaagaaattcgctcggtaccagctgggcgacctgctgctgcacctggaaaagaagcacggcgaggactggggaaaggtgtacgacgaggcctgggagcggattgacaagaaagtggaaggcctgagcaagcacatcaagctggaagaggaacggagaagcgaggacgcccagagcaaggccgccctgaccgactggctgcgggctaaggccagcttcgtgatcgagggcctgaaggaggccgacaaggacgagttctgcagatgcgagctgaagctgcagaagtggtacggggacctgcggggaaagcccttcgccatcgaagccgagaacagcatcctggacatcagcggcttcagcaagcagtacaactgtgccttcatctggcagaaggacggcgtgaagaagctgaacctgtacctgatcatcaactacttcaagggcggcaagctgcggttcaagaagatcaaacctgaagccttcgaagccaacagattctacaccgtgatcaacaaaaagagcggcgagatcgtgcccatggaggtgaacttcaacttcgacgaccccaacctgatcatcctgcctctggcctttggcaagagacagggcagagaattcatctggaacgacctgctgtccctggaaaccggcagcctgaagctggccaacggaagagtgatcgagaagacactgtacaacagaagaacccggcaggatgagcctgccctgttcgtggccctgaccttcgagcggcgggaggtcctggactcctccaatatcaaaccaatgaacctgatcggcgtggcaagaggcgaaaacatccccgccgtgatcgccctgaccgaccccgagggctgcccactgagccggtttaaggatagcctgggaaacccaacccacatcctgagaatcggcgagagctataaggagaagcagcggaccatccaggccaagaaggaggtggagcagcggagagccggcggctacagccggaagtacgccagcaaagccaagaatctggcagacgatatggtgagaaacaccgctagagatctgctgtactacgccgtgacccaggatgccatgctgatcttcgccaacctgagccggggcttcggccggcagggcaagcggaccttcatggccgagagacagtacacacggatggaggactggctgaccgccaagctggcctacgagggcctgagcaagacctacctgtccaagacactggcccagtacacctccaagacatgcagcaactgtgggtttaccatcaccagcgccgactacgacagggtgctggagaagctgaagaagacagcaacaggctggatgaccacaattaacggcaaggagctgaaggtggagggccagattacctactacaacagatacaagagacagaacgtagtcaaggacctgtccgtcgagctggatagactgagcgaagaatctgtgaacaacgacatctcctcctggacaaagggcagaagcggagaagctctgagcctcctgaagaaaagattctcccatagacccgtgcaggagaagttcgtgtgcctgaactgcggcttcgagacacacgcagccgagcaagccgccctgaacatcgccagatcctggctgttcctgcggagccaggagtacaagaaataccagacaaacaagacaaccggcaacaccgataagagagccttcgtcgagacctggcagtccttttaccggaagaagcttaaggaggtgtggaaacctgccgtgcggtctggcggatctggcggaggctccaccagccccaagaaaaagagaaaagtctaagctgccttctgcggggcttgccttctggccatgcccttcttctctcccttgcacctgtacctcttggtctttgaataaagcctgagtaggaaggctagcaaaaaaaaaaaaaaaaaaaaaaaaaaaaaaaaaaaaaaaaaaaaaaaaaaaaaaaaaaaaaaaaaaaaaaaaaaaaaaaa

SEQ ID NO: 10098 - RNA, 8787 nt, synthetic construct
  source 1..8787: mol_type = other RNA
aggaaataagagagaaaagaagagtaagaagaaatataagagccaccatggcccctaagaagaagcgtaaagtgagccggatgaaccacgaccaggagttcgacccccctaaggtgtaccctcccgtccccgccgagaagagaaagcccatccgggtcctgagcctgttcgatggcatcgccaccggtctgctggtgctgaaggacctgggcatccaggtggataggtacattgcctccgaggtgtgcgaggactccatcaccgtgggaatggtgcgtcatcagggcaagatcatgtacgtgggcgacgtgcggagcgtgacacagaagcatatccaggagtggggccctttcgacctggtgatcggcggcagcccttgcaatgacctgagcatcgtgaacccagcccggaagggcctgtacgagggaaccggcagactgttcttcgagttttacagactgctgcacgacgcccggcctaaggaaggcgacgaccggcccttcttttggctgttcgagaatgtggtggccatgggagtcagcgacaagcgggatattagccggttcctggagagcaaccccgtgatgatcgatgccaaggaagtgagcgccgcccaccgggccagatacttctggggcaatctgcctggcatgaacagacccctggccagcaccgtgaacgacaagctggagctgcaggagtgcctggagcacggccggatcgccaagttcagcaaggtgagaaccatcaccacccgaagcaacagcatcaaacaaggcaaggaccagcactttcctgtgttcatgaacgagaaggaggacatcctgtggtgtaccgagatggagagagtgttcgggttcccagtccactacacagatgtcagcaacatgtctagactggccagacagagactgctgggaagaagctggtccgtccctgtgatcagacacctgttcgcccctctgaaggagtacttcgcctgcgtgagcagcggcaacagcaacgccaacagccggggccccagcttctctagcggcctggtgccactgtccctgagagggagccacatgggccccatggagatctacaaaaccgtgagcgcctggaagcggcagcctgtgcgcgtgctgagcctgtttcggaatatcgataaagtcctgaaaagcctgggattcctggagagcggctctggctccggcggtggcaccctgaagtacgtggaggatgtgacaaacgtggtcagacgggatgtggagaagtggggccccttcgatctggtgtacggcagcacccaacccctgggcagctcttgtgaccggtgccctggctggtacatgtttcagttccaccggatcctgcagtacgccctgccgagacaggagtcccagcggccattcttttggattttcatggacaacttgctgctgaccgaggatgaccaggaaactaccactcggttcctgcagaccgaagccgtgaccctgcaggacgtgagaggccgggactaccagaacgccatgcgggtgtggtccaacatccctggactgaaaagcaagcacgcacctctgacccctaaagaagaggagtacctgcaggcccaggtgcggagcagaagcaagctggacgcccctaaggtggatctgctggtgaagaattgcctcctgcccctgagagagtacttcaagtatttcagccagaatagtctgcccctgggaggcagcggcggcggcaagcagggcggcgtgaccttcgaggacgtggccgtgtacttcagccaggaggagtggagcctgctgaacgaggcccagaggaggctgtaccacgacgtgatgctggagaacttcgccctgatcagcagcctgggctgctgctgcagggccgaggccgtggagacccccttcgagcagagcatcagcgtgggcgtgagccaggccaagacccccaaggagcccaggagcagccagaagacccacggcggcccaagcagcggcgcccctcctcccagcggcggcaggcggcccaagcagcggcgcccctcctcccagcggcggcagcccagccggctccccaacctctaccgaggagggcacctctgagtccgccacccccgagagcggccctggcacctccaccgagcccagcgagggcagcgcacccggcagccctgccggcagccccacctccacagaggagggaaccagcaccgagcccagcgaaggcagcgccccaggcaccagcaccgagcctagtgagcaggagattaaacggatcaacaagatcagaagaagacttgtgaaagacagcaacaccaagaaggccggcaagacaggccccatgaaaaccctgctggttagagtgatgacacccgatctgagagagcggctggaaaacctgagaaagaagcctgaaaatatcccccagcccatcagcaatacatctagagccaacctgaataagctgctgaccgattacaccgaaatgaagaaggcgatcctgcatgtgtactgggaagagttccagaaggaccctgtgggcctgatgagccgggtggcccagcctgccagcaagaagatcgatcagaacaagctgaaacctgagatggacgagaagggcaacctgaccaccgccggctttgcctgctctcagtgtggccagcccctgttcgtgtacaagctggagcaggtgtctgagaagggcaaggcttacaccaactacttcggacggtgcaatgtggccgagcacgaaaagctgatcctgctggcccagctgaagcccgagaaggatagcgacgaagccgtgacatatagcctgggaaagtttgggcagagggccctggatttctacagcattcatgtgaccaaggagtccacccaccccgtgaagcccctggcccagatcgccggaaacagatacgcctccggacctgtgggaaaggccctgagcgacgcatgtatgggcacaatcgcctccttcctgtctaagtaccaggacatcatcatcgaacaccagaaggtggtgaagggcaaccagaagagactggagagcctgcgggagctggccggcaaggaaaacctggaataccctagcgtgaccctgccacctcagcctcacaccaaggagggcgttgatgcctacaacgaagtgatcgcccgggtgcgaatgtgggtgaacctgaacctgtggcagaagctgaagctaagcagagatgatgccaagcctctgctgagactgaagggattcccttcctttcctctggtcgagagacaggccaacgaagtggactggtgggacatggtgtgtaacgtgaagaagctgatcaacgagaaaaaggaggatggcaaggtgttttggcagaatctggctggctacaagagacaggaagccctgagaccatacctgagcagcgaggaagatcggaagaagggaaagaaattcgctcggtaccagctgggcgacctgctgctgcacctggaaaagaagcacggcgaggactggggaaaggtgtacgacgaggcctgggagcggattgacaagaaagtggaaggcctgagcaagcacatcaagctggaagaggaacggagaagcgaggacgcccagagcaaggccgccctgaccgactggctgcgggctaaggccagcttcgtgatcgagggcctgaaggaggccgacaaggacgagttctgcagatgcgagctgaagctgcagaagtggtacggggacctgcggggaaagcccttcgccatcgaagccgagaacagcatcctggacatcagcggcttcagcaagcagtacaactgtgccttcatctggcagaaggacggcgtgaagaagctgaacctgtacctgatcatcaactacttcaagggcggcaagctgcggttcaagaagatcaaacctgaagccttcgaagccaacagattctacaccgtgatcaacaaaaagagcggcgagatcgtgcccatggaggtgaacttcaacttcgacgaccccaacctgatcatcctgcctctggcctttggcaagagacagggcagagaattcatctggaacgacctgctgtccctggaaaccggcagcctgaagctggccaacggaagagtgatcgagaagacactgtacaacagaagaacccggcaggatgagcctgccctgttcgtggccctgaccttcgagcggcgggaggtcctggactcctccaatatcaaaccaatgaacctgatcggcgtggcaagaggcgaaaacatccccgccgtgatcgccctgaccgaccccgagggctgcccactgagccggtttaaggatagcctgggaaacccaacccacatcctgagaatcggcgagagctataaggagaagcagcggaccatccaggccaagaaggaggtggagcagcggagagccggcggctacagccggaagtacgccagcaaagccaagaatctggcagacgatatggtgagaaacaccgctagagatctgctgtactacgccgtgacccaggatgccatgctgatcttcgccaacctgagccggggcttcggccggcagggcaagcggaccttcatggccgagagacagtacacacggatggaggactggctgaccgccaagctggcctacgagggcctgagcaagacctacctgtccaagacactggcccagtacacctccaagacatgcagcaactgtgggtttaccatcaccagcgccgactacgacagggtgctggagaagctgaagaagacagcaacaggctggatgaccacaattaacggcaaggagctgaaggtggagggccagattacctactacaacagatacaagagacagaacgtagtcaaggacctgtccgtcgagctggatagactgagcgaagaatctgtgaacaacgacatctcctcctggacaaagggcagaagcggagaagctctgagcctcctgaagaaaagattctcccatagacccgtgcaggagaagttcgtgtgcctgaactgcggcttcgagacacacgcagccgagcaagccgccctgaacatcgccagatcctggctgttcctgcggagccaggagtacaagaaataccagacaaacaagacaaccggcaacaccgataagagagccttcgtcgagacctggcagtccttttaccggaagaagcttaaggaggtgtggaaacctgccgtgcggtctggcggatctggcggaggctccaccagccccaagaaaaagagaaaagtctaagctgccttctgcggggcttgccttctggccatgcccttcttctctcccttgcacctgtacctcttggtctttgaataaagcctgagtaggaaggctagcaaaaaaaaaaaaaaaaaaaaaaaaaaaaaaaaaaaaaaaaaaaaaaaaaaaaaaaaaaaaaaaaaaaaaaaaaaaaaaaagcccagccggctccccaacctctaccgaggagggcacctctgagtccgccacccccgagagcggccctggcacctccaccgagcccagcgagggcagcgcacccggcagccctgccggcagccccacctccacagaggagggaaccagcaccgagcccagcgaaggcagcgccccaggcaccagcaccgagcctagtgagcaggagattaaacggatcaacaagatcagaagaagacttgtgaaagacagcaacaccaagaaggccggcaagacaggccccatgaaaaccctgctggttagagtgatgacacccgatctgagagagcggctggaaaacctgagaaagaagcctgaaaatatcccccagcccatcagcaatacatctagagccaacctgaataagctgctgaccgattacaccgaaatgaagaaggcgatcctgcatgtgtactgggaagagttccagaaggaccctgtgggcctgatgagccgggtggcccagcctgccagcaagaagatcgatcagaacaagctgaaacctgagatggacgagaagggcaacctgaccaccgccggctttgcctgctctcagtgtggccagcccctgttcgtgtacaagctggagcaggtgtctgagaagggcaaggcttacaccaactacttcggacggtgcaatgtggccgagcacgaaaagctgatcctgctggcccagctgaagcccgagaaggatagcgacgaagccgtgacatatagcctgggaaagtttgggcagagggccctggatttctacagcattcatgtgaccaaggagtccacccaccccgtgaagcccctggcccagatcgccggaaacagatacgcctccggacctgtgggaaaggccctgagcgacgcatgtatgggcacaatcgcctccttcctgtctaagtaccaggacatcatcatcgaacaccagaaggtggtgaagggcaaccagaagagactggagagcctgcgggagctggccggcaaggaaaacctggaataccctagcgtgaccctgccacctcagcctcacaccaaggagggcgttgatgcctacaacgaagtgatcgcccgggtgcgaatgtgggtgaacctgaacctgtggcagaagctgaagctaagcagagatgatgccaagcctctgctgagactgaagggattcccttcctttcctctggtcgagagacaggccaacgaagtggactggtgggacatggtgtgtaacgtgaagaagctgatcaacgagaaaaaggaggatggcaaggtgttttggcagaatctggctggctacaagagacaggaagccctgagaccatacctgagcagcgaggaagatcggaagaagggaaagaaattcgctcggtaccagctgggcgacctgctgctgcacctggaaaagaagcacggcgaggactggggaaaggtgtacgacgaggcctgggagcggattgacaagaaagtggaaggcctgagcaagcacatcaagctggaagaggaacggagaagcgaggacgcccagagcaaggccgccctgaccgactggctgcgggctaaggccagcttcgtgatcgagggcctgaaggaggccgacaaggacgagttctgcagatgcgagctgaagctgcagaagtggtacggggacctgcggggaaagcccttcgccatcgaagccgagaacagcatcctggacatcagcggcttcagcaagcagtacaactgtgccttcatctggcagaaggacggcgtgaagaagctgaacctgtacctgatcatcaactacttcaagggcggcaagctgcggttcaagaagatcaaacctgaagccttcgaagccaacagattctacaccgtgatcaacaaaaagagcggcgagatcgtgcccatggaggtgaacttcaacttcgacgaccccaacctgatcatcctgcctctggcctttggcaagagacagggcagagaattcatctggaacgacctgctgtccctggaaaccggcagcctgaagctggccaacggaagagtgatcgagaagacactgtacaacagaagaacccggcaggatgagcctgccctgttcgtggccctgaccttcgagcggcgggaggtcctggactcctccaatatcaaaccaatgaacctgatcggcgtggcaagaggcgaaaacatccccgccgtgatcgccctgaccgaccccgagggctgcccactgagccggtttaaggatagcctgggaaacccaacccacatcctgagaatcggcgagagctataaggagaagcagcggaccatccaggccaagaaggaggtggagcagcggagagccggcggctacagccggaagtacgccagcaaagccaagaatctggcagacgatatggtgagaaacaccgctagagatctgctgtactacgccgtgacccaggatgccatgctgatcttcgccaacctgagccggggcttcggccggcagggcaagcggaccttcatggccgagagacagtacacacggatggaggactggctgaccgccaagctggcctacgagggcctgagcaagacctacctgtccaagacactggcccagtacacctccaagacatgcagcaactgtgggtttaccatcaccagcgccgactacgacagggtgctggagaagctgaagaagacagcaacaggctggatgaccacaattaacggcaaggagctgaaggtggagggccagattacctactacaacagatacaagagacagaacgtagtcaaggacctgtccgtcgagctggatagactgagcgaagaatctgtgaacaacgacatctcctcctggacaaagggcagaagcggagaagctctgagcctcctgaagaaaagattctcccatagacccgtgcaggagaagttcgtgtgcctgaactgcggcttcgagacacacgcagccgagcaagccgccctgaacatcgccagatcctggctgttcctgcggagccaggagtacaagaaataccagacaaacaagacaaccggcaacaccgataagagagccttcgtcgagacctggcagtccttttaccggaagaagcttaaggaggtgtggaaacctgccgtgcggtctggcggatctggcggaggctccaccagccccaagaaaaagagaaaagtctaagctgccttctgcggggcttgccttctggccatgcccttcttctctcccttgcacctgtacctcttggtctttgaataaagcctgagtaggaaggctagcaaaaaaaaaaaaaaaaaaaaaaaaaaaaaaaaaaaaaaaaaaaaaaaaaaaaaaaaaaaaaaaaaaaaaaaaaaaaaaaa

SEQ ID NO: 10099 - RNA, 8787 nt, synthetic construct
  source 1..8787: mol_type = other RNA
aggaaataagagagaaaagaagagtaagaagaaatataagagccaccatggcccctaagaagaagcgtaaagtgagccggatgaaccacgaccaggagttcgacccccctaaggtgtaccctcccgtccccgccgagaagagaaagcccatccgggtcctgagcctgttcgatggcatcgccaccggtctgctggtgctgaaggacctgggcatccaggtggataggtacattgcctccgaggtgtgcgaggactccatcaccgtgggaatggtgcgtcatcagggcaagatcatgtacgtgggcgacgtgcggagcgtgacacagaagcatatccaggagtggggccctttcgacctggtgatcggcggcagcccttgcaatgacctgagcatcgtgaacccagcccggaagggcctgtacgagggaaccggcagactgttcttcgagttttacagactgctgcacgacgcccggcctaaggaaggcgacgaccggcccttcttttggctgttcgagaatgtggtggccatgggagtcagcgacaagcgggatattagccggttcctggagagcaaccccgtgatgatcgatgccaaggaagtgagcgccgcccaccgggccagatacttctggggcaatctgcctggcatgaacagacccctggccagcaccgtgaacgacaagctggagctgcaggagtgcctggagcacggccggatcgccaagttcagcaaggtgagaaccatcaccacccgaagcaacagcatcaaacaaggcaaggaccagcactttcctgtgttcatgaacgagaaggaggacatcctgtggtgtaccgagatggagagagtgttcgggttcccagtccactacacagatgtcagcaacatgtctagactggccagacagagactgctgggaagaagctggtccgtccctgtgatcagacacctgttcgcccctctgaaggagtacttcgcctgcgtgagcagcggcaacagcaacgccaacagccggggccccagcttctctagcggcctggtgccactgtccctgagagggagccacatgggccccatggagatctacaaaaccgtgagcgcctggaagcggcagcctgtgcgcgtgctgagcctgtttcggaatatcgataaagtcctgaaaagcctgggattcctggagagcggctctggctccggcggtggcaccctgaagtacgtggaggatgtgacaaacgtggtcagacgggatgtggagaagtggggccccttcgatctggtgtacggcagcacccaacccctgggcagctcttgtgaccggtgccctggctggtacatgtttcagttccaccggatcctgcagtacgccctgccgagacaggagtcccagcggccattcttttggattttcatggacaacttgctgctgaccgaggatgaccaggaaactaccactcggttcctgcagaccgaagccgtgaccctgcaggacgtgagaggccgggactaccagaacgccatgcgggtgtggtccaacatccctggactgaaaagcaagcacgcacctctgacccctaaagaagaggagtacctgcaggcccaggtgcggagcagaagcaagctggacgcccctaaggtggatctgctggtgaagaattgcctcctgcccctgagagagtacttcaagtatttcagccagaatagtctgcccctgggaggcagcggcggcggctgcagccacaggagctgcagggaggaccccggcaccagcgagagcagggagatggaccccgtggccttcaaggacgtggccgtgaacttcacccaggaggagtgggccctgctggacatcagccagaggaagctgtacagggaggtgatgctggagaccttcaggaacctgaccagcatcggcaagaagtggaaggaccagaacatcgagttcgagtaccagaaccccaggaggaacttcaggggcggcccaagcagcggcgcccctcctcccagcggcggcaggcggcccaagcagcggcgcccctcctcccagcggcggcagcccagccggctccccaacctctaccgaggagggcacctctgagtccgccacccccgagagcggccctggcacctccaccgagcccagcgagggcagcgcacccggcagccctgccggcagccccacctccacagaggagggaaccagcaccgagcccagcgaaggcagcgccccaggcaccagcaccgagcctagtgagcaggagattaaacggatcaacaagatcagaagaagacttgtgaaagacagcaacaccaagaaggccggcaagacaggccccatgaaaaccctgctggttagagtgatgacacccgatctgagagagcggctggaaaacctgagaaagaagcctgaaaatatcccccagcccatcagcaatacatctagagccaacctgaataagctgctgaccgattacaccgaaatgaagaaggcgatcctgcatgtgtactgggaagagttccagaaggaccctgtgggcctgatgagccgggtggcccagcctgccagcaagaagatcgatcagaacaagctgaaacctgagatggacgagaagggcaacctgaccaccgccggctttgcctgctctcagtgtggccagcccctgttcgtgtacaagctggagcaggtgtctgagaagggcaaggcttacaccaactacttcggacggtgcaatgtggccgagcacgaaaagctgatcctgctggcccagctgaagcccgagaaggatagcgacgaagccgtgacatatagcctgggaaagtttgggcagagggccctggatttctacagcattcatgtgaccaaggagtccacccaccccgtgaagcccctggcccagatcgccggaaacagatacgcctccggacctgtgggaaaggccctgagcgacgcatgtatgggcacaatcgcctccttcctgtctaagtaccaggacatcatcatcgaacaccagaaggtggtgaagggcaaccagaagagactggagagcctgcgggagctggccggcaaggaaaacctggaataccctagcgtgaccctgccacctcagcctcacaccaaggagggcgttgatgcctacaacgaagtgatcgcccgggtgcgaatgtgggtgaacctgaacctgtggcagaagctgaagctaagcagagatgatgccaagcctctgctgagactgaagggattcccttcctttcctctggtcgagagacaggccaacgaagtggactggtgggacatggtgtgtaacgtgaagaagctgatcaacgagaaaaaggaggatggcaaggtgttttggcagaatctggctggctacaagagacaggaagccctgagaccatacctgagcagcgaggaagatcggaagaagggaaagaaattcgctcggtaccagctgggcgacctgctgctgcacctggaaaagaagcacggcgaggactggggaaaggtgtacgacgaggcctgggagcggattgacaagaaagtggaaggcctgagcaagcacatcaagctggaagaggaacggagaagcgaggacgcccagagcaaggccgccctgaccgactggctgcgggctaaggccagcttcgtgatcgagggcctgaaggaggccgacaaggacgagttctgcagatgcgagctgaagctgcagaagtggtacggggacctgcggggaaagcccttcgccatcgaagccgagaacagcatcctggacatcagcggcttcagcaagcagtacaactgtgccttcatctggcagaaggacggcgtgaagaagctgaacctgtacctgatcatcaactacttcaagggcggcaagctgcggttcaagaagatcaaacctgaagccttcgaagccaacagattctacaccgtgatcaacaaaaagagcggcgagatcgtgcccatggaggtgaacttcaacttcgacgaccccaacctgatcatcctgcctctggcctttggcaagagacagggcagagaattcatctggaacgacctgctgtccctggaaaccggcagcctgaagctggccaacggaagagtgatcgagaagacactgtacaacagaagaacccggcaggatgagcctgccctgttcgtggccctgaccttcgagcggcgggaggtcctggactcctccaatatcaaaccaatgaacctgatcggcgtggcaagaggcgaaaacatccccgccgtgatcgccctgaccgaccccgagggctgcccactgagccggtttaaggatagcctgggaaacccaacccacatcctgagaatcggcgagagctataaggagaagcagcggaccatccaggccaagaaggaggtggagcagcggagagccggcggctacagccggaagtacgccagcaaagccaagaatctggcagacgatatggtgagaaacaccgctagagatctgctgtactacgccgtgacccaggatgccatgctgatcttcgccaacctgagccggggcttcggccggcagggcaagcggaccttcatggccgagagacagtacacacggatggaggactggctgaccgccaagctggcctacgagggcctgagcaagacctacctgtccaagacactggcccagtacacctccaagacatgcagcaactgtgggtttaccatcaccagcgccgactacgacagggtgctggagaagctgaagaagacagcaacaggctggatgaccacaattaacggcaaggagctgaaggtggagggccagattacctactacaacagatacaagagacagaacgtagtcaaggacctgtccgtcgagctggatagactgagcgaagaatctgtgaacaacgacatctcctcctggacaaagggcagaagcggagaagctctgagcctcctgaagaaaagattctcccatagacccgtgcaggagaagttcgtgtgcctgaactgcggcttcgagacacacgcagccgagcaagccgccctgaacatcgccagatcctggctgttcctgcggagccaggagtacaagaaataccagacaaacaagacaaccggcaacaccgataagagagccttcgtcgagacctggcagtccttttaccggaagaagcttaaggaggtgtggaaacctgccgtgcggtctggcggatctggcggaggctccaccagccccaagaaaaagagaaaagtctaagctgccttctgcggggcttgccttctggccatgcccttcttctctcccttgcacctgtacctcttggtctttgaataaagcctgagtaggaaggctagcaaaaaaaaaaaaaaaaaaaaaaaaaaaaaaaaaaaaaaaaaaaaaaaaaaaaaaaaaaaaaaaaaaaaaaaaaaaaaaaagcccagccggctccccaacctctaccgaggagggcacctctgagtccgccacccccgagagcggccctggcacctccaccgagcccagcgagggcagcgcacccggcagccctgccggcagccccacctccacagaggagggaaccagcaccgagcccagcgaaggcagcgccccaggcaccagcaccgagcctagtgagcaggagattaaacggatcaacaagatcagaagaagacttgtgaaagacagcaacaccaagaaggccggcaagacaggccccatgaaaaccctgctggttagagtgatgacacccgatctgagagagcggctggaaaacctgagaaagaagcctgaaaatatcccccagcccatcagcaatacatctagagccaacctgaataagctgctgaccgattacaccgaaatgaagaaggcgatcctgcatgtgtactgggaagagttccagaaggaccctgtgggcctgatgagccgggtggcccagcctgccagcaagaagatcgatcagaacaagctgaaacctgagatggacgagaagggcaacctgaccaccgccggctttgcctgctctcagtgtggccagcccctgttcgtgtacaagctggagcaggtgtctgagaagggcaaggcttacaccaactacttcggacggtgcaatgtggccgagcacgaaaagctgatcctgctggcccagctgaagcccgagaaggatagcgacgaagccgtgacatatagcctgggaaagtttgggcagagggccctggatttctacagcattcatgtgaccaaggagtccacccaccccgtgaagcccctggcccagatcgccggaaacagatacgcctccggacctgtgggaaaggccctgagcgacgcatgtatgggcacaatcgcctccttcctgtctaagtaccaggacatcatcatcgaacaccagaaggtggtgaagggcaaccagaagagactggagagcctgcgggagctggccggcaaggaaaacctggaataccctagcgtgaccctgccacctcagcctcacaccaaggagggcgttgatgcctacaacgaagtgatcgcccgggtgcgaatgtgggtgaacctgaacctgtggcagaagctgaagctaagcagagatgatgccaagcctctgctgagactgaagggattcccttcctttcctctggtcgagagacaggccaacgaagtggactggtgggacatggtgtgtaacgtgaagaagctgatcaacgagaaaaaggaggatggcaaggtgttttggcagaatctggctggctacaagagacaggaagccctgagaccatacctgagcagcgaggaagatcggaagaagggaaagaaattcgctcggtaccagctgggcgacctgctgctgcacctggaaaagaagcacggcgaggactggggaaaggtgtacgacgaggcctgggagcggattgacaagaaagtggaaggcctgagcaagcacatcaagctggaagaggaacggagaagcgaggacgcccagagcaaggccgccctgaccgactggctgcgggctaaggccagcttcgtgatcgagggcctgaaggaggccgacaaggacgagttctgcagatgcgagctgaagctgcagaagtggtacggggacctgcggggaaagcccttcgccatcgaagccgagaacagcatcctggacatcagcggcttcagcaagcagtacaactgtgccttcatctggcagaaggacggcgtgaagaagctgaacctgtacctgatcatcaactacttcaagggcggcaagctgcggttcaagaagatcaaacctgaagccttcgaagccaacagattctacaccgtgatcaacaaaaagagcggcgagatcgtgcccatggaggtgaacttcaacttcgacgaccccaacctgatcatcctgcctctggcctttggcaagagacagggcagagaattcatctggaacgacctgctgtccctggaaaccggcagcctgaagctggccaacggaagagtgatcgagaagacactgtacaacagaagaacccggcaggatgagcctgccctgttcgtggccctgaccttcgagcggcgggaggtcctggactcctccaatatcaaaccaatgaacctgatcggcgtggcaagaggcgaaaacatccccgccgtgatcgccctgaccgaccccgagggctgcccactgagccggtttaaggatagcctgggaaacccaacccacatcctgagaatcggcgagagctataaggagaagcagcggaccatccaggccaagaaggaggtggagcagcggagagccggcggctacagccggaagtacgccagcaaagccaagaatctggcagacgatatggtgagaaacaccgctagagatctgctgtactacgccgtgacccaggatgccatgctgatcttcgccaacctgagccggggcttcggccggcagggcaagcggaccttcatggccgagagacagtacacacggatggaggactggctgaccgccaagctggcctacgagggcctgagcaagacctacctgtccaagacactggcccagtacacctccaagacatgcagcaactgtgggtttaccatcaccagcgccgactacgacagggtgctggagaagctgaagaagacagcaacaggctggatgaccacaattaacggcaaggagctgaaggtggagggccagattacctactacaacagatacaagagacagaacgtagtcaaggacctgtccgtcgagctggatagactgagcgaagaatctgtgaacaacgacatctcctcctggacaaagggcagaagcggagaagctctgagcctcctgaagaaaagattctcccatagacccgtgcaggagaagttcgtgtgcctgaactgcggcttcgagacacacgcagccgagcaagccgccctgaacatcgccagatcctggctgttcctgcggagccaggagtacaagaaataccagacaaacaagacaaccggcaacaccgataagagagccttcgtcgagacctggcagtccttttaccggaagaagcttaaggaggtgtggaaacctgccgtgcggtctggcggatctggcggaggctccaccagccccaagaaaaagagaaaagtctaagctgccttctgcggggcttgccttctggccatgcccttcttctctcccttgcacctgtacctcttggtctttgaataaagcctgagtaggaaggctagcaaaaaaaaaaaaaaaaaaaaaaaaaaaaaaaaaaaaaaaaaaaaaaaaaaaaaaaaaaaaaaaaaaaaaaaaaaaaaaaa

SEQ ID NO: 10100 - RNA, 8787 nt, synthetic construct
  source 1..8787: mol_type = other RNA
aggaaataagagagaaaagaagagtaagaagaaatataagagccaccatggcccctaagaagaagcgtaaagtgagccggatgaaccacgaccaggagttcgacccccctaaggtgtaccctcccgtccccgccgagaagagaaagcccatccgggtcctgagcctgttcgatggcatcgccaccggtctgctggtgctgaaggacctgggcatccaggtggataggtacattgcctccgaggtgtgcgaggactccatcaccgtgggaatggtgcgtcatcagggcaagatcatgtacgtgggcgacgtgcggagcgtgacacagaagcatatccaggagtggggccctttcgacctggtgatcggcggcagcccttgcaatgacctgagcatcgtgaacccagcccggaagggcctgtacgagggaaccggcagactgttcttcgagttttacagactgctgcacgacgcccggcctaaggaaggcgacgaccggcccttcttttggctgttcgagaatgtggtggccatgggagtcagcgacaagcgggatattagccggttcctggagagcaaccccgtgatgatcgatgccaaggaagtgagcgccgcccaccgggccagatacttctggggcaatctgcctggcatgaacagacccctggccagcaccgtgaacgacaagctggagctgcaggagtgcctggagcacggccggatcgccaagttcagcaaggtgagaaccatcaccacccgaagcaacagcatcaaacaaggcaaggaccagcactttcctgtgttcatgaacgagaaggaggacatcctgtggtgtaccgagatggagagagtgttcgggttcccagtccactacacagatgtcagcaacatgtctagactggccagacagagactgctgggaagaagctggtccgtccctgtgatcagacacctgttcgcccctctgaaggagtacttcgcctgcgtgagcagcggcaacagcaacgccaacagccggggccccagcttctctagcggcctggtgccactgtccctgagagggagccacatgggccccatggagatctacaaaaccgtgagcgcctggaagcggcagcctgtgcgcgtgctgagcctgtttcggaatatcgataaagtcctgaaaagcctgggattcctggagagcggctctggctccggcggtggcaccctgaagtacgtggaggatgtgacaaacgtggtcagacgggatgtggagaagtggggccccttcgatctggtgtacggcagcacccaacccctgggcagctcttgtgaccggtgccctggctggtacatgtttcagttccaccggatcctgcagtacgccctgccgagacaggagtcccagcggccattcttttggattttcatggacaacttgctgctgaccgaggatgaccaggaaactaccactcggttcctgcagaccgaagccgtgaccctgcaggacgtgagaggccgggactaccagaacgccatgcgggtgtggtccaacatccctggactgaaaagcaagcacgcacctctgacccctaaagaagaggagtacctgcaggcccaggtgcggagcagaagcaagctggacgcccctaaggtggatctgctggtgaagaattgcctcctgcccctgagagagtacttcaagtatttcagccagaatagtctgcccctgggaggcagcggcggcggcagccagggcagcatcaccttcaaggacgtggccgtggacttcacccaggaggagtggtgcctgctggaccccagccagaaggagctgtacagggaggtgatgctggagaacgtgcagaacctgctgttcgtggagaccaacttcgaggtgaaggagatcagcaccaagcagagcctgttcgtggagggcagcggcccccccaggggcaagaacaagggcccctgcgacttcctgctgagggagggcggcccaagcagcggcgcccctcctcccagcggcggcaggcggcccaagcagcggcgcccctcctcccagcggcggcagcccagccggctccccaacctctaccgaggagggcacctctgagtccgccacccccgagagcggccctggcacctccaccgagcccagcgagggcagcgcacccggcagccctgccggcagccccacctccacagaggagggaaccagcaccgagcccagcgaaggcagcgccccaggcaccagcaccgagcctagtgagcaggagattaaacggatcaacaagatcagaagaagacttgtgaaagacagcaacaccaagaaggccggcaagacaggccccatgaaaaccctgctggttagagtgatgacacccgatctgagagagcggctggaaaacctgagaaagaagcctgaaaatatcccccagcccatcagcaatacatctagagccaacctgaataagctgctgaccgattacaccgaaatgaagaaggcgatcctgcatgtgtactgggaagagttccagaaggaccctgtgggcctgatgagccgggtggcccagcctgccagcaagaagatcgatcagaacaagctgaaacctgagatggacgagaagggcaacctgaccaccgccggctttgcctgctctcagtgtggccagcccctgttcgtgtacaagctggagcaggtgtctgagaagggcaaggcttacaccaactacttcggacggtgcaatgtggccgagcacgaaaagctgatcctgctggcccagctgaagcccgagaaggatagcgacgaagccgtgacatatagcctgggaaagtttgggcagagggccctggatttctacagcattcatgtgaccaaggagtccacccaccccgtgaagcccctggcccagatcgccggaaacagatacgcctccggacctgtgggaaaggccctgagcgacgcatgtatgggcacaatcgcctccttcctgtctaagtaccaggacatcatcatcgaacaccagaaggtggtgaagggcaaccagaagagactggagagcctgcgggagctggccggcaaggaaaacctggaataccctagcgtgaccctgccacctcagcctcacaccaaggagggcgttgatgcctacaacgaagtgatcgcccgggtgcgaatgtgggtgaacctgaacctgtggcagaagctgaagctaagcagagatgatgccaagcctctgctgagactgaagggattcccttcctttcctctggtcgagagacaggccaacgaagtggactggtgggacatggtgtgtaacgtgaagaagctgatcaacgagaaaaaggaggatggcaaggtgttttggcagaatctggctggctacaagagacaggaagccctgagaccatacctgagcagcgaggaagatcggaagaagggaaagaaattcgctcggtaccagctgggcgacctgctgctgcacctggaaaagaagcacggcgaggactggggaaaggtgtacgacgaggcctgggagcggattgacaagaaagtggaaggcctgagcaagcacatcaagctggaagaggaacggagaagcgaggacgcccagagcaaggccgccctgaccgactggctgcgggctaaggccagcttcgtgatcgagggcctgaaggaggccgacaaggacgagttctgcagatgcgagctgaagctgcagaagtggtacggggacctgcggggaaagcccttcgccatcgaagccgagaacagcatcctggacatcagcggcttcagcaagcagtacaactgtgccttcatctggcagaaggacggcgtgaagaagctgaacctgtacctgatcatcaactacttcaagggcggcaagctgcggttcaagaagatcaaacctgaagccttcgaagccaacagattctacaccgtgatcaacaaaaagagcggcgagatcgtgcccatggaggtgaacttcaacttcgacgaccccaacctgatcatcctgcctctggcctttggcaagagacagggcagagaattcatctggaacgacctgctgtccctggaaaccggcagcctgaagctggccaacggaagagtgatcgagaagacactgtacaacagaagaacccggcaggatgagcctgccctgttcgtggccctgaccttcgagcggcgggaggtcctggactcctccaatatcaaaccaatgaacctgatcggcgtggcaagaggcgaaaacatccccgccgtgatcgccctgaccgaccccgagggctgcccactgagccggtttaaggatagcctgggaaacccaacccacatcctgagaatcggcgagagctataaggagaagcagcggaccatccaggccaagaaggaggtggagcagcggagagccggcggctacagccggaagtacgccagcaaagccaagaatctggcagacgatatggtgagaaacaccgctagagatctgctgtactacgccgtgacccaggatgccatgctgatcttcgccaacctgagccggggcttcggccggcagggcaagcggaccttcatggccgagagacagtacacacggatggaggactggctgaccgccaagctggcctacgagggcctgagcaagacctacctgtccaagacactggcccagtacacctccaagacatgcagcaactgtgggtttaccatcaccagcgccgactacgacagggtgctggagaagctgaagaagacagcaacaggctggatgaccacaattaacggcaaggagctgaaggtggagggccagattacctactacaacagatacaagagacagaacgtagtcaaggacctgtccgtcgagctggatagactgagcgaagaatctgtgaacaacgacatctcctcctggacaaagggcagaagcggagaagctctgagcctcctgaagaaaagattctcccatagacccgtgcaggagaagttcgtgtgcctgaactgcggcttcgagacacacgcagccgagcaagccgccctgaacatcgccagatcctggctgttcctgcggagccaggagtacaagaaataccagacaaacaagacaaccggcaacaccgataagagagccttcgtcgagacctggcagtccttttaccggaagaagcttaaggaggtgtggaaacctgccgtgcggtctggcggatctggcggaggctccaccagccccaagaaaaagagaaaagtctaagctgccttctgcggggcttgccttctggccatgcccttcttctctcccttgcacctgtacctcttggtctttgaataaagcctgagtaggaaggctagcaaaaaaaaaaaaaaaaaaaaaaaaaaaaaaaaaaaaaaaaaaaaaaaaaaaaaaaaaaaaaaaaaaaaaaaaaaaaaaaagcccagccggctccccaacctctaccgaggagggcacctctgagtccgccacccccgagagcggccctggcacctccaccgagcccagcgagggcagcgcacccggcagccctgccggcagccccacctccacagaggagggaaccagcaccgagcccagcgaaggcagcgccccaggcaccagcaccgagcctagtgagcaggagattaaacggatcaacaagatcagaagaagacttgtgaaagacagcaacaccaagaaggccggcaagacaggccccatgaaaaccctgctggttagagtgatgacacccgatctgagagagcggctggaaaacctgagaaagaagcctgaaaatatcccccagcccatcagcaatacatctagagccaacctgaataagctgctgaccgattacaccgaaatgaagaaggcgatcctgcatgtgtactgggaagagttccagaaggaccctgtgggcctgatgagccgggtggcccagcctgccagcaagaagatcgatcagaacaagctgaaacctgagatggacgagaagggcaacctgaccaccgccggctttgcctgctctcagtgtggccagcccctgttcgtgtacaagctggagcaggtgtctgagaagggcaaggcttacaccaactacttcggacggtgcaatgtggccgagcacgaaaagctgatcctgctggcccagctgaagcccgagaaggatagcgacgaagccgtgacatatagcctgggaaagtttgggcagagggccctggatttctacagcattcatgtgaccaaggagtccacccaccccgtgaagcccctggcccagatcgccggaaacagatacgcctccggacctgtgggaaaggccctgagcgacgcatgtatgggcacaatcgcctccttcctgtctaagtaccaggacatcatcatcgaacaccagaaggtggtgaagggcaaccagaagagactggagagcctgcgggagctggccggcaaggaaaacctggaataccctagcgtgaccctgccacctcagcctcacaccaaggagggcgttgatgcctacaacgaagtgatcgcccgggtgcgaatgtgggtgaacctgaacctgtggcagaagctgaagctaagcagagatgatgccaagcctctgctgagactgaagggattcccttcctttcctctggtcgagagacaggccaacgaagtggactggtgggacatggtgtgtaacgtgaagaagctgatcaacgagaaaaaggaggatggcaaggtgttttggcagaatctggctggctacaagagacaggaagccctgagaccatacctgagcagcgaggaagatcggaagaagggaaagaaattcgctcggtaccagctgggcgacctgctgctgcacctggaaaagaagcacggcgaggactggggaaaggtgtacgacgaggcctgggagcggattgacaagaaagtggaaggcctgagcaagcacatcaagctggaagaggaacggagaagcgaggacgcccagagcaaggccgccctgaccgactggctgcgggctaaggccagcttcgtgatcgagggcctgaaggaggccgacaaggacgagttctgcagatgcgagctgaagctgcagaagtggtacggggacctgcggggaaagcccttcgccatcgaagccgagaacagcatcctggacatcagcggcttcagcaagcagtacaactgtgccttcatctggcagaaggacggcgtgaagaagctgaacctgtacctgatcatcaactacttcaagggcggcaagctgcggttcaagaagatcaaacctgaagccttcgaagccaacagattctacaccgtgatcaacaaaaagagcggcgagatcgtgcccatggaggtgaacttcaacttcgacgaccccaacctgatcatcctgcctctggcctttggcaagagacagggcagagaattcatctggaacgacctgctgtccctggaaaccggcagcctgaagctggccaacggaagagtgatcgagaagacactgtacaacagaagaacccggcaggatgagcctgccctgttcgtggccctgaccttcgagcggcgggaggtcctggactcctccaatatcaaaccaatgaacctgatcggcgtggcaagaggcgaaaacatccccgccgtgatcgccctgaccgaccccgagggctgcccactgagccggtttaaggatagcctgggaaacccaacccacatcctgagaatcggcgagagctataaggagaagcagcggaccatccaggccaagaaggaggtggagcagcggagagccggcggctacagccggaagtacgccagcaaagccaagaatctggcagacgatatggtgagaaacaccgctagagatctgctgtactacgccgtgacccaggatgccatgctgatcttcgccaacctgagccggggcttcggccggcagggcaagcggaccttcatggccgagagacagtacacacggatggaggactggctgaccgccaagctggcctacgagggcctgagcaagacctacctgtccaagacactggcccagtacacctccaagacatgcagcaactgtgggtttaccatcaccagcgccgactacgacagggtgctggagaagctgaagaagacagcaacaggctggatgaccacaattaacggcaaggagctgaaggtggagggccagattacctactacaacagatacaagagacagaacgtagtcaaggacctgtccgtcgagctggatagactgagcgaagaatctgtgaacaacgacatctcctcctggacaaagggcagaagcggagaagctctgagcctcctgaagaaaagattctcccatagacccgtgcaggagaagttcgtgtgcctgaactgcggcttcgagacacacgcagccgagcaagccgccctgaacatcgccagatcctggctgttcctgcggagccaggagtacaagaaataccagacaaacaagacaaccggcaacaccgataagagagccttcgtcgagacctggcagtccttttaccggaagaagcttaaggaggtgtggaaacctgccgtgcggtctggcggatctggcggaggctccaccagccccaagaaaaagagaaaagtctaagctgccttctgcggggcttgccttctggccatgcccttcttctctcccttgcacctgtacctcttggtctttgaataaagcctgagtaggaaggctagcaaaaaaaaaaaaaaaaaaaaaaaaaaaaaaaaaaaaaaaaaaaaaaaaaaaaaaaaaaaaaaaaaaaaaaaaaaaaaaaa

SEQ ID NO: 10101 - RNA, 8787 nt, synthetic construct
  source 1..8787: mol_type = other RNA
aggaaataagagagaaaagaagagtaagaagaaatataagagccaccatggcccctaagaagaagcgtaaagtgagccggatgaaccacgaccaggagttcgacccccctaaggtgtaccctcccgtccccgccgagaagagaaagcccatccgggtcctgagcctgttcgatggcatcgccaccggtctgctggtgctgaaggacctgggcatccaggtggataggtacattgcctccgaggtgtgcgaggactccatcaccgtgggaatggtgcgtcatcagggcaagatcatgtacgtgggcgacgtgcggagcgtgacacagaagcatatccaggagtggggccctttcgacctggtgatcggcggcagcccttgcaatgacctgagcatcgtgaacccagcccggaagggcctgtacgagggaaccggcagactgttcttcgagttttacagactgctgcacgacgcccggcctaaggaaggcgacgaccggcccttcttttggctgttcgagaatgtggtggccatgggagtcagcgacaagcgggatattagccggttcctggagagcaaccccgtgatgatcgatgccaaggaagtgagcgccgcccaccgggccagatacttctggggcaatctgcctggcatgaacagacccctggccagcaccgtgaacgacaagctggagctgcaggagtgcctggagcacggccggatcgccaagttcagcaaggtgagaaccatcaccacccgaagcaacagcatcaaacaaggcaaggaccagcactttcctgtgttcatgaacgagaaggaggacatcctgtggtgtaccgagatggagagagtgttcgggttcccagtccactacacagatgtcagcaacatgtctagactggccagacagagactgctgggaagaagctggtccgtccctgtgatcagacacctgttcgcccctctgaaggagtacttcgcctgcgtgagcagcggcaacagcaacgccaacagccggggccccagcttctctagcggcctggtgccactgtccctgagagggagccacatgggccccatggagatctacaaaaccgtgagcgcctggaagcggcagcctgtgcgcgtgctgagcctgtttcggaatatcgataaagtcctgaaaagcctgggattcctggagagcggctctggctccggcggtggcaccctgaagtacgtggaggatgtgacaaacgtggtcagacgggatgtggagaagtggggccccttcgatctggtgtacggcagcacccaacccctgggcagctcttgtgaccggtgccctggctggtacatgtttcagttccaccggatcctgcagtacgccctgccgagacaggagtcccagcggccattcttttggattttcatggacaacttgctgctgaccgaggatgaccaggaaactaccactcggttcctgcagaccgaagccgtgaccctgcaggacgtgagaggccgggactaccagaacgccatgcgggtgtggtccaacatccctggactgaaaagcaagcacgcacctctgacccctaaagaagaggagtacctgcaggcccaggtgcggagcagaagcaagctggacgcccctaaggtggatctgctggtgaagaattgcctcctgcccctgagagagtacttcaagtatttcagccagaatagtctgcccctgggaggcagcggcggcggccccctggagagcgtgaccttcgaggacgtggccatcaacttcacccaggaggagtgggccctgctggacaccagccagaggaacctgttcaggaacgtgatgctggagaacatcagccacctggtgagcatcggctaccagatcagcaagagcgacgtgatcagccagctgaagcagggcaaggagctgaggaagagcaccgtgagcaagcagtgcggcaagagcctgagccagggcagcttcggcggcccaagcagcggcgcccctcctcccagcggcggcaggcggcccaagcagcggcgcccctcctcccagcggcggcagcccagccggctccccaacctctaccgaggagggcacctctgagtccgccacccccgagagcggccctggcacctccaccgagcccagcgagggcagcgcacccggcagccctgccggcagccccacctccacagaggagggaaccagcaccgagcccagcgaaggcagcgccccaggcaccagcaccgagcctagtgagcaggagattaaacggatcaacaagatcagaagaagacttgtgaaagacagcaacaccaagaaggccggcaagacaggccccatgaaaaccctgctggttagagtgatgacacccgatctgagagagcggctggaaaacctgagaaagaagcctgaaaatatcccccagcccatcagcaatacatctagagccaacctgaataagctgctgaccgattacaccgaaatgaagaaggcgatcctgcatgtgtactgggaagagttccagaaggaccctgtgggcctgatgagccgggtggcccagcctgccagcaagaagatcgatcagaacaagctgaaacctgagatggacgagaagggcaacctgaccaccgccggctttgcctgctctcagtgtggccagcccctgttcgtgtacaagctggagcaggtgtctgagaagggcaaggcttacaccaactacttcggacggtgcaatgtggccgagcacgaaaagctgatcctgctggcccagctgaagcccgagaaggatagcgacgaagccgtgacatatagcctgggaaagtttgggcagagggccctggatttctacagcattcatgtgaccaaggagtccacccaccccgtgaagcccctggcccagatcgccggaaacagatacgcctccggacctgtgggaaaggccctgagcgacgcatgtatgggcacaatcgcctccttcctgtctaagtaccaggacatcatcatcgaacaccagaaggtggtgaagggcaaccagaagagactggagagcctgcgggagctggccggcaaggaaaacctggaataccctagcgtgaccctgccacctcagcctcacaccaaggagggcgttgatgcctacaacgaagtgatcgcccgggtgcgaatgtgggtgaacctgaacctgtggcagaagctgaagctaagcagagatgatgccaagcctctgctgagactgaagggattcccttcctttcctctggtcgagagacaggccaacgaagtggactggtgggacatggtgtgtaacgtgaagaagctgatcaacgagaaaaaggaggatggcaaggtgttttggcagaatctggctggctacaagagacaggaagccctgagaccatacctgagcagcgaggaagatcggaagaagggaaagaaattcgctcggtaccagctgggcgacctgctgctgcacctggaaaagaagcacggcgaggactggggaaaggtgtacgacgaggcctgggagcggattgacaagaaagtggaaggcctgagcaagcacatcaagctggaagaggaacggagaagcgaggacgcccagagcaaggccgccctgaccgactggctgcgggctaaggccagcttcgtgatcgagggcctgaaggaggccgacaaggacgagttctgcagatgcgagctgaagctgcagaagtggtacggggacctgcggggaaagcccttcgccatcgaagccgagaacagcatcctggacatcagcggcttcagcaagcagtacaactgtgccttcatctggcagaaggacggcgtgaagaagctgaacctgtacctgatcatcaactacttcaagggcggcaagctgcggttcaagaagatcaaacctgaagccttcgaagccaacagattctacaccgtgatcaacaaaaagagcggcgagatcgtgcccatggaggtgaacttcaacttcgacgaccccaacctgatcatcctgcctctggcctttggcaagagacagggcagagaattcatctggaacgacctgctgtccctggaaaccggcagcctgaagctggccaacggaagagtgatcgagaagacactgtacaacagaagaacccggcaggatgagcctgccctgttcgtggccctgaccttcgagcggcgggaggtcctggactcctccaatatcaaaccaatgaacctgatcggcgtggcaagaggcgaaaacatccccgccgtgatcgccctgaccgaccccgagggctgcccactgagccggtttaaggatagcctgggaaacccaacccacatcctgagaatcggcgagagctataaggagaagcagcggaccatccaggccaagaaggaggtggagcagcggagagccggcggctacagccggaagtacgccagcaaagccaagaatctggcagacgatatggtgagaaacaccgctagagatctgctgtactacgccgtgacccaggatgccatgctgatcttcgccaacctgagccggggcttcggccggcagggcaagcggaccttcatggccgagagacagtacacacggatggaggactggctgaccgccaagctggcctacgagggcctgagcaagacctacctgtccaagacactggcccagtacacctccaagacatgcagcaactgtgggtttaccatcaccagcgccgactacgacagggtgctggagaagctgaagaagacagcaacaggctggatgaccacaattaacggcaaggagctgaaggtggagggccagattacctactacaacagatacaagagacagaacgtagtcaaggacctgtccgtcgagctggatagactgagcgaagaatctgtgaacaacgacatctcctcctggacaaagggcagaagcggagaagctctgagcctcctgaagaaaagattctcccatagacccgtgcaggagaagttcgtgtgcctgaactgcggcttcgagacacacgcagccgagcaagccgccctgaacatcgccagatcctggctgttcctgcggagccaggagtacaagaaataccagacaaacaagacaaccggcaacaccgataagagagccttcgtcgagacctggcagtccttttaccggaagaagcttaaggaggtgtggaaacctgccgtgcggtctggcggatctggcggaggctccaccagccccaagaaaaagagaaaagtctaagctgccttctgcggggcttgccttctggccatgcccttcttctctcccttgcacctgtacctcttggtctttgaataaagcctgagtaggaaggctagcaaaaaaaaaaaaaaaaaaaaaaaaaaaaaaaaaaaaaaaaaaaaaaaaaaaaaaaaaaaaaaaaaaaaaaaaaaaaaaaagcccagccggctccccaacctctaccgaggagggcacctctgagtccgccacccccgagagcggccctggcacctccaccgagcccagcgagggcagcgcacccggcagccctgccggcagccccacctccacagaggagggaaccagcaccgagcccagcgaaggcagcgccccaggcaccagcaccgagcctagtgagcaggagattaaacggatcaacaagatcagaagaagacttgtgaaagacagcaacaccaagaaggccggcaagacaggccccatgaaaaccctgctggttagagtgatgacacccgatctgagagagcggctggaaaacctgagaaagaagcctgaaaatatcccccagcccatcagcaatacatctagagccaacctgaataagctgctgaccgattacaccgaaatgaagaaggcgatcctgcatgtgtactgggaagagttccagaaggaccctgtgggcctgatgagccgggtggcccagcctgccagcaagaagatcgatcagaacaagctgaaacctgagatggacgagaagggcaacctgaccaccgccggctttgcctgctctcagtgtggccagcccctgttcgtgtacaagctggagcaggtgtctgagaagggcaaggcttacaccaactacttcggacggtgcaatgtggccgagcacgaaaagctgatcctgctggcccagctgaagcccgagaaggatagcgacgaagccgtgacatatagcctgggaaagtttgggcagagggccctggatttctacagcattcatgtgaccaaggagtccacccaccccgtgaagcccctggcccagatcgccggaaacagatacgcctccggacctgtgggaaaggccctgagcgacgcatgtatgggcacaatcgcctccttcctgtctaagtaccaggacatcatcatcgaacaccagaaggtggtgaagggcaaccagaagagactggagagcctgcgggagctggccggcaaggaaaacctggaataccctagcgtgaccctgccacctcagcctcacaccaaggagggcgttgatgcctacaacgaagtgatcgcccgggtgcgaatgtgggtgaacctgaacctgtggcagaagctgaagctaagcagagatgatgccaagcctctgctgagactgaagggattcccttcctttcctctggtcgagagacaggccaacgaagtggactggtgggacatggtgtgtaacgtgaagaagctgatcaacgagaaaaaggaggatggcaaggtgttttggcagaatctggctggctacaagagacaggaagccctgagaccatacctgagcagcgaggaagatcggaagaagggaaagaaattcgctcggtaccagctgggcgacctgctgctgcacctggaaaagaagcacggcgaggactggggaaaggtgtacgacgaggcctgggagcggattgacaagaaagtggaaggcctgagcaagcacatcaagctggaagaggaacggagaagcgaggacgcccagagcaaggccgccctgaccgactggctgcgggctaaggccagcttcgtgatcgagggcctgaaggaggccgacaaggacgagttctgcagatgcgagctgaagctgcagaagtggtacggggacctgcggggaaagcccttcgccatcgaagccgagaacagcatcctggacatcagcggcttcagcaagcagtacaactgtgccttcatctggcagaaggacggcgtgaagaagctgaacctgtacctgatcatcaactacttcaagggcggcaagctgcggttcaagaagatcaaacctgaagccttcgaagccaacagattctacaccgtgatcaacaaaaagagcggcgagatcgtgcccatggaggtgaacttcaacttcgacgaccccaacctgatcatcctgcctctggcctttggcaagagacagggcagagaattcatctggaacgacctgctgtccctggaaaccggcagcctgaagctggccaacggaagagtgatcgagaagacactgtacaacagaagaacccggcaggatgagcctgccctgttcgtggccctgaccttcgagcggcgggaggtcctggactcctccaatatcaaaccaatgaacctgatcggcgtggcaagaggcgaaaacatccccgccgtgatcgccctgaccgaccccgagggctgcccactgagccggtttaaggatagcctgggaaacccaacccacatcctgagaatcggcgagagctataaggagaagcagcggaccatccaggccaagaaggaggtggagcagcggagagccggcggctacagccggaagtacgccagcaaagccaagaatctggcagacgatatggtgagaaacaccgctagagatctgctgtactacgccgtgacccaggatgccatgctgatcttcgccaacctgagccggggcttcggccggcagggcaagcggaccttcatggccgagagacagtacacacggatggaggactggctgaccgccaagctggcctacgagggcctgagcaagacctacctgtccaagacactggcccagtacacctccaagacatgcagcaactgtgggtttaccatcaccagcgccgactacgacagggtgctggagaagctgaagaagacagcaacaggctggatgaccacaattaacggcaaggagctgaaggtggagggccagattacctactacaacagatacaagagacagaacgtagtcaaggacctgtccgtcgagctggatagactgagcgaagaatctgtgaacaacgacatctcctcctggacaaagggcagaagcggagaagctctgagcctcctgaagaaaagattctcccatagacccgtgcaggagaagttcgtgtgcctgaactgcggcttcgagacacacgcagccgagcaagccgccctgaacatcgccagatcctggctgttcctgcggagccaggagtacaagaaataccagacaaacaagacaaccggcaacaccgataagagagccttcgtcgagacctggcagtccttttaccggaagaagcttaaggaggtgtggaaacctgccgtgcggtctggcggatctggcggaggctccaccagccccaagaaaaagagaaaagtctaagctgccttctgcggggcttgccttctggccatgcccttcttctctcccttgcacctgtacctcttggtctttgaataaagcctgagtaggaaggctagcaaaaaaaaaaaaaaaaaaaaaaaaaaaaaaaaaaaaaaaaaaaaaaaaaaaaaaaaaaaaaaaaaaaaaaaaaaaaaaaa

SEQ ID NO: 10102 - RNA, 8787 nt, synthetic construct
  source 1..8787: mol_type = other RNA
aggaaataagagagaaaagaagagtaagaagaaatataagagccaccatggcccctaagaagaagcgtaaagtgagccggatgaaccacgaccaggagttcgacccccctaaggtgtaccctcccgtccccgccgagaagagaaagcccatccgggtcctgagcctgttcgatggcatcgccaccggtctgctggtgctgaaggacctgggcatccaggtggataggtacattgcctccgaggtgtgcgaggactccatcaccgtgggaatggtgcgtcatcagggcaagatcatgtacgtgggcgacgtgcggagcgtgacacagaagcatatccaggagtggggccctttcgacctggtgatcggcggcagcccttgcaatgacctgagcatcgtgaacccagcccggaagggcctgtacgagggaaccggcagactgttcttcgagttttacagactgctgcacgacgcccggcctaaggaaggcgacgaccggcccttcttttggctgttcgagaatgtggtggccatgggagtcagcgacaagcgggatattagccggttcctggagagcaaccccgtgatgatcgatgccaaggaagtgagcgccgcccaccgggccagatacttctggggcaatctgcctggcatgaacagacccctggccagcaccgtgaacgacaagctggagctgcaggagtgcctggagcacggccggatcgccaagttcagcaaggtgagaaccatcaccacccgaagcaacagcatcaaacaaggcaaggaccagcactttcctgtgttcatgaacgagaaggaggacatcctgtggtgtaccgagatggagagagtgttcgggttcccagtccactacacagatgtcagcaacatgtctagactggccagacagagactgctgggaagaagctggtccgtccctgtgatcagacacctgttcgcccctctgaaggagtacttcgcctgcgtgagcagcggcaacagcaacgccaacagccggggccccagcttctctagcggcctggtgccactgtccctgagagggagccacatgggccccatggagatctacaaaaccgtgagcgcctggaagcggcagcctgtgcgcgtgctgagcctgtttcggaatatcgataaagtcctgaaaagcctgggattcctggagagcggctctggctccggcggtggcaccctgaagtacgtggaggatgtgacaaacgtggtcagacgggatgtggagaagtggggccccttcgatctggtgtacggcagcacccaacccctgggcagctcttgtgaccggtgccctggctggtacatgtttcagttccaccggatcctgcagtacgccctgccgagacaggagtcccagcggccattcttttggattttcatggacaacttgctgctgaccgaggatgaccaggaaactaccactcggttcctgcagaccgaagccgtgaccctgcaggacgtgagaggccgggactaccagaacgccatgcgggtgtggtccaacatccctggactgaaaagcaagcacgcacctctgacccctaaagaagaggagtacctgcaggcccaggtgcggagcagaagcaagctggacgcccctaaggtggatctgctggtgaagaattgcctcctgcccctgagagagtacttcaagtatttcagccagaatagtctgcccctgggaggcagcggcggcggcatgagcctgggcagcgagctgttcagggacgtggccatcgtgttcagccaggaggagtggcagtgcctggcccccgcccagagggacctgtacagggacgtgatgctggagacctacaacaacctggtgagcctgggcctggccatcagcaagcccgacgtgatcagcttcctggagcagggcaaggagccctggatggtggagagggtggtgagcggcggcctgtgccccgtgctggagagcggcggcccaagcagcggcgcccctcctcccagcggcggcaggcggcccaagcagcggcgcccctcctcccagcggcggcagcccagccggctccccaacctctaccgaggagggcacctctgagtccgccacccccgagagcggccctggcacctccaccgagcccagcgagggcagcgcacccggcagccctgccggcagccccacctccacagaggagggaaccagcaccgagcccagcgaaggcagcgccccaggcaccagcaccgagcctagtgagcaggagattaaacggatcaacaagatcagaagaagacttgtgaaagacagcaacaccaagaaggccggcaagacaggccccatgaaaaccctgctggttagagtgatgacacccgatctgagagagcggctggaaaacctgagaaagaagcctgaaaatatcccccagcccatcagcaatacatctagagccaacctgaataagctgctgaccgattacaccgaaatgaagaaggcgatcctgcatgtgtactgggaagagttccagaaggaccctgtgggcctgatgagccgggtggcccagcctgccagcaagaagatcgatcagaacaagctgaaacctgagatggacgagaagggcaacctgaccaccgccggctttgcctgctctcagtgtggccagcccctgttcgtgtacaagctggagcaggtgtctgagaagggcaaggcttacaccaactacttcggacggtgcaatgtggccgagcacgaaaagctgatcctgctggcccagctgaagcccgagaaggatagcgacgaagccgtgacatatagcctgggaaagtttgggcagagggccctggatttctacagcattcatgtgaccaaggagtccacccaccccgtgaagcccctggcccagatcgccggaaacagatacgcctccggacctgtgggaaaggccctgagcgacgcatgtatgggcacaatcgcctccttcctgtctaagtaccaggacatcatcatcgaacaccagaaggtggtgaagggcaaccagaagagactggagagcctgcgggagctggccggcaaggaaaacctggaataccctagcgtgaccctgccacctcagcctcacaccaaggagggcgttgatgcctacaacgaagtgatcgcccgggtgcgaatgtgggtgaacctgaacctgtggcagaagctgaagctaagcagagatgatgccaagcctctgctgagactgaagggattcccttcctttcctctggtcgagagacaggccaacgaagtggactggtgggacatggtgtgtaacgtgaagaagctgatcaacgagaaaaaggaggatggcaaggtgttttggcagaatctggctggctacaagagacaggaagccctgagaccatacctgagcagcgaggaagatcggaagaagggaaagaaattcgctcggtaccagctgggcgacctgctgctgcacctggaaaagaagcacggcgaggactggggaaaggtgtacgacgaggcctgggagcggattgacaagaaagtggaaggcctgagcaagcacatcaagctggaagaggaacggagaagcgaggacgcccagagcaaggccgccctgaccgactggctgcgggctaaggccagcttcgtgatcgagggcctgaaggaggccgacaaggacgagttctgcagatgcgagctgaagctgcagaagtggtacggggacctgcggggaaagcccttcgccatcgaagccgagaacagcatcctggacatcagcggcttcagcaagcagtacaactgtgccttcatctggcagaaggacggcgtgaagaagctgaacctgtacctgatcatcaactacttcaagggcggcaagctgcggttcaagaagatcaaacctgaagccttcgaagccaacagattctacaccgtgatcaacaaaaagagcggcgagatcgtgcccatggaggtgaacttcaacttcgacgaccccaacctgatcatcctgcctctggcctttggcaagagacagggcagagaattcatctggaacgacctgctgtccctggaaaccggcagcctgaagctggccaacggaagagtgatcgagaagacactgtacaacagaagaacccggcaggatgagcctgccctgttcgtggccctgaccttcgagcggcgggaggtcctggactcctccaatatcaaaccaatgaacctgatcggcgtggcaagaggcgaaaacatccccgccgtgatcgccctgaccgaccccgagggctgcccactgagccggtttaaggatagcctgggaaacccaacccacatcctgagaatcggcgagagctataaggagaagcagcggaccatccaggccaagaaggaggtggagcagcggagagccggcggctacagccggaagtacgccagcaaagccaagaatctggcagacgatatggtgagaaacaccgctagagatctgctgtactacgccgtgacccaggatgccatgctgatcttcgccaacctgagccggggcttcggccggcagggcaagcggaccttcatggccgagagacagtacacacggatggaggactggctgaccgccaagctggcctacgagggcctgagcaagacctacctgtccaagacactggcccagtacacctccaagacatgcagcaactgtgggtttaccatcaccagcgccgactacgacagggtgctggagaagctgaagaagacagcaacaggctggatgaccacaattaacggcaaggagctgaaggtggagggccagattacctactacaacagatacaagagacagaacgtagtcaaggacctgtccgtcgagctggatagactgagcgaagaatctgtgaacaacgacatctcctcctggacaaagggcagaagcggagaagctctgagcctcctgaagaaaagattctcccatagacccgtgcaggagaagttcgtgtgcctgaactgcggcttcgagacacacgcagccgagcaagccgccctgaacatcgccagatcctggctgttcctgcggagccaggagtacaagaaataccagacaaacaagacaaccggcaacaccgataagagagccttcgtcgagacctggcagtccttttaccggaagaagcttaaggaggtgtggaaacctgccgtgcggtctggcggatctggcggaggctccaccagccccaagaaaaagagaaaagtctaagctgccttctgcggggcttgccttctggccatgcccttcttctctcccttgcacctgtacctcttggtctttgaataaagcctgagtaggaaggctagcaaaaaaaaaaaaaaaaaaaaaaaaaaaaaaaaaaaaaaaaaaaaaaaaaaaaaaaaaaaaaaaaaaaaaaaaaaaaaaaagcccagccggctccccaacctctaccgaggagggcacctctgagtccgccacccccgagagcggccctggcacctccaccgagcccagcgagggcagcgcacccggcagccctgccggcagccccacctccacagaggagggaaccagcaccgagcccagcgaaggcagcgccccaggcaccagcaccgagcctagtgagcaggagattaaacggatcaacaagatcagaagaagacttgtgaaagacagcaacaccaagaaggccggcaagacaggccccatgaaaaccctgctggttagagtgatgacacccgatctgagagagcggctggaaaacctgagaaagaagcctgaaaatatcccccagcccatcagcaatacatctagagccaacctgaataagctgctgaccgattacaccgaaatgaagaaggcgatcctgcatgtgtactgggaagagttccagaaggaccctgtgggcctgatgagccgggtggcccagcctgccagcaagaagatcgatcagaacaagctgaaacctgagatggacgagaagggcaacctgaccaccgccggctttgcctgctctcagtgtggccagcccctgttcgtgtacaagctggagcaggtgtctgagaagggcaaggcttacaccaactacttcggacggtgcaatgtggccgagcacgaaaagctgatcctgctggcccagctgaagcccgagaaggatagcgacgaagccgtgacatatagcctgggaaagtttgggcagagggccctggatttctacagcattcatgtgaccaaggagtccacccaccccgtgaagcccctggcccagatcgccggaaacagatacgcctccggacctgtgggaaaggccctgagcgacgcatgtatgggcacaatcgcctccttcctgtctaagtaccaggacatcatcatcgaacaccagaaggtggtgaagggcaaccagaagagactggagagcctgcgggagctggccggcaaggaaaacctggaataccctagcgtgaccctgccacctcagcctcacaccaaggagggcgttgatgcctacaacgaagtgatcgcccgggtgcgaatgtgggtgaacctgaacctgtggcagaagctgaagctaagcagagatgatgccaagcctctgctgagactgaagggattcccttcctttcctctggtcgagagacaggccaacgaagtggactggtgggacatggtgtgtaacgtgaagaagctgatcaacgagaaaaaggaggatggcaaggtgttttggcagaatctggctggctacaagagacaggaagccctgagaccatacctgagcagcgaggaagatcggaagaagggaaagaaattcgctcggtaccagctgggcgacctgctgctgcacctggaaaagaagcacggcgaggactggggaaaggtgtacgacgaggcctgggagcggattgacaagaaagtggaaggcctgagcaagcacatcaagctggaagaggaacggagaagcgaggacgcccagagcaaggccgccctgaccgactggctgcgggctaaggccagcttcgtgatcgagggcctgaaggaggccgacaaggacgagttctgcagatgcgagctgaagctgcagaagtggtacggggacctgcggggaaagcccttcgccatcgaagccgagaacagcatcctggacatcagcggcttcagcaagcagtacaactgtgccttcatctggcagaaggacggcgtgaagaagctgaacctgtacctgatcatcaactacttcaagggcggcaagctgcggttcaagaagatcaaacctgaagccttcgaagccaacagattctacaccgtgatcaacaaaaagagcggcgagatcgtgcccatggaggtgaacttcaacttcgacgaccccaacctgatcatcctgcctctggcctttggcaagagacagggcagagaattcatctggaacgacctgctgtccctggaaaccggcagcctgaagctggccaacggaagagtgatcgagaagacactgtacaacagaagaacccggcaggatgagcctgccctgttcgtggccctgaccttcgagcggcgggaggtcctggactcctccaatatcaaaccaatgaacctgatcggcgtggcaagaggcgaaaacatccccgccgtgatcgccctgaccgaccccgagggctgcccactgagccggtttaaggatagcctgggaaacccaacccacatcctgagaatcggcgagagctataaggagaagcagcggaccatccaggccaagaaggaggtggagcagcggagagccggcggctacagccggaagtacgccagcaaagccaagaatctggcagacgatatggtgagaaacaccgctagagatctgctgtactacgccgtgacccaggatgccatgctgatcttcgccaacctgagccggggcttcggccggcagggcaagcggaccttcatggccgagagacagtacacacggatggaggactggctgaccgccaagctggcctacgagggcctgagcaagacctacctgtccaagacactggcccagtacacctccaagacatgcagcaactgtgggtttaccatcaccagcgccgactacgacagggtgctggagaagctgaagaagacagcaacaggctggatgaccacaattaacggcaaggagctgaaggtggagggccagattacctactacaacagatacaagagacagaacgtagtcaaggacctgtccgtcgagctggatagactgagcgaagaatctgtgaacaacgacatctcctcctggacaaagggcagaagcggagaagctctgagcctcctgaagaaaagattctcccatagacccgtgcaggagaagttcgtgtgcctgaactgcggcttcgagacacacgcagccgagcaagccgccctgaacatcgccagatcctggctgttcctgcggagccaggagtacaagaaataccagacaaacaagacaaccggcaacaccgataagagagccttcgtcgagacctggcagtccttttaccggaagaagcttaaggaggtgtggaaacctgccgtgcggtctggcggatctggcggaggctccaccagccccaagaaaaagagaaaagtctaagctgccttctgcggggcttgccttctggccatgcccttcttctctcccttgcacctgtacctcttggtctttgaataaagcctgagtaggaaggctagcaaaaaaaaaaaaaaaaaaaaaaaaaaaaaaaaaaaaaaaaaaaaaaaaaaaaaaaaaaaaaaaaaaaaaaaaaaaaaaaa

SEQ ID NO: 10103 - RNA, 8787 nt, synthetic construct
  source 1..8787: mol_type = other RNA
aggaaataagagagaaaagaagagtaagaagaaatataagagccaccatggcccctaagaagaagcgtaaagtgagccggatgaaccacgaccaggagttcgacccccctaaggtgtaccctcccgtccccgccgagaagagaaagcccatccgggtcctgagcctgttcgatggcatcgccaccggtctgctggtgctgaaggacctgggcatccaggtggataggtacattgcctccgaggtgtgcgaggactccatcaccgtgggaatggtgcgtcatcagggcaagatcatgtacgtgggcgacgtgcggagcgtgacacagaagcatatccaggagtggggccctttcgacctggtgatcggcggcagcccttgcaatgacctgagcatcgtgaacccagcccggaagggcctgtacgagggaaccggcagactgttcttcgagttttacagactgctgcacgacgcccggcctaaggaaggcgacgaccggcccttcttttggctgttcgagaatgtggtggccatgggagtcagcgacaagcgggatattagccggttcctggagagcaaccccgtgatgatcgatgccaaggaagtgagcgccgcccaccgggccagatacttctggggcaatctgcctggcatgaacagacccctggccagcaccgtgaacgacaagctggagctgcaggagtgcctggagcacggccggatcgccaagttcagcaaggtgagaaccatcaccacccgaagcaacagcatcaaacaaggcaaggaccagcactttcctgtgttcatgaacgagaaggaggacatcctgtggtgtaccgagatggagagagtgttcgggttcccagtccactacacagatgtcagcaacatgtctagactggccagacagagactgctgggaagaagctggtccgtccctgtgatcagacacctgttcgcccctctgaaggagtacttcgcctgcgtgagcagcggcaacagcaacgccaacagccggggccccagcttctctagcggcctggtgccactgtccctgagagggagccacatgggccccatggagatctacaaaaccgtgagcgcctggaagcggcagcctgtgcgcgtgctgagcctgtttcggaatatcgataaagtcctgaaaagcctgggattcctggagagcggctctggctccggcggtggcaccctgaagtacgtggaggatgtgacaaacgtggtcagacgggatgtggagaagtggggccccttcgatctggtgtacggcagcacccaacccctgggcagctcttgtgaccggtgccctggctggtacatgtttcagttccaccggatcctgcagtacgccctgccgagacaggagtcccagcggccattcttttggattttcatggacaacttgctgctgaccgaggatgaccaggaaactaccactcggttcctgcagaccgaagccgtgaccctgcaggacgtgagaggccgggactaccagaacgccatgcgggtgtggtccaacatccctggactgaaaagcaagcacgcacctctgacccctaaagaagaggagtacctgcaggcccaggtgcggagcagaagcaagctggacgcccctaaggtggatctgctggtgaagaattgcctcctgcccctgagagagtacttcaagtatttcagccagaatagtctgcccctgggaggcagcggcggcggcatgctgcagaccgtgtggttccaggagcccgtgaccttcgaggacgtggccgtgtacttcacccagaacgagtgggccagcctgcaccccacccagagggccctgtacagggaggtgatgctggagaactacgccaacgtgaccagcctgagcgccttccccttccccaagcccgacctgatcttccagctggagcagggcgaggccgcctggggccccgacccctggaccctggccggcggcggcggcccaagcagcggcgcccctcctcccagcggcggcaggcggcccaagcagcggcgcccctcctcccagcggcggcagcccagccggctccccaacctctaccgaggagggcacctctgagtccgccacccccgagagcggccctggcacctccaccgagcccagcgagggcagcgcacccggcagccctgccggcagccccacctccacagaggagggaaccagcaccgagcccagcgaaggcagcgccccaggcaccagcaccgagcctagtgagcaggagattaaacggatcaacaagatcagaagaagacttgtgaaagacagcaacaccaagaaggccggcaagacaggccccatgaaaaccctgctggttagagtgatgacacccgatctgagagagcggctggaaaacctgagaaagaagcctgaaaatatcccccagcccatcagcaatacatctagagccaacctgaataagctgctgaccgattacaccgaaatgaagaaggcgatcctgcatgtgtactgggaagagttccagaaggaccctgtgggcctgatgagccgggtggcccagcctgccagcaagaagatcgatcagaacaagctgaaacctgagatggacgagaagggcaacctgaccaccgccggctttgcctgctctcagtgtggccagcccctgttcgtgtacaagctggagcaggtgtctgagaagggcaaggcttacaccaactacttcggacggtgcaatgtggccgagcacgaaaagctgatcctgctggcccagctgaagcccgagaaggatagcgacgaagccgtgacatatagcctgggaaagtttgggcagagggccctggatttctacagcattcatgtgaccaaggagtccacccaccccgtgaagcccctggcccagatcgccggaaacagatacgcctccggacctgtgggaaaggccctgagcgacgcatgtatgggcacaatcgcctccttcctgtctaagtaccaggacatcatcatcgaacaccagaaggtggtgaagggcaaccagaagagactggagagcctgcgggagctggccggcaaggaaaacctggaataccctagcgtgaccctgccacctcagcctcacaccaaggagggcgttgatgcctacaacgaagtgatcgcccgggtgcgaatgtgggtgaacctgaacctgtggcagaagctgaagctaagcagagatgatgccaagcctctgctgagactgaagggattcccttcctttcctctggtcgagagacaggccaacgaagtggactggtgggacatggtgtgtaacgtgaagaagctgatcaacgagaaaaaggaggatggcaaggtgttttggcagaatctggctggctacaagagacaggaagccctgagaccatacctgagcagcgaggaagatcggaagaagggaaagaaattcgctcggtaccagctgggcgacctgctgctgcacctggaaaagaagcacggcgaggactggggaaaggtgtacgacgaggcctgggagcggattgacaagaaagtggaaggcctgagcaagcacatcaagctggaagaggaacggagaagcgaggacgcccagagcaaggccgccctgaccgactggctgcgggctaaggccagcttcgtgatcgagggcctgaaggaggccgacaaggacgagttctgcagatgcgagctgaagctgcagaagtggtacggggacctgcggggaaagcccttcgccatcgaagccgagaacagcatcctggacatcagcggcttcagcaagcagtacaactgtgccttcatctggcagaaggacggcgtgaagaagctgaacctgtacctgatcatcaactacttcaagggcggcaagctgcggttcaagaagatcaaacctgaagccttcgaagccaacagattctacaccgtgatcaacaaaaagagcggcgagatcgtgcccatggaggtgaacttcaacttcgacgaccccaacctgatcatcctgcctctggcctttggcaagagacagggcagagaattcatctggaacgacctgctgtccctggaaaccggcagcctgaagctggccaacggaagagtgatcgagaagacactgtacaacagaagaacccggcaggatgagcctgccctgttcgtggccctgaccttcgagcggcgggaggtcctggactcctccaatatcaaaccaatgaacctgatcggcgtggcaagaggcgaaaacatccccgccgtgatcgccctgaccgaccccgagggctgcccactgagccggtttaaggatagcctgggaaacccaacccacatcctgagaatcggcgagagctataaggagaagcagcggaccatccaggccaagaaggaggtggagcagcggagagccggcggctacagccggaagtacgccagcaaagccaagaatctggcagacgatatggtgagaaacaccgctagagatctgctgtactacgccgtgacccaggatgccatgctgatcttcgccaacctgagccggggcttcggccggcagggcaagcggaccttcatggccgagagacagtacacacggatggaggactggctgaccgccaagctggcctacgagggcctgagcaagacctacctgtccaagacactggcccagtacacctccaagacatgcagcaactgtgggtttaccatcaccagcgccgactacgacagggtgctggagaagctgaagaagacagcaacaggctggatgaccacaattaacggcaaggagctgaaggtggagggccagattacctactacaacagatacaagagacagaacgtagtcaaggacctgtccgtcgagctggatagactgagcgaagaatctgtgaacaacgacatctcctcctggacaaagggcagaagcggagaagctctgagcctcctgaagaaaagattctcccatagacccgtgcaggagaagttcgtgtgcctgaactgcggcttcgagacacacgcagccgagcaagccgccctgaacatcgccagatcctggctgttcctgcggagccaggagtacaagaaataccagacaaacaagacaaccggcaacaccgataagagagccttcgtcgagacctggcagtccttttaccggaagaagcttaaggaggtgtggaaacctgccgtgcggtctggcggatctggcggaggctccaccagccccaagaaaaagagaaaagtctaagctgccttctgcggggcttgccttctggccatgcccttcttctctcccttgcacctgtacctcttggtctttgaataaagcctgagtaggaaggctagcaaaaaaaaaaaaaaaaaaaaaaaaaaaaaaaaaaaaaaaaaaaaaaaaaaaaaaaaaaaaaaaaaaaaaaaaaaaaaaaagcccagccggctccccaacctctaccgaggagggcacctctgagtccgccacccccgagagcggccctggcacctccaccgagcccagcgagggcagcgcacccggcagccctgccggcagccccacctccacagaggagggaaccagcaccgagcccagcgaaggcagcgccccaggcaccagcaccgagcctagtgagcaggagattaaacggatcaacaagatcagaagaagacttgtgaaagacagcaacaccaagaaggccggcaagacaggccccatgaaaaccctgctggttagagtgatgacacccgatctgagagagcggctggaaaacctgagaaagaagcctgaaaatatcccccagcccatcagcaatacatctagagccaacctgaataagctgctgaccgattacaccgaaatgaagaaggcgatcctgcatgtgtactgggaagagttccagaaggaccctgtgggcctgatgagccgggtggcccagcctgccagcaagaagatcgatcagaacaagctgaaacctgagatggacgagaagggcaacctgaccaccgccggctttgcctgctctcagtgtggccagcccctgttcgtgtacaagctggagcaggtgtctgagaagggcaaggcttacaccaactacttcggacggtgcaatgtggccgagcacgaaaagctgatcctgctggcccagctgaagcccgagaaggatagcgacgaagccgtgacatatagcctgggaaagtttgggcagagggccctggatttctacagcattcatgtgaccaaggagtccacccaccccgtgaagcccctggcccagatcgccggaaacagatacgcctccggacctgtgggaaaggccctgagcgacgcatgtatgggcacaatcgcctccttcctgtctaagtaccaggacatcatcatcgaacaccagaaggtggtgaagggcaaccagaagagactggagagcctgcgggagctggccggcaaggaaaacctggaataccctagcgtgaccctgccacctcagcctcacaccaaggagggcgttgatgcctacaacgaagtgatcgcccgggtgcgaatgtgggtgaacctgaacctgtggcagaagctgaagctaagcagagatgatgccaagcctctgctgagactgaagggattcccttcctttcctctggtcgagagacaggccaacgaagtggactggtgggacatggtgtgtaacgtgaagaagctgatcaacgagaaaaaggaggatggcaaggtgttttggcagaatctggctggctacaagagacaggaagccctgagaccatacctgagcagcgaggaagatcggaagaagggaaagaaattcgctcggtaccagctgggcgacctgctgctgcacctggaaaagaagcacggcgaggactggggaaaggtgtacgacgaggcctgggagcggattgacaagaaagtggaaggcctgagcaagcacatcaagctggaagaggaacggagaagcgaggacgcccagagcaaggccgccctgaccgactggctgcgggctaaggccagcttcgtgatcgagggcctgaaggaggccgacaaggacgagttctgcagatgcgagctgaagctgcagaagtggtacggggacctgcggggaaagcccttcgccatcgaagccgagaacagcatcctggacatcagcggcttcagcaagcagtacaactgtgccttcatctggcagaaggacggcgtgaagaagctgaacctgtacctgatcatcaactacttcaagggcggcaagctgcggttcaagaagatcaaacctgaagccttcgaagccaacagattctacaccgtgatcaacaaaaagagcggcgagatcgtgcccatggaggtgaacttcaacttcgacgaccccaacctgatcatcctgcctctggcctttggcaagagacagggcagagaattcatctggaacgacctgctgtccctggaaaccggcagcctgaagctggccaacggaagagtgatcgagaagacactgtacaacagaagaacccggcaggatgagcctgccctgttcgtggccctgaccttcgagcggcgggaggtcctggactcctccaatatcaaaccaatgaacctgatcggcgtggcaagaggcgaaaacatccccgccgtgatcgccctgaccgaccccgagggctgcccactgagccggtttaaggatagcctgggaaacccaacccacatcctgagaatcggcgagagctataaggagaagcagcggaccatccaggccaagaaggaggtggagcagcggagagccggcggctacagccggaagtacgccagcaaagccaagaatctggcagacgatatggtgagaaacaccgctagagatctgctgtactacgccgtgacccaggatgccatgctgatcttcgccaacctgagccggggcttcggccggcagggcaagcggaccttcatggccgagagacagtacacacggatggaggactggctgaccgccaagctggcctacgagggcctgagcaagacctacctgtccaagacactggcccagtacacctccaagacatgcagcaactgtgggtttaccatcaccagcgccgactacgacagggtgctggagaagctgaagaagacagcaacaggctggatgaccacaattaacggcaaggagctgaaggtggagggccagattacctactacaacagatacaagagacagaacgtagtcaaggacctgtccgtcgagctggatagactgagcgaagaatctgtgaacaacgacatctcctcctggacaaagggcagaagcggagaagctctgagcctcctgaagaaaagattctcccatagacccgtgcaggagaagttcgtgtgcctgaactgcggcttcgagacacacgcagccgagcaagccgccctgaacatcgccagatcctggctgttcctgcggagccaggagtacaagaaataccagacaaacaagacaaccggcaacaccgataagagagccttcgtcgagacctggcagtccttttaccggaagaagcttaaggaggtgtggaaacctgccgtgcggtctggcggatctggcggaggctccaccagccccaagaaaaagagaaaagtctaagctgccttctgcggggcttgccttctggccatgcccttcttctctcccttgcacctgtacctcttggtctttgaataaagcctgagtaggaaggctagcaaaaaaaaaaaaaaaaaaaaaaaaaaaaaaaaaaaaaaaaaaaaaaaaaaaaaaaaaaaaaaaaaaaaaaaaaaaaaaaa

SEQ ID NO: 10104 - RNA, 8787 nt, synthetic construct
  source 1..8787: mol_type = other RNA
aggaaataagagagaaaagaagagtaagaagaaatataagagccaccatggcccctaagaagaagcgtaaagtgagccggatgaaccacgaccaggagttcgacccccctaaggtgtaccctcccgtccccgccgagaagagaaagcccatccgggtcctgagcctgttcgatggcatcgccaccggtctgctggtgctgaaggacctgggcatccaggtggataggtacattgcctccgaggtgtgcgaggactccatcaccgtgggaatggtgcgtcatcagggcaagatcatgtacgtgggcgacgtgcggagcgtgacacagaagcatatccaggagtggggccctttcgacctggtgatcggcggcagcccttgcaatgacctgagcatcgtgaacccagcccggaagggcctgtacgagggaaccggcagactgttcttcgagttttacagactgctgcacgacgcccggcctaaggaaggcgacgaccggcccttcttttggctgttcgagaatgtggtggccatgggagtcagcgacaagcgggatattagccggttcctggagagcaaccccgtgatgatcgatgccaaggaagtgagcgccgcccaccgggccagatacttctggggcaatctgcctggcatgaacagacccctggccagcaccgtgaacgacaagctggagctgcaggagtgcctggagcacggccggatcgccaagttcagcaaggtgagaaccatcaccacccgaagcaacagcatcaaacaaggcaaggaccagcactttcctgtgttcatgaacgagaaggaggacatcctgtggtgtaccgagatggagagagtgttcgggttcccagtccactacacagatgtcagcaacatgtctagactggccagacagagactgctgggaagaagctggtccgtccctgtgatcagacacctgttcgcccctctgaaggagtacttcgcctgcgtgagcagcggcaacagcaacgccaacagccggggccccagcttctctagcggcctggtgccactgtccctgagagggagccacatgggccccatggagatctacaaaaccgtgagcgcctggaagcggcagcctgtgcgcgtgctgagcctgtttcggaatatcgataaagtcctgaaaagcctgggattcctggagagcggctctggctccggcggtggcaccctgaagtacgtggaggatgtgacaaacgtggtcagacgggatgtggagaagtggggccccttcgatctggtgtacggcagcacccaacccctgggcagctcttgtgaccggtgccctggctggtacatgtttcagttccaccggatcctgcagtacgccctgccgagacaggagtcccagcggccattcttttggattttcatggacaacttgctgctgaccgaggatgaccaggaaactaccactcggttcctgcagaccgaagccgtgaccctgcaggacgtgagaggccgggactaccagaacgccatgcgggtgtggtccaacatccctggactgaaaagcaagcacgcacctctgacccctaaagaagaggagtacctgcaggcccaggtgcggagcagaagcaagctggacgcccctaaggtggatctgctggtgaagaattgcctcctgcccctgagagagtacttcaagtatttcagccagaatagtctgcccctgggaggcagcggcggcggcttccaggagctggtgaccttcgaggacgtgtgcgtggacttcaccagcgaggagctgagctgcctgagcaccagccagaggaccctgtacagggaggtgatgctggagaactacaggaacctggtgagcctgggccaccagttcagcaagcccgagctgatcagcaggctggaggaggaggagttccaggccatggccgccgacagcagcgccgtggccggcgacagcggcgccgtggccggcggcggcccaagcagcggcgcccctcctcccagcggcggcaggcggcccaagcagcggcgcccctcctcccagcggcggcagcccagccggctccccaacctctaccgaggagggcacctctgagtccgccacccccgagagcggccctggcacctccaccgagcccagcgagggcagcgcacccggcagccctgccggcagccccacctccacagaggagggaaccagcaccgagcccagcgaaggcagcgccccaggcaccagcaccgagcctagtgagcaggagattaaacggatcaacaagatcagaagaagacttgtgaaagacagcaacaccaagaaggccggcaagacaggccccatgaaaaccctgctggttagagtgatgacacccgatctgagagagcggctggaaaacctgagaaagaagcctgaaaatatcccccagcccatcagcaatacatctagagccaacctgaataagctgctgaccgattacaccgaaatgaagaaggcgatcctgcatgtgtactgggaagagttccagaaggaccctgtgggcctgatgagccgggtggcccagcctgccagcaagaagatcgatcagaacaagctgaaacctgagatggacgagaagggcaacctgaccaccgccggctttgcctgctctcagtgtggccagcccctgttcgtgtacaagctggagcaggtgtctgagaagggcaaggcttacaccaactacttcggacggtgcaatgtggccgagcacgaaaagctgatcctgctggcccagctgaagcccgagaaggatagcgacgaagccgtgacatatagcctgggaaagtttgggcagagggccctggatttctacagcattcatgtgaccaaggagtccacccaccccgtgaagcccctggcccagatcgccggaaacagatacgcctccggacctgtgggaaaggccctgagcgacgcatgtatgggcacaatcgcctccttcctgtctaagtaccaggacatcatcatcgaacaccagaaggtggtgaagggcaaccagaagagactggagagcctgcgggagctggccggcaaggaaaacctggaataccctagcgtgaccctgccacctcagcctcacaccaaggagggcgttgatgcctacaacgaagtgatcgcccgggtgcgaatgtgggtgaacctgaacctgtggcagaagctgaagctaagcagagatgatgccaagcctctgctgagactgaagggattcccttcctttcctctggtcgagagacaggccaacgaagtggactggtgggacatggtgtgtaacgtgaagaagctgatcaacgagaaaaaggaggatggcaaggtgttttggcagaatctggctggctacaagagacaggaagccctgagaccatacctgagcagcgaggaagatcggaagaagggaaagaaattcgctcggtaccagctgggcgacctgctgctgcacctggaaaagaagcacggcgaggactggggaaaggtgtacgacgaggcctgggagcggattgacaagaaagtggaaggcctgagcaagcacatcaagctggaagaggaacggagaagcgaggacgcccagagcaaggccgccctgaccgactggctgcgggctaaggccagcttcgtgatcgagggcctgaaggaggccgacaaggacgagttctgcagatgcgagctgaagctgcagaagtggtacggggacctgcggggaaagcccttcgccatcgaagccgagaacagcatcctggacatcagcggcttcagcaagcagtacaactgtgccttcatctggcagaaggacggcgtgaagaagctgaacctgtacctgatcatcaactacttcaagggcggcaagctgcggttcaagaagatcaaacctgaagccttcgaagccaacagattctacaccgtgatcaacaaaaagagcggcgagatcgtgcccatggaggtgaacttcaacttcgacgaccccaacctgatcatcctgcctctggcctttggcaagagacagggcagagaattcatctggaacgacctgctgtccctggaaaccggcagcctgaagctggccaacggaagagtgatcgagaagacactgtacaacagaagaacccggcaggatgagcctgccctgttcgtggccctgaccttcgagcggcgggaggtcctggactcctccaatatcaaaccaatgaacctgatcggcgtggcaagaggcgaaaacatccccgccgtgatcgccctgaccgaccccgagggctgcccactgagccggtttaaggatagcctgggaaacccaacccacatcctgagaatcggcgagagctataaggagaagcagcggaccatccaggccaagaaggaggtggagcagcggagagccggcggctacagccggaagtacgccagcaaagccaagaatctggcagacgatatggtgagaaacaccgctagagatctgctgtactacgccgtgacccaggatgccatgctgatcttcgccaacctgagccggggcttcggccggcagggcaagcggaccttcatggccgagagacagtacacacggatggaggactggctgaccgccaagctggcctacgagggcctgagcaagacctacctgtccaagacactggcccagtacacctccaagacatgcagcaactgtgggtttaccatcaccagcgccgactacgacagggtgctggagaagctgaagaagacagcaacaggctggatgaccacaattaacggcaaggagctgaaggtggagggccagattacctactacaacagatacaagagacagaacgtagtcaaggacctgtccgtcgagctggatagactgagcgaagaatctgtgaacaacgacatctcctcctggacaaagggcagaagcggagaagctctgagcctcctgaagaaaagattctcccatagacccgtgcaggagaagttcgtgtgcctgaactgcggcttcgagacacacgcagccgagcaagccgccctgaacatcgccagatcctggctgttcctgcggagccaggagtacaagaaataccagacaaacaagacaaccggcaacaccgataagagagccttcgtcgagacctggcagtccttttaccggaagaagcttaaggaggtgtggaaacctgccgtgcggtctggcggatctggcggaggctccaccagccccaagaaaaagagaaaagtctaagctgccttctgcggggcttgccttctggccatgcccttcttctctcccttgcacctgtacctcttggtctttgaataaagcctgagtaggaaggctagcaaaaaaaaaaaaaaaaaaaaaaaaaaaaaaaaaaaaaaaaaaaaaaaaaaaaaaaaaaaaaaaaaaaaaaaaaaaaaaaagcccagccggctccccaacctctaccgaggagggcacctctgagtccgccacccccgagagcggccctggcacctccaccgagcccagcgagggcagcgcacccggcagccctgccggcagccccacctccacagaggagggaaccagcaccgagcccagcgaaggcagcgccccaggcaccagcaccgagcctagtgagcaggagattaaacggatcaacaagatcagaagaagacttgtgaaagacagcaacaccaagaaggccggcaagacaggccccatgaaaaccctgctggttagagtgatgacacccgatctgagagagcggctggaaaacctgagaaagaagcctgaaaatatcccccagcccatcagcaatacatctagagccaacctgaataagctgctgaccgattacaccgaaatgaagaaggcgatcctgcatgtgtactgggaagagttccagaaggaccctgtgggcctgatgagccgggtggcccagcctgccagcaagaagatcgatcagaacaagctgaaacctgagatggacgagaagggcaacctgaccaccgccggctttgcctgctctcagtgtggccagcccctgttcgtgtacaagctggagcaggtgtctgagaagggcaaggcttacaccaactacttcggacggtgcaatgtggccgagcacgaaaagctgatcctgctggcccagctgaagcccgagaaggatagcgacgaagccgtgacatatagcctgggaaagtttgggcagagggccctggatttctacagcattcatgtgaccaaggagtccacccaccccgtgaagcccctggcccagatcgccggaaacagatacgcctccggacctgtgggaaaggccctgagcgacgcatgtatgggcacaatcgcctccttcctgtctaagtaccaggacatcatcatcgaacaccagaaggtggtgaagggcaaccagaagagactggagagcctgcgggagctggccggcaaggaaaacctggaataccctagcgtgaccctgccacctcagcctcacaccaaggagggcgttgatgcctacaacgaagtgatcgcccgggtgcgaatgtgggtgaacctgaacctgtggcagaagctgaagctaagcagagatgatgccaagcctctgctgagactgaagggattcccttcctttcctctggtcgagagacaggccaacgaagtggactggtgggacatggtgtgtaacgtgaagaagctgatcaacgagaaaaaggaggatggcaaggtgttttggcagaatctggctggctacaagagacaggaagccctgagaccatacctgagcagcgaggaagatcggaagaagggaaagaaattcgctcggtaccagctgggcgacctgctgctgcacctggaaaagaagcacggcgaggactggggaaaggtgtacgacgaggcctgggagcggattgacaagaaagtggaaggcctgagcaagcacatcaagctggaagaggaacggagaagcgaggacgcccagagcaaggccgccctgaccgactggctgcgggctaaggccagcttcgtgatcgagggcctgaaggaggccgacaaggacgagttctgcagatgcgagctgaagctgcagaagtggtacggggacctgcggggaaagcccttcgccatcgaagccgagaacagcatcctggacatcagcggcttcagcaagcagtacaactgtgccttcatctggcagaaggacggcgtgaagaagctgaacctgtacctgatcatcaactacttcaagggcggcaagctgcggttcaagaagatcaaacctgaagccttcgaagccaacagattctacaccgtgatcaacaaaaagagcggcgagatcgtgcccatggaggtgaacttcaacttcgacgaccccaacctgatcatcctgcctctggcctttggcaagagacagggcagagaattcatctggaacgacctgctgtccctggaaaccggcagcctgaagctggccaacggaagagtgatcgagaagacactgtacaacagaagaacccggcaggatgagcctgccctgttcgtggccctgaccttcgagcggcgggaggtcctggactcctccaatatcaaaccaatgaacctgatcggcgtggcaagaggcgaaaacatccccgccgtgatcgccctgaccgaccccgagggctgcccactgagccggtttaaggatagcctgggaaacccaacccacatcctgagaatcggcgagagctataaggagaagcagcggaccatccaggccaagaaggaggtggagcagcggagagccggcggctacagccggaagtacgccagcaaagccaagaatctggcagacgatatggtgagaaacaccgctagagatctgctgtactacgccgtgacccaggatgccatgctgatcttcgccaacctgagccggggcttcggccggcagggcaagcggaccttcatggccgagagacagtacacacggatggaggactggctgaccgccaagctggcctacgagggcctgagcaagacctacctgtccaagacactggcccagtacacctccaagacatgcagcaactgtgggtttaccatcaccagcgccgactacgacagggtgctggagaagctgaagaagacagcaacaggctggatgaccacaattaacggcaaggagctgaaggtggagggccagattacctactacaacagatacaagagacagaacgtagtcaaggacctgtccgtcgagctggatagactgagcgaagaatctgtgaacaacgacatctcctcctggacaaagggcagaagcggagaagctctgagcctcctgaagaaaagattctcccatagacccgtgcaggagaagttcgtgtgcctgaactgcggcttcgagacacacgcagccgagcaagccgccctgaacatcgccagatcctggctgttcctgcggagccaggagtacaagaaataccagacaaacaagacaaccggcaacaccgataagagagccttcgtcgagacctggcagtccttttaccggaagaagcttaaggaggtgtggaaacctgccgtgcggtctggcggatctggcggaggctccaccagccccaagaaaaagagaaaagtctaagctgccttctgcggggcttgccttctggccatgcccttcttctctcccttgcacctgtacctcttggtctttgaataaagcctgagtaggaaggctagcaaaaaaaaaaaaaaaaaaaaaaaaaaaaaaaaaaaaaaaaaaaaaaaaaaaaaaaaaaaaaaaaaaaaaaaaaaaaaaaa

SEQ ID NO: 10105 - RNA, 8787 nt, synthetic construct
  source 1..8787: mol_type = other RNA
aggaaataagagagaaaagaagagtaagaagaaatataagagccaccatggcccctaagaagaagcgtaaagtgagccggatgaaccacgaccaggagttcgacccccctaaggtgtaccctcccgtccccgccgagaagagaaagcccatccgggtcctgagcctgttcgatggcatcgccaccggtctgctggtgctgaaggacctgggcatccaggtggataggtacattgcctccgaggtgtgcgaggactccatcaccgtgggaatggtgcgtcatcagggcaagatcatgtacgtgggcgacgtgcggagcgtgacacagaagcatatccaggagtggggccctttcgacctggtgatcggcggcagcccttgcaatgacctgagcatcgtgaacccagcccggaagggcctgtacgagggaaccggcagactgttcttcgagttttacagactgctgcacgacgcccggcctaaggaaggcgacgaccggcccttcttttggctgttcgagaatgtggtggccatgggagtcagcgacaagcgggatattagccggttcctggagagcaaccccgtgatgatcgatgccaaggaagtgagcgccgcccaccgggccagatacttctggggcaatctgcctggcatgaacagacccctggccagcaccgtgaacgacaagctggagctgcaggagtgcctggagcacggccggatcgccaagttcagcaaggtgagaaccatcaccacccgaagcaacagcatcaaacaaggcaaggaccagcactttcctgtgttcatgaacgagaaggaggacatcctgtggtgtaccgagatggagagagtgttcgggttcccagtccactacacagatgtcagcaacatgtctagactggccagacagagactgctgggaagaagctggtccgtccctgtgatcagacacctgttcgcccctctgaaggagtacttcgcctgcgtgagcagcggcaacagcaacgccaacagccggggccccagcttctctagcggcctggtgccactgtccctgagagggagccacatgggccccatggagatctacaaaaccgtgagcgcctggaagcggcagcctgtgcgcgtgctgagcctgtttcggaatatcgataaagtcctgaaaagcctgggattcctggagagcggctctggctccggcggtggcaccctgaagtacgtggaggatgtgacaaacgtggtcagacgggatgtggagaagtggggccccttcgatctggtgtacggcagcacccaacccctgggcagctcttgtgaccggtgccctggctggtacatgtttcagttccaccggatcctgcagtacgccctgccgagacaggagtcccagcggccattcttttggattttcatggacaacttgctgctgaccgaggatgaccaggaaactaccactcggttcctgcagaccgaagccgtgaccctgcaggacgtgagaggccgggactaccagaacgccatgcgggtgtggtccaacatccctggactgaaaagcaagcacgcacctctgacccctaaagaagaggagtacctgcaggcccaggtgcggagcagaagcaagctggacgcccctaaggtggatctgctggtgaagaattgcctcctgcccctgagagagtacttcaagtatttcagccagaatagtctgcccctgggaggcagcggcggcggcatgaacatggagggcctggtgatgttccaggacctgagcatcgacttcagccaggaggagtgggagtgcctggacgccgcccagaaggacctgtacagggacgtgatgatggagaactacagcagcctggtgagcctgggcctgagcatccccaagcccgacgtgatcagcctgctggagcagggcaaggagccctggatggtgagcagggacatgctgggcggctggtgccccgacagcgagggcggcccaagcagcggcgcccctcctcccagcggcggcaggcggcccaagcagcggcgcccctcctcccagcggcggcagcccagccggctccccaacctctaccgaggagggcacctctgagtccgccacccccgagagcggccctggcacctccaccgagcccagcgagggcagcgcacccggcagccctgccggcagccccacctccacagaggagggaaccagcaccgagcccagcgaaggcagcgccccaggcaccagcaccgagcctagtgagcaggagattaaacggatcaacaagatcagaagaagacttgtgaaagacagcaacaccaagaaggccggcaagacaggccccatgaaaaccctgctggttagagtgatgacacccgatctgagagagcggctggaaaacctgagaaagaagcctgaaaatatcccccagcccatcagcaatacatctagagccaacctgaataagctgctgaccgattacaccgaaatgaagaaggcgatcctgcatgtgtactgggaagagttccagaaggaccctgtgggcctgatgagccgggtggcccagcctgccagcaagaagatcgatcagaacaagctgaaacctgagatggacgagaagggcaacctgaccaccgccggctttgcctgctctcagtgtggccagcccctgttcgtgtacaagctggagcaggtgtctgagaagggcaaggcttacaccaactacttcggacggtgcaatgtggccgagcacgaaaagctgatcctgctggcccagctgaagcccgagaaggatagcgacgaagccgtgacatatagcctgggaaagtttgggcagagggccctggatttctacagcattcatgtgaccaaggagtccacccaccccgtgaagcccctggcccagatcgccggaaacagatacgcctccggacctgtgggaaaggccctgagcgacgcatgtatgggcacaatcgcctccttcctgtctaagtaccaggacatcatcatcgaacaccagaaggtggtgaagggcaaccagaagagactggagagcctgcgggagctggccggcaaggaaaacctggaataccctagcgtgaccctgccacctcagcctcacaccaaggagggcgttgatgcctacaacgaagtgatcgcccgggtgcgaatgtgggtgaacctgaacctgtggcagaagctgaagctaagcagagatgatgccaagcctctgctgagactgaagggattcccttcctttcctctggtcgagagacaggccaacgaagtggactggtgggacatggtgtgtaacgtgaagaagctgatcaacgagaaaaaggaggatggcaaggtgttttggcagaatctggctggctacaagagacaggaagccctgagaccatacctgagcagcgaggaagatcggaagaagggaaagaaattcgctcggtaccagctgggcgacctgctgctgcacctggaaaagaagcacggcgaggactggggaaaggtgtacgacgaggcctgggagcggattgacaagaaagtggaaggcctgagcaagcacatcaagctggaagaggaacggagaagcgaggacgcccagagcaaggccgccctgaccgactggctgcgggctaaggccagcttcgtgatcgagggcctgaaggaggccgacaaggacgagttctgcagatgcgagctgaagctgcagaagtggtacggggacctgcggggaaagcccttcgccatcgaagccgagaacagcatcctggacatcagcggcttcagcaagcagtacaactgtgccttcatctggcagaaggacggcgtgaagaagctgaacctgtacctgatcatcaactacttcaagggcggcaagctgcggttcaagaagatcaaacctgaagccttcgaagccaacagattctacaccgtgatcaacaaaaagagcggcgagatcgtgcccatggaggtgaacttcaacttcgacgaccccaacctgatcatcctgcctctggcctttggcaagagacagggcagagaattcatctggaacgacctgctgtccctggaaaccggcagcctgaagctggccaacggaagagtgatcgagaagacactgtacaacagaagaacccggcaggatgagcctgccctgttcgtggccctgaccttcgagcggcgggaggtcctggactcctccaatatcaaaccaatgaacctgatcggcgtggcaagaggcgaaaacatccccgccgtgatcgccctgaccgaccccgagggctgcccactgagccggtttaaggatagcctgggaaacccaacccacatcctgagaatcggcgagagctataaggagaagcagcggaccatccaggccaagaaggaggtggagcagcggagagccggcggctacagccggaagtacgccagcaaagccaagaatctggcagacgatatggtgagaaacaccgctagagatctgctgtactacgccgtgacccaggatgccatgctgatcttcgccaacctgagccggggcttcggccggcagggcaagcggaccttcatggccgagagacagtacacacggatggaggactggctgaccgccaagctggcctacgagggcctgagcaagacctacctgtccaagacactggcccagtacacctccaagacatgcagcaactgtgggtttaccatcaccagcgccgactacgacagggtgctggagaagctgaagaagacagcaacaggctggatgaccacaattaacggcaaggagctgaaggtggagggccagattacctactacaacagatacaagagacagaacgtagtcaaggacctgtccgtcgagctggatagactgagcgaagaatctgtgaacaacgacatctcctcctggacaaagggcagaagcggagaagctctgagcctcctgaagaaaagattctcccatagacccgtgcaggagaagttcgtgtgcctgaactgcggcttcgagacacacgcagccgagcaagccgccctgaacatcgccagatcctggctgttcctgcggagccaggagtacaagaaataccagacaaacaagacaaccggcaacaccgataagagagccttcgtcgagacctggcagtccttttaccggaagaagcttaaggaggtgtggaaacctgccgtgcggtctggcggatctggcggaggctccaccagccccaagaaaaagagaaaagtctaagctgccttctgcggggcttgccttctggccatgcccttcttctctcccttgcacctgtacctcttggtctttgaataaagcctgagtaggaaggctagcaaaaaaaaaaaaaaaaaaaaaaaaaaaaaaaaaaaaaaaaaaaaaaaaaaaaaaaaaaaaaaaaaaaaaaaaaaaaaaaagcccagccggctccccaacctctaccgaggagggcacctctgagtccgccacccccgagagcggccctggcacctccaccgagcccagcgagggcagcgcacccggcagccctgccggcagccccacctccacagaggagggaaccagcaccgagcccagcgaaggcagcgccccaggcaccagcaccgagcctagtgagcaggagattaaacggatcaacaagatcagaagaagacttgtgaaagacagcaacaccaagaaggccggcaagacaggccccatgaaaaccctgctggttagagtgatgacacccgatctgagagagcggctggaaaacctgagaaagaagcctgaaaatatcccccagcccatcagcaatacatctagagccaacctgaataagctgctgaccgattacaccgaaatgaagaaggcgatcctgcatgtgtactgggaagagttccagaaggaccctgtgggcctgatgagccgggtggcccagcctgccagcaagaagatcgatcagaacaagctgaaacctgagatggacgagaagggcaacctgaccaccgccggctttgcctgctctcagtgtggccagcccctgttcgtgtacaagctggagcaggtgtctgagaagggcaaggcttacaccaactacttcggacggtgcaatgtggccgagcacgaaaagctgatcctgctggcccagctgaagcccgagaaggatagcgacgaagccgtgacatatagcctgggaaagtttgggcagagggccctggatttctacagcattcatgtgaccaaggagtccacccaccccgtgaagcccctggcccagatcgccggaaacagatacgcctccggacctgtgggaaaggccctgagcgacgcatgtatgggcacaatcgcctccttcctgtctaagtaccaggacatcatcatcgaacaccagaaggtggtgaagggcaaccagaagagactggagagcctgcgggagctggccggcaaggaaaacctggaataccctagcgtgaccctgccacctcagcctcacaccaaggagggcgttgatgcctacaacgaagtgatcgcccgggtgcgaatgtgggtgaacctgaacctgtggcagaagctgaagctaagcagagatgatgccaagcctctgctgagactgaagggattcccttcctttcctctggtcgagagacaggccaacgaagtggactggtgggacatggtgtgtaacgtgaagaagctgatcaacgagaaaaaggaggatggcaaggtgttttggcagaatctggctggctacaagagacaggaagccctgagaccatacctgagcagcgaggaagatcggaagaagggaaagaaattcgctcggtaccagctgggcgacctgctgctgcacctggaaaagaagcacggcgaggactggggaaaggtgtacgacgaggcctgggagcggattgacaagaaagtggaaggcctgagcaagcacatcaagctggaagaggaacggagaagcgaggacgcccagagcaaggccgccctgaccgactggctgcgggctaaggccagcttcgtgatcgagggcctgaaggaggccgacaaggacgagttctgcagatgcgagctgaagctgcagaagtggtacggggacctgcggggaaagcccttcgccatcgaagccgagaacagcatcctggacatcagcggcttcagcaagcagtacaactgtgccttcatctggcagaaggacggcgtgaagaagctgaacctgtacctgatcatcaactacttcaagggcggcaagctgcggttcaagaagatcaaacctgaagccttcgaagccaacagattctacaccgtgatcaacaaaaagagcggcgagatcgtgcccatggaggtgaacttcaacttcgacgaccccaacctgatcatcctgcctctggcctttggcaagagacagggcagagaattcatctggaacgacctgctgtccctggaaaccggcagcctgaagctggccaacggaagagtgatcgagaagacactgtacaacagaagaacccggcaggatgagcctgccctgttcgtggccctgaccttcgagcggcgggaggtcctggactcctccaatatcaaaccaatgaacctgatcggcgtggcaagaggcgaaaacatccccgccgtgatcgccctgaccgaccccgagggctgcccactgagccggtttaaggatagcctgggaaacccaacccacatcctgagaatcggcgagagctataaggagaagcagcggaccatccaggccaagaaggaggtggagcagcggagagccggcggctacagccggaagtacgccagcaaagccaagaatctggcagacgatatggtgagaaacaccgctagagatctgctgtactacgccgtgacccaggatgccatgctgatcttcgccaacctgagccggggcttcggccggcagggcaagcggaccttcatggccgagagacagtacacacggatggaggactggctgaccgccaagctggcctacgagggcctgagcaagacctacctgtccaagacactggcccagtacacctccaagacatgcagcaactgtgggtttaccatcaccagcgccgactacgacagggtgctggagaagctgaagaagacagcaacaggctggatgaccacaattaacggcaaggagctgaaggtggagggccagattacctactacaacagatacaagagacagaacgtagtcaaggacctgtccgtcgagctggatagactgagcgaagaatctgtgaacaacgacatctcctcctggacaaagggcagaagcggagaagctctgagcctcctgaagaaaagattctcccatagacccgtgcaggagaagttcgtgtgcctgaactgcggcttcgagacacacgcagccgagcaagccgccctgaacatcgccagatcctggctgttcctgcggagccaggagtacaagaaataccagacaaacaagacaaccggcaacaccgataagagagccttcgtcgagacctggcagtccttttaccggaagaagcttaaggaggtgtggaaacctgccgtgcggtctggcggatctggcggaggctccaccagccccaagaaaaagagaaaagtctaagctgccttctgcggggcttgccttctggccatgcccttcttctctcccttgcacctgtacctcttggtctttgaataaagcctgagtaggaaggctagcaaaaaaaaaaaaaaaaaaaaaaaaaaaaaaaaaaaaaaaaaaaaaaaaaaaaaaaaaaaaaaaaaaaaaaaaaaaaaaaa

SEQ ID NO: 10106 - RNA, 8787 nt, synthetic construct
  source 1..8787: mol_type = other RNA
aggaaataagagagaaaagaagagtaagaagaaatataagagccaccatggcccctaagaagaagcgtaaagtgagccggatgaaccacgaccaggagttcgacccccctaaggtgtaccctcccgtccccgccgagaagagaaagcccatccgggtcctgagcctgttcgatggcatcgccaccggtctgctggtgctgaaggacctgggcatccaggtggataggtacattgcctccgaggtgtgcgaggactccatcaccgtgggaatggtgcgtcatcagggcaagatcatgtacgtgggcgacgtgcggagcgtgacacagaagcatatccaggagtggggccctttcgacctggtgatcggcggcagcccttgcaatgacctgagcatcgtgaacccagcccggaagggcctgtacgagggaaccggcagactgttcttcgagttttacagactgctgcacgacgcccggcctaaggaaggcgacgaccggcccttcttttggctgttcgagaatgtggtggccatgggagtcagcgacaagcgggatattagccggttcctggagagcaaccccgtgatgatcgatgccaaggaagtgagcgccgcccaccgggccagatacttctggggcaatctgcctggcatgaacagacccctggccagcaccgtgaacgacaagctggagctgcaggagtgcctggagcacggccggatcgccaagttcagcaaggtgagaaccatcaccacccgaagcaacagcatcaaacaaggcaaggaccagcactttcctgtgttcatgaacgagaaggaggacatcctgtggtgtaccgagatggagagagtgttcgggttcccagtccactacacagatgtcagcaacatgtctagactggccagacagagactgctgggaagaagctggtccgtccctgtgatcagacacctgttcgcccctctgaaggagtacttcgcctgcgtgagcagcggcaacagcaacgccaacagccggggccccagcttctctagcggcctggtgccactgtccctgagagggagccacatgggccccatggagatctacaaaaccgtgagcgcctggaagcggcagcctgtgcgcgtgctgagcctgtttcggaatatcgataaagtcctgaaaagcctgggattcctggagagcggctctggctccggcggtggcaccctgaagtacgtggaggatgtgacaaacgtggtcagacgggatgtggagaagtggggccccttcgatctggtgtacggcagcacccaacccctgggcagctcttgtgaccggtgccctggctggtacatgtttcagttccaccggatcctgcagtacgccctgccgagacaggagtcccagcggccattcttttggattttcatggacaacttgctgctgaccgaggatgaccaggaaactaccactcggttcctgcagaccgaagccgtgaccctgcaggacgtgagaggccgggactaccagaacgccatgcgggtgtggtccaacatccctggactgaaaagcaagcacgcacctctgacccctaaagaagaggagtacctgcaggcccaggtgcggagcagaagcaagctggacgcccctaaggtggatctgctggtgaagaattgcctcctgcccctgagagagtacttcaagtatttcagccagaatagtctgcccctgggaggcagcggcggcggcagccagggcagcgtgaccttcagggacgtggccgtggacttcagcagggaggagtgggagtggctgcagcccgcccagagggacctgtacaggcacgtgatgctggagaactacggccacctggtgagcctgggcctgaacatcagcaagccccacgtggtgagcctgctggagcagggcaaggagccctggctgggcaaggacgccagcaggggcctgttcagcgccagcgagagcaacggcggcggcccaagcagcggcgcccctcctcccagcggcggcaggcggcccaagcagcggcgcccctcctcccagcggcggcagcccagccggctccccaacctctaccgaggagggcacctctgagtccgccacccccgagagcggccctggcacctccaccgagcccagcgagggcagcgcacccggcagccctgccggcagccccacctccacagaggagggaaccagcaccgagcccagcgaaggcagcgccccaggcaccagcaccgagcctagtgagcaggagattaaacggatcaacaagatcagaagaagacttgtgaaagacagcaacaccaagaaggccggcaagacaggccccatgaaaaccctgctggttagagtgatgacacccgatctgagagagcggctggaaaacctgagaaagaagcctgaaaatatcccccagcccatcagcaatacatctagagccaacctgaataagctgctgaccgattacaccgaaatgaagaaggcgatcctgcatgtgtactgggaagagttccagaaggaccctgtgggcctgatgagccgggtggcccagcctgccagcaagaagatcgatcagaacaagctgaaacctgagatggacgagaagggcaacctgaccaccgccggctttgcctgctctcagtgtggccagcccctgttcgtgtacaagctggagcaggtgtctgagaagggcaaggcttacaccaactacttcggacggtgcaatgtggccgagcacgaaaagctgatcctgctggcccagctgaagcccgagaaggatagcgacgaagccgtgacatatagcctgggaaagtttgggcagagggccctggatttctacagcattcatgtgaccaaggagtccacccaccccgtgaagcccctggcccagatcgccggaaacagatacgcctccggacctgtgggaaaggccctgagcgacgcatgtatgggcacaatcgcctccttcctgtctaagtaccaggacatcatcatcgaacaccagaaggtggtgaagggcaaccagaagagactggagagcctgcgggagctggccggcaaggaaaacctggaataccctagcgtgaccctgccacctcagcctcacaccaaggagggcgttgatgcctacaacgaagtgatcgcccgggtgcgaatgtgggtgaacctgaacctgtggcagaagctgaagctaagcagagatgatgccaagcctctgctgagactgaagggattcccttcctttcctctggtcgagagacaggccaacgaagtggactggtgggacatggtgtgtaacgtgaagaagctgatcaacgagaaaaaggaggatggcaaggtgttttggcagaatctggctggctacaagagacaggaagccctgagaccatacctgagcagcgaggaagatcggaagaagggaaagaaattcgctcggtaccagctgggcgacctgctgctgcacctggaaaagaagcacggcgaggactggggaaaggtgtacgacgaggcctgggagcggattgacaagaaagtggaaggcctgagcaagcacatcaagctggaagaggaacggagaagcgaggacgcccagagcaaggccgccctgaccgactggctgcgggctaaggccagcttcgtgatcgagggcctgaaggaggccgacaaggacgagttctgcagatgcgagctgaagctgcagaagtggtacggggacctgcggggaaagcccttcgccatcgaagccgagaacagcatcctggacatcagcggcttcagcaagcagtacaactgtgccttcatctggcagaaggacggcgtgaagaagctgaacctgtacctgatcatcaactacttcaagggcggcaagctgcggttcaagaagatcaaacctgaagccttcgaagccaacagattctacaccgtgatcaacaaaaagagcggcgagatcgtgcccatggaggtgaacttcaacttcgacgaccccaacctgatcatcctgcctctggcctttggcaagagacagggcagagaattcatctggaacgacctgctgtccctggaaaccggcagcctgaagctggccaacggaagagtgatcgagaagacactgtacaacagaagaacccggcaggatgagcctgccctgttcgtggccctgaccttcgagcggcgggaggtcctggactcctccaatatcaaaccaatgaacctgatcggcgtggcaagaggcgaaaacatccccgccgtgatcgccctgaccgaccccgagggctgcccactgagccggtttaaggatagcctgggaaacccaacccacatcctgagaatcggcgagagctataaggagaagcagcggaccatccaggccaagaaggaggtggagcagcggagagccggcggctacagccggaagtacgccagcaaagccaagaatctggcagacgatatggtgagaaacaccgctagagatctgctgtactacgccgtgacccaggatgccatgctgatcttcgccaacctgagccggggcttcggccggcagggcaagcggaccttcatggccgagagacagtacacacggatggaggactggctgaccgccaagctggcctacgagggcctgagcaagacctacctgtccaagacactggcccagtacacctccaagacatgcagcaactgtgggtttaccatcaccagcgccgactacgacagggtgctggagaagctgaagaagacagcaacaggctggatgaccacaattaacggcaaggagctgaaggtggagggccagattacctactacaacagatacaagagacagaacgtagtcaaggacctgtccgtcgagctggatagactgagcgaagaatctgtgaacaacgacatctcctcctggacaaagggcagaagcggagaagctctgagcctcctgaagaaaagattctcccatagacccgtgcaggagaagttcgtgtgcctgaactgcggcttcgagacacacgcagccgagcaagccgccctgaacatcgccagatcctggctgttcctgcggagccaggagtacaagaaataccagacaaacaagacaaccggcaacaccgataagagagccttcgtcgagacctggcagtccttttaccggaagaagcttaaggaggtgtggaaacctgccgtgcggtctggcggatctggcggaggctccaccagccccaagaaaaagagaaaagtctaagctgccttctgcggggcttgccttctggccatgcccttcttctctcccttgcacctgtacctcttggtctttgaataaagcctgagtaggaaggctagcaaaaaaaaaaaaaaaaaaaaaaaaaaaaaaaaaaaaaaaaaaaaaaaaaaaaaaaaaaaaaaaaaaaaaaaaaaaaaaaagcccagccggctccccaacctctaccgaggagggcacctctgagtccgccacccccgagagcggccctggcacctccaccgagcccagcgagggcagcgcacccggcagccctgccggcagccccacctccacagaggagggaaccagcaccgagcccagcgaaggcagcgccccaggcaccagcaccgagcctagtgagcaggagattaaacggatcaacaagatcagaagaagacttgtgaaagacagcaacaccaagaaggccggcaagacaggccccatgaaaaccctgctggttagagtgatgacacccgatctgagagagcggctggaaaacctgagaaagaagcctgaaaatatcccccagcccatcagcaatacatctagagccaacctgaataagctgctgaccgattacaccgaaatgaagaaggcgatcctgcatgtgtactgggaagagttccagaaggaccctgtgggcctgatgagccgggtggcccagcctgccagcaagaagatcgatcagaacaagctgaaacctgagatggacgagaagggcaacctgaccaccgccggctttgcctgctctcagtgtggccagcccctgttcgtgtacaagctggagcaggtgtctgagaagggcaaggcttacaccaactacttcggacggtgcaatgtggccgagcacgaaaagctgatcctgctggcccagctgaagcccgagaaggatagcgacgaagccgtgacatatagcctgggaaagtttgggcagagggccctggatttctacagcattcatgtgaccaaggagtccacccaccccgtgaagcccctggcccagatcgccggaaacagatacgcctccggacctgtgggaaaggccctgagcgacgcatgtatgggcacaatcgcctccttcctgtctaagtaccaggacatcatcatcgaacaccagaaggtggtgaagggcaaccagaagagactggagagcctgcgggagctggccggcaaggaaaacctggaataccctagcgtgaccctgccacctcagcctcacaccaaggagggcgttgatgcctacaacgaagtgatcgcccgggtgcgaatgtgggtgaacctgaacctgtggcagaagctgaagctaagcagagatgatgccaagcctctgctgagactgaagggattcccttcctttcctctggtcgagagacaggccaacgaagtggactggtgggacatggtgtgtaacgtgaagaagctgatcaacgagaaaaaggaggatggcaaggtgttttggcagaatctggctggctacaagagacaggaagccctgagaccatacctgagcagcgaggaagatcggaagaagggaaagaaattcgctcggtaccagctgggcgacctgctgctgcacctggaaaagaagcacggcgaggactggggaaaggtgtacgacgaggcctgggagcggattgacaagaaagtggaaggcctgagcaagcacatcaagctggaagaggaacggagaagcgaggacgcccagagcaaggccgccctgaccgactggctgcgggctaaggccagcttcgtgatcgagggcctgaaggaggccgacaaggacgagttctgcagatgcgagctgaagctgcagaagtggtacggggacctgcggggaaagcccttcgccatcgaagccgagaacagcatcctggacatcagcggcttcagcaagcagtacaactgtgccttcatctggcagaaggacggcgtgaagaagctgaacctgtacctgatcatcaactacttcaagggcggcaagctgcggttcaagaagatcaaacctgaagccttcgaagccaacagattctacaccgtgatcaacaaaaagagcggcgagatcgtgcccatggaggtgaacttcaacttcgacgaccccaacctgatcatcctgcctctggcctttggcaagagacagggcagagaattcatctggaacgacctgctgtccctggaaaccggcagcctgaagctggccaacggaagagtgatcgagaagacactgtacaacagaagaacccggcaggatgagcctgccctgttcgtggccctgaccttcgagcggcgggaggtcctggactcctccaatatcaaaccaatgaacctgatcggcgtggcaagaggcgaaaacatccccgccgtgatcgccctgaccgaccccgagggctgcccactgagccggtttaaggatagcctgggaaacccaacccacatcctgagaatcggcgagagctataaggagaagcagcggaccatccaggccaagaaggaggtggagcagcggagagccggcggctacagccggaagtacgccagcaaagccaagaatctggcagacgatatggtgagaaacaccgctagagatctgctgtactacgccgtgacccaggatgccatgctgatcttcgccaacctgagccggggcttcggccggcagggcaagcggaccttcatggccgagagacagtacacacggatggaggactggctgaccgccaagctggcctacgagggcctgagcaagacctacctgtccaagacactggcccagtacacctccaagacatgcagcaactgtgggtttaccatcaccagcgccgactacgacagggtgctggagaagctgaagaagacagcaacaggctggatgaccacaattaacggcaaggagctgaaggtggagggccagattacctactacaacagatacaagagacagaacgtagtcaaggacctgtccgtcgagctggatagactgagcgaagaatctgtgaacaacgacatctcctcctggacaaagggcagaagcggagaagctctgagcctcctgaagaaaagattctcccatagacccgtgcaggagaagttcgtgtgcctgaactgcggcttcgagacacacgcagccgagcaagccgccctgaacatcgccagatcctggctgttcctgcggagccaggagtacaagaaataccagacaaacaagacaaccggcaacaccgataagagagccttcgtcgagacctggcagtccttttaccggaagaagcttaaggaggtgtggaaacctgccgtgcggtctggcggatctggcggaggctccaccagccccaagaaaaagagaaaagtctaagctgccttctgcggggcttgccttctggccatgcccttcttctctcccttgcacctgtacctcttggtctttgaataaagcctgagtaggaaggctagcaaaaaaaaaaaaaaaaaaaaaaaaaaaaaaaaaaaaaaaaaaaaaaaaaaaaaaaaaaaaaaaaaaaaaaaaaaaaaaaa

SEQ ID NO: 10107 - RNA, 8787 nt, synthetic construct
  source 1..8787: mol_type = other RNA
aggaaataagagagaaaagaagagtaagaagaaatataagagccaccatggcccctaagaagaagcgtaaagtgagccggatgaaccacgaccaggagttcgacccccctaaggtgtaccctcccgtccccgccgagaagagaaagcccatccgggtcctgagcctgttcgatggcatcgccaccggtctgctggtgctgaaggacctgggcatccaggtggataggtacattgcctccgaggtgtgcgaggactccatcaccgtgggaatggtgcgtcatcagggcaagatcatgtacgtgggcgacgtgcggagcgtgacacagaagcatatccaggagtggggccctttcgacctggtgatcggcggcagcccttgcaatgacctgagcatcgtgaacccagcccggaagggcctgtacgagggaaccggcagactgttcttcgagttttacagactgctgcacgacgcccggcctaaggaaggcgacgaccggcccttcttttggctgttcgagaatgtggtggccatgggagtcagcgacaagcgggatattagccggttcctggagagcaaccccgtgatgatcgatgccaaggaagtgagcgccgcccaccgggccagatacttctggggcaatctgcctggcatgaacagacccctggccagcaccgtgaacgacaagctggagctgcaggagtgcctggagcacggccggatcgccaagttcagcaaggtgagaaccatcaccacccgaagcaacagcatcaaacaaggcaaggaccagcactttcctgtgttcatgaacgagaaggaggacatcctgtggtgtaccgagatggagagagtgttcgggttcccagtccactacacagatgtcagcaacatgtctagactggccagacagagactgctgggaagaagctggtccgtccctgtgatcagacacctgttcgcccctctgaaggagtacttcgcctgcgtgagcagcggcaacagcaacgccaacagccggggccccagcttctctagcggcctggtgccactgtccctgagagggagccacatgggccccatggagatctacaaaaccgtgagcgcctggaagcggcagcctgtgcgcgtgctgagcctgtttcggaatatcgataaagtcctgaaaagcctgggattcctggagagcggctctggctccggcggtggcaccctgaagtacgtggaggatgtgacaaacgtggtcagacgggatgtggagaagtggggccccttcgatctggtgtacggcagcacccaacccctgggcagctcttgtgaccggtgccctggctggtacatgtttcagttccaccggatcctgcagtacgccctgccgagacaggagtcccagcggccattcttttggattttcatggacaacttgctgctgaccgaggatgaccaggaaactaccactcggttcctgcagaccgaagccgtgaccctgcaggacgtgagaggccgggactaccagaacgccatgcgggtgtggtccaacatccctggactgaaaagcaagcacgcacctctgacccctaaagaagaggagtacctgcaggcccaggtgcggagcagaagcaagctggacgcccctaaggtggatctgctggtgaagaattgcctcctgcccctgagagagtacttcaagtatttcagccagaatagtctgcccctgggaggcagcggcggcggcatggccgccggccagagggaggccaggccccaggtgagcctgaccttcgaggacgtggccgtgctgttcaccagggacgagtggaggaagctggcccccagccagaggaacctgtacagggacgtgatgctggagaactacaggaacctggtgagcctgggcctgcccttcaccaagcccaaggtgatcagcctgctgcagcagggcgaggacccctggaaggtggagaaggacagcagcggcggcggcccaagcagcggcgcccctcctcccagcggcggcaggcggcccaagcagcggcgcccctcctcccagcggcggcagcccagccggctccccaacctctaccgaggagggcacctctgagtccgccacccccgagagcggccctggcacctccaccgagcccagcgagggcagcgcacccggcagccctgccggcagccccacctccacagaggagggaaccagcaccgagcccagcgaaggcagcgccccaggcaccagcaccgagcctagtgagcaggagattaaacggatcaacaagatcagaagaagacttgtgaaagacagcaacaccaagaaggccggcaagacaggccccatgaaaaccctgctggttagagtgatgacacccgatctgagagagcggctggaaaacctgagaaagaagcctgaaaatatcccccagcccatcagcaatacatctagagccaacctgaataagctgctgaccgattacaccgaaatgaagaaggcgatcctgcatgtgtactgggaagagttccagaaggaccctgtgggcctgatgagccgggtggcccagcctgccagcaagaagatcgatcagaacaagctgaaacctgagatggacgagaagggcaacctgaccaccgccggctttgcctgctctcagtgtggccagcccctgttcgtgtacaagctggagcaggtgtctgagaagggcaaggcttacaccaactacttcggacggtgcaatgtggccgagcacgaaaagctgatcctgctggcccagctgaagcccgagaaggatagcgacgaagccgtgacatatagcctgggaaagtttgggcagagggccctggatttctacagcattcatgtgaccaaggagtccacccaccccgtgaagcccctggcccagatcgccggaaacagatacgcctccggacctgtgggaaaggccctgagcgacgcatgtatgggcacaatcgcctccttcctgtctaagtaccaggacatcatcatcgaacaccagaaggtggtgaagggcaaccagaagagactggagagcctgcgggagctggccggcaaggaaaacctggaataccctagcgtgaccctgccacctcagcctcacaccaaggagggcgttgatgcctacaacgaagtgatcgcccgggtgcgaatgtgggtgaacctgaacctgtggcagaagctgaagctaagcagagatgatgccaagcctctgctgagactgaagggattcccttcctttcctctggtcgagagacaggccaacgaagtggactggtgggacatggtgtgtaacgtgaagaagctgatcaacgagaaaaaggaggatggcaaggtgttttggcagaatctggctggctacaagagacaggaagccctgagaccatacctgagcagcgaggaagatcggaagaagggaaagaaattcgctcggtaccagctgggcgacctgctgctgcacctggaaaagaagcacggcgaggactggggaaaggtgtacgacgaggcctgggagcggattgacaagaaagtggaaggcctgagcaagcacatcaagctggaagaggaacggagaagcgaggacgcccagagcaaggccgccctgaccgactggctgcgggctaaggccagcttcgtgatcgagggcctgaaggaggccgacaaggacgagttctgcagatgcgagctgaagctgcagaagtggtacggggacctgcggggaaagcccttcgccatcgaagccgagaacagcatcctggacatcagcggcttcagcaagcagtacaactgtgccttcatctggcagaaggacggcgtgaagaagctgaacctgtacctgatcatcaactacttcaagggcggcaagctgcggttcaagaagatcaaacctgaagccttcgaagccaacagattctacaccgtgatcaacaaaaagagcggcgagatcgtgcccatggaggtgaacttcaacttcgacgaccccaacctgatcatcctgcctctggcctttggcaagagacagggcagagaattcatctggaacgacctgctgtccctggaaaccggcagcctgaagctggccaacggaagagtgatcgagaagacactgtacaacagaagaacccggcaggatgagcctgccctgttcgtggccctgaccttcgagcggcgggaggtcctggactcctccaatatcaaaccaatgaacctgatcggcgtggcaagaggcgaaaacatccccgccgtgatcgccctgaccgaccccgagggctgcccactgagccggtttaaggatagcctgggaaacccaacccacatcctgagaatcggcgagagctataaggagaagcagcggaccatccaggccaagaaggaggtggagcagcggagagccggcggctacagccggaagtacgccagcaaagccaagaatctggcagacgatatggtgagaaacaccgctagagatctgctgtactacgccgtgacccaggatgccatgctgatcttcgccaacctgagccggggcttcggccggcagggcaagcggaccttcatggccgagagacagtacacacggatggaggactggctgaccgccaagctggcctacgagggcctgagcaagacctacctgtccaagacactggcccagtacacctccaagacatgcagcaactgtgggtttaccatcaccagcgccgactacgacagggtgctggagaagctgaagaagacagcaacaggctggatgaccacaattaacggcaaggagctgaaggtggagggccagattacctactacaacagatacaagagacagaacgtagtcaaggacctgtccgtcgagctggatagactgagcgaagaatctgtgaacaacgacatctcctcctggacaaagggcagaagcggagaagctctgagcctcctgaagaaaagattctcccatagacccgtgcaggagaagttcgtgtgcctgaactgcggcttcgagacacacgcagccgagcaagccgccctgaacatcgccagatcctggctgttcctgcggagccaggagtacaagaaataccagacaaacaagacaaccggcaacaccgataagagagccttcgtcgagacctggcagtccttttaccggaagaagcttaaggaggtgtggaaacctgccgtgcggtctggcggatctggcggaggctccaccagccccaagaaaaagagaaaagtctaagctgccttctgcggggcttgccttctggccatgcccttcttctctcccttgcacctgtacctcttggtctttgaataaagcctgagtaggaaggctagcaaaaaaaaaaaaaaaaaaaaaaaaaaaaaaaaaaaaaaaaaaaaaaaaaaaaaaaaaaaaaaaaaaaaaaaaaaaaaaaagcccagccggctccccaacctctaccgaggagggcacctctgagtccgccacccccgagagcggccctggcacctccaccgagcccagcgagggcagcgcacccggcagccctgccggcagccccacctccacagaggagggaaccagcaccgagcccagcgaaggcagcgccccaggcaccagcaccgagcctagtgagcaggagattaaacggatcaacaagatcagaagaagacttgtgaaagacagcaacaccaagaaggccggcaagacaggccccatgaaaaccctgctggttagagtgatgacacccgatctgagagagcggctggaaaacctgagaaagaagcctgaaaatatcccccagcccatcagcaatacatctagagccaacctgaataagctgctgaccgattacaccgaaatgaagaaggcgatcctgcatgtgtactgggaagagttccagaaggaccctgtgggcctgatgagccgggtggcccagcctgccagcaagaagatcgatcagaacaagctgaaacctgagatggacgagaagggcaacctgaccaccgccggctttgcctgctctcagtgtggccagcccctgttcgtgtacaagctggagcaggtgtctgagaagggcaaggcttacaccaactacttcggacggtgcaatgtggccgagcacgaaaagctgatcctgctggcccagctgaagcccgagaaggatagcgacgaagccgtgacatatagcctgggaaagtttgggcagagggccctggatttctacagcattcatgtgaccaaggagtccacccaccccgtgaagcccctggcccagatcgccggaaacagatacgcctccggacctgtgggaaaggccctgagcgacgcatgtatgggcacaatcgcctccttcctgtctaagtaccaggacatcatcatcgaacaccagaaggtggtgaagggcaaccagaagagactggagagcctgcgggagctggccggcaaggaaaacctggaataccctagcgtgaccctgccacctcagcctcacaccaaggagggcgttgatgcctacaacgaagtgatcgcccgggtgcgaatgtgggtgaacctgaacctgtggcagaagctgaagctaagcagagatgatgccaagcctctgctgagactgaagggattcccttcctttcctctggtcgagagacaggccaacgaagtggactggtgggacatggtgtgtaacgtgaagaagctgatcaacgagaaaaaggaggatggcaaggtgttttggcagaatctggctggctacaagagacaggaagccctgagaccatacctgagcagcgaggaagatcggaagaagggaaagaaattcgctcggtaccagctgggcgacctgctgctgcacctggaaaagaagcacggcgaggactggggaaaggtgtacgacgaggcctgggagcggattgacaagaaagtggaaggcctgagcaagcacatcaagctggaagaggaacggagaagcgaggacgcccagagcaaggccgccctgaccgactggctgcgggctaaggccagcttcgtgatcgagggcctgaaggaggccgacaaggacgagttctgcagatgcgagctgaagctgcagaagtggtacggggacctgcggggaaagcccttcgccatcgaagccgagaacagcatcctggacatcagcggcttcagcaagcagtacaactgtgccttcatctggcagaaggacggcgtgaagaagctgaacctgtacctgatcatcaactacttcaagggcggcaagctgcggttcaagaagatcaaacctgaagccttcgaagccaacagattctacaccgtgatcaacaaaaagagcggcgagatcgtgcccatggaggtgaacttcaacttcgacgaccccaacctgatcatcctgcctctggcctttggcaagagacagggcagagaattcatctggaacgacctgctgtccctggaaaccggcagcctgaagctggccaacggaagagtgatcgagaagacactgtacaacagaagaacccggcaggatgagcctgccctgttcgtggccctgaccttcgagcggcgggaggtcctggactcctccaatatcaaaccaatgaacctgatcggcgtggcaagaggcgaaaacatccccgccgtgatcgccctgaccgaccccgagggctgcccactgagccggtttaaggatagcctgggaaacccaacccacatcctgagaatcggcgagagctataaggagaagcagcggaccatccaggccaagaaggaggtggagcagcggagagccggcggctacagccggaagtacgccagcaaagccaagaatctggcagacgatatggtgagaaacaccgctagagatctgctgtactacgccgtgacccaggatgccatgctgatcttcgccaacctgagccggggcttcggccggcagggcaagcggaccttcatggccgagagacagtacacacggatggaggactggctgaccgccaagctggcctacgagggcctgagcaagacctacctgtccaagacactggcccagtacacctccaagacatgcagcaactgtgggtttaccatcaccagcgccgactacgacagggtgctggagaagctgaagaagacagcaacaggctggatgaccacaattaacggcaaggagctgaaggtggagggccagattacctactacaacagatacaagagacagaacgtagtcaaggacctgtccgtcgagctggatagactgagcgaagaatctgtgaacaacgacatctcctcctggacaaagggcagaagcggagaagctctgagcctcctgaagaaaagattctcccatagacccgtgcaggagaagttcgtgtgcctgaactgcggcttcgagacacacgcagccgagcaagccgccctgaacatcgccagatcctggctgttcctgcggagccaggagtacaagaaataccagacaaacaagacaaccggcaacaccgataagagagccttcgtcgagacctggcagtccttttaccggaagaagcttaaggaggtgtggaaacctgccgtgcggtctggcggatctggcggaggctccaccagccccaagaaaaagagaaaagtctaagctgccttctgcggggcttgccttctggccatgcccttcttctctcccttgcacctgtacctcttggtctttgaataaagcctgagtaggaaggctagcaaaaaaaaaaaaaaaaaaaaaaaaaaaaaaaaaaaaaaaaaaaaaaaaaaaaaaaaaaaaaaaaaaaaaaaaaaaaaaaa

SEQ ID NO: 10108 - RNA, 8787 nt, synthetic construct
  source 1..8787: mol_type = other RNA
aggaaataagagagaaaagaagagtaagaagaaatataagagccaccatggcccctaagaagaagcgtaaagtgagccggatgaaccacgaccaggagttcgacccccctaaggtgtaccctcccgtccccgccgagaagagaaagcccatccgggtcctgagcctgttcgatggcatcgccaccggtctgctggtgctgaaggacctgggcatccaggtggataggtacattgcctccgaggtgtgcgaggactccatcaccgtgggaatggtgcgtcatcagggcaagatcatgtacgtgggcgacgtgcggagcgtgacacagaagcatatccaggagtggggccctttcgacctggtgatcggcggcagcccttgcaatgacctgagcatcgtgaacccagcccggaagggcctgtacgagggaaccggcagactgttcttcgagttttacagactgctgcacgacgcccggcctaaggaaggcgacgaccggcccttcttttggctgttcgagaatgtggtggccatgggagtcagcgacaagcgggatattagccggttcctggagagcaaccccgtgatgatcgatgccaaggaagtgagcgccgcccaccgggccagatacttctggggcaatctgcctggcatgaacagacccctggccagcaccgtgaacgacaagctggagctgcaggagtgcctggagcacggccggatcgccaagttcagcaaggtgagaaccatcaccacccgaagcaacagcatcaaacaaggcaaggaccagcactttcctgtgttcatgaacgagaaggaggacatcctgtggtgtaccgagatggagagagtgttcgggttcccagtccactacacagatgtcagcaacatgtctagactggccagacagagactgctgggaagaagctggtccgtccctgtgatcagacacctgttcgcccctctgaaggagtacttcgcctgcgtgagcagcggcaacagcaacgccaacagccggggccccagcttctctagcggcctggtgccactgtccctgagagggagccacatgggccccatggagatctacaaaaccgtgagcgcctggaagcggcagcctgtgcgcgtgctgagcctgtttcggaatatcgataaagtcctgaaaagcctgggattcctggagagcggctctggctccggcggtggcaccctgaagtacgtggaggatgtgacaaacgtggtcagacgggatgtggagaagtggggccccttcgatctggtgtacggcagcacccaacccctgggcagctcttgtgaccggtgccctggctggtacatgtttcagttccaccggatcctgcagtacgccctgccgagacaggagtcccagcggccattcttttggattttcatggacaacttgctgctgaccgaggatgaccaggaaactaccactcggttcctgcagaccgaagccgtgaccctgcaggacgtgagaggccgggactaccagaacgccatgcgggtgtggtccaacatccctggactgaaaagcaagcacgcacctctgacccctaaagaagaggagtacctgcaggcccaggtgcggagcagaagcaagctggacgcccctaaggtggatctgctggtgaagaattgcctcctgcccctgagagagtacttcaagtatttcagccagaatagtctgcccctgggaggcagcggcggcggcagcagccagaccctgctgaccttcagggacgtggccatcgagttcagccaggaggagtggggctgcctgaaccacagccagagggagctgtacagggacgtgatgctggagacctacggccacctgctgttcctgggcctggtgagcaagcccgacctggtgatcgtgctggagcagaagaaggagctgtggggcgtgaagaggaaggagaccgtggccagccaccccgccgtgagcagccagggcggcccaagcagcggcgcccctcctcccagcggcggcaggcggcccaagcagcggcgcccctcctcccagcggcggcagcccagccggctccccaacctctaccgaggagggcacctctgagtccgccacccccgagagcggccctggcacctccaccgagcccagcgagggcagcgcacccggcagccctgccggcagccccacctccacagaggagggaaccagcaccgagcccagcgaaggcagcgccccaggcaccagcaccgagcctagtgagcaggagattaaacggatcaacaagatcagaagaagacttgtgaaagacagcaacaccaagaaggccggcaagacaggccccatgaaaaccctgctggttagagtgatgacacccgatctgagagagcggctggaaaacctgagaaagaagcctgaaaatatcccccagcccatcagcaatacatctagagccaacctgaataagctgctgaccgattacaccgaaatgaagaaggcgatcctgcatgtgtactgggaagagttccagaaggaccctgtgggcctgatgagccgggtggcccagcctgccagcaagaagatcgatcagaacaagctgaaacctgagatggacgagaagggcaacctgaccaccgccggctttgcctgctctcagtgtggccagcccctgttcgtgtacaagctggagcaggtgtctgagaagggcaaggcttacaccaactacttcggacggtgcaatgtggccgagcacgaaaagctgatcctgctggcccagctgaagcccgagaaggatagcgacgaagccgtgacatatagcctgggaaagtttgggcagagggccctggatttctacagcattcatgtgaccaaggagtccacccaccccgtgaagcccctggcccagatcgccggaaacagatacgcctccggacctgtgggaaaggccctgagcgacgcatgtatgggcacaatcgcctccttcctgtctaagtaccaggacatcatcatcgaacaccagaaggtggtgaagggcaaccagaagagactggagagcctgcgggagctggccggcaaggaaaacctggaataccctagcgtgaccctgccacctcagcctcacaccaaggagggcgttgatgcctacaacgaagtgatcgcccgggtgcgaatgtgggtgaacctgaacctgtggcagaagctgaagctaagcagagatgatgccaagcctctgctgagactgaagggattcccttcctttcctctggtcgagagacaggccaacgaagtggactggtgggacatggtgtgtaacgtgaagaagctgatcaacgagaaaaaggaggatggcaaggtgttttggcagaatctggctggctacaagagacaggaagccctgagaccatacctgagcagcgaggaagatcggaagaagggaaagaaattcgctcggtaccagctgggcgacctgctgctgcacctggaaaagaagcacggcgaggactggggaaaggtgtacgacgaggcctgggagcggattgacaagaaagtggaaggcctgagcaagcacatcaagctggaagaggaacggagaagcgaggacgcccagagcaaggccgccctgaccgactggctgcgggctaaggccagcttcgtgatcgagggcctgaaggaggccgacaaggacgagttctgcagatgcgagctgaagctgcagaagtggtacggggacctgcggggaaagcccttcgccatcgaagccgagaacagcatcctggacatcagcggcttcagcaagcagtacaactgtgccttcatctggcagaaggacggcgtgaagaagctgaacctgtacctgatcatcaactacttcaagggcggcaagctgcggttcaagaagatcaaacctgaagccttcgaagccaacagattctacaccgtgatcaacaaaaagagcggcgagatcgtgcccatggaggtgaacttcaacttcgacgaccccaacctgatcatcctgcctctggcctttggcaagagacagggcagagaattcatctggaacgacctgctgtccctggaaaccggcagcctgaagctggccaacggaagagtgatcgagaagacactgtacaacagaagaacccggcaggatgagcctgccctgttcgtggccctgaccttcgagcggcgggaggtcctggactcctccaatatcaaaccaatgaacctgatcggcgtggcaagaggcgaaaacatccccgccgtgatcgccctgaccgaccccgagggctgcccactgagccggtttaaggatagcctgggaaacccaacccacatcctgagaatcggcgagagctataaggagaagcagcggaccatccaggccaagaaggaggtggagcagcggagagccggcggctacagccggaagtacgccagcaaagccaagaatctggcagacgatatggtgagaaacaccgctagagatctgctgtactacgccgtgacccaggatgccatgctgatcttcgccaacctgagccggggcttcggccggcagggcaagcggaccttcatggccgagagacagtacacacggatggaggactggctgaccgccaagctggcctacgagggcctgagcaagacctacctgtccaagacactggcccagtacacctccaagacatgcagcaactgtgggtttaccatcaccagcgccgactacgacagggtgctggagaagctgaagaagacagcaacaggctggatgaccacaattaacggcaaggagctgaaggtggagggccagattacctactacaacagatacaagagacagaacgtagtcaaggacctgtccgtcgagctggatagactgagcgaagaatctgtgaacaacgacatctcctcctggacaaagggcagaagcggagaagctctgagcctcctgaagaaaagattctcccatagacccgtgcaggagaagttcgtgtgcctgaactgcggcttcgagacacacgcagccgagcaagccgccctgaacatcgccagatcctggctgttcctgcggagccaggagtacaagaaataccagacaaacaagacaaccggcaacaccgataagagagccttcgtcgagacctggcagtccttttaccggaagaagcttaaggaggtgtggaaacctgccgtgcggtctggcggatctggcggaggctccaccagccccaagaaaaagagaaaagtctaagctgccttctgcggggcttgccttctggccatgcccttcttctctcccttgcacctgtacctcttggtctttgaataaagcctgagtaggaaggctagcaaaaaaaaaaaaaaaaaaaaaaaaaaaaaaaaaaaaaaaaaaaaaaaaaaaaaaaaaaaaaaaaaaaaaaaaaaaaaaaagcccagccggctccccaacctctaccgaggagggcacctctgagtccgccacccccgagagcggccctggcacctccaccgagcccagcgagggcagcgcacccggcagccctgccggcagccccacctccacagaggagggaaccagcaccgagcccagcgaaggcagcgccccaggcaccagcaccgagcctagtgagcaggagattaaacggatcaacaagatcagaagaagacttgtgaaagacagcaacaccaagaaggccggcaagacaggccccatgaaaaccctgctggttagagtgatgacacccgatctgagagagcggctggaaaacctgagaaagaagcctgaaaatatcccccagcccatcagcaatacatctagagccaacctgaataagctgctgaccgattacaccgaaatgaagaaggcgatcctgcatgtgtactgggaagagttccagaaggaccctgtgggcctgatgagccgggtggcccagcctgccagcaagaagatcgatcagaacaagctgaaacctgagatggacgagaagggcaacctgaccaccgccggctttgcctgctctcagtgtggccagcccctgttcgtgtacaagctggagcaggtgtctgagaagggcaaggcttacaccaactacttcggacggtgcaatgtggccgagcacgaaaagctgatcctgctggcccagctgaagcccgagaaggatagcgacgaagccgtgacatatagcctgggaaagtttgggcagagggccctggatttctacagcattcatgtgaccaaggagtccacccaccccgtgaagcccctggcccagatcgccggaaacagatacgcctccggacctgtgggaaaggccctgagcgacgcatgtatgggcacaatcgcctccttcctgtctaagtaccaggacatcatcatcgaacaccagaaggtggtgaagggcaaccagaagagactggagagcctgcgggagctggccggcaaggaaaacctggaataccctagcgtgaccctgccacctcagcctcacaccaaggagggcgttgatgcctacaacgaagtgatcgcccgggtgcgaatgtgggtgaacctgaacctgtggcagaagctgaagctaagcagagatgatgccaagcctctgctgagactgaagggattcccttcctttcctctggtcgagagacaggccaacgaagtggactggtgggacatggtgtgtaacgtgaagaagctgatcaacgagaaaaaggaggatggcaaggtgttttggcagaatctggctggctacaagagacaggaagccctgagaccatacctgagcagcgaggaagatcggaagaagggaaagaaattcgctcggtaccagctgggcgacctgctgctgcacctggaaaagaagcacggcgaggactggggaaaggtgtacgacgaggcctgggagcggattgacaagaaagtggaaggcctgagcaagcacatcaagctggaagaggaacggagaagcgaggacgcccagagcaaggccgccctgaccgactggctgcgggctaaggccagcttcgtgatcgagggcctgaaggaggccgacaaggacgagttctgcagatgcgagctgaagctgcagaagtggtacggggacctgcggggaaagcccttcgccatcgaagccgagaacagcatcctggacatcagcggcttcagcaagcagtacaactgtgccttcatctggcagaaggacggcgtgaagaagctgaacctgtacctgatcatcaactacttcaagggcggcaagctgcggttcaagaagatcaaacctgaagccttcgaagccaacagattctacaccgtgatcaacaaaaagagcggcgagatcgtgcccatggaggtgaacttcaacttcgacgaccccaacctgatcatcctgcctctggcctttggcaagagacagggcagagaattcatctggaacgacctgctgtccctggaaaccggcagcctgaagctggccaacggaagagtgatcgagaagacactgtacaacagaagaacccggcaggatgagcctgccctgttcgtggccctgaccttcgagcggcgggaggtcctggactcctccaatatcaaaccaatgaacctgatcggcgtggcaagaggcgaaaacatccccgccgtgatcgccctgaccgaccccgagggctgcccactgagccggtttaaggatagcctgggaaacccaacccacatcctgagaatcggcgagagctataaggagaagcagcggaccatccaggccaagaaggaggtggagcagcggagagccggcggctacagccggaagtacgccagcaaagccaagaatctggcagacgatatggtgagaaacaccgctagagatctgctgtactacgccgtgacccaggatgccatgctgatcttcgccaacctgagccggggcttcggccggcagggcaagcggaccttcatggccgagagacagtacacacggatggaggactggctgaccgccaagctggcctacgagggcctgagcaagacctacctgtccaagacactggcccagtacacctccaagacatgcagcaactgtgggtttaccatcaccagcgccgactacgacagggtgctggagaagctgaagaagacagcaacaggctggatgaccacaattaacggcaaggagctgaaggtggagggccagattacctactacaacagatacaagagacagaacgtagtcaaggacctgtccgtcgagctggatagactgagcgaagaatctgtgaacaacgacatctcctcctggacaaagggcagaagcggagaagctctgagcctcctgaagaaaagattctcccatagacccgtgcaggagaagttcgtgtgcctgaactgcggcttcgagacacacgcagccgagcaagccgccctgaacatcgccagatcctggctgttcctgcggagccaggagtacaagaaataccagacaaacaagacaaccggcaacaccgataagagagccttcgtcgagacctggcagtccttttaccggaagaagcttaaggaggtgtggaaacctgccgtgcggtctggcggatctggcggaggctccaccagccccaagaaaaagagaaaagtctaagctgccttctgcggggcttgccttctggccatgcccttcttctctcccttgcacctgtacctcttggtctttgaataaagcctgagtaggaaggctagcaaaaaaaaaaaaaaaaaaaaaaaaaaaaaaaaaaaaaaaaaaaaaaaaaaaaaaaaaaaaaaaaaaaaaaaaaaaaaaaa

SEQ ID NO: 10109 - RNA, 8787 nt, synthetic construct
  source 1..8787: mol_type = other RNA
aggaaataagagagaaaagaagagtaagaagaaatataagagccaccatggcccctaagaagaagcgtaaagtgagccggatgaaccacgaccaggagttcgacccccctaaggtgtaccctcccgtccccgccgagaagagaaagcccatccgggtcctgagcctgttcgatggcatcgccaccggtctgctggtgctgaaggacctgggcatccaggtggataggtacattgcctccgaggtgtgcgaggactccatcaccgtgggaatggtgcgtcatcagggcaagatcatgtacgtgggcgacgtgcggagcgtgacacagaagcatatccaggagtggggccctttcgacctggtgatcggcggcagcccttgcaatgacctgagcatcgtgaacccagcccggaagggcctgtacgagggaaccggcagactgttcttcgagttttacagactgctgcacgacgcccggcctaaggaaggcgacgaccggcccttcttttggctgttcgagaatgtggtggccatgggagtcagcgacaagcgggatattagccggttcctggagagcaaccccgtgatgatcgatgccaaggaagtgagcgccgcccaccgggccagatacttctggggcaatctgcctggcatgaacagacccctggccagcaccgtgaacgacaagctggagctgcaggagtgcctggagcacggccggatcgccaagttcagcaaggtgagaaccatcaccacccgaagcaacagcatcaaacaaggcaaggaccagcactttcctgtgttcatgaacgagaaggaggacatcctgtggtgtaccgagatggagagagtgttcgggttcccagtccactacacagatgtcagcaacatgtctagactggccagacagagactgctgggaagaagctggtccgtccctgtgatcagacacctgttcgcccctctgaaggagtacttcgcctgcgtgagcagcggcaacagcaacgccaacagccggggccccagcttctctagcggcctggtgccactgtccctgagagggagccacatgggccccatggagatctacaaaaccgtgagcgcctggaagcggcagcctgtgcgcgtgctgagcctgtttcggaatatcgataaagtcctgaaaagcctgggattcctggagagcggctctggctccggcggtggcaccctgaagtacgtggaggatgtgacaaacgtggtcagacgggatgtggagaagtggggccccttcgatctggtgtacggcagcacccaacccctgggcagctcttgtgaccggtgccctggctggtacatgtttcagttccaccggatcctgcagtacgccctgccgagacaggagtcccagcggccattcttttggattttcatggacaacttgctgctgaccgaggatgaccaggaaactaccactcggttcctgcagaccgaagccgtgaccctgcaggacgtgagaggccgggactaccagaacgccatgcgggtgtggtccaacatccctggactgaaaagcaagcacgcacctctgacccctaaagaagaggagtacctgcaggcccaggtgcggagcagaagcaagctggacgcccctaaggtggatctgctggtgaagaattgcctcctgcccctgagagagtacttcaagtatttcagccagaatagtctgcccctgggaggcagcggcggcggctggaaggaggagctgagcttcgaggacgtggccgtgaacttcaccagggaggagtggaacaagctggactggacccagagggacctgtacagggacgtgatgctggagaactacaggaacatgatcctgctgggcttccagttccccaagcccgaggtgatctgccagctggagcagtgggaggacccctggatcctggacctgcccagggccggcaccaggaaggccagcagcaacgcctgcggcggcccaagcagcggcgcccctcctcccagcggcggcaggcggcccaagcagcggcgcccctcctcccagcggcggcagcccagccggctccccaacctctaccgaggagggcacctctgagtccgccacccccgagagcggccctggcacctccaccgagcccagcgagggcagcgcacccggcagccctgccggcagccccacctccacagaggagggaaccagcaccgagcccagcgaaggcagcgccccaggcaccagcaccgagcctagtgagcaggagattaaacggatcaacaagatcagaagaagacttgtgaaagacagcaacaccaagaaggccggcaagacaggccccatgaaaaccctgctggttagagtgatgacacccgatctgagagagcggctggaaaacctgagaaagaagcctgaaaatatcccccagcccatcagcaatacatctagagccaacctgaataagctgctgaccgattacaccgaaatgaagaaggcgatcctgcatgtgtactgggaagagttccagaaggaccctgtgggcctgatgagccgggtggcccagcctgccagcaagaagatcgatcagaacaagctgaaacctgagatggacgagaagggcaacctgaccaccgccggctttgcctgctctcagtgtggccagcccctgttcgtgtacaagctggagcaggtgtctgagaagggcaaggcttacaccaactacttcggacggtgcaatgtggccgagcacgaaaagctgatcctgctggcccagctgaagcccgagaaggatagcgacgaagccgtgacatatagcctgggaaagtttgggcagagggccctggatttctacagcattcatgtgaccaaggagtccacccaccccgtgaagcccctggcccagatcgccggaaacagatacgcctccggacctgtgggaaaggccctgagcgacgcatgtatgggcacaatcgcctccttcctgtctaagtaccaggacatcatcatcgaacaccagaaggtggtgaagggcaaccagaagagactggagagcctgcgggagctggccggcaaggaaaacctggaataccctagcgtgaccctgccacctcagcctcacaccaaggagggcgttgatgcctacaacgaagtgatcgcccgggtgcgaatgtgggtgaacctgaacctgtggcagaagctgaagctaagcagagatgatgccaagcctctgctgagactgaagggattcccttcctttcctctggtcgagagacaggccaacgaagtggactggtgggacatggtgtgtaacgtgaagaagctgatcaacgagaaaaaggaggatggcaaggtgttttggcagaatctggctggctacaagagacaggaagccctgagaccatacctgagcagcgaggaagatcggaagaagggaaagaaattcgctcggtaccagctgggcgacctgctgctgcacctggaaaagaagcacggcgaggactggggaaaggtgtacgacgaggcctgggagcggattgacaagaaagtggaaggcctgagcaagcacatcaagctggaagaggaacggagaagcgaggacgcccagagcaaggccgccctgaccgactggctgcgggctaaggccagcttcgtgatcgagggcctgaaggaggccgacaaggacgagttctgcagatgcgagctgaagctgcagaagtggtacggggacctgcggggaaagcccttcgccatcgaagccgagaacagcatcctggacatcagcggcttcagcaagcagtacaactgtgccttcatctggcagaaggacggcgtgaagaagctgaacctgtacctgatcatcaactacttcaagggcggcaagctgcggttcaagaagatcaaacctgaagccttcgaagccaacagattctacaccgtgatcaacaaaaagagcggcgagatcgtgcccatggaggtgaacttcaacttcgacgaccccaacctgatcatcctgcctctggcctttggcaagagacagggcagagaattcatctggaacgacctgctgtccctggaaaccggcagcctgaagctggccaacggaagagtgatcgagaagacactgtacaacagaagaacccggcaggatgagcctgccctgttcgtggccctgaccttcgagcggcgggaggtcctggactcctccaatatcaaaccaatgaacctgatcggcgtggcaagaggcgaaaacatccccgccgtgatcgccctgaccgaccccgagggctgcccactgagccggtttaaggatagcctgggaaacccaacccacatcctgagaatcggcgagagctataaggagaagcagcggaccatccaggccaagaaggaggtggagcagcggagagccggcggctacagccggaagtacgccagcaaagccaagaatctggcagacgatatggtgagaaacaccgctagagatctgctgtactacgccgtgacccaggatgccatgctgatcttcgccaacctgagccggggcttcggccggcagggcaagcggaccttcatggccgagagacagtacacacggatggaggactggctgaccgccaagctggcctacgagggcctgagcaagacctacctgtccaagacactggcccagtacacctccaagacatgcagcaactgtgggtttaccatcaccagcgccgactacgacagggtgctggagaagctgaagaagacagcaacaggctggatgaccacaattaacggcaaggagctgaaggtggagggccagattacctactacaacagatacaagagacagaacgtagtcaaggacctgtccgtcgagctggatagactgagcgaagaatctgtgaacaacgacatctcctcctggacaaagggcagaagcggagaagctctgagcctcctgaagaaaagattctcccatagacccgtgcaggagaagttcgtgtgcctgaactgcggcttcgagacacacgcagccgagcaagccgccctgaacatcgccagatcctggctgttcctgcggagccaggagtacaagaaataccagacaaacaagacaaccggcaacaccgataagagagccttcgtcgagacctggcagtccttttaccggaagaagcttaaggaggtgtggaaacctgccgtgcggtctggcggatctggcggaggctccaccagccccaagaaaaagagaaaagtctaagctgccttctgcggggcttgccttctggccatgcccttcttctctcccttgcacctgtacctcttggtctttgaataaagcctgagtaggaaggctagcaaaaaaaaaaaaaaaaaaaaaaaaaaaaaaaaaaaaaaaaaaaaaaaaaaaaaaaaaaaaaaaaaaaaaaaaaaaaaaaagcccagccggctccccaacctctaccgaggagggcacctctgagtccgccacccccgagagcggccctggcacctccaccgagcccagcgagggcagcgcacccggcagccctgccggcagccccacctccacagaggagggaaccagcaccgagcccagcgaaggcagcgccccaggcaccagcaccgagcctagtgagcaggagattaaacggatcaacaagatcagaagaagacttgtgaaagacagcaacaccaagaaggccggcaagacaggccccatgaaaaccctgctggttagagtgatgacacccgatctgagagagcggctggaaaacctgagaaagaagcctgaaaatatcccccagcccatcagcaatacatctagagccaacctgaataagctgctgaccgattacaccgaaatgaagaaggcgatcctgcatgtgtactgggaagagttccagaaggaccctgtgggcctgatgagccgggtggcccagcctgccagcaagaagatcgatcagaacaagctgaaacctgagatggacgagaagggcaacctgaccaccgccggctttgcctgctctcagtgtggccagcccctgttcgtgtacaagctggagcaggtgtctgagaagggcaaggcttacaccaactacttcggacggtgcaatgtggccgagcacgaaaagctgatcctgctggcccagctgaagcccgagaaggatagcgacgaagccgtgacatatagcctgggaaagtttgggcagagggccctggatttctacagcattcatgtgaccaaggagtccacccaccccgtgaagcccctggcccagatcgccggaaacagatacgcctccggacctgtgggaaaggccctgagcgacgcatgtatgggcacaatcgcctccttcctgtctaagtaccaggacatcatcatcgaacaccagaaggtggtgaagggcaaccagaagagactggagagcctgcgggagctggccggcaaggaaaacctggaataccctagcgtgaccctgccacctcagcctcacaccaaggagggcgttgatgcctacaacgaagtgatcgcccgggtgcgaatgtgggtgaacctgaacctgtggcagaagctgaagctaagcagagatgatgccaagcctctgctgagactgaagggattcccttcctttcctctggtcgagagacaggccaacgaagtggactggtgggacatggtgtgtaacgtgaagaagctgatcaacgagaaaaaggaggatggcaaggtgttttggcagaatctggctggctacaagagacaggaagccctgagaccatacctgagcagcgaggaagatcggaagaagggaaagaaattcgctcggtaccagctgggcgacctgctgctgcacctggaaaagaagcacggcgaggactggggaaaggtgtacgacgaggcctgggagcggattgacaagaaagtggaaggcctgagcaagcacatcaagctggaagaggaacggagaagcgaggacgcccagagcaaggccgccctgaccgactggctgcgggctaaggccagcttcgtgatcgagggcctgaaggaggccgacaaggacgagttctgcagatgcgagctgaagctgcagaagtggtacggggacctgcggggaaagcccttcgccatcgaagccgagaacagcatcctggacatcagcggcttcagcaagcagtacaactgtgccttcatctggcagaaggacggcgtgaagaagctgaacctgtacctgatcatcaactacttcaagggcggcaagctgcggttcaagaagatcaaacctgaagccttcgaagccaacagattctacaccgtgatcaacaaaaagagcggcgagatcgtgcccatggaggtgaacttcaacttcgacgaccccaacctgatcatcctgcctctggcctttggcaagagacagggcagagaattcatctggaacgacctgctgtccctggaaaccggcagcctgaagctggccaacggaagagtgatcgagaagacactgtacaacagaagaacccggcaggatgagcctgccctgttcgtggccctgaccttcgagcggcgggaggtcctggactcctccaatatcaaaccaatgaacctgatcggcgtggcaagaggcgaaaacatccccgccgtgatcgccctgaccgaccccgagggctgcccactgagccggtttaaggatagcctgggaaacccaacccacatcctgagaatcggcgagagctataaggagaagcagcggaccatccaggccaagaaggaggtggagcagcggagagccggcggctacagccggaagtacgccagcaaagccaagaatctggcagacgatatggtgagaaacaccgctagagatctgctgtactacgccgtgacccaggatgccatgctgatcttcgccaacctgagccggggcttcggccggcagggcaagcggaccttcatggccgagagacagtacacacggatggaggactggctgaccgccaagctggcctacgagggcctgagcaagacctacctgtccaagacactggcccagtacacctccaagacatgcagcaactgtgggtttaccatcaccagcgccgactacgacagggtgctggagaagctgaagaagacagcaacaggctggatgaccacaattaacggcaaggagctgaaggtggagggccagattacctactacaacagatacaagagacagaacgtagtcaaggacctgtccgtcgagctggatagactgagcgaagaatctgtgaacaacgacatctcctcctggacaaagggcagaagcggagaagctctgagcctcctgaagaaaagattctcccatagacccgtgcaggagaagttcgtgtgcctgaactgcggcttcgagacacacgcagccgagcaagccgccctgaacatcgccagatcctggctgttcctgcggagccaggagtacaagaaataccagacaaacaagacaaccggcaacaccgataagagagccttcgtcgagacctggcagtccttttaccggaagaagcttaaggaggtgtggaaacctgccgtgcggtctggcggatctggcggaggctccaccagccccaagaaaaagagaaaagtctaagctgccttctgcggggcttgccttctggccatgcccttcttctctcccttgcacctgtacctcttggtctttgaataaagcctgagtaggaaggctagcaaaaaaaaaaaaaaaaaaaaaaaaaaaaaaaaaaaaaaaaaaaaaaaaaaaaaaaaaaaaaaaaaaaaaaaaaaaaaaaa

SEQ ID NO: 10110 - RNA, 8787 nt, synthetic construct
  source 1..8787: mol_type = other RNA
aggaaataagagagaaaagaagagtaagaagaaatataagagccaccatggcccctaagaagaagcgtaaagtgagccggatgaaccacgaccaggagttcgacccccctaaggtgtaccctcccgtccccgccgagaagagaaagcccatccgggtcctgagcctgttcgatggcatcgccaccggtctgctggtgctgaaggacctgggcatccaggtggataggtacattgcctccgaggtgtgcgaggactccatcaccgtgggaatggtgcgtcatcagggcaagatcatgtacgtgggcgacgtgcggagcgtgacacagaagcatatccaggagtggggccctttcgacctggtgatcggcggcagcccttgcaatgacctgagcatcgtgaacccagcccggaagggcctgtacgagggaaccggcagactgttcttcgagttttacagactgctgcacgacgcccggcctaaggaaggcgacgaccggcccttcttttggctgttcgagaatgtggtggccatgggagtcagcgacaagcgggatattagccggttcctggagagcaaccccgtgatgatcgatgccaaggaagtgagcgccgcccaccgggccagatacttctggggcaatctgcctggcatgaacagacccctggccagcaccgtgaacgacaagctggagctgcaggagtgcctggagcacggccggatcgccaagttcagcaaggtgagaaccatcaccacccgaagcaacagcatcaaacaaggcaaggaccagcactttcctgtgttcatgaacgagaaggaggacatcctgtggtgtaccgagatggagagagtgttcgggttcccagtccactacacagatgtcagcaacatgtctagactggccagacagagactgctgggaagaagctggtccgtccctgtgatcagacacctgttcgcccctctgaaggagtacttcgcctgcgtgagcagcggcaacagcaacgccaacagccggggccccagcttctctagcggcctggtgccactgtccctgagagggagccacatgggccccatggagatctacaaaaccgtgagcgcctggaagcggcagcctgtgcgcgtgctgagcctgtttcggaatatcgataaagtcctgaaaagcctgggattcctggagagcggctctggctccggcggtggcaccctgaagtacgtggaggatgtgacaaacgtggtcagacgggatgtggagaagtggggccccttcgatctggtgtacggcagcacccaacccctgggcagctcttgtgaccggtgccctggctggtacatgtttcagttccaccggatcctgcagtacgccctgccgagacaggagtcccagcggccattcttttggattttcatggacaacttgctgctgaccgaggatgaccaggaaactaccactcggttcctgcagaccgaagccgtgaccctgcaggacgtgagaggccgggactaccagaacgccatgcgggtgtggtccaacatccctggactgaaaagcaagcacgcacctctgacccctaaagaagaggagtacctgcaggcccaggtgcggagcagaagcaagctggacgcccctaaggtggatctgctggtgaagaattgcctcctgcccctgagagagtacttcaagtatttcagccagaatagtctgcccctgggaggcagcggcggcggcgtgcccgtgaccttcgaggacgtggccgtgaggttcagcgccgaggagtgggagatcctggagggctggcagaaggagctgcacaaggaggtgatggaggagaactaccagctgctgatcagcctgggccagcccgtgcccaccctggccctgctggccctgaccgccgagagggaggccgccggcggccagatcaggagcgtgagcggcgagagggagctggccagcaagggcggcagcagcggcggcccaagcagcggcgcccctcctcccagcggcggcaggcggcccaagcagcggcgcccctcctcccagcggcggcagcccagccggctccccaacctctaccgaggagggcacctctgagtccgccacccccgagagcggccctggcacctccaccgagcccagcgagggcagcgcacccggcagccctgccggcagccccacctccacagaggagggaaccagcaccgagcccagcgaaggcagcgccccaggcaccagcaccgagcctagtgagcaggagattaaacggatcaacaagatcagaagaagacttgtgaaagacagcaacaccaagaaggccggcaagacaggccccatgaaaaccctgctggttagagtgatgacacccgatctgagagagcggctggaaaacctgagaaagaagcctgaaaatatcccccagcccatcagcaatacatctagagccaacctgaataagctgctgaccgattacaccgaaatgaagaaggcgatcctgcatgtgtactgggaagagttccagaaggaccctgtgggcctgatgagccgggtggcccagcctgccagcaagaagatcgatcagaacaagctgaaacctgagatggacgagaagggcaacctgaccaccgccggctttgcctgctctcagtgtggccagcccctgttcgtgtacaagctggagcaggtgtctgagaagggcaaggcttacaccaactacttcggacggtgcaatgtggccgagcacgaaaagctgatcctgctggcccagctgaagcccgagaaggatagcgacgaagccgtgacatatagcctgggaaagtttgggcagagggccctggatttctacagcattcatgtgaccaaggagtccacccaccccgtgaagcccctggcccagatcgccggaaacagatacgcctccggacctgtgggaaaggccctgagcgacgcatgtatgggcacaatcgcctccttcctgtctaagtaccaggacatcatcatcgaacaccagaaggtggtgaagggcaaccagaagagactggagagcctgcgggagctggccggcaaggaaaacctggaataccctagcgtgaccctgccacctcagcctcacaccaaggagggcgttgatgcctacaacgaagtgatcgcccgggtgcgaatgtgggtgaacctgaacctgtggcagaagctgaagctaagcagagatgatgccaagcctctgctgagactgaagggattcccttcctttcctctggtcgagagacaggccaacgaagtggactggtgggacatggtgtgtaacgtgaagaagctgatcaacgagaaaaaggaggatggcaaggtgttttggcagaatctggctggctacaagagacaggaagccctgagaccatacctgagcagcgaggaagatcggaagaagggaaagaaattcgctcggtaccagctgggcgacctgctgctgcacctggaaaagaagcacggcgaggactggggaaaggtgtacgacgaggcctgggagcggattgacaagaaagtggaaggcctgagcaagcacatcaagctggaagaggaacggagaagcgaggacgcccagagcaaggccgccctgaccgactggctgcgggctaaggccagcttcgtgatcgagggcctgaaggaggccgacaaggacgagttctgcagatgcgagctgaagctgcagaagtggtacggggacctgcggggaaagcccttcgccatcgaagccgagaacagcatcctggacatcagcggcttcagcaagcagtacaactgtgccttcatctggcagaaggacggcgtgaagaagctgaacctgtacctgatcatcaactacttcaagggcggcaagctgcggttcaagaagatcaaacctgaagccttcgaagccaacagattctacaccgtgatcaacaaaaagagcggcgagatcgtgcccatggaggtgaacttcaacttcgacgaccccaacctgatcatcctgcctctggcctttggcaagagacagggcagagaattcatctggaacgacctgctgtccctggaaaccggcagcctgaagctggccaacggaagagtgatcgagaagacactgtacaacagaagaacccggcaggatgagcctgccctgttcgtggccctgaccttcgagcggcgggaggtcctggactcctccaatatcaaaccaatgaacctgatcggcgtggcaagaggcgaaaacatccccgccgtgatcgccctgaccgaccccgagggctgcccactgagccggtttaaggatagcctgggaaacccaacccacatcctgagaatcggcgagagctataaggagaagcagcggaccatccaggccaagaaggaggtggagcagcggagagccggcggctacagccggaagtacgccagcaaagccaagaatctggcagacgatatggtgagaaacaccgctagagatctgctgtactacgccgtgacccaggatgccatgctgatcttcgccaacctgagccggggcttcggccggcagggcaagcggaccttcatggccgagagacagtacacacggatggaggactggctgaccgccaagctggcctacgagggcctgagcaagacctacctgtccaagacactggcccagtacacctccaagacatgcagcaactgtgggtttaccatcaccagcgccgactacgacagggtgctggagaagctgaagaagacagcaacaggctggatgaccacaattaacggcaaggagctgaaggtggagggccagattacctactacaacagatacaagagacagaacgtagtcaaggacctgtccgtcgagctggatagactgagcgaagaatctgtgaacaacgacatctcctcctggacaaagggcagaagcggagaagctctgagcctcctgaagaaaagattctcccatagacccgtgcaggagaagttcgtgtgcctgaactgcggcttcgagacacacgcagccgagcaagccgccctgaacatcgccagatcctggctgttcctgcggagccaggagtacaagaaataccagacaaacaagacaaccggcaacaccgataagagagccttcgtcgagacctggcagtccttttaccggaagaagcttaaggaggtgtggaaacctgccgtgcggtctggcggatctggcggaggctccaccagccccaagaaaaagagaaaagtctaagctgccttctgcggggcttgccttctggccatgcccttcttctctcccttgcacctgtacctcttggtctttgaataaagcctgagtaggaaggctagcaaaaaaaaaaaaaaaaaaaaaaaaaaaaaaaaaaaaaaaaaaaaaaaaaaaaaaaaaaaaaaaaaaaaaaaaaaaaaaaagcccagccggctccccaacctctaccgaggagggcacctctgagtccgccacccccgagagcggccctggcacctccaccgagcccagcgagggcagcgcacccggcagccctgccggcagccccacctccacagaggagggaaccagcaccgagcccagcgaaggcagcgccccaggcaccagcaccgagcctagtgagcaggagattaaacggatcaacaagatcagaagaagacttgtgaaagacagcaacaccaagaaggccggcaagacaggccccatgaaaaccctgctggttagagtgatgacacccgatctgagagagcggctggaaaacctgagaaagaagcctgaaaatatcccccagcccatcagcaatacatctagagccaacctgaataagctgctgaccgattacaccgaaatgaagaaggcgatcctgcatgtgtactgggaagagttccagaaggaccctgtgggcctgatgagccgggtggcccagcctgccagcaagaagatcgatcagaacaagctgaaacctgagatggacgagaagggcaacctgaccaccgccggctttgcctgctctcagtgtggccagcccctgttcgtgtacaagctggagcaggtgtctgagaagggcaaggcttacaccaactacttcggacggtgcaatgtggccgagcacgaaaagctgatcctgctggcccagctgaagcccgagaaggatagcgacgaagccgtgacatatagcctgggaaagtttgggcagagggccctggatttctacagcattcatgtgaccaaggagtccacccaccccgtgaagcccctggcccagatcgccggaaacagatacgcctccggacctgtgggaaaggccctgagcgacgcatgtatgggcacaatcgcctccttcctgtctaagtaccaggacatcatcatcgaacaccagaaggtggtgaagggcaaccagaagagactggagagcctgcgggagctggccggcaaggaaaacctggaataccctagcgtgaccctgccacctcagcctcacaccaaggagggcgttgatgcctacaacgaagtgatcgcccgggtgcgaatgtgggtgaacctgaacctgtggcagaagctgaagctaagcagagatgatgccaagcctctgctgagactgaagggattcccttcctttcctctggtcgagagacaggccaacgaagtggactggtgggacatggtgtgtaacgtgaagaagctgatcaacgagaaaaaggaggatggcaaggtgttttggcagaatctggctggctacaagagacaggaagccctgagaccatacctgagcagcgaggaagatcggaagaagggaaagaaattcgctcggtaccagctgggcgacctgctgctgcacctggaaaagaagcacggcgaggactggggaaaggtgtacgacgaggcctgggagcggattgacaagaaagtggaaggcctgagcaagcacatcaagctggaagaggaacggagaagcgaggacgcccagagcaaggccgccctgaccgactggctgcgggctaaggccagcttcgtgatcgagggcctgaaggaggccgacaaggacgagttctgcagatgcgagctgaagctgcagaagtggtacggggacctgcggggaaagcccttcgccatcgaagccgagaacagcatcctggacatcagcggcttcagcaagcagtacaactgtgccttcatctggcagaaggacggcgtgaagaagctgaacctgtacctgatcatcaactacttcaagggcggcaagctgcggttcaagaagatcaaacctgaagccttcgaagccaacagattctacaccgtgatcaacaaaaagagcggcgagatcgtgcccatggaggtgaacttcaacttcgacgaccccaacctgatcatcctgcctctggcctttggcaagagacagggcagagaattcatctggaacgacctgctgtccctggaaaccggcagcctgaagctggccaacggaagagtgatcgagaagacactgtacaacagaagaacccggcaggatgagcctgccctgttcgtggccctgaccttcgagcggcgggaggtcctggactcctccaatatcaaaccaatgaacctgatcggcgtggcaagaggcgaaaacatccccgccgtgatcgccctgaccgaccccgagggctgcccactgagccggtttaaggatagcctgggaaacccaacccacatcctgagaatcggcgagagctataaggagaagcagcggaccatccaggccaagaaggaggtggagcagcggagagccggcggctacagccggaagtacgccagcaaagccaagaatctggcagacgatatggtgagaaacaccgctagagatctgctgtactacgccgtgacccaggatgccatgctgatcttcgccaacctgagccggggcttcggccggcagggcaagcggaccttcatggccgagagacagtacacacggatggaggactggctgaccgccaagctggcctacgagggcctgagcaagacctacctgtccaagacactggcccagtacacctccaagacatgcagcaactgtgggtttaccatcaccagcgccgactacgacagggtgctggagaagctgaagaagacagcaacaggctggatgaccacaattaacggcaaggagctgaaggtggagggccagattacctactacaacagatacaagagacagaacgtagtcaaggacctgtccgtcgagctggatagactgagcgaagaatctgtgaacaacgacatctcctcctggacaaagggcagaagcggagaagctctgagcctcctgaagaaaagattctcccatagacccgtgcaggagaagttcgtgtgcctgaactgcggcttcgagacacacgcagccgagcaagccgccctgaacatcgccagatcctggctgttcctgcggagccaggagtacaagaaataccagacaaacaagacaaccggcaacaccgataagagagccttcgtcgagacctggcagtccttttaccggaagaagcttaaggaggtgtggaaacctgccgtgcggtctggcggatctggcggaggctccaccagccccaagaaaaagagaaaagtctaagctgccttctgcggggcttgccttctggccatgcccttcttctctcccttgcacctgtacctcttggtctttgaataaagcctgagtaggaaggctagcaaaaaaaaaaaaaaaaaaaaaaaaaaaaaaaaaaaaaaaaaaaaaaaaaaaaaaaaaaaaaaaaaaaaaaaaaaaaaaaa

SEQ ID NO: 10111 - RNA, 8787 nt, synthetic construct
  source 1..8787: mol_type = other RNA
aggaaataagagagaaaagaagagtaagaagaaatataagagccaccatggcccctaagaagaagcgtaaagtgagccggatgaaccacgaccaggagttcgacccccctaaggtgtaccctcccgtccccgccgagaagagaaagcccatccgggtcctgagcctgttcgatggcatcgccaccggtctgctggtgctgaaggacctgggcatccaggtggataggtacattgcctccgaggtgtgcgaggactccatcaccgtgggaatggtgcgtcatcagggcaagatcatgtacgtgggcgacgtgcggagcgtgacacagaagcatatccaggagtggggccctttcgacctggtgatcggcggcagcccttgcaatgacctgagcatcgtgaacccagcccggaagggcctgtacgagggaaccggcagactgttcttcgagttttacagactgctgcacgacgcccggcctaaggaaggcgacgaccggcccttcttttggctgttcgagaatgtggtggccatgggagtcagcgacaagcgggatattagccggttcctggagagcaaccccgtgatgatcgatgccaaggaagtgagcgccgcccaccgggccagatacttctggggcaatctgcctggcatgaacagacccctggccagcaccgtgaacgacaagctggagctgcaggagtgcctggagcacggccggatcgccaagttcagcaaggtgagaaccatcaccacccgaagcaacagcatcaaacaaggcaaggaccagcactttcctgtgttcatgaacgagaaggaggacatcctgtggtgtaccgagatggagagagtgttcgggttcccagtccactacacagatgtcagcaacatgtctagactggccagacagagactgctgggaagaagctggtccgtccctgtgatcagacacctgttcgcccctctgaaggagtacttcgcctgcgtgagcagcggcaacagcaacgccaacagccggggccccagcttctctagcggcctggtgccactgtccctgagagggagccacatgggccccatggagatctacaaaaccgtgagcgcctggaagcggcagcctgtgcgcgtgctgagcctgtttcggaatatcgataaagtcctgaaaagcctgggattcctggagagcggctctggctccggcggtggcaccctgaagtacgtggaggatgtgacaaacgtggtcagacgggatgtggagaagtggggccccttcgatctggtgtacggcagcacccaacccctgggcagctcttgtgaccggtgccctggctggtacatgtttcagttccaccggatcctgcagtacgccctgccgagacaggagtcccagcggccattcttttggattttcatggacaacttgctgctgaccgaggatgaccaggaaactaccactcggttcctgcagaccgaagccgtgaccctgcaggacgtgagaggccgggactaccagaacgccatgcgggtgtggtccaacatccctggactgaaaagcaagcacgcacctctgacccctaaagaagaggagtacctgcaggcccaggtgcggagcagaagcaagctggacgcccctaaggtggatctgctggtgaagaattgcctcctgcccctgagagagtacttcaagtatttcagccagaatagtctgcccctgggaggcagcggcggcggcatggccttcaaggacgtggccgtggccttcacccagaaggagtggaagctgctgagccccgcccagaggaccctgtacagggacgtgatgctggagaactacagccacatggtgagcctgggcatcgccttccccaagcccaagctgatcatccagctggagcagggcgacgagccctggagggaggagagcgagagcctgctggacctgtgccccgagcccaggaccgagttccagccccacggcggcccaagcagcggcgcccctcctcccagcggcggcaggcggcccaagcagcggcgcccctcctcccagcggcggcagcccagccggctccccaacctctaccgaggagggcacctctgagtccgccacccccgagagcggccctggcacctccaccgagcccagcgagggcagcgcacccggcagccctgccggcagccccacctccacagaggagggaaccagcaccgagcccagcgaaggcagcgccccaggcaccagcaccgagcctagtgagcaggagattaaacggatcaacaagatcagaagaagacttgtgaaagacagcaacaccaagaaggccggcaagacaggccccatgaaaaccctgctggttagagtgatgacacccgatctgagagagcggctggaaaacctgagaaagaagcctgaaaatatcccccagcccatcagcaatacatctagagccaacctgaataagctgctgaccgattacaccgaaatgaagaaggcgatcctgcatgtgtactgggaagagttccagaaggaccctgtgggcctgatgagccgggtggcccagcctgccagcaagaagatcgatcagaacaagctgaaacctgagatggacgagaagggcaacctgaccaccgccggctttgcctgctctcagtgtggccagcccctgttcgtgtacaagctggagcaggtgtctgagaagggcaaggcttacaccaactacttcggacggtgcaatgtggccgagcacgaaaagctgatcctgctggcccagctgaagcccgagaaggatagcgacgaagccgtgacatatagcctgggaaagtttgggcagagggccctggatttctacagcattcatgtgaccaaggagtccacccaccccgtgaagcccctggcccagatcgccggaaacagatacgcctccggacctgtgggaaaggccctgagcgacgcatgtatgggcacaatcgcctccttcctgtctaagtaccaggacatcatcatcgaacaccagaaggtggtgaagggcaaccagaagagactggagagcctgcgggagctggccggcaaggaaaacctggaataccctagcgtgaccctgccacctcagcctcacaccaaggagggcgttgatgcctacaacgaagtgatcgcccgggtgcgaatgtgggtgaacctgaacctgtggcagaagctgaagctaagcagagatgatgccaagcctctgctgagactgaagggattcccttcctttcctctggtcgagagacaggccaacgaagtggactggtgggacatggtgtgtaacgtgaagaagctgatcaacgagaaaaaggaggatggcaaggtgttttggcagaatctggctggctacaagagacaggaagccctgagaccatacctgagcagcgaggaagatcggaagaagggaaagaaattcgctcggtaccagctgggcgacctgctgctgcacctggaaaagaagcacggcgaggactggggaaaggtgtacgacgaggcctgggagcggattgacaagaaagtggaaggcctgagcaagcacatcaagctggaagaggaacggagaagcgaggacgcccagagcaaggccgccctgaccgactggctgcgggctaaggccagcttcgtgatcgagggcctgaaggaggccgacaaggacgagttctgcagatgcgagctgaagctgcagaagtggtacggggacctgcggggaaagcccttcgccatcgaagccgagaacagcatcctggacatcagcggcttcagcaagcagtacaactgtgccttcatctggcagaaggacggcgtgaagaagctgaacctgtacctgatcatcaactacttcaagggcggcaagctgcggttcaagaagatcaaacctgaagccttcgaagccaacagattctacaccgtgatcaacaaaaagagcggcgagatcgtgcccatggaggtgaacttcaacttcgacgaccccaacctgatcatcctgcctctggcctttggcaagagacagggcagagaattcatctggaacgacctgctgtccctggaaaccggcagcctgaagctggccaacggaagagtgatcgagaagacactgtacaacagaagaacccggcaggatgagcctgccctgttcgtggccctgaccttcgagcggcgggaggtcctggactcctccaatatcaaaccaatgaacctgatcggcgtggcaagaggcgaaaacatccccgccgtgatcgccctgaccgaccccgagggctgcccactgagccggtttaaggatagcctgggaaacccaacccacatcctgagaatcggcgagagctataaggagaagcagcggaccatccaggccaagaaggaggtggagcagcggagagccggcggctacagccggaagtacgccagcaaagccaagaatctggcagacgatatggtgagaaacaccgctagagatctgctgtactacgccgtgacccaggatgccatgctgatcttcgccaacctgagccggggcttcggccggcagggcaagcggaccttcatggccgagagacagtacacacggatggaggactggctgaccgccaagctggcctacgagggcctgagcaagacctacctgtccaagacactggcccagtacacctccaagacatgcagcaactgtgggtttaccatcaccagcgccgactacgacagggtgctggagaagctgaagaagacagcaacaggctggatgaccacaattaacggcaaggagctgaaggtggagggccagattacctactacaacagatacaagagacagaacgtagtcaaggacctgtccgtcgagctggatagactgagcgaagaatctgtgaacaacgacatctcctcctggacaaagggcagaagcggagaagctctgagcctcctgaagaaaagattctcccatagacccgtgcaggagaagttcgtgtgcctgaactgcggcttcgagacacacgcagccgagcaagccgccctgaacatcgccagatcctggctgttcctgcggagccaggagtacaagaaataccagacaaacaagacaaccggcaacaccgataagagagccttcgtcgagacctggcagtccttttaccggaagaagcttaaggaggtgtggaaacctgccgtgcggtctggcggatctggcggaggctccaccagccccaagaaaaagagaaaagtctaagctgccttctgcggggcttgccttctggccatgcccttcttctctcccttgcacctgtacctcttggtctttgaataaagcctgagtaggaaggctagcaaaaaaaaaaaaaaaaaaaaaaaaaaaaaaaaaaaaaaaaaaaaaaaaaaaaaaaaaaaaaaaaaaaaaaaaaaaaaaaagcccagccggctccccaacctctaccgaggagggcacctctgagtccgccacccccgagagcggccctggcacctccaccgagcccagcgagggcagcgcacccggcagccctgccggcagccccacctccacagaggagggaaccagcaccgagcccagcgaaggcagcgccccaggcaccagcaccgagcctagtgagcaggagattaaacggatcaacaagatcagaagaagacttgtgaaagacagcaacaccaagaaggccggcaagacaggccccatgaaaaccctgctggttagagtgatgacacccgatctgagagagcggctggaaaacctgagaaagaagcctgaaaatatcccccagcccatcagcaatacatctagagccaacctgaataagctgctgaccgattacaccgaaatgaagaaggcgatcctgcatgtgtactgggaagagttccagaaggaccctgtgggcctgatgagccgggtggcccagcctgccagcaagaagatcgatcagaacaagctgaaacctgagatggacgagaagggcaacctgaccaccgccggctttgcctgctctcagtgtggccagcccctgttcgtgtacaagctggagcaggtgtctgagaagggcaaggcttacaccaactacttcggacggtgcaatgtggccgagcacgaaaagctgatcctgctggcccagctgaagcccgagaaggatagcgacgaagccgtgacatatagcctgggaaagtttgggcagagggccctggatttctacagcattcatgtgaccaaggagtccacccaccccgtgaagcccctggcccagatcgccggaaacagatacgcctccggacctgtgggaaaggccctgagcgacgcatgtatgggcacaatcgcctccttcctgtctaagtaccaggacatcatcatcgaacaccagaaggtggtgaagggcaaccagaagagactggagagcctgcgggagctggccggcaaggaaaacctggaataccctagcgtgaccctgccacctcagcctcacaccaaggagggcgttgatgcctacaacgaagtgatcgcccgggtgcgaatgtgggtgaacctgaacctgtggcagaagctgaagctaagcagagatgatgccaagcctctgctgagactgaagggattcccttcctttcctctggtcgagagacaggccaacgaagtggactggtgggacatggtgtgtaacgtgaagaagctgatcaacgagaaaaaggaggatggcaaggtgttttggcagaatctggctggctacaagagacaggaagccctgagaccatacctgagcagcgaggaagatcggaagaagggaaagaaattcgctcggtaccagctgggcgacctgctgctgcacctggaaaagaagcacggcgaggactggggaaaggtgtacgacgaggcctgggagcggattgacaagaaagtggaaggcctgagcaagcacatcaagctggaagaggaacggagaagcgaggacgcccagagcaaggccgccctgaccgactggctgcgggctaaggccagcttcgtgatcgagggcctgaaggaggccgacaaggacgagttctgcagatgcgagctgaagctgcagaagtggtacggggacctgcggggaaagcccttcgccatcgaagccgagaacagcatcctggacatcagcggcttcagcaagcagtacaactgtgccttcatctggcagaaggacggcgtgaagaagctgaacctgtacctgatcatcaactacttcaagggcggcaagctgcggttcaagaagatcaaacctgaagccttcgaagccaacagattctacaccgtgatcaacaaaaagagcggcgagatcgtgcccatggaggtgaacttcaacttcgacgaccccaacctgatcatcctgcctctggcctttggcaagagacagggcagagaattcatctggaacgacctgctgtccctggaaaccggcagcctgaagctggccaacggaagagtgatcgagaagacactgtacaacagaagaacccggcaggatgagcctgccctgttcgtggccctgaccttcgagcggcgggaggtcctggactcctccaatatcaaaccaatgaacctgatcggcgtggcaagaggcgaaaacatccccgccgtgatcgccctgaccgaccccgagggctgcccactgagccggtttaaggatagcctgggaaacccaacccacatcctgagaatcggcgagagctataaggagaagcagcggaccatccaggccaagaaggaggtggagcagcggagagccggcggctacagccggaagtacgccagcaaagccaagaatctggcagacgatatggtgagaaacaccgctagagatctgctgtactacgccgtgacccaggatgccatgctgatcttcgccaacctgagccggggcttcggccggcagggcaagcggaccttcatggccgagagacagtacacacggatggaggactggctgaccgccaagctggcctacgagggcctgagcaagacctacctgtccaagacactggcccagtacacctccaagacatgcagcaactgtgggtttaccatcaccagcgccgactacgacagggtgctggagaagctgaagaagacagcaacaggctggatgaccacaattaacggcaaggagctgaaggtggagggccagattacctactacaacagatacaagagacagaacgtagtcaaggacctgtccgtcgagctggatagactgagcgaagaatctgtgaacaacgacatctcctcctggacaaagggcagaagcggagaagctctgagcctcctgaagaaaagattctcccatagacccgtgcaggagaagttcgtgtgcctgaactgcggcttcgagacacacgcagccgagcaagccgccctgaacatcgccagatcctggctgttcctgcggagccaggagtacaagaaataccagacaaacaagacaaccggcaacaccgataagagagccttcgtcgagacctggcagtccttttaccggaagaagcttaaggaggtgtggaaacctgccgtgcggtctggcggatctggcggaggctccaccagccccaagaaaaagagaaaagtctaagctgccttctgcggggcttgccttctggccatgcccttcttctctcccttgcacctgtacctcttggtctttgaataaagcctgagtaggaaggctagcaaaaaaaaaaaaaaaaaaaaaaaaaaaaaaaaaaaaaaaaaaaaaaaaaaaaaaaaaaaaaaaaaaaaaaaaaaaaaaaa

SEQ ID NO: 10112 - RNA, 8787 nt, synthetic construct
  source 1..8787: mol_type = other RNA
aggaaataagagagaaaagaagagtaagaagaaatataagagccaccatggcccctaagaagaagcgtaaagtgagccggatgaaccacgaccaggagttcgacccccctaaggtgtaccctcccgtccccgccgagaagagaaagcccatccgggtcctgagcctgttcgatggcatcgccaccggtctgctggtgctgaaggacctgggcatccaggtggataggtacattgcctccgaggtgtgcgaggactccatcaccgtgggaatggtgcgtcatcagggcaagatcatgtacgtgggcgacgtgcggagcgtgacacagaagcatatccaggagtggggccctttcgacctggtgatcggcggcagcccttgcaatgacctgagcatcgtgaacccagcccggaagggcctgtacgagggaaccggcagactgttcttcgagttttacagactgctgcacgacgcccggcctaaggaaggcgacgaccggcccttcttttggctgttcgagaatgtggtggccatgggagtcagcgacaagcgggatattagccggttcctggagagcaaccccgtgatgatcgatgccaaggaagtgagcgccgcccaccgggccagatacttctggggcaatctgcctggcatgaacagacccctggccagcaccgtgaacgacaagctggagctgcaggagtgcctggagcacggccggatcgccaagttcagcaaggtgagaaccatcaccacccgaagcaacagcatcaaacaaggcaaggaccagcactttcctgtgttcatgaacgagaaggaggacatcctgtggtgtaccgagatggagagagtgttcgggttcccagtccactacacagatgtcagcaacatgtctagactggccagacagagactgctgggaagaagctggtccgtccctgtgatcagacacctgttcgcccctctgaaggagtacttcgcctgcgtgagcagcggcaacagcaacgccaacagccggggccccagcttctctagcggcctggtgccactgtccctgagagggagccacatgggccccatggagatctacaaaaccgtgagcgcctggaagcggcagcctgtgcgcgtgctgagcctgtttcggaatatcgataaagtcctgaaaagcctgggattcctggagagcggctctggctccggcggtggcaccctgaagtacgtggaggatgtgacaaacgtggtcagacgggatgtggagaagtggggccccttcgatctggtgtacggcagcacccaacccctgggcagctcttgtgaccggtgccctggctggtacatgtttcagttccaccggatcctgcagtacgccctgccgagacaggagtcccagcggccattcttttggattttcatggacaacttgctgctgaccgaggatgaccaggaaactaccactcggttcctgcagaccgaagccgtgaccctgcaggacgtgagaggccgggactaccagaacgccatgcgggtgtggtccaacatccctggactgaaaagcaagcacgcacctctgacccctaaagaagaggagtacctgcaggcccaggtgcggagcagaagcaagctggacgcccctaaggtggatctgctggtgaagaattgcctcctgcccctgagagagtacttcaagtatttcagccagaatagtctgcccctgggaggcagcggcggcggcagccaggagagcgtgagcttcgaggacgtggccgtgtacttcacccagaaccagtgggccagcctggacagcgcccagaggaccctgtacaggaaggtgatgctggagaactacgccaacgtgaccagcctggccgccttccccttccccaagcccgacctgatcctgcagctggagcagggcgaggcccccggcggcctggacccctggacccccatcaggagggaggtgaggggcgtgtgcggcggcccaagcagcggcgcccctcctcccagcggcggcaggcggcccaagcagcggcgcccctcctcccagcggcggcagcccagccggctccccaacctctaccgaggagggcacctctgagtccgccacccccgagagcggccctggcacctccaccgagcccagcgagggcagcgcacccggcagccctgccggcagccccacctccacagaggagggaaccagcaccgagcccagcgaaggcagcgccccaggcaccagcaccgagcctagtgagcaggagattaaacggatcaacaagatcagaagaagacttgtgaaagacagcaacaccaagaaggccggcaagacaggccccatgaaaaccctgctggttagagtgatgacacccgatctgagagagcggctggaaaacctgagaaagaagcctgaaaatatcccccagcccatcagcaatacatctagagccaacctgaataagctgctgaccgattacaccgaaatgaagaaggcgatcctgcatgtgtactgggaagagttccagaaggaccctgtgggcctgatgagccgggtggcccagcctgccagcaagaagatcgatcagaacaagctgaaacctgagatggacgagaagggcaacctgaccaccgccggctttgcctgctctcagtgtggccagcccctgttcgtgtacaagctggagcaggtgtctgagaagggcaaggcttacaccaactacttcggacggtgcaatgtggccgagcacgaaaagctgatcctgctggcccagctgaagcccgagaaggatagcgacgaagccgtgacatatagcctgggaaagtttgggcagagggccctggatttctacagcattcatgtgaccaaggagtccacccaccccgtgaagcccctggcccagatcgccggaaacagatacgcctccggacctgtgggaaaggccctgagcgacgcatgtatgggcacaatcgcctccttcctgtctaagtaccaggacatcatcatcgaacaccagaaggtggtgaagggcaaccagaagagactggagagcctgcgggagctggccggcaaggaaaacctggaataccctagcgtgaccctgccacctcagcctcacaccaaggagggcgttgatgcctacaacgaagtgatcgcccgggtgcgaatgtgggtgaacctgaacctgtggcagaagctgaagctaagcagagatgatgccaagcctctgctgagactgaagggattcccttcctttcctctggtcgagagacaggccaacgaagtggactggtgggacatggtgtgtaacgtgaagaagctgatcaacgagaaaaaggaggatggcaaggtgttttggcagaatctggctggctacaagagacaggaagccctgagaccatacctgagcagcgaggaagatcggaagaagggaaagaaattcgctcggtaccagctgggcgacctgctgctgcacctggaaaagaagcacggcgaggactggggaaaggtgtacgacgaggcctgggagcggattgacaagaaagtggaaggcctgagcaagcacatcaagctggaagaggaacggagaagcgaggacgcccagagcaaggccgccctgaccgactggctgcgggctaaggccagcttcgtgatcgagggcctgaaggaggccgacaaggacgagttctgcagatgcgagctgaagctgcagaagtggtacggggacctgcggggaaagcccttcgccatcgaagccgagaacagcatcctggacatcagcggcttcagcaagcagtacaactgtgccttcatctggcagaaggacggcgtgaagaagctgaacctgtacctgatcatcaactacttcaagggcggcaagctgcggttcaagaagatcaaacctgaagccttcgaagccaacagattctacaccgtgatcaacaaaaagagcggcgagatcgtgcccatggaggtgaacttcaacttcgacgaccccaacctgatcatcctgcctctggcctttggcaagagacagggcagagaattcatctggaacgacctgctgtccctggaaaccggcagcctgaagctggccaacggaagagtgatcgagaagacactgtacaacagaagaacccggcaggatgagcctgccctgttcgtggccctgaccttcgagcggcgggaggtcctggactcctccaatatcaaaccaatgaacctgatcggcgtggcaagaggcgaaaacatccccgccgtgatcgccctgaccgaccccgagggctgcccactgagccggtttaaggatagcctgggaaacccaacccacatcctgagaatcggcgagagctataaggagaagcagcggaccatccaggccaagaaggaggtggagcagcggagagccggcggctacagccggaagtacgccagcaaagccaagaatctggcagacgatatggtgagaaacaccgctagagatctgctgtactacgccgtgacccaggatgccatgctgatcttcgccaacctgagccggggcttcggccggcagggcaagcggaccttcatggccgagagacagtacacacggatggaggactggctgaccgccaagctggcctacgagggcctgagcaagacctacctgtccaagacactggcccagtacacctccaagacatgcagcaactgtgggtttaccatcaccagcgccgactacgacagggtgctggagaagctgaagaagacagcaacaggctggatgaccacaattaacggcaaggagctgaaggtggagggccagattacctactacaacagatacaagagacagaacgtagtcaaggacctgtccgtcgagctggatagactgagcgaagaatctgtgaacaacgacatctcctcctggacaaagggcagaagcggagaagctctgagcctcctgaagaaaagattctcccatagacccgtgcaggagaagttcgtgtgcctgaactgcggcttcgagacacacgcagccgagcaagccgccctgaacatcgccagatcctggctgttcctgcggagccaggagtacaagaaataccagacaaacaagacaaccggcaacaccgataagagagccttcgtcgagacctggcagtccttttaccggaagaagcttaaggaggtgtggaaacctgccgtgcggtctggcggatctggcggaggctccaccagccccaagaaaaagagaaaagtctaagctgccttctgcggggcttgccttctggccatgcccttcttctctcccttgcacctgtacctcttggtctttgaataaagcctgagtaggaaggctagcaaaaaaaaaaaaaaaaaaaaaaaaaaaaaaaaaaaaaaaaaaaaaaaaaaaaaaaaaaaaaaaaaaaaaaaaaaaaaaaagcccagccggctccccaacctctaccgaggagggcacctctgagtccgccacccccgagagcggccctggcacctccaccgagcccagcgagggcagcgcacccggcagccctgccggcagccccacctccacagaggagggaaccagcaccgagcccagcgaaggcagcgccccaggcaccagcaccgagcctagtgagcaggagattaaacggatcaacaagatcagaagaagacttgtgaaagacagcaacaccaagaaggccggcaagacaggccccatgaaaaccctgctggttagagtgatgacacccgatctgagagagcggctggaaaacctgagaaagaagcctgaaaatatcccccagcccatcagcaatacatctagagccaacctgaataagctgctgaccgattacaccgaaatgaagaaggcgatcctgcatgtgtactgggaagagttccagaaggaccctgtgggcctgatgagccgggtggcccagcctgccagcaagaagatcgatcagaacaagctgaaacctgagatggacgagaagggcaacctgaccaccgccggctttgcctgctctcagtgtggccagcccctgttcgtgtacaagctggagcaggtgtctgagaagggcaaggcttacaccaactacttcggacggtgcaatgtggccgagcacgaaaagctgatcctgctggcccagctgaagcccgagaaggatagcgacgaagccgtgacatatagcctgggaaagtttgggcagagggccctggatttctacagcattcatgtgaccaaggagtccacccaccccgtgaagcccctggcccagatcgccggaaacagatacgcctccggacctgtgggaaaggccctgagcgacgcatgtatgggcacaatcgcctccttcctgtctaagtaccaggacatcatcatcgaacaccagaaggtggtgaagggcaaccagaagagactggagagcctgcgggagctggccggcaaggaaaacctggaataccctagcgtgaccctgccacctcagcctcacaccaaggagggcgttgatgcctacaacgaagtgatcgcccgggtgcgaatgtgggtgaacctgaacctgtggcagaagctgaagctaagcagagatgatgccaagcctctgctgagactgaagggattcccttcctttcctctggtcgagagacaggccaacgaagtggactggtgggacatggtgtgtaacgtgaagaagctgatcaacgagaaaaaggaggatggcaaggtgttttggcagaatctggctggctacaagagacaggaagccctgagaccatacctgagcagcgaggaagatcggaagaagggaaagaaattcgctcggtaccagctgggcgacctgctgctgcacctggaaaagaagcacggcgaggactggggaaaggtgtacgacgaggcctgggagcggattgacaagaaagtggaaggcctgagcaagcacatcaagctggaagaggaacggagaagcgaggacgcccagagcaaggccgccctgaccgactggctgcgggctaaggccagcttcgtgatcgagggcctgaaggaggccgacaaggacgagttctgcagatgcgagctgaagctgcagaagtggtacggggacctgcggggaaagcccttcgccatcgaagccgagaacagcatcctggacatcagcggcttcagcaagcagtacaactgtgccttcatctggcagaaggacggcgtgaagaagctgaacctgtacctgatcatcaactacttcaagggcggcaagctgcggttcaagaagatcaaacctgaagccttcgaagccaacagattctacaccgtgatcaacaaaaagagcggcgagatcgtgcccatggaggtgaacttcaacttcgacgaccccaacctgatcatcctgcctctggcctttggcaagagacagggcagagaattcatctggaacgacctgctgtccctggaaaccggcagcctgaagctggccaacggaagagtgatcgagaagacactgtacaacagaagaacccggcaggatgagcctgccctgttcgtggccctgaccttcgagcggcgggaggtcctggactcctccaatatcaaaccaatgaacctgatcggcgtggcaagaggcgaaaacatccccgccgtgatcgccctgaccgaccccgagggctgcccactgagccggtttaaggatagcctgggaaacccaacccacatcctgagaatcggcgagagctataaggagaagcagcggaccatccaggccaagaaggaggtggagcagcggagagccggcggctacagccggaagtacgccagcaaagccaagaatctggcagacgatatggtgagaaacaccgctagagatctgctgtactacgccgtgacccaggatgccatgctgatcttcgccaacctgagccggggcttcggccggcagggcaagcggaccttcatggccgagagacagtacacacggatggaggactggctgaccgccaagctggcctacgagggcctgagcaagacctacctgtccaagacactggcccagtacacctccaagacatgcagcaactgtgggtttaccatcaccagcgccgactacgacagggtgctggagaagctgaagaagacagcaacaggctggatgaccacaattaacggcaaggagctgaaggtggagggccagattacctactacaacagatacaagagacagaacgtagtcaaggacctgtccgtcgagctggatagactgagcgaagaatctgtgaacaacgacatctcctcctggacaaagggcagaagcggagaagctctgagcctcctgaagaaaagattctcccatagacccgtgcaggagaagttcgtgtgcctgaactgcggcttcgagacacacgcagccgagcaagccgccctgaacatcgccagatcctggctgttcctgcggagccaggagtacaagaaataccagacaaacaagacaaccggcaacaccgataagagagccttcgtcgagacctggcagtccttttaccggaagaagcttaaggaggtgtggaaacctgccgtgcggtctggcggatctggcggaggctccaccagccccaagaaaaagagaaaagtctaagctgccttctgcggggcttgccttctggccatgcccttcttctctcccttgcacctgtacctcttggtctttgaataaagcctgagtaggaaggctagcaaaaaaaaaaaaaaaaaaaaaaaaaaaaaaaaaaaaaaaaaaaaaaaaaaaaaaaaaaaaaaaaaaaaaaaaaaaaaaaa

SEQ ID NO: 10113 - RNA, 8787 nt, synthetic construct
  source 1..8787: mol_type = other RNA
aggaaataagagagaaaagaagagtaagaagaaatataagagccaccatggcccctaagaagaagcgtaaagtgagccggatgaaccacgaccaggagttcgacccccctaaggtgtaccctcccgtccccgccgagaagagaaagcccatccgggtcctgagcctgttcgatggcatcgccaccggtctgctggtgctgaaggacctgggcatccaggtggataggtacattgcctccgaggtgtgcgaggactccatcaccgtgggaatggtgcgtcatcagggcaagatcatgtacgtgggcgacgtgcggagcgtgacacagaagcatatccaggagtggggccctttcgacctggtgatcggcggcagcccttgcaatgacctgagcatcgtgaacccagcccggaagggcctgtacgagggaaccggcagactgttcttcgagttttacagactgctgcacgacgcccggcctaaggaaggcgacgaccggcccttcttttggctgttcgagaatgtggtggccatgggagtcagcgacaagcgggatattagccggttcctggagagcaaccccgtgatgatcgatgccaaggaagtgagcgccgcccaccgggccagatacttctggggcaatctgcctggcatgaacagacccctggccagcaccgtgaacgacaagctggagctgcaggagtgcctggagcacggccggatcgccaagttcagcaaggtgagaaccatcaccacccgaagcaacagcatcaaacaaggcaaggaccagcactttcctgtgttcatgaacgagaaggaggacatcctgtggtgtaccgagatggagagagtgttcgggttcccagtccactacacagatgtcagcaacatgtctagactggccagacagagactgctgggaagaagctggtccgtccctgtgatcagacacctgttcgcccctctgaaggagtacttcgcctgcgtgagcagcggcaacagcaacgccaacagccggggccccagcttctctagcggcctggtgccactgtccctgagagggagccacatgggccccatggagatctacaaaaccgtgagcgcctggaagcggcagcctgtgcgcgtgctgagcctgtttcggaatatcgataaagtcctgaaaagcctgggattcctggagagcggctctggctccggcggtggcaccctgaagtacgtggaggatgtgacaaacgtggtcagacgggatgtggagaagtggggccccttcgatctggtgtacggcagcacccaacccctgggcagctcttgtgaccggtgccctggctggtacatgtttcagttccaccggatcctgcagtacgccctgccgagacaggagtcccagcggccattcttttggattttcatggacaacttgctgctgaccgaggatgaccaggaaactaccactcggttcctgcagaccgaagccgtgaccctgcaggacgtgagaggccgggactaccagaacgccatgcgggtgtggtccaacatccctggactgaaaagcaagcacgcacctctgacccctaaagaagaggagtacctgcaggcccaggtgcggagcagaagcaagctggacgcccctaaggtggatctgctggtgaagaattgcctcctgcccctgagagagtacttcaagtatttcagccagaatagtctgcccctgggaggcagcggcggcggcgtgcaggagagcgtgaccttcagggacctggccgtggacttcgacatggaggagtggggctacctgtgccccagccagaaggagctgtacagggaggtgatgctggagaactacaggcacctggtgagcctgggcctgctggaggccaagcccgacctgatcagcaggctggagcaggaggagccccaggtgtgggaggtgcaggagggcgccagcggcagcgtgtgcgcctgcaccggcggcggcggcccaagcagcggcgcccctcctcccagcggcggcaggcggcccaagcagcggcgcccctcctcccagcggcggcagcccagccggctccccaacctctaccgaggagggcacctctgagtccgccacccccgagagcggccctggcacctccaccgagcccagcgagggcagcgcacccggcagccctgccggcagccccacctccacagaggagggaaccagcaccgagcccagcgaaggcagcgccccaggcaccagcaccgagcctagtgagcaggagattaaacggatcaacaagatcagaagaagacttgtgaaagacagcaacaccaagaaggccggcaagacaggccccatgaaaaccctgctggttagagtgatgacacccgatctgagagagcggctggaaaacctgagaaagaagcctgaaaatatcccccagcccatcagcaatacatctagagccaacctgaataagctgctgaccgattacaccgaaatgaagaaggcgatcctgcatgtgtactgggaagagttccagaaggaccctgtgggcctgatgagccgggtggcccagcctgccagcaagaagatcgatcagaacaagctgaaacctgagatggacgagaagggcaacctgaccaccgccggctttgcctgctctcagtgtggccagcccctgttcgtgtacaagctggagcaggtgtctgagaagggcaaggcttacaccaactacttcggacggtgcaatgtggccgagcacgaaaagctgatcctgctggcccagctgaagcccgagaaggatagcgacgaagccgtgacatatagcctgggaaagtttgggcagagggccctggatttctacagcattcatgtgaccaaggagtccacccaccccgtgaagcccctggcccagatcgccggaaacagatacgcctccggacctgtgggaaaggccctgagcgacgcatgtatgggcacaatcgcctccttcctgtctaagtaccaggacatcatcatcgaacaccagaaggtggtgaagggcaaccagaagagactggagagcctgcgggagctggccggcaaggaaaacctggaataccctagcgtgaccctgccacctcagcctcacaccaaggagggcgttgatgcctacaacgaagtgatcgcccgggtgcgaatgtgggtgaacctgaacctgtggcagaagctgaagctaagcagagatgatgccaagcctctgctgagactgaagggattcccttcctttcctctggtcgagagacaggccaacgaagtggactggtgggacatggtgtgtaacgtgaagaagctgatcaacgagaaaaaggaggatggcaaggtgttttggcagaatctggctggctacaagagacaggaagccctgagaccatacctgagcagcgaggaagatcggaagaagggaaagaaattcgctcggtaccagctgggcgacctgctgctgcacctggaaaagaagcacggcgaggactggggaaaggtgtacgacgaggcctgggagcggattgacaagaaagtggaaggcctgagcaagcacatcaagctggaagaggaacggagaagcgaggacgcccagagcaaggccgccctgaccgactggctgcgggctaaggccagcttcgtgatcgagggcctgaaggaggccgacaaggacgagttctgcagatgcgagctgaagctgcagaagtggtacggggacctgcggggaaagcccttcgccatcgaagccgagaacagcatcctggacatcagcggcttcagcaagcagtacaactgtgccttcatctggcagaaggacggcgtgaagaagctgaacctgtacctgatcatcaactacttcaagggcggcaagctgcggttcaagaagatcaaacctgaagccttcgaagccaacagattctacaccgtgatcaacaaaaagagcggcgagatcgtgcccatggaggtgaacttcaacttcgacgaccccaacctgatcatcctgcctctggcctttggcaagagacagggcagagaattcatctggaacgacctgctgtccctggaaaccggcagcctgaagctggccaacggaagagtgatcgagaagacactgtacaacagaagaacccggcaggatgagcctgccctgttcgtggccctgaccttcgagcggcgggaggtcctggactcctccaatatcaaaccaatgaacctgatcggcgtggcaagaggcgaaaacatccccgccgtgatcgccctgaccgaccccgagggctgcccactgagccggtttaaggatagcctgggaaacccaacccacatcctgagaatcggcgagagctataaggagaagcagcggaccatccaggccaagaaggaggtggagcagcggagagccggcggctacagccggaagtacgccagcaaagccaagaatctggcagacgatatggtgagaaacaccgctagagatctgctgtactacgccgtgacccaggatgccatgctgatcttcgccaacctgagccggggcttcggccggcagggcaagcggaccttcatggccgagagacagtacacacggatggaggactggctgaccgccaagctggcctacgagggcctgagcaagacctacctgtccaagacactggcccagtacacctccaagacatgcagcaactgtgggtttaccatcaccagcgccgactacgacagggtgctggagaagctgaagaagacagcaacaggctggatgaccacaattaacggcaaggagctgaaggtggagggccagattacctactacaacagatacaagagacagaacgtagtcaaggacctgtccgtcgagctggatagactgagcgaagaatctgtgaacaacgacatctcctcctggacaaagggcagaagcggagaagctctgagcctcctgaagaaaagattctcccatagacccgtgcaggagaagttcgtgtgcctgaactgcggcttcgagacacacgcagccgagcaagccgccctgaacatcgccagatcctggctgttcctgcggagccaggagtacaagaaataccagacaaacaagacaaccggcaacaccgataagagagccttcgtcgagacctggcagtccttttaccggaagaagcttaaggaggtgtggaaacctgccgtgcggtctggcggatctggcggaggctccaccagccccaagaaaaagagaaaagtctaagctgccttctgcggggcttgccttctggccatgcccttcttctctcccttgcacctgtacctcttggtctttgaataaagcctgagtaggaaggctagcaaaaaaaaaaaaaaaaaaaaaaaaaaaaaaaaaaaaaaaaaaaaaaaaaaaaaaaaaaaaaaaaaaaaaaaaaaaaaaaagcccagccggctccccaacctctaccgaggagggcacctctgagtccgccacccccgagagcggccctggcacctccaccgagcccagcgagggcagcgcacccggcagccctgccggcagccccacctccacagaggagggaaccagcaccgagcccagcgaaggcagcgccccaggcaccagcaccgagcctagtgagcaggagattaaacggatcaacaagatcagaagaagacttgtgaaagacagcaacaccaagaaggccggcaagacaggccccatgaaaaccctgctggttagagtgatgacacccgatctgagagagcggctggaaaacctgagaaagaagcctgaaaatatcccccagcccatcagcaatacatctagagccaacctgaataagctgctgaccgattacaccgaaatgaagaaggcgatcctgcatgtgtactgggaagagttccagaaggaccctgtgggcctgatgagccgggtggcccagcctgccagcaagaagatcgatcagaacaagctgaaacctgagatggacgagaagggcaacctgaccaccgccggctttgcctgctctcagtgtggccagcccctgttcgtgtacaagctggagcaggtgtctgagaagggcaaggcttacaccaactacttcggacggtgcaatgtggccgagcacgaaaagctgatcctgctggcccagctgaagcccgagaaggatagcgacgaagccgtgacatatagcctgggaaagtttgggcagagggccctggatttctacagcattcatgtgaccaaggagtccacccaccccgtgaagcccctggcccagatcgccggaaacagatacgcctccggacctgtgggaaaggccctgagcgacgcatgtatgggcacaatcgcctccttcctgtctaagtaccaggacatcatcatcgaacaccagaaggtggtgaagggcaaccagaagagactggagagcctgcgggagctggccggcaaggaaaacctggaataccctagcgtgaccctgccacctcagcctcacaccaaggagggcgttgatgcctacaacgaagtgatcgcccgggtgcgaatgtgggtgaacctgaacctgtggcagaagctgaagctaagcagagatgatgccaagcctctgctgagactgaagggattcccttcctttcctctggtcgagagacaggccaacgaagtggactggtgggacatggtgtgtaacgtgaagaagctgatcaacgagaaaaaggaggatggcaaggtgttttggcagaatctggctggctacaagagacaggaagccctgagaccatacctgagcagcgaggaagatcggaagaagggaaagaaattcgctcggtaccagctgggcgacctgctgctgcacctggaaaagaagcacggcgaggactggggaaaggtgtacgacgaggcctgggagcggattgacaagaaagtggaaggcctgagcaagcacatcaagctggaagaggaacggagaagcgaggacgcccagagcaaggccgccctgaccgactggctgcgggctaaggccagcttcgtgatcgagggcctgaaggaggccgacaaggacgagttctgcagatgcgagctgaagctgcagaagtggtacggggacctgcggggaaagcccttcgccatcgaagccgagaacagcatcctggacatcagcggcttcagcaagcagtacaactgtgccttcatctggcagaaggacggcgtgaagaagctgaacctgtacctgatcatcaactacttcaagggcggcaagctgcggttcaagaagatcaaacctgaagccttcgaagccaacagattctacaccgtgatcaacaaaaagagcggcgagatcgtgcccatggaggtgaacttcaacttcgacgaccccaacctgatcatcctgcctctggcctttggcaagagacagggcagagaattcatctggaacgacctgctgtccctggaaaccggcagcctgaagctggccaacggaagagtgatcgagaagacactgtacaacagaagaacccggcaggatgagcctgccctgttcgtggccctgaccttcgagcggcgggaggtcctggactcctccaatatcaaaccaatgaacctgatcggcgtggcaagaggcgaaaacatccccgccgtgatcgccctgaccgaccccgagggctgcccactgagccggtttaaggatagcctgggaaacccaacccacatcctgagaatcggcgagagctataaggagaagcagcggaccatccaggccaagaaggaggtggagcagcggagagccggcggctacagccggaagtacgccagcaaagccaagaatctggcagacgatatggtgagaaacaccgctagagatctgctgtactacgccgtgacccaggatgccatgctgatcttcgccaacctgagccggggcttcggccggcagggcaagcggaccttcatggccgagagacagtacacacggatggaggactggctgaccgccaagctggcctacgagggcctgagcaagacctacctgtccaagacactggcccagtacacctccaagacatgcagcaactgtgggtttaccatcaccagcgccgactacgacagggtgctggagaagctgaagaagacagcaacaggctggatgaccacaattaacggcaaggagctgaaggtggagggccagattacctactacaacagatacaagagacagaacgtagtcaaggacctgtccgtcgagctggatagactgagcgaagaatctgtgaacaacgacatctcctcctggacaaagggcagaagcggagaagctctgagcctcctgaagaaaagattctcccatagacccgtgcaggagaagttcgtgtgcctgaactgcggcttcgagacacacgcagccgagcaagccgccctgaacatcgccagatcctggctgttcctgcggagccaggagtacaagaaataccagacaaacaagacaaccggcaacaccgataagagagccttcgtcgagacctggcagtccttttaccggaagaagcttaaggaggtgtggaaacctgccgtgcggtctggcggatctggcggaggctccaccagccccaagaaaaagagaaaagtctaagctgccttctgcggggcttgccttctggccatgcccttcttctctcccttgcacctgtacctcttggtctttgaataaagcctgagtaggaaggctagcaaaaaaaaaaaaaaaaaaaaaaaaaaaaaaaaaaaaaaaaaaaaaaaaaaaaaaaaaaaaaaaaaaaaaaaaaaaaaaaa

SEQ ID NO: 10114 - RNA, 8787 nt, synthetic construct
  source 1..8787: mol_type = other RNA
aggaaataagagagaaaagaagagtaagaagaaatataagagccaccatggcccctaagaagaagcgtaaagtgagccggatgaaccacgaccaggagttcgacccccctaaggtgtaccctcccgtccccgccgagaagagaaagcccatccgggtcctgagcctgttcgatggcatcgccaccggtctgctggtgctgaaggacctgggcatccaggtggataggtacattgcctccgaggtgtgcgaggactccatcaccgtgggaatggtgcgtcatcagggcaagatcatgtacgtgggcgacgtgcggagcgtgacacagaagcatatccaggagtggggccctttcgacctggtgatcggcggcagcccttgcaatgacctgagcatcgtgaacccagcccggaagggcctgtacgagggaaccggcagactgttcttcgagttttacagactgctgcacgacgcccggcctaaggaaggcgacgaccggcccttcttttggctgttcgagaatgtggtggccatgggagtcagcgacaagcgggatattagccggttcctggagagcaaccccgtgatgatcgatgccaaggaagtgagcgccgcccaccgggccagatacttctggggcaatctgcctggcatgaacagacccctggccagcaccgtgaacgacaagctggagctgcaggagtgcctggagcacggccggatcgccaagttcagcaaggtgagaaccatcaccacccgaagcaacagcatcaaacaaggcaaggaccagcactttcctgtgttcatgaacgagaaggaggacatcctgtggtgtaccgagatggagagagtgttcgggttcccagtccactacacagatgtcagcaacatgtctagactggccagacagagactgctgggaagaagctggtccgtccctgtgatcagacacctgttcgcccctctgaaggagtacttcgcctgcgtgagcagcggcaacagcaacgccaacagccggggccccagcttctctagcggcctggtgccactgtccctgagagggagccacatgggccccatggagatctacaaaaccgtgagcgcctggaagcggcagcctgtgcgcgtgctgagcctgtttcggaatatcgataaagtcctgaaaagcctgggattcctggagagcggctctggctccggcggtggcaccctgaagtacgtggaggatgtgacaaacgtggtcagacgggatgtggagaagtggggccccttcgatctggtgtacggcagcacccaacccctgggcagctcttgtgaccggtgccctggctggtacatgtttcagttccaccggatcctgcagtacgccctgccgagacaggagtcccagcggccattcttttggattttcatggacaacttgctgctgaccgaggatgaccaggaaactaccactcggttcctgcagaccgaagccgtgaccctgcaggacgtgagaggccgggactaccagaacgccatgcgggtgtggtccaacatccctggactgaaaagcaagcacgcacctctgacccctaaagaagaggagtacctgcaggcccaggtgcggagcagaagcaagctggacgcccctaaggtggatctgctggtgaagaattgcctcctgcccctgagagagtacttcaagtatttcagccagaatagtctgcccctgggaggcagcggcggcggcagccaggagctgctgaccttcaaggacgtgagcgtggacttcacccaggaggagtggggccagctgagcctggcccacaggaacctgtacagggaggtgatgctggagaactacggcaacctggtgagcgtggccggctaccagctgagcaagcccagcgtgatcagccagctggagaagggccaggagccctggatgaccgagaagaagggccccggcgaccccagccccgacctgaagaacggcggcccaagcagcggcgcccctcctcccagcggcggcaggcggcccaagcagcggcgcccctcctcccagcggcggcagcccagccggctccccaacctctaccgaggagggcacctctgagtccgccacccccgagagcggccctggcacctccaccgagcccagcgagggcagcgcacccggcagccctgccggcagccccacctccacagaggagggaaccagcaccgagcccagcgaaggcagcgccccaggcaccagcaccgagcctagtgagcaggagattaaacggatcaacaagatcagaagaagacttgtgaaagacagcaacaccaagaaggccggcaagacaggccccatgaaaaccctgctggttagagtgatgacacccgatctgagagagcggctggaaaacctgagaaagaagcctgaaaatatcccccagcccatcagcaatacatctagagccaacctgaataagctgctgaccgattacaccgaaatgaagaaggcgatcctgcatgtgtactgggaagagttccagaaggaccctgtgggcctgatgagccgggtggcccagcctgccagcaagaagatcgatcagaacaagctgaaacctgagatggacgagaagggcaacctgaccaccgccggctttgcctgctctcagtgtggccagcccctgttcgtgtacaagctggagcaggtgtctgagaagggcaaggcttacaccaactacttcggacggtgcaatgtggccgagcacgaaaagctgatcctgctggcccagctgaagcccgagaaggatagcgacgaagccgtgacatatagcctgggaaagtttgggcagagggccctggatttctacagcattcatgtgaccaaggagtccacccaccccgtgaagcccctggcccagatcgccggaaacagatacgcctccggacctgtgggaaaggccctgagcgacgcatgtatgggcacaatcgcctccttcctgtctaagtaccaggacatcatcatcgaacaccagaaggtggtgaagggcaaccagaagagactggagagcctgcgggagctggccggcaaggaaaacctggaataccctagcgtgaccctgccacctcagcctcacaccaaggagggcgttgatgcctacaacgaagtgatcgcccgggtgcgaatgtgggtgaacctgaacctgtggcagaagctgaagctaagcagagatgatgccaagcctctgctgagactgaagggattcccttcctttcctctggtcgagagacaggccaacgaagtggactggtgggacatggtgtgtaacgtgaagaagctgatcaacgagaaaaaggaggatggcaaggtgttttggcagaatctggctggctacaagagacaggaagccctgagaccatacctgagcagcgaggaagatcggaagaagggaaagaaattcgctcggtaccagctgggcgacctgctgctgcacctggaaaagaagcacggcgaggactggggaaaggtgtacgacgaggcctgggagcggattgacaagaaagtggaaggcctgagcaagcacatcaagctggaagaggaacggagaagcgaggacgcccagagcaaggccgccctgaccgactggctgcgggctaaggccagcttcgtgatcgagggcctgaaggaggccgacaaggacgagttctgcagatgcgagctgaagctgcagaagtggtacggggacctgcggggaaagcccttcgccatcgaagccgagaacagcatcctggacatcagcggcttcagcaagcagtacaactgtgccttcatctggcagaaggacggcgtgaagaagctgaacctgtacctgatcatcaactacttcaagggcggcaagctgcggttcaagaagatcaaacctgaagccttcgaagccaacagattctacaccgtgatcaacaaaaagagcggcgagatcgtgcccatggaggtgaacttcaacttcgacgaccccaacctgatcatcctgcctctggcctttggcaagagacagggcagagaattcatctggaacgacctgctgtccctggaaaccggcagcctgaagctggccaacggaagagtgatcgagaagacactgtacaacagaagaacccggcaggatgagcctgccctgttcgtggccctgaccttcgagcggcgggaggtcctggactcctccaatatcaaaccaatgaacctgatcggcgtggcaagaggcgaaaacatccccgccgtgatcgccctgaccgaccccgagggctgcccactgagccggtttaaggatagcctgggaaacccaacccacatcctgagaatcggcgagagctataaggagaagcagcggaccatccaggccaagaaggaggtggagcagcggagagccggcggctacagccggaagtacgccagcaaagccaagaatctggcagacgatatggtgagaaacaccgctagagatctgctgtactacgccgtgacccaggatgccatgctgatcttcgccaacctgagccggggcttcggccggcagggcaagcggaccttcatggccgagagacagtacacacggatggaggactggctgaccgccaagctggcctacgagggcctgagcaagacctacctgtccaagacactggcccagtacacctccaagacatgcagcaactgtgggtttaccatcaccagcgccgactacgacagggtgctggagaagctgaagaagacagcaacaggctggatgaccacaattaacggcaaggagctgaaggtggagggccagattacctactacaacagatacaagagacagaacgtagtcaaggacctgtccgtcgagctggatagactgagcgaagaatctgtgaacaacgacatctcctcctggacaaagggcagaagcggagaagctctgagcctcctgaagaaaagattctcccatagacccgtgcaggagaagttcgtgtgcctgaactgcggcttcgagacacacgcagccgagcaagccgccctgaacatcgccagatcctggctgttcctgcggagccaggagtacaagaaataccagacaaacaagacaaccggcaacaccgataagagagccttcgtcgagacctggcagtccttttaccggaagaagcttaaggaggtgtggaaacctgccgtgcggtctggcggatctggcggaggctccaccagccccaagaaaaagagaaaagtctaagctgccttctgcggggcttgccttctggccatgcccttcttctctcccttgcacctgtacctcttggtctttgaataaagcctgagtaggaaggctagcaaaaaaaaaaaaaaaaaaaaaaaaaaaaaaaaaaaaaaaaaaaaaaaaaaaaaaaaaaaaaaaaaaaaaaaaaaaaaaaagcccagccggctccccaacctctaccgaggagggcacctctgagtccgccacccccgagagcggccctggcacctccaccgagcccagcgagggcagcgcacccggcagccctgccggcagccccacctccacagaggagggaaccagcaccgagcccagcgaaggcagcgccccaggcaccagcaccgagcctagtgagcaggagattaaacggatcaacaagatcagaagaagacttgtgaaagacagcaacaccaagaaggccggcaagacaggccccatgaaaaccctgctggttagagtgatgacacccgatctgagagagcggctggaaaacctgagaaagaagcctgaaaatatcccccagcccatcagcaatacatctagagccaacctgaataagctgctgaccgattacaccgaaatgaagaaggcgatcctgcatgtgtactgggaagagttccagaaggaccctgtgggcctgatgagccgggtggcccagcctgccagcaagaagatcgatcagaacaagctgaaacctgagatggacgagaagggcaacctgaccaccgccggctttgcctgctctcagtgtggccagcccctgttcgtgtacaagctggagcaggtgtctgagaagggcaaggcttacaccaactacttcggacggtgcaatgtggccgagcacgaaaagctgatcctgctggcccagctgaagcccgagaaggatagcgacgaagccgtgacatatagcctgggaaagtttgggcagagggccctggatttctacagcattcatgtgaccaaggagtccacccaccccgtgaagcccctggcccagatcgccggaaacagatacgcctccggacctgtgggaaaggccctgagcgacgcatgtatgggcacaatcgcctccttcctgtctaagtaccaggacatcatcatcgaacaccagaaggtggtgaagggcaaccagaagagactggagagcctgcgggagctggccggcaaggaaaacctggaataccctagcgtgaccctgccacctcagcctcacaccaaggagggcgttgatgcctacaacgaagtgatcgcccgggtgcgaatgtgggtgaacctgaacctgtggcagaagctgaagctaagcagagatgatgccaagcctctgctgagactgaagggattcccttcctttcctctggtcgagagacaggccaacgaagtggactggtgggacatggtgtgtaacgtgaagaagctgatcaacgagaaaaaggaggatggcaaggtgttttggcagaatctggctggctacaagagacaggaagccctgagaccatacctgagcagcgaggaagatcggaagaagggaaagaaattcgctcggtaccagctgggcgacctgctgctgcacctggaaaagaagcacggcgaggactggggaaaggtgtacgacgaggcctgggagcggattgacaagaaagtggaaggcctgagcaagcacatcaagctggaagaggaacggagaagcgaggacgcccagagcaaggccgccctgaccgactggctgcgggctaaggccagcttcgtgatcgagggcctgaaggaggccgacaaggacgagttctgcagatgcgagctgaagctgcagaagtggtacggggacctgcggggaaagcccttcgccatcgaagccgagaacagcatcctggacatcagcggcttcagcaagcagtacaactgtgccttcatctggcagaaggacggcgtgaagaagctgaacctgtacctgatcatcaactacttcaagggcggcaagctgcggttcaagaagatcaaacctgaagccttcgaagccaacagattctacaccgtgatcaacaaaaagagcggcgagatcgtgcccatggaggtgaacttcaacttcgacgaccccaacctgatcatcctgcctctggcctttggcaagagacagggcagagaattcatctggaacgacctgctgtccctggaaaccggcagcctgaagctggccaacggaagagtgatcgagaagacactgtacaacagaagaacccggcaggatgagcctgccctgttcgtggccctgaccttcgagcggcgggaggtcctggactcctccaatatcaaaccaatgaacctgatcggcgtggcaagaggcgaaaacatccccgccgtgatcgccctgaccgaccccgagggctgcccactgagccggtttaaggatagcctgggaaacccaacccacatcctgagaatcggcgagagctataaggagaagcagcggaccatccaggccaagaaggaggtggagcagcggagagccggcggctacagccggaagtacgccagcaaagccaagaatctggcagacgatatggtgagaaacaccgctagagatctgctgtactacgccgtgacccaggatgccatgctgatcttcgccaacctgagccggggcttcggccggcagggcaagcggaccttcatggccgagagacagtacacacggatggaggactggctgaccgccaagctggcctacgagggcctgagcaagacctacctgtccaagacactggcccagtacacctccaagacatgcagcaactgtgggtttaccatcaccagcgccgactacgacagggtgctggagaagctgaagaagacagcaacaggctggatgaccacaattaacggcaaggagctgaaggtggagggccagattacctactacaacagatacaagagacagaacgtagtcaaggacctgtccgtcgagctggatagactgagcgaagaatctgtgaacaacgacatctcctcctggacaaagggcagaagcggagaagctctgagcctcctgaagaaaagattctcccatagacccgtgcaggagaagttcgtgtgcctgaactgcggcttcgagacacacgcagccgagcaagccgccctgaacatcgccagatcctggctgttcctgcggagccaggagtacaagaaataccagacaaacaagacaaccggcaacaccgataagagagccttcgtcgagacctggcagtccttttaccggaagaagcttaaggaggtgtggaaacctgccgtgcggtctggcggatctggcggaggctccaccagccccaagaaaaagagaaaagtctaagctgccttctgcggggcttgccttctggccatgcccttcttctctcccttgcacctgtacctcttggtctttgaataaagcctgagtaggaaggctagcaaaaaaaaaaaaaaaaaaaaaaaaaaaaaaaaaaaaaaaaaaaaaaaaaaaaaaaaaaaaaaaaaaaaaaaaaaaaaaaa

SEQ ID NO: 10115 - RNA, 8787 nt, synthetic construct
  source 1..8787: mol_type = other RNA
aggaaataagagagaaaagaagagtaagaagaaatataagagccaccatggcccctaagaagaagcgtaaagtgagccggatgaaccacgaccaggagttcgacccccctaaggtgtaccctcccgtccccgccgagaagagaaagcccatccgggtcctgagcctgttcgatggcatcgccaccggtctgctggtgctgaaggacctgggcatccaggtggataggtacattgcctccgaggtgtgcgaggactccatcaccgtgggaatggtgcgtcatcagggcaagatcatgtacgtgggcgacgtgcggagcgtgacacagaagcatatccaggagtggggccctttcgacctggtgatcggcggcagcccttgcaatgacctgagcatcgtgaacccagcccggaagggcctgtacgagggaaccggcagactgttcttcgagttttacagactgctgcacgacgcccggcctaaggaaggcgacgaccggcccttcttttggctgttcgagaatgtggtggccatgggagtcagcgacaagcgggatattagccggttcctggagagcaaccccgtgatgatcgatgccaaggaagtgagcgccgcccaccgggccagatacttctggggcaatctgcctggcatgaacagacccctggccagcaccgtgaacgacaagctggagctgcaggagtgcctggagcacggccggatcgccaagttcagcaaggtgagaaccatcaccacccgaagcaacagcatcaaacaaggcaaggaccagcactttcctgtgttcatgaacgagaaggaggacatcctgtggtgtaccgagatggagagagtgttcgggttcccagtccactacacagatgtcagcaacatgtctagactggccagacagagactgctgggaagaagctggtccgtccctgtgatcagacacctgttcgcccctctgaaggagtacttcgcctgcgtgagcagcggcaacagcaacgccaacagccggggccccagcttctctagcggcctggtgccactgtccctgagagggagccacatgggccccatggagatctacaaaaccgtgagcgcctggaagcggcagcctgtgcgcgtgctgagcctgtttcggaatatcgataaagtcctgaaaagcctgggattcctggagagcggctctggctccggcggtggcaccctgaagtacgtggaggatgtgacaaacgtggtcagacgggatgtggagaagtggggccccttcgatctggtgtacggcagcacccaacccctgggcagctcttgtgaccggtgccctggctggtacatgtttcagttccaccggatcctgcagtacgccctgccgagacaggagtcccagcggccattcttttggattttcatggacaacttgctgctgaccgaggatgaccaggaaactaccactcggttcctgcagaccgaagccgtgaccctgcaggacgtgagaggccgggactaccagaacgccatgcgggtgtggtccaacatccctggactgaaaagcaagcacgcacctctgacccctaaagaagaggagtacctgcaggcccaggtgcggagcagaagcaagctggacgcccctaaggtggatctgctggtgaagaattgcctcctgcccctgagagagtacttcaagtatttcagccagaatagtctgcccctgggaggcagcggcggcggcgaggtgcaggagaccctgaccttcgacgacgtggccgtggccttcacctgggaggagtggcagctgctggcccccgcccagaaggccctgtacagggacgtgatgctggagaaccacagcaacctggtgagcgtgggcttccaggccagcacccccgaggtgctgagcaagctggaccagggcgagccctggaccatggacgacgaggtgcactgcaggaccaggagcgaggtgtggaagttcggcggcccaagcagcggcgcccctcctcccagcggcggcaggcggcccaagcagcggcgcccctcctcccagcggcggcagcccagccggctccccaacctctaccgaggagggcacctctgagtccgccacccccgagagcggccctggcacctccaccgagcccagcgagggcagcgcacccggcagccctgccggcagccccacctccacagaggagggaaccagcaccgagcccagcgaaggcagcgccccaggcaccagcaccgagcctagtgagcaggagattaaacggatcaacaagatcagaagaagacttgtgaaagacagcaacaccaagaaggccggcaagacaggccccatgaaaaccctgctggttagagtgatgacacccgatctgagagagcggctggaaaacctgagaaagaagcctgaaaatatcccccagcccatcagcaatacatctagagccaacctgaataagctgctgaccgattacaccgaaatgaagaaggcgatcctgcatgtgtactgggaagagttccagaaggaccctgtgggcctgatgagccgggtggcccagcctgccagcaagaagatcgatcagaacaagctgaaacctgagatggacgagaagggcaacctgaccaccgccggctttgcctgctctcagtgtggccagcccctgttcgtgtacaagctggagcaggtgtctgagaagggcaaggcttacaccaactacttcggacggtgcaatgtggccgagcacgaaaagctgatcctgctggcccagctgaagcccgagaaggatagcgacgaagccgtgacatatagcctgggaaagtttgggcagagggccctggatttctacagcattcatgtgaccaaggagtccacccaccccgtgaagcccctggcccagatcgccggaaacagatacgcctccggacctgtgggaaaggccctgagcgacgcatgtatgggcacaatcgcctccttcctgtctaagtaccaggacatcatcatcgaacaccagaaggtggtgaagggcaaccagaagagactggagagcctgcgggagctggccggcaaggaaaacctggaataccctagcgtgaccctgccacctcagcctcacaccaaggagggcgttgatgcctacaacgaagtgatcgcccgggtgcgaatgtgggtgaacctgaacctgtggcagaagctgaagctaagcagagatgatgccaagcctctgctgagactgaagggattcccttcctttcctctggtcgagagacaggccaacgaagtggactggtgggacatggtgtgtaacgtgaagaagctgatcaacgagaaaaaggaggatggcaaggtgttttggcagaatctggctggctacaagagacaggaagccctgagaccatacctgagcagcgaggaagatcggaagaagggaaagaaattcgctcggtaccagctgggcgacctgctgctgcacctggaaaagaagcacggcgaggactggggaaaggtgtacgacgaggcctgggagcggattgacaagaaagtggaaggcctgagcaagcacatcaagctggaagaggaacggagaagcgaggacgcccagagcaaggccgccctgaccgactggctgcgggctaaggccagcttcgtgatcgagggcctgaaggaggccgacaaggacgagttctgcagatgcgagctgaagctgcagaagtggtacggggacctgcggggaaagcccttcgccatcgaagccgagaacagcatcctggacatcagcggcttcagcaagcagtacaactgtgccttcatctggcagaaggacggcgtgaagaagctgaacctgtacctgatcatcaactacttcaagggcggcaagctgcggttcaagaagatcaaacctgaagccttcgaagccaacagattctacaccgtgatcaacaaaaagagcggcgagatcgtgcccatggaggtgaacttcaacttcgacgaccccaacctgatcatcctgcctctggcctttggcaagagacagggcagagaattcatctggaacgacctgctgtccctggaaaccggcagcctgaagctggccaacggaagagtgatcgagaagacactgtacaacagaagaacccggcaggatgagcctgccctgttcgtggccctgaccttcgagcggcgggaggtcctggactcctccaatatcaaaccaatgaacctgatcggcgtggcaagaggcgaaaacatccccgccgtgatcgccctgaccgaccccgagggctgcccactgagccggtttaaggatagcctgggaaacccaacccacatcctgagaatcggcgagagctataaggagaagcagcggaccatccaggccaagaaggaggtggagcagcggagagccggcggctacagccggaagtacgccagcaaagccaagaatctggcagacgatatggtgagaaacaccgctagagatctgctgtactacgccgtgacccaggatgccatgctgatcttcgccaacctgagccggggcttcggccggcagggcaagcggaccttcatggccgagagacagtacacacggatggaggactggctgaccgccaagctggcctacgagggcctgagcaagacctacctgtccaagacactggcccagtacacctccaagacatgcagcaactgtgggtttaccatcaccagcgccgactacgacagggtgctggagaagctgaagaagacagcaacaggctggatgaccacaattaacggcaaggagctgaaggtggagggccagattacctactacaacagatacaagagacagaacgtagtcaaggacctgtccgtcgagctggatagactgagcgaagaatctgtgaacaacgacatctcctcctggacaaagggcagaagcggagaagctctgagcctcctgaagaaaagattctcccatagacccgtgcaggagaagttcgtgtgcctgaactgcggcttcgagacacacgcagccgagcaagccgccctgaacatcgccagatcctggctgttcctgcggagccaggagtacaagaaataccagacaaacaagacaaccggcaacaccgataagagagccttcgtcgagacctggcagtccttttaccggaagaagcttaaggaggtgtggaaacctgccgtgcggtctggcggatctggcggaggctccaccagccccaagaaaaagagaaaagtctaagctgccttctgcggggcttgccttctggccatgcccttcttctctcccttgcacctgtacctcttggtctttgaataaagcctgagtaggaaggctagcaaaaaaaaaaaaaaaaaaaaaaaaaaaaaaaaaaaaaaaaaaaaaaaaaaaaaaaaaaaaaaaaaaaaaaaaaaaaaaaagcccagccggctccccaacctctaccgaggagggcacctctgagtccgccacccccgagagcggccctggcacctccaccgagcccagcgagggcagcgcacccggcagccctgccggcagccccacctccacagaggagggaaccagcaccgagcccagcgaaggcagcgccccaggcaccagcaccgagcctagtgagcaggagattaaacggatcaacaagatcagaagaagacttgtgaaagacagcaacaccaagaaggccggcaagacaggccccatgaaaaccctgctggttagagtgatgacacccgatctgagagagcggctggaaaacctgagaaagaagcctgaaaatatcccccagcccatcagcaatacatctagagccaacctgaataagctgctgaccgattacaccgaaatgaagaaggcgatcctgcatgtgtactgggaagagttccagaaggaccctgtgggcctgatgagccgggtggcccagcctgccagcaagaagatcgatcagaacaagctgaaacctgagatggacgagaagggcaacctgaccaccgccggctttgcctgctctcagtgtggccagcccctgttcgtgtacaagctggagcaggtgtctgagaagggcaaggcttacaccaactacttcggacggtgcaatgtggccgagcacgaaaagctgatcctgctggcccagctgaagcccgagaaggatagcgacgaagccgtgacatatagcctgggaaagtttgggcagagggccctggatttctacagcattcatgtgaccaaggagtccacccaccccgtgaagcccctggcccagatcgccggaaacagatacgcctccggacctgtgggaaaggccctgagcgacgcatgtatgggcacaatcgcctccttcctgtctaagtaccaggacatcatcatcgaacaccagaaggtggtgaagggcaaccagaagagactggagagcctgcgggagctggccggcaaggaaaacctggaataccctagcgtgaccctgccacctcagcctcacaccaaggagggcgttgatgcctacaacgaagtgatcgcccgggtgcgaatgtgggtgaacctgaacctgtggcagaagctgaagctaagcagagatgatgccaagcctctgctgagactgaagggattcccttcctttcctctggtcgagagacaggccaacgaagtggactggtgggacatggtgtgtaacgtgaagaagctgatcaacgagaaaaaggaggatggcaaggtgttttggcagaatctggctggctacaagagacaggaagccctgagaccatacctgagcagcgaggaagatcggaagaagggaaagaaattcgctcggtaccagctgggcgacctgctgctgcacctggaaaagaagcacggcgaggactggggaaaggtgtacgacgaggcctgggagcggattgacaagaaagtggaaggcctgagcaagcacatcaagctggaagaggaacggagaagcgaggacgcccagagcaaggccgccctgaccgactggctgcgggctaaggccagcttcgtgatcgagggcctgaaggaggccgacaaggacgagttctgcagatgcgagctgaagctgcagaagtggtacggggacctgcggggaaagcccttcgccatcgaagccgagaacagcatcctggacatcagcggcttcagcaagcagtacaactgtgccttcatctggcagaaggacggcgtgaagaagctgaacctgtacctgatcatcaactacttcaagggcggcaagctgcggttcaagaagatcaaacctgaagccttcgaagccaacagattctacaccgtgatcaacaaaaagagcggcgagatcgtgcccatggaggtgaacttcaacttcgacgaccccaacctgatcatcctgcctctggcctttggcaagagacagggcagagaattcatctggaacgacctgctgtccctggaaaccggcagcctgaagctggccaacggaagagtgatcgagaagacactgtacaacagaagaacccggcaggatgagcctgccctgttcgtggccctgaccttcgagcggcgggaggtcctggactcctccaatatcaaaccaatgaacctgatcggcgtggcaagaggcgaaaacatccccgccgtgatcgccctgaccgaccccgagggctgcccactgagccggtttaaggatagcctgggaaacccaacccacatcctgagaatcggcgagagctataaggagaagcagcggaccatccaggccaagaaggaggtggagcagcggagagccggcggctacagccggaagtacgccagcaaagccaagaatctggcagacgatatggtgagaaacaccgctagagatctgctgtactacgccgtgacccaggatgccatgctgatcttcgccaacctgagccggggcttcggccggcagggcaagcggaccttcatggccgagagacagtacacacggatggaggactggctgaccgccaagctggcctacgagggcctgagcaagacctacctgtccaagacactggcccagtacacctccaagacatgcagcaactgtgggtttaccatcaccagcgccgactacgacagggtgctggagaagctgaagaagacagcaacaggctggatgaccacaattaacggcaaggagctgaaggtggagggccagattacctactacaacagatacaagagacagaacgtagtcaaggacctgtccgtcgagctggatagactgagcgaagaatctgtgaacaacgacatctcctcctggacaaagggcagaagcggagaagctctgagcctcctgaagaaaagattctcccatagacccgtgcaggagaagttcgtgtgcctgaactgcggcttcgagacacacgcagccgagcaagccgccctgaacatcgccagatcctggctgttcctgcggagccaggagtacaagaaataccagacaaacaagacaaccggcaacaccgataagagagccttcgtcgagacctggcagtccttttaccggaagaagcttaaggaggtgtggaaacctgccgtgcggtctggcggatctggcggaggctccaccagccccaagaaaaagagaaaagtctaagctgccttctgcggggcttgccttctggccatgcccttcttctctcccttgcacctgtacctcttggtctttgaataaagcctgagtaggaaggctagcaaaaaaaaaaaaaaaaaaaaaaaaaaaaaaaaaaaaaaaaaaaaaaaaaaaaaaaaaaaaaaaaaaaaaaaaaaaaaaaa

SEQ ID NO: 10116 - RNA, 8787 nt, synthetic construct
  source 1..8787: mol_type = other RNA
aggaaataagagagaaaagaagagtaagaagaaatataagagccaccatggcccctaagaagaagcgtaaagtgagccggatgaaccacgaccaggagttcgacccccctaaggtgtaccctcccgtccccgccgagaagagaaagcccatccgggtcctgagcctgttcgatggcatcgccaccggtctgctggtgctgaaggacctgggcatccaggtggataggtacattgcctccgaggtgtgcgaggactccatcaccgtgggaatggtgcgtcatcagggcaagatcatgtacgtgggcgacgtgcggagcgtgacacagaagcatatccaggagtggggccctttcgacctggtgatcggcggcagcccttgcaatgacctgagcatcgtgaacccagcccggaagggcctgtacgagggaaccggcagactgttcttcgagttttacagactgctgcacgacgcccggcctaaggaaggcgacgaccggcccttcttttggctgttcgagaatgtggtggccatgggagtcagcgacaagcgggatattagccggttcctggagagcaaccccgtgatgatcgatgccaaggaagtgagcgccgcccaccgggccagatacttctggggcaatctgcctggcatgaacagacccctggccagcaccgtgaacgacaagctggagctgcaggagtgcctggagcacggccggatcgccaagttcagcaaggtgagaaccatcaccacccgaagcaacagcatcaaacaaggcaaggaccagcactttcctgtgttcatgaacgagaaggaggacatcctgtggtgtaccgagatggagagagtgttcgggttcccagtccactacacagatgtcagcaacatgtctagactggccagacagagactgctgggaagaagctggtccgtccctgtgatcagacacctgttcgcccctctgaaggagtacttcgcctgcgtgagcagcggcaacagcaacgccaacagccggggccccagcttctctagcggcctggtgccactgtccctgagagggagccacatgggccccatggagatctacaaaaccgtgagcgcctggaagcggcagcctgtgcgcgtgctgagcctgtttcggaatatcgataaagtcctgaaaagcctgggattcctggagagcggctctggctccggcggtggcaccctgaagtacgtggaggatgtgacaaacgtggtcagacgggatgtggagaagtggggccccttcgatctggtgtacggcagcacccaacccctgggcagctcttgtgaccggtgccctggctggtacatgtttcagttccaccggatcctgcagtacgccctgccgagacaggagtcccagcggccattcttttggattttcatggacaacttgctgctgaccgaggatgaccaggaaactaccactcggttcctgcagaccgaagccgtgaccctgcaggacgtgagaggccgggactaccagaacgccatgcgggtgtggtccaacatccctggactgaaaagcaagcacgcacctctgacccctaaagaagaggagtacctgcaggcccaggtgcggagcagaagcaagctggacgcccctaaggtggatctgctggtgaagaattgcctcctgcccctgagagagtacttcaagtatttcagccagaatagtctgcccctgggaggcagcggcggcggcagccagggcctggtgaccttcgaggacgtggccgtgtacttcagcctggaggagtggcagaggctggacgccgcccagagggacctgtacaaggaggtgatgcaggagaactacggcatcctggtgagcctgggctaccccatccccaagcccgacctgatcttcaggctggagcagggcgaggagccctgggtgcccgacagccccagccccgaggagggcgacatcgtgaccggcgtgtacggcggcccaagcagcggcgcccctcctcccagcggcggcaggcggcccaagcagcggcgcccctcctcccagcggcggcagcccagccggctccccaacctctaccgaggagggcacctctgagtccgccacccccgagagcggccctggcacctccaccgagcccagcgagggcagcgcacccggcagccctgccggcagccccacctccacagaggagggaaccagcaccgagcccagcgaaggcagcgccccaggcaccagcaccgagcctagtgagcaggagattaaacggatcaacaagatcagaagaagacttgtgaaagacagcaacaccaagaaggccggcaagacaggccccatgaaaaccctgctggttagagtgatgacacccgatctgagagagcggctggaaaacctgagaaagaagcctgaaaatatcccccagcccatcagcaatacatctagagccaacctgaataagctgctgaccgattacaccgaaatgaagaaggcgatcctgcatgtgtactgggaagagttccagaaggaccctgtgggcctgatgagccgggtggcccagcctgccagcaagaagatcgatcagaacaagctgaaacctgagatggacgagaagggcaacctgaccaccgccggctttgcctgctctcagtgtggccagcccctgttcgtgtacaagctggagcaggtgtctgagaagggcaaggcttacaccaactacttcggacggtgcaatgtggccgagcacgaaaagctgatcctgctggcccagctgaagcccgagaaggatagcgacgaagccgtgacatatagcctgggaaagtttgggcagagggccctggatttctacagcattcatgtgaccaaggagtccacccaccccgtgaagcccctggcccagatcgccggaaacagatacgcctccggacctgtgggaaaggccctgagcgacgcatgtatgggcacaatcgcctccttcctgtctaagtaccaggacatcatcatcgaacaccagaaggtggtgaagggcaaccagaagagactggagagcctgcgggagctggccggcaaggaaaacctggaataccctagcgtgaccctgccacctcagcctcacaccaaggagggcgttgatgcctacaacgaagtgatcgcccgggtgcgaatgtgggtgaacctgaacctgtggcagaagctgaagctaagcagagatgatgccaagcctctgctgagactgaagggattcccttcctttcctctggtcgagagacaggccaacgaagtggactggtgggacatggtgtgtaacgtgaagaagctgatcaacgagaaaaaggaggatggcaaggtgttttggcagaatctggctggctacaagagacaggaagccctgagaccatacctgagcagcgaggaagatcggaagaagggaaagaaattcgctcggtaccagctgggcgacctgctgctgcacctggaaaagaagcacggcgaggactggggaaaggtgtacgacgaggcctgggagcggattgacaagaaagtggaaggcctgagcaagcacatcaagctggaagaggaacggagaagcgaggacgcccagagcaaggccgccctgaccgactggctgcgggctaaggccagcttcgtgatcgagggcctgaaggaggccgacaaggacgagttctgcagatgcgagctgaagctgcagaagtggtacggggacctgcggggaaagcccttcgccatcgaagccgagaacagcatcctggacatcagcggcttcagcaagcagtacaactgtgccttcatctggcagaaggacggcgtgaagaagctgaacctgtacctgatcatcaactacttcaagggcggcaagctgcggttcaagaagatcaaacctgaagccttcgaagccaacagattctacaccgtgatcaacaaaaagagcggcgagatcgtgcccatggaggtgaacttcaacttcgacgaccccaacctgatcatcctgcctctggcctttggcaagagacagggcagagaattcatctggaacgacctgctgtccctggaaaccggcagcctgaagctggccaacggaagagtgatcgagaagacactgtacaacagaagaacccggcaggatgagcctgccctgttcgtggccctgaccttcgagcggcgggaggtcctggactcctccaatatcaaaccaatgaacctgatcggcgtggcaagaggcgaaaacatccccgccgtgatcgccctgaccgaccccgagggctgcccactgagccggtttaaggatagcctgggaaacccaacccacatcctgagaatcggcgagagctataaggagaagcagcggaccatccaggccaagaaggaggtggagcagcggagagccggcggctacagccggaagtacgccagcaaagccaagaatctggcagacgatatggtgagaaacaccgctagagatctgctgtactacgccgtgacccaggatgccatgctgatcttcgccaacctgagccggggcttcggccggcagggcaagcggaccttcatggccgagagacagtacacacggatggaggactggctgaccgccaagctggcctacgagggcctgagcaagacctacctgtccaagacactggcccagtacacctccaagacatgcagcaactgtgggtttaccatcaccagcgccgactacgacagggtgctggagaagctgaagaagacagcaacaggctggatgaccacaattaacggcaaggagctgaaggtggagggccagattacctactacaacagatacaagagacagaacgtagtcaaggacctgtccgtcgagctggatagactgagcgaagaatctgtgaacaacgacatctcctcctggacaaagggcagaagcggagaagctctgagcctcctgaagaaaagattctcccatagacccgtgcaggagaagttcgtgtgcctgaactgcggcttcgagacacacgcagccgagcaagccgccctgaacatcgccagatcctggctgttcctgcggagccaggagtacaagaaataccagacaaacaagacaaccggcaacaccgataagagagccttcgtcgagacctggcagtccttttaccggaagaagcttaaggaggtgtggaaacctgccgtgcggtctggcggatctggcggaggctccaccagccccaagaaaaagagaaaagtctaagctgccttctgcggggcttgccttctggccatgcccttcttctctcccttgcacctgtacctcttggtctttgaataaagcctgagtaggaaggctagcaaaaaaaaaaaaaaaaaaaaaaaaaaaaaaaaaaaaaaaaaaaaaaaaaaaaaaaaaaaaaaaaaaaaaaaaaaaaaaaagcccagccggctccccaacctctaccgaggagggcacctctgagtccgccacccccgagagcggccctggcacctccaccgagcccagcgagggcagcgcacccggcagccctgccggcagccccacctccacagaggagggaaccagcaccgagcccagcgaaggcagcgccccaggcaccagcaccgagcctagtgagcaggagattaaacggatcaacaagatcagaagaagacttgtgaaagacagcaacaccaagaaggccggcaagacaggccccatgaaaaccctgctggttagagtgatgacacccgatctgagagagcggctggaaaacctgagaaagaagcctgaaaatatcccccagcccatcagcaatacatctagagccaacctgaataagctgctgaccgattacaccgaaatgaagaaggcgatcctgcatgtgtactgggaagagttccagaaggaccctgtgggcctgatgagccgggtggcccagcctgccagcaagaagatcgatcagaacaagctgaaacctgagatggacgagaagggcaacctgaccaccgccggctttgcctgctctcagtgtggccagcccctgttcgtgtacaagctggagcaggtgtctgagaagggcaaggcttacaccaactacttcggacggtgcaatgtggccgagcacgaaaagctgatcctgctggcccagctgaagcccgagaaggatagcgacgaagccgtgacatatagcctgggaaagtttgggcagagggccctggatttctacagcattcatgtgaccaaggagtccacccaccccgtgaagcccctggcccagatcgccggaaacagatacgcctccggacctgtgggaaaggccctgagcgacgcatgtatgggcacaatcgcctccttcctgtctaagtaccaggacatcatcatcgaacaccagaaggtggtgaagggcaaccagaagagactggagagcctgcgggagctggccggcaaggaaaacctggaataccctagcgtgaccctgccacctcagcctcacaccaaggagggcgttgatgcctacaacgaagtgatcgcccgggtgcgaatgtgggtgaacctgaacctgtggcagaagctgaagctaagcagagatgatgccaagcctctgctgagactgaagggattcccttcctttcctctggtcgagagacaggccaacgaagtggactggtgggacatggtgtgtaacgtgaagaagctgatcaacgagaaaaaggaggatggcaaggtgttttggcagaatctggctggctacaagagacaggaagccctgagaccatacctgagcagcgaggaagatcggaagaagggaaagaaattcgctcggtaccagctgggcgacctgctgctgcacctggaaaagaagcacggcgaggactggggaaaggtgtacgacgaggcctgggagcggattgacaagaaagtggaaggcctgagcaagcacatcaagctggaagaggaacggagaagcgaggacgcccagagcaaggccgccctgaccgactggctgcgggctaaggccagcttcgtgatcgagggcctgaaggaggccgacaaggacgagttctgcagatgcgagctgaagctgcagaagtggtacggggacctgcggggaaagcccttcgccatcgaagccgagaacagcatcctggacatcagcggcttcagcaagcagtacaactgtgccttcatctggcagaaggacggcgtgaagaagctgaacctgtacctgatcatcaactacttcaagggcggcaagctgcggttcaagaagatcaaacctgaagccttcgaagccaacagattctacaccgtgatcaacaaaaagagcggcgagatcgtgcccatggaggtgaacttcaacttcgacgaccccaacctgatcatcctgcctctggcctttggcaagagacagggcagagaattcatctggaacgacctgctgtccctggaaaccggcagcctgaagctggccaacggaagagtgatcgagaagacactgtacaacagaagaacccggcaggatgagcctgccctgttcgtggccctgaccttcgagcggcgggaggtcctggactcctccaatatcaaaccaatgaacctgatcggcgtggcaagaggcgaaaacatccccgccgtgatcgccctgaccgaccccgagggctgcccactgagccggtttaaggatagcctgggaaacccaacccacatcctgagaatcggcgagagctataaggagaagcagcggaccatccaggccaagaaggaggtggagcagcggagagccggcggctacagccggaagtacgccagcaaagccaagaatctggcagacgatatggtgagaaacaccgctagagatctgctgtactacgccgtgacccaggatgccatgctgatcttcgccaacctgagccggggcttcggccggcagggcaagcggaccttcatggccgagagacagtacacacggatggaggactggctgaccgccaagctggcctacgagggcctgagcaagacctacctgtccaagacactggcccagtacacctccaagacatgcagcaactgtgggtttaccatcaccagcgccgactacgacagggtgctggagaagctgaagaagacagcaacaggctggatgaccacaattaacggcaaggagctgaaggtggagggccagattacctactacaacagatacaagagacagaacgtagtcaaggacctgtccgtcgagctggatagactgagcgaagaatctgtgaacaacgacatctcctcctggacaaagggcagaagcggagaagctctgagcctcctgaagaaaagattctcccatagacccgtgcaggagaagttcgtgtgcctgaactgcggcttcgagacacacgcagccgagcaagccgccctgaacatcgccagatcctggctgttcctgcggagccaggagtacaagaaataccagacaaacaagacaaccggcaacaccgataagagagccttcgtcgagacctggcagtccttttaccggaagaagcttaaggaggtgtggaaacctgccgtgcggtctggcggatctggcggaggctccaccagccccaagaaaaagagaaaagtctaagctgccttctgcggggcttgccttctggccatgcccttcttctctcccttgcacctgtacctcttggtctttgaataaagcctgagtaggaaggctagcaaaaaaaaaaaaaaaaaaaaaaaaaaaaaaaaaaaaaaaaaaaaaaaaaaaaaaaaaaaaaaaaaaaaaaaaaaaaaaaa

SEQ ID NO: 10117 - RNA, 8787 nt, synthetic construct
  source 1..8787: mol_type = other RNA
aggaaataagagagaaaagaagagtaagaagaaatataagagccaccatggcccctaagaagaagcgtaaagtgagccggatgaaccacgaccaggagttcgacccccctaaggtgtaccctcccgtccccgccgagaagagaaagcccatccgggtcctgagcctgttcgatggcatcgccaccggtctgctggtgctgaaggacctgggcatccaggtggataggtacattgcctccgaggtgtgcgaggactccatcaccgtgggaatggtgcgtcatcagggcaagatcatgtacgtgggcgacgtgcggagcgtgacacagaagcatatccaggagtggggccctttcgacctggtgatcggcggcagcccttgcaatgacctgagcatcgtgaacccagcccggaagggcctgtacgagggaaccggcagactgttcttcgagttttacagactgctgcacgacgcccggcctaaggaaggcgacgaccggcccttcttttggctgttcgagaatgtggtggccatgggagtcagcgacaagcgggatattagccggttcctggagagcaaccccgtgatgatcgatgccaaggaagtgagcgccgcccaccgggccagatacttctggggcaatctgcctggcatgaacagacccctggccagcaccgtgaacgacaagctggagctgcaggagtgcctggagcacggccggatcgccaagttcagcaaggtgagaaccatcaccacccgaagcaacagcatcaaacaaggcaaggaccagcactttcctgtgttcatgaacgagaaggaggacatcctgtggtgtaccgagatggagagagtgttcgggttcccagtccactacacagatgtcagcaacatgtctagactggccagacagagactgctgggaagaagctggtccgtccctgtgatcagacacctgttcgcccctctgaaggagtacttcgcctgcgtgagcagcggcaacagcaacgccaacagccggggccccagcttctctagcggcctggtgccactgtccctgagagggagccacatgggccccatggagatctacaaaaccgtgagcgcctggaagcggcagcctgtgcgcgtgctgagcctgtttcggaatatcgataaagtcctgaaaagcctgggattcctggagagcggctctggctccggcggtggcaccctgaagtacgtggaggatgtgacaaacgtggtcagacgggatgtggagaagtggggccccttcgatctggtgtacggcagcacccaacccctgggcagctcttgtgaccggtgccctggctggtacatgtttcagttccaccggatcctgcagtacgccctgccgagacaggagtcccagcggccattcttttggattttcatggacaacttgctgctgaccgaggatgaccaggaaactaccactcggttcctgcagaccgaagccgtgaccctgcaggacgtgagaggccgggactaccagaacgccatgcgggtgtggtccaacatccctggactgaaaagcaagcacgcacctctgacccctaaagaagaggagtacctgcaggcccaggtgcggagcagaagcaagctggacgcccctaaggtggatctgctggtgaagaattgcctcctgcccctgagagagtacttcaagtatttcagccagaatagtctgcccctgggaggcagcggcggcggcagcctggagagcgtgaccttccaggacgtggccgtgaacttcacccaggaggagtggggccacctggagcccgcccagaaggacctgtacagggaggtgatgctggagaactaccagaacttcgtgagcctgggcctgcccttcagcaagccccacgtgatcagccagctggagaggggcgaggccccctggatcaccgagagggacgtgcccagggtgagctgccaggacttcttcatccagggcggcccaagcagcggcgcccctcctcccagcggcggcaggcggcccaagcagcggcgcccctcctcccagcggcggcagcccagccggctccccaacctctaccgaggagggcacctctgagtccgccacccccgagagcggccctggcacctccaccgagcccagcgagggcagcgcacccggcagccctgccggcagccccacctccacagaggagggaaccagcaccgagcccagcgaaggcagcgccccaggcaccagcaccgagcctagtgagcaggagattaaacggatcaacaagatcagaagaagacttgtgaaagacagcaacaccaagaaggccggcaagacaggccccatgaaaaccctgctggttagagtgatgacacccgatctgagagagcggctggaaaacctgagaaagaagcctgaaaatatcccccagcccatcagcaatacatctagagccaacctgaataagctgctgaccgattacaccgaaatgaagaaggcgatcctgcatgtgtactgggaagagttccagaaggaccctgtgggcctgatgagccgggtggcccagcctgccagcaagaagatcgatcagaacaagctgaaacctgagatggacgagaagggcaacctgaccaccgccggctttgcctgctctcagtgtggccagcccctgttcgtgtacaagctggagcaggtgtctgagaagggcaaggcttacaccaactacttcggacggtgcaatgtggccgagcacgaaaagctgatcctgctggcccagctgaagcccgagaaggatagcgacgaagccgtgacatatagcctgggaaagtttgggcagagggccctggatttctacagcattcatgtgaccaaggagtccacccaccccgtgaagcccctggcccagatcgccggaaacagatacgcctccggacctgtgggaaaggccctgagcgacgcatgtatgggcacaatcgcctccttcctgtctaagtaccaggacatcatcatcgaacaccagaaggtggtgaagggcaaccagaagagactggagagcctgcgggagctggccggcaaggaaaacctggaataccctagcgtgaccctgccacctcagcctcacaccaaggagggcgttgatgcctacaacgaagtgatcgcccgggtgcgaatgtgggtgaacctgaacctgtggcagaagctgaagctaagcagagatgatgccaagcctctgctgagactgaagggattcccttcctttcctctggtcgagagacaggccaacgaagtggactggtgggacatggtgtgtaacgtgaagaagctgatcaacgagaaaaaggaggatggcaaggtgttttggcagaatctggctggctacaagagacaggaagccctgagaccatacctgagcagcgaggaagatcggaagaagggaaagaaattcgctcggtaccagctgggcgacctgctgctgcacctggaaaagaagcacggcgaggactggggaaaggtgtacgacgaggcctgggagcggattgacaagaaagtggaaggcctgagcaagcacatcaagctggaagaggaacggagaagcgaggacgcccagagcaaggccgccctgaccgactggctgcgggctaaggccagcttcgtgatcgagggcctgaaggaggccgacaaggacgagttctgcagatgcgagctgaagctgcagaagtggtacggggacctgcggggaaagcccttcgccatcgaagccgagaacagcatcctggacatcagcggcttcagcaagcagtacaactgtgccttcatctggcagaaggacggcgtgaagaagctgaacctgtacctgatcatcaactacttcaagggcggcaagctgcggttcaagaagatcaaacctgaagccttcgaagccaacagattctacaccgtgatcaacaaaaagagcggcgagatcgtgcccatggaggtgaacttcaacttcgacgaccccaacctgatcatcctgcctctggcctttggcaagagacagggcagagaattcatctggaacgacctgctgtccctggaaaccggcagcctgaagctggccaacggaagagtgatcgagaagacactgtacaacagaagaacccggcaggatgagcctgccctgttcgtggccctgaccttcgagcggcgggaggtcctggactcctccaatatcaaaccaatgaacctgatcggcgtggcaagaggcgaaaacatccccgccgtgatcgccctgaccgaccccgagggctgcccactgagccggtttaaggatagcctgggaaacccaacccacatcctgagaatcggcgagagctataaggagaagcagcggaccatccaggccaagaaggaggtggagcagcggagagccggcggctacagccggaagtacgccagcaaagccaagaatctggcagacgatatggtgagaaacaccgctagagatctgctgtactacgccgtgacccaggatgccatgctgatcttcgccaacctgagccggggcttcggccggcagggcaagcggaccttcatggccgagagacagtacacacggatggaggactggctgaccgccaagctggcctacgagggcctgagcaagacctacctgtccaagacactggcccagtacacctccaagacatgcagcaactgtgggtttaccatcaccagcgccgactacgacagggtgctggagaagctgaagaagacagcaacaggctggatgaccacaattaacggcaaggagctgaaggtggagggccagattacctactacaacagatacaagagacagaacgtagtcaaggacctgtccgtcgagctggatagactgagcgaagaatctgtgaacaacgacatctcctcctggacaaagggcagaagcggagaagctctgagcctcctgaagaaaagattctcccatagacccgtgcaggagaagttcgtgtgcctgaactgcggcttcgagacacacgcagccgagcaagccgccctgaacatcgccagatcctggctgttcctgcggagccaggagtacaagaaataccagacaaacaagacaaccggcaacaccgataagagagccttcgtcgagacctggcagtccttttaccggaagaagcttaaggaggtgtggaaacctgccgtgcggtctggcggatctggcggaggctccaccagccccaagaaaaagagaaaagtctaagctgccttctgcggggcttgccttctggccatgcccttcttctctcccttgcacctgtacctcttggtctttgaataaagcctgagtaggaaggctagcaaaaaaaaaaaaaaaaaaaaaaaaaaaaaaaaaaaaaaaaaaaaaaaaaaaaaaaaaaaaaaaaaaaaaaaaaaaaaaaagcccagccggctccccaacctctaccgaggagggcacctctgagtccgccacccccgagagcggccctggcacctccaccgagcccagcgagggcagcgcacccggcagccctgccggcagccccacctccacagaggagggaaccagcaccgagcccagcgaaggcagcgccccaggcaccagcaccgagcctagtgagcaggagattaaacggatcaacaagatcagaagaagacttgtgaaagacagcaacaccaagaaggccggcaagacaggccccatgaaaaccctgctggttagagtgatgacacccgatctgagagagcggctggaaaacctgagaaagaagcctgaaaatatcccccagcccatcagcaatacatctagagccaacctgaataagctgctgaccgattacaccgaaatgaagaaggcgatcctgcatgtgtactgggaagagttccagaaggaccctgtgggcctgatgagccgggtggcccagcctgccagcaagaagatcgatcagaacaagctgaaacctgagatggacgagaagggcaacctgaccaccgccggctttgcctgctctcagtgtggccagcccctgttcgtgtacaagctggagcaggtgtctgagaagggcaaggcttacaccaactacttcggacggtgcaatgtggccgagcacgaaaagctgatcctgctggcccagctgaagcccgagaaggatagcgacgaagccgtgacatatagcctgggaaagtttgggcagagggccctggatttctacagcattcatgtgaccaaggagtccacccaccccgtgaagcccctggcccagatcgccggaaacagatacgcctccggacctgtgggaaaggccctgagcgacgcatgtatgggcacaatcgcctccttcctgtctaagtaccaggacatcatcatcgaacaccagaaggtggtgaagggcaaccagaagagactggagagcctgcgggagctggccggcaaggaaaacctggaataccctagcgtgaccctgccacctcagcctcacaccaaggagggcgttgatgcctacaacgaagtgatcgcccgggtgcgaatgtgggtgaacctgaacctgtggcagaagctgaagctaagcagagatgatgccaagcctctgctgagactgaagggattcccttcctttcctctggtcgagagacaggccaacgaagtggactggtgggacatggtgtgtaacgtgaagaagctgatcaacgagaaaaaggaggatggcaaggtgttttggcagaatctggctggctacaagagacaggaagccctgagaccatacctgagcagcgaggaagatcggaagaagggaaagaaattcgctcggtaccagctgggcgacctgctgctgcacctggaaaagaagcacggcgaggactggggaaaggtgtacgacgaggcctgggagcggattgacaagaaagtggaaggcctgagcaagcacatcaagctggaagaggaacggagaagcgaggacgcccagagcaaggccgccctgaccgactggctgcgggctaaggccagcttcgtgatcgagggcctgaaggaggccgacaaggacgagttctgcagatgcgagctgaagctgcagaagtggtacggggacctgcggggaaagcccttcgccatcgaagccgagaacagcatcctggacatcagcggcttcagcaagcagtacaactgtgccttcatctggcagaaggacggcgtgaagaagctgaacctgtacctgatcatcaactacttcaagggcggcaagctgcggttcaagaagatcaaacctgaagccttcgaagccaacagattctacaccgtgatcaacaaaaagagcggcgagatcgtgcccatggaggtgaacttcaacttcgacgaccccaacctgatcatcctgcctctggcctttggcaagagacagggcagagaattcatctggaacgacctgctgtccctggaaaccggcagcctgaagctggccaacggaagagtgatcgagaagacactgtacaacagaagaacccggcaggatgagcctgccctgttcgtggccctgaccttcgagcggcgggaggtcctggactcctccaatatcaaaccaatgaacctgatcggcgtggcaagaggcgaaaacatccccgccgtgatcgccctgaccgaccccgagggctgcccactgagccggtttaaggatagcctgggaaacccaacccacatcctgagaatcggcgagagctataaggagaagcagcggaccatccaggccaagaaggaggtggagcagcggagagccggcggctacagccggaagtacgccagcaaagccaagaatctggcagacgatatggtgagaaacaccgctagagatctgctgtactacgccgtgacccaggatgccatgctgatcttcgccaacctgagccggggcttcggccggcagggcaagcggaccttcatggccgagagacagtacacacggatggaggactggctgaccgccaagctggcctacgagggcctgagcaagacctacctgtccaagacactggcccagtacacctccaagacatgcagcaactgtgggtttaccatcaccagcgccgactacgacagggtgctggagaagctgaagaagacagcaacaggctggatgaccacaattaacggcaaggagctgaaggtggagggccagattacctactacaacagatacaagagacagaacgtagtcaaggacctgtccgtcgagctggatagactgagcgaagaatctgtgaacaacgacatctcctcctggacaaagggcagaagcggagaagctctgagcctcctgaagaaaagattctcccatagacccgtgcaggagaagttcgtgtgcctgaactgcggcttcgagacacacgcagccgagcaagccgccctgaacatcgccagatcctggctgttcctgcggagccaggagtacaagaaataccagacaaacaagacaaccggcaacaccgataagagagccttcgtcgagacctggcagtccttttaccggaagaagcttaaggaggtgtggaaacctgccgtgcggtctggcggatctggcggaggctccaccagccccaagaaaaagagaaaagtctaagctgccttctgcggggcttgccttctggccatgcccttcttctctcccttgcacctgtacctcttggtctttgaataaagcctgagtaggaaggctagcaaaaaaaaaaaaaaaaaaaaaaaaaaaaaaaaaaaaaaaaaaaaaaaaaaaaaaaaaaaaaaaaaaaaaaaaaaaaaaaa

SEQ ID NO: 10118 - RNA, 8787 nt, synthetic construct
  source 1..8787: mol_type = other RNA
aggaaataagagagaaaagaagagtaagaagaaatataagagccaccatggcccctaagaagaagcgtaaagtgagccggatgaaccacgaccaggagttcgacccccctaaggtgtaccctcccgtccccgccgagaagagaaagcccatccgggtcctgagcctgttcgatggcatcgccaccggtctgctggtgctgaaggacctgggcatccaggtggataggtacattgcctccgaggtgtgcgaggactccatcaccgtgggaatggtgcgtcatcagggcaagatcatgtacgtgggcgacgtgcggagcgtgacacagaagcatatccaggagtggggccctttcgacctggtgatcggcggcagcccttgcaatgacctgagcatcgtgaacccagcccggaagggcctgtacgagggaaccggcagactgttcttcgagttttacagactgctgcacgacgcccggcctaaggaaggcgacgaccggcccttcttttggctgttcgagaatgtggtggccatgggagtcagcgacaagcgggatattagccggttcctggagagcaaccccgtgatgatcgatgccaaggaagtgagcgccgcccaccgggccagatacttctggggcaatctgcctggcatgaacagacccctggccagcaccgtgaacgacaagctggagctgcaggagtgcctggagcacggccggatcgccaagttcagcaaggtgagaaccatcaccacccgaagcaacagcatcaaacaaggcaaggaccagcactttcctgtgttcatgaacgagaaggaggacatcctgtggtgtaccgagatggagagagtgttcgggttcccagtccactacacagatgtcagcaacatgtctagactggccagacagagactgctgggaagaagctggtccgtccctgtgatcagacacctgttcgcccctctgaaggagtacttcgcctgcgtgagcagcggcaacagcaacgccaacagccggggccccagcttctctagcggcctggtgccactgtccctgagagggagccacatgggccccatggagatctacaaaaccgtgagcgcctggaagcggcagcctgtgcgcgtgctgagcctgtttcggaatatcgataaagtcctgaaaagcctgggattcctggagagcggctctggctccggcggtggcaccctgaagtacgtggaggatgtgacaaacgtggtcagacgggatgtggagaagtggggccccttcgatctggtgtacggcagcacccaacccctgggcagctcttgtgaccggtgccctggctggtacatgtttcagttccaccggatcctgcagtacgccctgccgagacaggagtcccagcggccattcttttggattttcatggacaacttgctgctgaccgaggatgaccaggaaactaccactcggttcctgcagaccgaagccgtgaccctgcaggacgtgagaggccgggactaccagaacgccatgcgggtgtggtccaacatccctggactgaaaagcaagcacgcacctctgacccctaaagaagaggagtacctgcaggcccaggtgcggagcagaagcaagctggacgcccctaaggtggatctgctggtgaagaattgcctcctgcccctgagagagtacttcaagtatttcagccagaatagtctgcccctgggaggcagcggcggcggcaagagcaagagcaaggcccccgtgaccttcggcgacctggccatctacttcagccaggaggagtgggagtggctgagccccatccagaaggacctgtacgaggacgtgatgctggagaactaccagaacctggtgagcctgggcctgagcttcaggaggcccaacgtgatcaccctgctggagaagggcaaggccccctggatggtggagcccgtgaagaggaggaggggcctgggccccctgggcggcccaagcagcggcgcccctcctcccagcggcggcaggcggcccaagcagcggcgcccctcctcccagcggcggcagcccagccggctccccaacctctaccgaggagggcacctctgagtccgccacccccgagagcggccctggcacctccaccgagcccagcgagggcagcgcacccggcagccctgccggcagccccacctccacagaggagggaaccagcaccgagcccagcgaaggcagcgccccaggcaccagcaccgagcctagtgagcaggagattaaacggatcaacaagatcagaagaagacttgtgaaagacagcaacaccaagaaggccggcaagacaggccccatgaaaaccctgctggttagagtgatgacacccgatctgagagagcggctggaaaacctgagaaagaagcctgaaaatatcccccagcccatcagcaatacatctagagccaacctgaataagctgctgaccgattacaccgaaatgaagaaggcgatcctgcatgtgtactgggaagagttccagaaggaccctgtgggcctgatgagccgggtggcccagcctgccagcaagaagatcgatcagaacaagctgaaacctgagatggacgagaagggcaacctgaccaccgccggctttgcctgctctcagtgtggccagcccctgttcgtgtacaagctggagcaggtgtctgagaagggcaaggcttacaccaactacttcggacggtgcaatgtggccgagcacgaaaagctgatcctgctggcccagctgaagcccgagaaggatagcgacgaagccgtgacatatagcctgggaaagtttgggcagagggccctggatttctacagcattcatgtgaccaaggagtccacccaccccgtgaagcccctggcccagatcgccggaaacagatacgcctccggacctgtgggaaaggccctgagcgacgcatgtatgggcacaatcgcctccttcctgtctaagtaccaggacatcatcatcgaacaccagaaggtggtgaagggcaaccagaagagactggagagcctgcgggagctggccggcaaggaaaacctggaataccctagcgtgaccctgccacctcagcctcacaccaaggagggcgttgatgcctacaacgaagtgatcgcccgggtgcgaatgtgggtgaacctgaacctgtggcagaagctgaagctaagcagagatgatgccaagcctctgctgagactgaagggattcccttcctttcctctggtcgagagacaggccaacgaagtggactggtgggacatggtgtgtaacgtgaagaagctgatcaacgagaaaaaggaggatggcaaggtgttttggcagaatctggctggctacaagagacaggaagccctgagaccatacctgagcagcgaggaagatcggaagaagggaaagaaattcgctcggtaccagctgggcgacctgctgctgcacctggaaaagaagcacggcgaggactggggaaaggtgtacgacgaggcctgggagcggattgacaagaaagtggaaggcctgagcaagcacatcaagctggaagaggaacggagaagcgaggacgcccagagcaaggccgccctgaccgactggctgcgggctaaggccagcttcgtgatcgagggcctgaaggaggccgacaaggacgagttctgcagatgcgagctgaagctgcagaagtggtacggggacctgcggggaaagcccttcgccatcgaagccgagaacagcatcctggacatcagcggcttcagcaagcagtacaactgtgccttcatctggcagaaggacggcgtgaagaagctgaacctgtacctgatcatcaactacttcaagggcggcaagctgcggttcaagaagatcaaacctgaagccttcgaagccaacagattctacaccgtgatcaacaaaaagagcggcgagatcgtgcccatggaggtgaacttcaacttcgacgaccccaacctgatcatcctgcctctggcctttggcaagagacagggcagagaattcatctggaacgacctgctgtccctggaaaccggcagcctgaagctggccaacggaagagtgatcgagaagacactgtacaacagaagaacccggcaggatgagcctgccctgttcgtggccctgaccttcgagcggcgggaggtcctggactcctccaatatcaaaccaatgaacctgatcggcgtggcaagaggcgaaaacatccccgccgtgatcgccctgaccgaccccgagggctgcccactgagccggtttaaggatagcctgggaaacccaacccacatcctgagaatcggcgagagctataaggagaagcagcggaccatccaggccaagaaggaggtggagcagcggagagccggcggctacagccggaagtacgccagcaaagccaagaatctggcagacgatatggtgagaaacaccgctagagatctgctgtactacgccgtgacccaggatgccatgctgatcttcgccaacctgagccggggcttcggccggcagggcaagcggaccttcatggccgagagacagtacacacggatggaggactggctgaccgccaagctggcctacgagggcctgagcaagacctacctgtccaagacactggcccagtacacctccaagacatgcagcaactgtgggtttaccatcaccagcgccgactacgacagggtgctggagaagctgaagaagacagcaacaggctggatgaccacaattaacggcaaggagctgaaggtggagggccagattacctactacaacagatacaagagacagaacgtagtcaaggacctgtccgtcgagctggatagactgagcgaagaatctgtgaacaacgacatctcctcctggacaaagggcagaagcggagaagctctgagcctcctgaagaaaagattctcccatagacccgtgcaggagaagttcgtgtgcctgaactgcggcttcgagacacacgcagccgagcaagccgccctgaacatcgccagatcctggctgttcctgcggagccaggagtacaagaaataccagacaaacaagacaaccggcaacaccgataagagagccttcgtcgagacctggcagtccttttaccggaagaagcttaaggaggtgtggaaacctgccgtgcggtctggcggatctggcggaggctccaccagccccaagaaaaagagaaaagtctaagctgccttctgcggggcttgccttctggccatgcccttcttctctcccttgcacctgtacctcttggtctttgaataaagcctgagtaggaaggctagcaaaaaaaaaaaaaaaaaaaaaaaaaaaaaaaaaaaaaaaaaaaaaaaaaaaaaaaaaaaaaaaaaaaaaaaaaaaaaaaagcccagccggctccccaacctctaccgaggagggcacctctgagtccgccacccccgagagcggccctggcacctccaccgagcccagcgagggcagcgcacccggcagccctgccggcagccccacctccacagaggagggaaccagcaccgagcccagcgaaggcagcgccccaggcaccagcaccgagcctagtgagcaggagattaaacggatcaacaagatcagaagaagacttgtgaaagacagcaacaccaagaaggccggcaagacaggccccatgaaaaccctgctggttagagtgatgacacccgatctgagagagcggctggaaaacctgagaaagaagcctgaaaatatcccccagcccatcagcaatacatctagagccaacctgaataagctgctgaccgattacaccgaaatgaagaaggcgatcctgcatgtgtactgggaagagttccagaaggaccctgtgggcctgatgagccgggtggcccagcctgccagcaagaagatcgatcagaacaagctgaaacctgagatggacgagaagggcaacctgaccaccgccggctttgcctgctctcagtgtggccagcccctgttcgtgtacaagctggagcaggtgtctgagaagggcaaggcttacaccaactacttcggacggtgcaatgtggccgagcacgaaaagctgatcctgctggcccagctgaagcccgagaaggatagcgacgaagccgtgacatatagcctgggaaagtttgggcagagggccctggatttctacagcattcatgtgaccaaggagtccacccaccccgtgaagcccctggcccagatcgccggaaacagatacgcctccggacctgtgggaaaggccctgagcgacgcatgtatgggcacaatcgcctccttcctgtctaagtaccaggacatcatcatcgaacaccagaaggtggtgaagggcaaccagaagagactggagagcctgcgggagctggccggcaaggaaaacctggaataccctagcgtgaccctgccacctcagcctcacaccaaggagggcgttgatgcctacaacgaagtgatcgcccgggtgcgaatgtgggtgaacctgaacctgtggcagaagctgaagctaagcagagatgatgccaagcctctgctgagactgaagggattcccttcctttcctctggtcgagagacaggccaacgaagtggactggtgggacatggtgtgtaacgtgaagaagctgatcaacgagaaaaaggaggatggcaaggtgttttggcagaatctggctggctacaagagacaggaagccctgagaccatacctgagcagcgaggaagatcggaagaagggaaagaaattcgctcggtaccagctgggcgacctgctgctgcacctggaaaagaagcacggcgaggactggggaaaggtgtacgacgaggcctgggagcggattgacaagaaagtggaaggcctgagcaagcacatcaagctggaagaggaacggagaagcgaggacgcccagagcaaggccgccctgaccgactggctgcgggctaaggccagcttcgtgatcgagggcctgaaggaggccgacaaggacgagttctgcagatgcgagctgaagctgcagaagtggtacggggacctgcggggaaagcccttcgccatcgaagccgagaacagcatcctggacatcagcggcttcagcaagcagtacaactgtgccttcatctggcagaaggacggcgtgaagaagctgaacctgtacctgatcatcaactacttcaagggcggcaagctgcggttcaagaagatcaaacctgaagccttcgaagccaacagattctacaccgtgatcaacaaaaagagcggcgagatcgtgcccatggaggtgaacttcaacttcgacgaccccaacctgatcatcctgcctctggcctttggcaagagacagggcagagaattcatctggaacgacctgctgtccctggaaaccggcagcctgaagctggccaacggaagagtgatcgagaagacactgtacaacagaagaacccggcaggatgagcctgccctgttcgtggccctgaccttcgagcggcgggaggtcctggactcctccaatatcaaaccaatgaacctgatcggcgtggcaagaggcgaaaacatccccgccgtgatcgccctgaccgaccccgagggctgcccactgagccggtttaaggatagcctgggaaacccaacccacatcctgagaatcggcgagagctataaggagaagcagcggaccatccaggccaagaaggaggtggagcagcggagagccggcggctacagccggaagtacgccagcaaagccaagaatctggcagacgatatggtgagaaacaccgctagagatctgctgtactacgccgtgacccaggatgccatgctgatcttcgccaacctgagccggggcttcggccggcagggcaagcggaccttcatggccgagagacagtacacacggatggaggactggctgaccgccaagctggcctacgagggcctgagcaagacctacctgtccaagacactggcccagtacacctccaagacatgcagcaactgtgggtttaccatcaccagcgccgactacgacagggtgctggagaagctgaagaagacagcaacaggctggatgaccacaattaacggcaaggagctgaaggtggagggccagattacctactacaacagatacaagagacagaacgtagtcaaggacctgtccgtcgagctggatagactgagcgaagaatctgtgaacaacgacatctcctcctggacaaagggcagaagcggagaagctctgagcctcctgaagaaaagattctcccatagacccgtgcaggagaagttcgtgtgcctgaactgcggcttcgagacacacgcagccgagcaagccgccctgaacatcgccagatcctggctgttcctgcggagccaggagtacaagaaataccagacaaacaagacaaccggcaacaccgataagagagccttcgtcgagacctggcagtccttttaccggaagaagcttaaggaggtgtggaaacctgccgtgcggtctggcggatctggcggaggctccaccagccccaagaaaaagagaaaagtctaagctgccttctgcggggcttgccttctggccatgcccttcttctctcccttgcacctgtacctcttggtctttgaataaagcctgagtaggaaggctagcaaaaaaaaaaaaaaaaaaaaaaaaaaaaaaaaaaaaaaaaaaaaaaaaaaaaaaaaaaaaaaaaaaaaaaaaaaaaaaaa

SEQ ID NO: 10119 - RNA, 8787 nt, synthetic construct
  source 1..8787: mol_type = other RNA
aggaaataagagagaaaagaagagtaagaagaaatataagagccaccatggcccctaagaagaagcgtaaagtgagccggatgaaccacgaccaggagttcgacccccctaaggtgtaccctcccgtccccgccgagaagagaaagcccatccgggtcctgagcctgttcgatggcatcgccaccggtctgctggtgctgaaggacctgggcatccaggtggataggtacattgcctccgaggtgtgcgaggactccatcaccgtgggaatggtgcgtcatcagggcaagatcatgtacgtgggcgacgtgcggagcgtgacacagaagcatatccaggagtggggccctttcgacctggtgatcggcggcagcccttgcaatgacctgagcatcgtgaacccagcccggaagggcctgtacgagggaaccggcagactgttcttcgagttttacagactgctgcacgacgcccggcctaaggaaggcgacgaccggcccttcttttggctgttcgagaatgtggtggccatgggagtcagcgacaagcgggatattagccggttcctggagagcaaccccgtgatgatcgatgccaaggaagtgagcgccgcccaccgggccagatacttctggggcaatctgcctggcatgaacagacccctggccagcaccgtgaacgacaagctggagctgcaggagtgcctggagcacggccggatcgccaagttcagcaaggtgagaaccatcaccacccgaagcaacagcatcaaacaaggcaaggaccagcactttcctgtgttcatgaacgagaaggaggacatcctgtggtgtaccgagatggagagagtgttcgggttcccagtccactacacagatgtcagcaacatgtctagactggccagacagagactgctgggaagaagctggtccgtccctgtgatcagacacctgttcgcccctctgaaggagtacttcgcctgcgtgagcagcggcaacagcaacgccaacagccggggccccagcttctctagcggcctggtgccactgtccctgagagggagccacatgggccccatggagatctacaaaaccgtgagcgcctggaagcggcagcctgtgcgcgtgctgagcctgtttcggaatatcgataaagtcctgaaaagcctgggattcctggagagcggctctggctccggcggtggcaccctgaagtacgtggaggatgtgacaaacgtggtcagacgggatgtggagaagtggggccccttcgatctggtgtacggcagcacccaacccctgggcagctcttgtgaccggtgccctggctggtacatgtttcagttccaccggatcctgcagtacgccctgccgagacaggagtcccagcggccattcttttggattttcatggacaacttgctgctgaccgaggatgaccaggaaactaccactcggttcctgcagaccgaagccgtgaccctgcaggacgtgagaggccgggactaccagaacgccatgcgggtgtggtccaacatccctggactgaaaagcaagcacgcacctctgacccctaaagaagaggagtacctgcaggcccaggtgcggagcagaagcaagctggacgcccctaaggtggatctgctggtgaagaattgcctcctgcccctgagagagtacttcaagtatttcagccagaatagtctgcccctgggaggcagcggcggcggcaagcccggcgccgtgagcttcgccgacgtggccgtgtacttcagccccgaggagtggggctgcctgaggcccgcccagagggccctgtacagggacgtgatgagggagacctacggccacctgggcgccctgggcttcaggggcaccaagcccgccctgatcagctgggtggaggaggaggccgacctgtggggccccgacgccagggaccccgaggtgggcgagtgcctgaccgccgccgacggcggcccaagcagcggcgcccctcctcccagcggcggcaggcggcccaagcagcggcgcccctcctcccagcggcggcagcccagccggctccccaacctctaccgaggagggcacctctgagtccgccacccccgagagcggccctggcacctccaccgagcccagcgagggcagcgcacccggcagccctgccggcagccccacctccacagaggagggaaccagcaccgagcccagcgaaggcagcgccccaggcaccagcaccgagcctagtgagcaggagattaaacggatcaacaagatcagaagaagacttgtgaaagacagcaacaccaagaaggccggcaagacaggccccatgaaaaccctgctggttagagtgatgacacccgatctgagagagcggctggaaaacctgagaaagaagcctgaaaatatcccccagcccatcagcaatacatctagagccaacctgaataagctgctgaccgattacaccgaaatgaagaaggcgatcctgcatgtgtactgggaagagttccagaaggaccctgtgggcctgatgagccgggtggcccagcctgccagcaagaagatcgatcagaacaagctgaaacctgagatggacgagaagggcaacctgaccaccgccggctttgcctgctctcagtgtggccagcccctgttcgtgtacaagctggagcaggtgtctgagaagggcaaggcttacaccaactacttcggacggtgcaatgtggccgagcacgaaaagctgatcctgctggcccagctgaagcccgagaaggatagcgacgaagccgtgacatatagcctgggaaagtttgggcagagggccctggatttctacagcattcatgtgaccaaggagtccacccaccccgtgaagcccctggcccagatcgccggaaacagatacgcctccggacctgtgggaaaggccctgagcgacgcatgtatgggcacaatcgcctccttcctgtctaagtaccaggacatcatcatcgaacaccagaaggtggtgaagggcaaccagaagagactggagagcctgcgggagctggccggcaaggaaaacctggaataccctagcgtgaccctgccacctcagcctcacaccaaggagggcgttgatgcctacaacgaagtgatcgcccgggtgcgaatgtgggtgaacctgaacctgtggcagaagctgaagctaagcagagatgatgccaagcctctgctgagactgaagggattcccttcctttcctctggtcgagagacaggccaacgaagtggactggtgggacatggtgtgtaacgtgaagaagctgatcaacgagaaaaaggaggatggcaaggtgttttggcagaatctggctggctacaagagacaggaagccctgagaccatacctgagcagcgaggaagatcggaagaagggaaagaaattcgctcggtaccagctgggcgacctgctgctgcacctggaaaagaagcacggcgaggactggggaaaggtgtacgacgaggcctgggagcggattgacaagaaagtggaaggcctgagcaagcacatcaagctggaagaggaacggagaagcgaggacgcccagagcaaggccgccctgaccgactggctgcgggctaaggccagcttcgtgatcgagggcctgaaggaggccgacaaggacgagttctgcagatgcgagctgaagctgcagaagtggtacggggacctgcggggaaagcccttcgccatcgaagccgagaacagcatcctggacatcagcggcttcagcaagcagtacaactgtgccttcatctggcagaaggacggcgtgaagaagctgaacctgtacctgatcatcaactacttcaagggcggcaagctgcggttcaagaagatcaaacctgaagccttcgaagccaacagattctacaccgtgatcaacaaaaagagcggcgagatcgtgcccatggaggtgaacttcaacttcgacgaccccaacctgatcatcctgcctctggcctttggcaagagacagggcagagaattcatctggaacgacctgctgtccctggaaaccggcagcctgaagctggccaacggaagagtgatcgagaagacactgtacaacagaagaacccggcaggatgagcctgccctgttcgtggccctgaccttcgagcggcgggaggtcctggactcctccaatatcaaaccaatgaacctgatcggcgtggcaagaggcgaaaacatccccgccgtgatcgccctgaccgaccccgagggctgcccactgagccggtttaaggatagcctgggaaacccaacccacatcctgagaatcggcgagagctataaggagaagcagcggaccatccaggccaagaaggaggtggagcagcggagagccggcggctacagccggaagtacgccagcaaagccaagaatctggcagacgatatggtgagaaacaccgctagagatctgctgtactacgccgtgacccaggatgccatgctgatcttcgccaacctgagccggggcttcggccggcagggcaagcggaccttcatggccgagagacagtacacacggatggaggactggctgaccgccaagctggcctacgagggcctgagcaagacctacctgtccaagacactggcccagtacacctccaagacatgcagcaactgtgggtttaccatcaccagcgccgactacgacagggtgctggagaagctgaagaagacagcaacaggctggatgaccacaattaacggcaaggagctgaaggtggagggccagattacctactacaacagatacaagagacagaacgtagtcaaggacctgtccgtcgagctggatagactgagcgaagaatctgtgaacaacgacatctcctcctggacaaagggcagaagcggagaagctctgagcctcctgaagaaaagattctcccatagacccgtgcaggagaagttcgtgtgcctgaactgcggcttcgagacacacgcagccgagcaagccgccctgaacatcgccagatcctggctgttcctgcggagccaggagtacaagaaataccagacaaacaagacaaccggcaacaccgataagagagccttcgtcgagacctggcagtccttttaccggaagaagcttaaggaggtgtggaaacctgccgtgcggtctggcggatctggcggaggctccaccagccccaagaaaaagagaaaagtctaagctgccttctgcggggcttgccttctggccatgcccttcttctctcccttgcacctgtacctcttggtctttgaataaagcctgagtaggaaggctagcaaaaaaaaaaaaaaaaaaaaaaaaaaaaaaaaaaaaaaaaaaaaaaaaaaaaaaaaaaaaaaaaaaaaaaaaaaaaaaaagcccagccggctccccaacctctaccgaggagggcacctctgagtccgccacccccgagagcggccctggcacctccaccgagcccagcgagggcagcgcacccggcagccctgccggcagccccacctccacagaggagggaaccagcaccgagcccagcgaaggcagcgccccaggcaccagcaccgagcctagtgagcaggagattaaacggatcaacaagatcagaagaagacttgtgaaagacagcaacaccaagaaggccggcaagacaggccccatgaaaaccctgctggttagagtgatgacacccgatctgagagagcggctggaaaacctgagaaagaagcctgaaaatatcccccagcccatcagcaatacatctagagccaacctgaataagctgctgaccgattacaccgaaatgaagaaggcgatcctgcatgtgtactgggaagagttccagaaggaccctgtgggcctgatgagccgggtggcccagcctgccagcaagaagatcgatcagaacaagctgaaacctgagatggacgagaagggcaacctgaccaccgccggctttgcctgctctcagtgtggccagcccctgttcgtgtacaagctggagcaggtgtctgagaagggcaaggcttacaccaactacttcggacggtgcaatgtggccgagcacgaaaagctgatcctgctggcccagctgaagcccgagaaggatagcgacgaagccgtgacatatagcctgggaaagtttgggcagagggccctggatttctacagcattcatgtgaccaaggagtccacccaccccgtgaagcccctggcccagatcgccggaaacagatacgcctccggacctgtgggaaaggccctgagcgacgcatgtatgggcacaatcgcctccttcctgtctaagtaccaggacatcatcatcgaacaccagaaggtggtgaagggcaaccagaagagactggagagcctgcgggagctggccggcaaggaaaacctggaataccctagcgtgaccctgccacctcagcctcacaccaaggagggcgttgatgcctacaacgaagtgatcgcccgggtgcgaatgtgggtgaacctgaacctgtggcagaagctgaagctaagcagagatgatgccaagcctctgctgagactgaagggattcccttcctttcctctggtcgagagacaggccaacgaagtggactggtgggacatggtgtgtaacgtgaagaagctgatcaacgagaaaaaggaggatggcaaggtgttttggcagaatctggctggctacaagagacaggaagccctgagaccatacctgagcagcgaggaagatcggaagaagggaaagaaattcgctcggtaccagctgggcgacctgctgctgcacctggaaaagaagcacggcgaggactggggaaaggtgtacgacgaggcctgggagcggattgacaagaaagtggaaggcctgagcaagcacatcaagctggaagaggaacggagaagcgaggacgcccagagcaaggccgccctgaccgactggctgcgggctaaggccagcttcgtgatcgagggcctgaaggaggccgacaaggacgagttctgcagatgcgagctgaagctgcagaagtggtacggggacctgcggggaaagcccttcgccatcgaagccgagaacagcatcctggacatcagcggcttcagcaagcagtacaactgtgccttcatctggcagaaggacggcgtgaagaagctgaacctgtacctgatcatcaactacttcaagggcggcaagctgcggttcaagaagatcaaacctgaagccttcgaagccaacagattctacaccgtgatcaacaaaaagagcggcgagatcgtgcccatggaggtgaacttcaacttcgacgaccccaacctgatcatcctgcctctggcctttggcaagagacagggcagagaattcatctggaacgacctgctgtccctggaaaccggcagcctgaagctggccaacggaagagtgatcgagaagacactgtacaacagaagaacccggcaggatgagcctgccctgttcgtggccctgaccttcgagcggcgggaggtcctggactcctccaatatcaaaccaatgaacctgatcggcgtggcaagaggcgaaaacatccccgccgtgatcgccctgaccgaccccgagggctgcccactgagccggtttaaggatagcctgggaaacccaacccacatcctgagaatcggcgagagctataaggagaagcagcggaccatccaggccaagaaggaggtggagcagcggagagccggcggctacagccggaagtacgccagcaaagccaagaatctggcagacgatatggtgagaaacaccgctagagatctgctgtactacgccgtgacccaggatgccatgctgatcttcgccaacctgagccggggcttcggccggcagggcaagcggaccttcatggccgagagacagtacacacggatggaggactggctgaccgccaagctggcctacgagggcctgagcaagacctacctgtccaagacactggcccagtacacctccaagacatgcagcaactgtgggtttaccatcaccagcgccgactacgacagggtgctggagaagctgaagaagacagcaacaggctggatgaccacaattaacggcaaggagctgaaggtggagggccagattacctactacaacagatacaagagacagaacgtagtcaaggacctgtccgtcgagctggatagactgagcgaagaatctgtgaacaacgacatctcctcctggacaaagggcagaagcggagaagctctgagcctcctgaagaaaagattctcccatagacccgtgcaggagaagttcgtgtgcctgaactgcggcttcgagacacacgcagccgagcaagccgccctgaacatcgccagatcctggctgttcctgcggagccaggagtacaagaaataccagacaaacaagacaaccggcaacaccgataagagagccttcgtcgagacctggcagtccttttaccggaagaagcttaaggaggtgtggaaacctgccgtgcggtctggcggatctggcggaggctccaccagccccaagaaaaagagaaaagtctaagctgccttctgcggggcttgccttctggccatgcccttcttctctcccttgcacctgtacctcttggtctttgaataaagcctgagtaggaaggctagcaaaaaaaaaaaaaaaaaaaaaaaaaaaaaaaaaaaaaaaaaaaaaaaaaaaaaaaaaaaaaaaaaaaaaaaaaaaaaaaa

SEQ ID NO: 10120 - RNA, 8787 nt, synthetic construct
  source 1..8787: mol_type = other RNA
aggaaataagagagaaaagaagagtaagaagaaatataagagccaccatggcccctaagaagaagcgtaaagtgagccggatgaaccacgaccaggagttcgacccccctaaggtgtaccctcccgtccccgccgagaagagaaagcccatccgggtcctgagcctgttcgatggcatcgccaccggtctgctggtgctgaaggacctgggcatccaggtggataggtacattgcctccgaggtgtgcgaggactccatcaccgtgggaatggtgcgtcatcagggcaagatcatgtacgtgggcgacgtgcggagcgtgacacagaagcatatccaggagtggggccctttcgacctggtgatcggcggcagcccttgcaatgacctgagcatcgtgaacccagcccggaagggcctgtacgagggaaccggcagactgttcttcgagttttacagactgctgcacgacgcccggcctaaggaaggcgacgaccggcccttcttttggctgttcgagaatgtggtggccatgggagtcagcgacaagcgggatattagccggttcctggagagcaaccccgtgatgatcgatgccaaggaagtgagcgccgcccaccgggccagatacttctggggcaatctgcctggcatgaacagacccctggccagcaccgtgaacgacaagctggagctgcaggagtgcctggagcacggccggatcgccaagttcagcaaggtgagaaccatcaccacccgaagcaacagcatcaaacaaggcaaggaccagcactttcctgtgttcatgaacgagaaggaggacatcctgtggtgtaccgagatggagagagtgttcgggttcccagtccactacacagatgtcagcaacatgtctagactggccagacagagactgctgggaagaagctggtccgtccctgtgatcagacacctgttcgcccctctgaaggagtacttcgcctgcgtgagcagcggcaacagcaacgccaacagccggggccccagcttctctagcggcctggtgccactgtccctgagagggagccacatgggccccatggagatctacaaaaccgtgagcgcctggaagcggcagcctgtgcgcgtgctgagcctgtttcggaatatcgataaagtcctgaaaagcctgggattcctggagagcggctctggctccggcggtggcaccctgaagtacgtggaggatgtgacaaacgtggtcagacgggatgtggagaagtggggccccttcgatctggtgtacggcagcacccaacccctgggcagctcttgtgaccggtgccctggctggtacatgtttcagttccaccggatcctgcagtacgccctgccgagacaggagtcccagcggccattcttttggattttcatggacaacttgctgctgaccgaggatgaccaggaaactaccactcggttcctgcagaccgaagccgtgaccctgcaggacgtgagaggccgggactaccagaacgccatgcgggtgtggtccaacatccctggactgaaaagcaagcacgcacctctgacccctaaagaagaggagtacctgcaggcccaggtgcggagcagaagcaagctggacgcccctaaggtggatctgctggtgaagaattgcctcctgcccctgagagagtacttcaagtatttcagccagaatagtctgcccctgggaggcagcggcggcggctgccaggagcccgtgagcttcgcccaggtggccgtgtacttcagcagggaggagtgggccctgctggaccccgcccagagggccctgtacagggacgtgatgctggagacctaccagtgcgtggccagcctggcccccctgcccgcccccaagcccatgctgatcagcctgctggagggcggcgaggacccctgggtgcccgacgtgtgcagccccgaggccgtgcccggcgacctgagccccggcggcccaagcagcggcgcccctcctcccagcggcggcaggcggcccaagcagcggcgcccctcctcccagcggcggcagcccagccggctccccaacctctaccgaggagggcacctctgagtccgccacccccgagagcggccctggcacctccaccgagcccagcgagggcagcgcacccggcagccctgccggcagccccacctccacagaggagggaaccagcaccgagcccagcgaaggcagcgccccaggcaccagcaccgagcctagtgagcaggagattaaacggatcaacaagatcagaagaagacttgtgaaagacagcaacaccaagaaggccggcaagacaggccccatgaaaaccctgctggttagagtgatgacacccgatctgagagagcggctggaaaacctgagaaagaagcctgaaaatatcccccagcccatcagcaatacatctagagccaacctgaataagctgctgaccgattacaccgaaatgaagaaggcgatcctgcatgtgtactgggaagagttccagaaggaccctgtgggcctgatgagccgggtggcccagcctgccagcaagaagatcgatcagaacaagctgaaacctgagatggacgagaagggcaacctgaccaccgccggctttgcctgctctcagtgtggccagcccctgttcgtgtacaagctggagcaggtgtctgagaagggcaaggcttacaccaactacttcggacggtgcaatgtggccgagcacgaaaagctgatcctgctggcccagctgaagcccgagaaggatagcgacgaagccgtgacatatagcctgggaaagtttgggcagagggccctggatttctacagcattcatgtgaccaaggagtccacccaccccgtgaagcccctggcccagatcgccggaaacagatacgcctccggacctgtgggaaaggccctgagcgacgcatgtatgggcacaatcgcctccttcctgtctaagtaccaggacatcatcatcgaacaccagaaggtggtgaagggcaaccagaagagactggagagcctgcgggagctggccggcaaggaaaacctggaataccctagcgtgaccctgccacctcagcctcacaccaaggagggcgttgatgcctacaacgaagtgatcgcccgggtgcgaatgtgggtgaacctgaacctgtggcagaagctgaagctaagcagagatgatgccaagcctctgctgagactgaagggattcccttcctttcctctggtcgagagacaggccaacgaagtggactggtgggacatggtgtgtaacgtgaagaagctgatcaacgagaaaaaggaggatggcaaggtgttttggcagaatctggctggctacaagagacaggaagccctgagaccatacctgagcagcgaggaagatcggaagaagggaaagaaattcgctcggtaccagctgggcgacctgctgctgcacctggaaaagaagcacggcgaggactggggaaaggtgtacgacgaggcctgggagcggattgacaagaaagtggaaggcctgagcaagcacatcaagctggaagaggaacggagaagcgaggacgcccagagcaaggccgccctgaccgactggctgcgggctaaggccagcttcgtgatcgagggcctgaaggaggccgacaaggacgagttctgcagatgcgagctgaagctgcagaagtggtacggggacctgcggggaaagcccttcgccatcgaagccgagaacagcatcctggacatcagcggcttcagcaagcagtacaactgtgccttcatctggcagaaggacggcgtgaagaagctgaacctgtacctgatcatcaactacttcaagggcggcaagctgcggttcaagaagatcaaacctgaagccttcgaagccaacagattctacaccgtgatcaacaaaaagagcggcgagatcgtgcccatggaggtgaacttcaacttcgacgaccccaacctgatcatcctgcctctggcctttggcaagagacagggcagagaattcatctggaacgacctgctgtccctggaaaccggcagcctgaagctggccaacggaagagtgatcgagaagacactgtacaacagaagaacccggcaggatgagcctgccctgttcgtggccctgaccttcgagcggcgggaggtcctggactcctccaatatcaaaccaatgaacctgatcggcgtggcaagaggcgaaaacatccccgccgtgatcgccctgaccgaccccgagggctgcccactgagccggtttaaggatagcctgggaaacccaacccacatcctgagaatcggcgagagctataaggagaagcagcggaccatccaggccaagaaggaggtggagcagcggagagccggcggctacagccggaagtacgccagcaaagccaagaatctggcagacgatatggtgagaaacaccgctagagatctgctgtactacgccgtgacccaggatgccatgctgatcttcgccaacctgagccggggcttcggccggcagggcaagcggaccttcatggccgagagacagtacacacggatggaggactggctgaccgccaagctggcctacgagggcctgagcaagacctacctgtccaagacactggcccagtacacctccaagacatgcagcaactgtgggtttaccatcaccagcgccgactacgacagggtgctggagaagctgaagaagacagcaacaggctggatgaccacaattaacggcaaggagctgaaggtggagggccagattacctactacaacagatacaagagacagaacgtagtcaaggacctgtccgtcgagctggatagactgagcgaagaatctgtgaacaacgacatctcctcctggacaaagggcagaagcggagaagctctgagcctcctgaagaaaagattctcccatagacccgtgcaggagaagttcgtgtgcctgaactgcggcttcgagacacacgcagccgagcaagccgccctgaacatcgccagatcctggctgttcctgcggagccaggagtacaagaaataccagacaaacaagacaaccggcaacaccgataagagagccttcgtcgagacctggcagtccttttaccggaagaagcttaaggaggtgtggaaacctgccgtgcggtctggcggatctggcggaggctccaccagccccaagaaaaagagaaaagtctaagctgccttctgcggggcttgccttctggccatgcccttcttctctcccttgcacctgtacctcttggtctttgaataaagcctgagtaggaaggctagcaaaaaaaaaaaaaaaaaaaaaaaaaaaaaaaaaaaaaaaaaaaaaaaaaaaaaaaaaaaaaaaaaaaaaaaaaaaaaaaagcccagccggctccccaacctctaccgaggagggcacctctgagtccgccacccccgagagcggccctggcacctccaccgagcccagcgagggcagcgcacccggcagccctgccggcagccccacctccacagaggagggaaccagcaccgagcccagcgaaggcagcgccccaggcaccagcaccgagcctagtgagcaggagattaaacggatcaacaagatcagaagaagacttgtgaaagacagcaacaccaagaaggccggcaagacaggccccatgaaaaccctgctggttagagtgatgacacccgatctgagagagcggctggaaaacctgagaaagaagcctgaaaatatcccccagcccatcagcaatacatctagagccaacctgaataagctgctgaccgattacaccgaaatgaagaaggcgatcctgcatgtgtactgggaagagttccagaaggaccctgtgggcctgatgagccgggtggcccagcctgccagcaagaagatcgatcagaacaagctgaaacctgagatggacgagaagggcaacctgaccaccgccggctttgcctgctctcagtgtggccagcccctgttcgtgtacaagctggagcaggtgtctgagaagggcaaggcttacaccaactacttcggacggtgcaatgtggccgagcacgaaaagctgatcctgctggcccagctgaagcccgagaaggatagcgacgaagccgtgacatatagcctgggaaagtttgggcagagggccctggatttctacagcattcatgtgaccaaggagtccacccaccccgtgaagcccctggcccagatcgccggaaacagatacgcctccggacctgtgggaaaggccctgagcgacgcatgtatgggcacaatcgcctccttcctgtctaagtaccaggacatcatcatcgaacaccagaaggtggtgaagggcaaccagaagagactggagagcctgcgggagctggccggcaaggaaaacctggaataccctagcgtgaccctgccacctcagcctcacaccaaggagggcgttgatgcctacaacgaagtgatcgcccgggtgcgaatgtgggtgaacctgaacctgtggcagaagctgaagctaagcagagatgatgccaagcctctgctgagactgaagggattcccttcctttcctctggtcgagagacaggccaacgaagtggactggtgggacatggtgtgtaacgtgaagaagctgatcaacgagaaaaaggaggatggcaaggtgttttggcagaatctggctggctacaagagacaggaagccctgagaccatacctgagcagcgaggaagatcggaagaagggaaagaaattcgctcggtaccagctgggcgacctgctgctgcacctggaaaagaagcacggcgaggactggggaaaggtgtacgacgaggcctgggagcggattgacaagaaagtggaaggcctgagcaagcacatcaagctggaagaggaacggagaagcgaggacgcccagagcaaggccgccctgaccgactggctgcgggctaaggccagcttcgtgatcgagggcctgaaggaggccgacaaggacgagttctgcagatgcgagctgaagctgcagaagtggtacggggacctgcggggaaagcccttcgccatcgaagccgagaacagcatcctggacatcagcggcttcagcaagcagtacaactgtgccttcatctggcagaaggacggcgtgaagaagctgaacctgtacctgatcatcaactacttcaagggcggcaagctgcggttcaagaagatcaaacctgaagccttcgaagccaacagattctacaccgtgatcaacaaaaagagcggcgagatcgtgcccatggaggtgaacttcaacttcgacgaccccaacctgatcatcctgcctctggcctttggcaagagacagggcagagaattcatctggaacgacctgctgtccctggaaaccggcagcctgaagctggccaacggaagagtgatcgagaagacactgtacaacagaagaacccggcaggatgagcctgccctgttcgtggccctgaccttcgagcggcgggaggtcctggactcctccaatatcaaaccaatgaacctgatcggcgtggcaagaggcgaaaacatccccgccgtgatcgccctgaccgaccccgagggctgcccactgagccggtttaaggatagcctgggaaacccaacccacatcctgagaatcggcgagagctataaggagaagcagcggaccatccaggccaagaaggaggtggagcagcggagagccggcggctacagccggaagtacgccagcaaagccaagaatctggcagacgatatggtgagaaacaccgctagagatctgctgtactacgccgtgacccaggatgccatgctgatcttcgccaacctgagccggggcttcggccggcagggcaagcggaccttcatggccgagagacagtacacacggatggaggactggctgaccgccaagctggcctacgagggcctgagcaagacctacctgtccaagacactggcccagtacacctccaagacatgcagcaactgtgggtttaccatcaccagcgccgactacgacagggtgctggagaagctgaagaagacagcaacaggctggatgaccacaattaacggcaaggagctgaaggtggagggccagattacctactacaacagatacaagagacagaacgtagtcaaggacctgtccgtcgagctggatagactgagcgaagaatctgtgaacaacgacatctcctcctggacaaagggcagaagcggagaagctctgagcctcctgaagaaaagattctcccatagacccgtgcaggagaagttcgtgtgcctgaactgcggcttcgagacacacgcagccgagcaagccgccctgaacatcgccagatcctggctgttcctgcggagccaggagtacaagaaataccagacaaacaagacaaccggcaacaccgataagagagccttcgtcgagacctggcagtccttttaccggaagaagcttaaggaggtgtggaaacctgccgtgcggtctggcggatctggcggaggctccaccagccccaagaaaaagagaaaagtctaagctgccttctgcggggcttgccttctggccatgcccttcttctctcccttgcacctgtacctcttggtctttgaataaagcctgagtaggaaggctagcaaaaaaaaaaaaaaaaaaaaaaaaaaaaaaaaaaaaaaaaaaaaaaaaaaaaaaaaaaaaaaaaaaaaaaaaaaaaaaaa

SEQ ID NO: 10121 - RNA, 8787 nt, synthetic construct
  source 1..8787: mol_type = other RNA
aggaaataagagagaaaagaagagtaagaagaaatataagagccaccatggcccctaagaagaagcgtaaagtgagccggatgaaccacgaccaggagttcgacccccctaaggtgtaccctcccgtccccgccgagaagagaaagcccatccgggtcctgagcctgttcgatggcatcgccaccggtctgctggtgctgaaggacctgggcatccaggtggataggtacattgcctccgaggtgtgcgaggactccatcaccgtgggaatggtgcgtcatcagggcaagatcatgtacgtgggcgacgtgcggagcgtgacacagaagcatatccaggagtggggccctttcgacctggtgatcggcggcagcccttgcaatgacctgagcatcgtgaacccagcccggaagggcctgtacgagggaaccggcagactgttcttcgagttttacagactgctgcacgacgcccggcctaaggaaggcgacgaccggcccttcttttggctgttcgagaatgtggtggccatgggagtcagcgacaagcgggatattagccggttcctggagagcaaccccgtgatgatcgatgccaaggaagtgagcgccgcccaccgggccagatacttctggggcaatctgcctggcatgaacagacccctggccagcaccgtgaacgacaagctggagctgcaggagtgcctggagcacggccggatcgccaagttcagcaaggtgagaaccatcaccacccgaagcaacagcatcaaacaaggcaaggaccagcactttcctgtgttcatgaacgagaaggaggacatcctgtggtgtaccgagatggagagagtgttcgggttcccagtccactacacagatgtcagcaacatgtctagactggccagacagagactgctgggaagaagctggtccgtccctgtgatcagacacctgttcgcccctctgaaggagtacttcgcctgcgtgagcagcggcaacagcaacgccaacagccggggccccagcttctctagcggcctggtgccactgtccctgagagggagccacatgggccccatggagatctacaaaaccgtgagcgcctggaagcggcagcctgtgcgcgtgctgagcctgtttcggaatatcgataaagtcctgaaaagcctgggattcctggagagcggctctggctccggcggtggcaccctgaagtacgtggaggatgtgacaaacgtggtcagacgggatgtggagaagtggggccccttcgatctggtgtacggcagcacccaacccctgggcagctcttgtgaccggtgccctggctggtacatgtttcagttccaccggatcctgcagtacgccctgccgagacaggagtcccagcggccattcttttggattttcatggacaacttgctgctgaccgaggatgaccaggaaactaccactcggttcctgcagaccgaagccgtgaccctgcaggacgtgagaggccgggactaccagaacgccatgcgggtgtggtccaacatccctggactgaaaagcaagcacgcacctctgacccctaaagaagaggagtacctgcaggcccaggtgcggagcagaagcaagctggacgcccctaaggtggatctgctggtgaagaattgcctcctgcccctgagagagtacttcaagtatttcagccagaatagtctgcccctgggaggcagcggcggcggcatggagcccgtgaccttcgaggacgtggccgtgtacttcacccagaaccagtgggccagcctggaccccgtgcagagggccctgtacagggaggtgatgctggagaactacgccaacgtggccagcctggccttccccttccccaagcccgtgctgatcagccagctggagcagggcgaggccccctggggccccgaccccggcgaggccgaggtgctgaagggcatctggcccggcggcgagggcggcccaagcagcggcgcccctcctcccagcggcggcaggcggcccaagcagcggcgcccctcctcccagcggcggcagcccagccggctccccaacctctaccgaggagggcacctctgagtccgccacccccgagagcggccctggcacctccaccgagcccagcgagggcagcgcacccggcagccctgccggcagccccacctccacagaggagggaaccagcaccgagcccagcgaaggcagcgccccaggcaccagcaccgagcctagtgagcaggagattaaacggatcaacaagatcagaagaagacttgtgaaagacagcaacaccaagaaggccggcaagacaggccccatgaaaaccctgctggttagagtgatgacacccgatctgagagagcggctggaaaacctgagaaagaagcctgaaaatatcccccagcccatcagcaatacatctagagccaacctgaataagctgctgaccgattacaccgaaatgaagaaggcgatcctgcatgtgtactgggaagagttccagaaggaccctgtgggcctgatgagccgggtggcccagcctgccagcaagaagatcgatcagaacaagctgaaacctgagatggacgagaagggcaacctgaccaccgccggctttgcctgctctcagtgtggccagcccctgttcgtgtacaagctggagcaggtgtctgagaagggcaaggcttacaccaactacttcggacggtgcaatgtggccgagcacgaaaagctgatcctgctggcccagctgaagcccgagaaggatagcgacgaagccgtgacatatagcctgggaaagtttgggcagagggccctggatttctacagcattcatgtgaccaaggagtccacccaccccgtgaagcccctggcccagatcgccggaaacagatacgcctccggacctgtgggaaaggccctgagcgacgcatgtatgggcacaatcgcctccttcctgtctaagtaccaggacatcatcatcgaacaccagaaggtggtgaagggcaaccagaagagactggagagcctgcgggagctggccggcaaggaaaacctggaataccctagcgtgaccctgccacctcagcctcacaccaaggagggcgttgatgcctacaacgaagtgatcgcccgggtgcgaatgtgggtgaacctgaacctgtggcagaagctgaagctaagcagagatgatgccaagcctctgctgagactgaagggattcccttcctttcctctggtcgagagacaggccaacgaagtggactggtgggacatggtgtgtaacgtgaagaagctgatcaacgagaaaaaggaggatggcaaggtgttttggcagaatctggctggctacaagagacaggaagccctgagaccatacctgagcagcgaggaagatcggaagaagggaaagaaattcgctcggtaccagctgggcgacctgctgctgcacctggaaaagaagcacggcgaggactggggaaaggtgtacgacgaggcctgggagcggattgacaagaaagtggaaggcctgagcaagcacatcaagctggaagaggaacggagaagcgaggacgcccagagcaaggccgccctgaccgactggctgcgggctaaggccagcttcgtgatcgagggcctgaaggaggccgacaaggacgagttctgcagatgcgagctgaagctgcagaagtggtacggggacctgcggggaaagcccttcgccatcgaagccgagaacagcatcctggacatcagcggcttcagcaagcagtacaactgtgccttcatctggcagaaggacggcgtgaagaagctgaacctgtacctgatcatcaactacttcaagggcggcaagctgcggttcaagaagatcaaacctgaagccttcgaagccaacagattctacaccgtgatcaacaaaaagagcggcgagatcgtgcccatggaggtgaacttcaacttcgacgaccccaacctgatcatcctgcctctggcctttggcaagagacagggcagagaattcatctggaacgacctgctgtccctggaaaccggcagcctgaagctggccaacggaagagtgatcgagaagacactgtacaacagaagaacccggcaggatgagcctgccctgttcgtggccctgaccttcgagcggcgggaggtcctggactcctccaatatcaaaccaatgaacctgatcggcgtggcaagaggcgaaaacatccccgccgtgatcgccctgaccgaccccgagggctgcccactgagccggtttaaggatagcctgggaaacccaacccacatcctgagaatcggcgagagctataaggagaagcagcggaccatccaggccaagaaggaggtggagcagcggagagccggcggctacagccggaagtacgccagcaaagccaagaatctggcagacgatatggtgagaaacaccgctagagatctgctgtactacgccgtgacccaggatgccatgctgatcttcgccaacctgagccggggcttcggccggcagggcaagcggaccttcatggccgagagacagtacacacggatggaggactggctgaccgccaagctggcctacgagggcctgagcaagacctacctgtccaagacactggcccagtacacctccaagacatgcagcaactgtgggtttaccatcaccagcgccgactacgacagggtgctggagaagctgaagaagacagcaacaggctggatgaccacaattaacggcaaggagctgaaggtggagggccagattacctactacaacagatacaagagacagaacgtagtcaaggacctgtccgtcgagctggatagactgagcgaagaatctgtgaacaacgacatctcctcctggacaaagggcagaagcggagaagctctgagcctcctgaagaaaagattctcccatagacccgtgcaggagaagttcgtgtgcctgaactgcggcttcgagacacacgcagccgagcaagccgccctgaacatcgccagatcctggctgttcctgcggagccaggagtacaagaaataccagacaaacaagacaaccggcaacaccgataagagagccttcgtcgagacctggcagtccttttaccggaagaagcttaaggaggtgtggaaacctgccgtgcggtctggcggatctggcggaggctccaccagccccaagaaaaagagaaaagtctaagctgccttctgcggggcttgccttctggccatgcccttcttctctcccttgcacctgtacctcttggtctttgaataaagcctgagtaggaaggctagcaaaaaaaaaaaaaaaaaaaaaaaaaaaaaaaaaaaaaaaaaaaaaaaaaaaaaaaaaaaaaaaaaaaaaaaaaaaaaaaagcccagccggctccccaacctctaccgaggagggcacctctgagtccgccacccccgagagcggccctggcacctccaccgagcccagcgagggcagcgcacccggcagccctgccggcagccccacctccacagaggagggaaccagcaccgagcccagcgaaggcagcgccccaggcaccagcaccgagcctagtgagcaggagattaaacggatcaacaagatcagaagaagacttgtgaaagacagcaacaccaagaaggccggcaagacaggccccatgaaaaccctgctggttagagtgatgacacccgatctgagagagcggctggaaaacctgagaaagaagcctgaaaatatcccccagcccatcagcaatacatctagagccaacctgaataagctgctgaccgattacaccgaaatgaagaaggcgatcctgcatgtgtactgggaagagttccagaaggaccctgtgggcctgatgagccgggtggcccagcctgccagcaagaagatcgatcagaacaagctgaaacctgagatggacgagaagggcaacctgaccaccgccggctttgcctgctctcagtgtggccagcccctgttcgtgtacaagctggagcaggtgtctgagaagggcaaggcttacaccaactacttcggacggtgcaatgtggccgagcacgaaaagctgatcctgctggcccagctgaagcccgagaaggatagcgacgaagccgtgacatatagcctgggaaagtttgggcagagggccctggatttctacagcattcatgtgaccaaggagtccacccaccccgtgaagcccctggcccagatcgccggaaacagatacgcctccggacctgtgggaaaggccctgagcgacgcatgtatgggcacaatcgcctccttcctgtctaagtaccaggacatcatcatcgaacaccagaaggtggtgaagggcaaccagaagagactggagagcctgcgggagctggccggcaaggaaaacctggaataccctagcgtgaccctgccacctcagcctcacaccaaggagggcgttgatgcctacaacgaagtgatcgcccgggtgcgaatgtgggtgaacctgaacctgtggcagaagctgaagctaagcagagatgatgccaagcctctgctgagactgaagggattcccttcctttcctctggtcgagagacaggccaacgaagtggactggtgggacatggtgtgtaacgtgaagaagctgatcaacgagaaaaaggaggatggcaaggtgttttggcagaatctggctggctacaagagacaggaagccctgagaccatacctgagcagcgaggaagatcggaagaagggaaagaaattcgctcggtaccagctgggcgacctgctgctgcacctggaaaagaagcacggcgaggactggggaaaggtgtacgacgaggcctgggagcggattgacaagaaagtggaaggcctgagcaagcacatcaagctggaagaggaacggagaagcgaggacgcccagagcaaggccgccctgaccgactggctgcgggctaaggccagcttcgtgatcgagggcctgaaggaggccgacaaggacgagttctgcagatgcgagctgaagctgcagaagtggtacggggacctgcggggaaagcccttcgccatcgaagccgagaacagcatcctggacatcagcggcttcagcaagcagtacaactgtgccttcatctggcagaaggacggcgtgaagaagctgaacctgtacctgatcatcaactacttcaagggcggcaagctgcggttcaagaagatcaaacctgaagccttcgaagccaacagattctacaccgtgatcaacaaaaagagcggcgagatcgtgcccatggaggtgaacttcaacttcgacgaccccaacctgatcatcctgcctctggcctttggcaagagacagggcagagaattcatctggaacgacctgctgtccctggaaaccggcagcctgaagctggccaacggaagagtgatcgagaagacactgtacaacagaagaacccggcaggatgagcctgccctgttcgtggccctgaccttcgagcggcgggaggtcctggactcctccaatatcaaaccaatgaacctgatcggcgtggcaagaggcgaaaacatccccgccgtgatcgccctgaccgaccccgagggctgcccactgagccggtttaaggatagcctgggaaacccaacccacatcctgagaatcggcgagagctataaggagaagcagcggaccatccaggccaagaaggaggtggagcagcggagagccggcggctacagccggaagtacgccagcaaagccaagaatctggcagacgatatggtgagaaacaccgctagagatctgctgtactacgccgtgacccaggatgccatgctgatcttcgccaacctgagccggggcttcggccggcagggcaagcggaccttcatggccgagagacagtacacacggatggaggactggctgaccgccaagctggcctacgagggcctgagcaagacctacctgtccaagacactggcccagtacacctccaagacatgcagcaactgtgggtttaccatcaccagcgccgactacgacagggtgctggagaagctgaagaagacagcaacaggctggatgaccacaattaacggcaaggagctgaaggtggagggccagattacctactacaacagatacaagagacagaacgtagtcaaggacctgtccgtcgagctggatagactgagcgaagaatctgtgaacaacgacatctcctcctggacaaagggcagaagcggagaagctctgagcctcctgaagaaaagattctcccatagacccgtgcaggagaagttcgtgtgcctgaactgcggcttcgagacacacgcagccgagcaagccgccctgaacatcgccagatcctggctgttcctgcggagccaggagtacaagaaataccagacaaacaagacaaccggcaacaccgataagagagccttcgtcgagacctggcagtccttttaccggaagaagcttaaggaggtgtggaaacctgccgtgcggtctggcggatctggcggaggctccaccagccccaagaaaaagagaaaagtctaagctgccttctgcggggcttgccttctggccatgcccttcttctctcccttgcacctgtacctcttggtctttgaataaagcctgagtaggaaggctagcaaaaaaaaaaaaaaaaaaaaaaaaaaaaaaaaaaaaaaaaaaaaaaaaaaaaaaaaaaaaaaaaaaaaaaaaaaaaaaaa

SEQ ID NO: 10122 - RNA, 8787 nt, synthetic construct
  source 1..8787: mol_type = other RNA
aggaaataagagagaaaagaagagtaagaagaaatataagagccaccatggcccctaagaagaagcgtaaagtgagccggatgaaccacgaccaggagttcgacccccctaaggtgtaccctcccgtccccgccgagaagagaaagcccatccgggtcctgagcctgttcgatggcatcgccaccggtctgctggtgctgaaggacctgggcatccaggtggataggtacattgcctccgaggtgtgcgaggactccatcaccgtgggaatggtgcgtcatcagggcaagatcatgtacgtgggcgacgtgcggagcgtgacacagaagcatatccaggagtggggccctttcgacctggtgatcggcggcagcccttgcaatgacctgagcatcgtgaacccagcccggaagggcctgtacgagggaaccggcagactgttcttcgagttttacagactgctgcacgacgcccggcctaaggaaggcgacgaccggcccttcttttggctgttcgagaatgtggtggccatgggagtcagcgacaagcgggatattagccggttcctggagagcaaccccgtgatgatcgatgccaaggaagtgagcgccgcccaccgggccagatacttctggggcaatctgcctggcatgaacagacccctggccagcaccgtgaacgacaagctggagctgcaggagtgcctggagcacggccggatcgccaagttcagcaaggtgagaaccatcaccacccgaagcaacagcatcaaacaaggcaaggaccagcactttcctgtgttcatgaacgagaaggaggacatcctgtggtgtaccgagatggagagagtgttcgggttcccagtccactacacagatgtcagcaacatgtctagactggccagacagagactgctgggaagaagctggtccgtccctgtgatcagacacctgttcgcccctctgaaggagtacttcgcctgcgtgagcagcggcaacagcaacgccaacagccggggccccagcttctctagcggcctggtgccactgtccctgagagggagccacatgggccccatggagatctacaaaaccgtgagcgcctggaagcggcagcctgtgcgcgtgctgagcctgtttcggaatatcgataaagtcctgaaaagcctgggattcctggagagcggctctggctccggcggtggcaccctgaagtacgtggaggatgtgacaaacgtggtcagacgggatgtggagaagtggggccccttcgatctggtgtacggcagcacccaacccctgggcagctcttgtgaccggtgccctggctggtacatgtttcagttccaccggatcctgcagtacgccctgccgagacaggagtcccagcggccattcttttggattttcatggacaacttgctgctgaccgaggatgaccaggaaactaccactcggttcctgcagaccgaagccgtgaccctgcaggacgtgagaggccgggactaccagaacgccatgcgggtgtggtccaacatccctggactgaaaagcaagcacgcacctctgacccctaaagaagaggagtacctgcaggcccaggtgcggagcagaagcaagctggacgcccctaaggtggatctgctggtgaagaattgcctcctgcccctgagagagtacttcaagtatttcagccagaatagtctgcccctgggaggcagcggcggcggcgtgagcgagcccgtgaccttcgaggaggtggccctgtacttcagcgaggaggagtgggccctgctggacgccggccagagggccctgtacagggacgtgatgaaggagaactacgaggccgtgaggtggctggacaacggcaggctgaacgagaaccacgacaagagcctgcagaacgagggccccgagcagatggccccctgcggcatgatgctgggcatcagcgagggccacgtgagccagggcggcccaagcagcggcgcccctcctcccagcggcggcaggcggcccaagcagcggcgcccctcctcccagcggcggcagcccagccggctccccaacctctaccgaggagggcacctctgagtccgccacccccgagagcggccctggcacctccaccgagcccagcgagggcagcgcacccggcagccctgccggcagccccacctccacagaggagggaaccagcaccgagcccagcgaaggcagcgccccaggcaccagcaccgagcctagtgagcaggagattaaacggatcaacaagatcagaagaagacttgtgaaagacagcaacaccaagaaggccggcaagacaggccccatgaaaaccctgctggttagagtgatgacacccgatctgagagagcggctggaaaacctgagaaagaagcctgaaaatatcccccagcccatcagcaatacatctagagccaacctgaataagctgctgaccgattacaccgaaatgaagaaggcgatcctgcatgtgtactgggaagagttccagaaggaccctgtgggcctgatgagccgggtggcccagcctgccagcaagaagatcgatcagaacaagctgaaacctgagatggacgagaagggcaacctgaccaccgccggctttgcctgctctcagtgtggccagcccctgttcgtgtacaagctggagcaggtgtctgagaagggcaaggcttacaccaactacttcggacggtgcaatgtggccgagcacgaaaagctgatcctgctggcccagctgaagcccgagaaggatagcgacgaagccgtgacatatagcctgggaaagtttgggcagagggccctggatttctacagcattcatgtgaccaaggagtccacccaccccgtgaagcccctggcccagatcgccggaaacagatacgcctccggacctgtgggaaaggccctgagcgacgcatgtatgggcacaatcgcctccttcctgtctaagtaccaggacatcatcatcgaacaccagaaggtggtgaagggcaaccagaagagactggagagcctgcgggagctggccggcaaggaaaacctggaataccctagcgtgaccctgccacctcagcctcacaccaaggagggcgttgatgcctacaacgaagtgatcgcccgggtgcgaatgtgggtgaacctgaacctgtggcagaagctgaagctaagcagagatgatgccaagcctctgctgagactgaagggattcccttcctttcctctggtcgagagacaggccaacgaagtggactggtgggacatggtgtgtaacgtgaagaagctgatcaacgagaaaaaggaggatggcaaggtgttttggcagaatctggctggctacaagagacaggaagccctgagaccatacctgagcagcgaggaagatcggaagaagggaaagaaattcgctcggtaccagctgggcgacctgctgctgcacctggaaaagaagcacggcgaggactggggaaaggtgtacgacgaggcctgggagcggattgacaagaaagtggaaggcctgagcaagcacatcaagctggaagaggaacggagaagcgaggacgcccagagcaaggccgccctgaccgactggctgcgggctaaggccagcttcgtgatcgagggcctgaaggaggccgacaaggacgagttctgcagatgcgagctgaagctgcagaagtggtacggggacctgcggggaaagcccttcgccatcgaagccgagaacagcatcctggacatcagcggcttcagcaagcagtacaactgtgccttcatctggcagaaggacggcgtgaagaagctgaacctgtacctgatcatcaactacttcaagggcggcaagctgcggttcaagaagatcaaacctgaagccttcgaagccaacagattctacaccgtgatcaacaaaaagagcggcgagatcgtgcccatggaggtgaacttcaacttcgacgaccccaacctgatcatcctgcctctggcctttggcaagagacagggcagagaattcatctggaacgacctgctgtccctggaaaccggcagcctgaagctggccaacggaagagtgatcgagaagacactgtacaacagaagaacccggcaggatgagcctgccctgttcgtggccctgaccttcgagcggcgggaggtcctggactcctccaatatcaaaccaatgaacctgatcggcgtggcaagaggcgaaaacatccccgccgtgatcgccctgaccgaccccgagggctgcccactgagccggtttaaggatagcctgggaaacccaacccacatcctgagaatcggcgagagctataaggagaagcagcggaccatccaggccaagaaggaggtggagcagcggagagccggcggctacagccggaagtacgccagcaaagccaagaatctggcagacgatatggtgagaaacaccgctagagatctgctgtactacgccgtgacccaggatgccatgctgatcttcgccaacctgagccggggcttcggccggcagggcaagcggaccttcatggccgagagacagtacacacggatggaggactggctgaccgccaagctggcctacgagggcctgagcaagacctacctgtccaagacactggcccagtacacctccaagacatgcagcaactgtgggtttaccatcaccagcgccgactacgacagggtgctggagaagctgaagaagacagcaacaggctggatgaccacaattaacggcaaggagctgaaggtggagggccagattacctactacaacagatacaagagacagaacgtagtcaaggacctgtccgtcgagctggatagactgagcgaagaatctgtgaacaacgacatctcctcctggacaaagggcagaagcggagaagctctgagcctcctgaagaaaagattctcccatagacccgtgcaggagaagttcgtgtgcctgaactgcggcttcgagacacacgcagccgagcaagccgccctgaacatcgccagatcctggctgttcctgcggagccaggagtacaagaaataccagacaaacaagacaaccggcaacaccgataagagagccttcgtcgagacctggcagtccttttaccggaagaagcttaaggaggtgtggaaacctgccgtgcggtctggcggatctggcggaggctccaccagccccaagaaaaagagaaaagtctaagctgccttctgcggggcttgccttctggccatgcccttcttctctcccttgcacctgtacctcttggtctttgaataaagcctgagtaggaaggctagcaaaaaaaaaaaaaaaaaaaaaaaaaaaaaaaaaaaaaaaaaaaaaaaaaaaaaaaaaaaaaaaaaaaaaaaaaaaaaaaagcccagccggctccccaacctctaccgaggagggcacctctgagtccgccacccccgagagcggccctggcacctccaccgagcccagcgagggcagcgcacccggcagccctgccggcagccccacctccacagaggagggaaccagcaccgagcccagcgaaggcagcgccccaggcaccagcaccgagcctagtgagcaggagattaaacggatcaacaagatcagaagaagacttgtgaaagacagcaacaccaagaaggccggcaagacaggccccatgaaaaccctgctggttagagtgatgacacccgatctgagagagcggctggaaaacctgagaaagaagcctgaaaatatcccccagcccatcagcaatacatctagagccaacctgaataagctgctgaccgattacaccgaaatgaagaaggcgatcctgcatgtgtactgggaagagttccagaaggaccctgtgggcctgatgagccgggtggcccagcctgccagcaagaagatcgatcagaacaagctgaaacctgagatggacgagaagggcaacctgaccaccgccggctttgcctgctctcagtgtggccagcccctgttcgtgtacaagctggagcaggtgtctgagaagggcaaggcttacaccaactacttcggacggtgcaatgtggccgagcacgaaaagctgatcctgctggcccagctgaagcccgagaaggatagcgacgaagccgtgacatatagcctgggaaagtttgggcagagggccctggatttctacagcattcatgtgaccaaggagtccacccaccccgtgaagcccctggcccagatcgccggaaacagatacgcctccggacctgtgggaaaggccctgagcgacgcatgtatgggcacaatcgcctccttcctgtctaagtaccaggacatcatcatcgaacaccagaaggtggtgaagggcaaccagaagagactggagagcctgcgggagctggccggcaaggaaaacctggaataccctagcgtgaccctgccacctcagcctcacaccaaggagggcgttgatgcctacaacgaagtgatcgcccgggtgcgaatgtgggtgaacctgaacctgtggcagaagctgaagctaagcagagatgatgccaagcctctgctgagactgaagggattcccttcctttcctctggtcgagagacaggccaacgaagtggactggtgggacatggtgtgtaacgtgaagaagctgatcaacgagaaaaaggaggatggcaaggtgttttggcagaatctggctggctacaagagacaggaagccctgagaccatacctgagcagcgaggaagatcggaagaagggaaagaaattcgctcggtaccagctgggcgacctgctgctgcacctggaaaagaagcacggcgaggactggggaaaggtgtacgacgaggcctgggagcggattgacaagaaagtggaaggcctgagcaagcacatcaagctggaagaggaacggagaagcgaggacgcccagagcaaggccgccctgaccgactggctgcgggctaaggccagcttcgtgatcgagggcctgaaggaggccgacaaggacgagttctgcagatgcgagctgaagctgcagaagtggtacggggacctgcggggaaagcccttcgccatcgaagccgagaacagcatcctggacatcagcggcttcagcaagcagtacaactgtgccttcatctggcagaaggacggcgtgaagaagctgaacctgtacctgatcatcaactacttcaagggcggcaagctgcggttcaagaagatcaaacctgaagccttcgaagccaacagattctacaccgtgatcaacaaaaagagcggcgagatcgtgcccatggaggtgaacttcaacttcgacgaccccaacctgatcatcctgcctctggcctttggcaagagacagggcagagaattcatctggaacgacctgctgtccctggaaaccggcagcctgaagctggccaacggaagagtgatcgagaagacactgtacaacagaagaacccggcaggatgagcctgccctgttcgtggccctgaccttcgagcggcgggaggtcctggactcctccaatatcaaaccaatgaacctgatcggcgtggcaagaggcgaaaacatccccgccgtgatcgccctgaccgaccccgagggctgcccactgagccggtttaaggatagcctgggaaacccaacccacatcctgagaatcggcgagagctataaggagaagcagcggaccatccaggccaagaaggaggtggagcagcggagagccggcggctacagccggaagtacgccagcaaagccaagaatctggcagacgatatggtgagaaacaccgctagagatctgctgtactacgccgtgacccaggatgccatgctgatcttcgccaacctgagccggggcttcggccggcagggcaagcggaccttcatggccgagagacagtacacacggatggaggactggctgaccgccaagctggcctacgagggcctgagcaagacctacctgtccaagacactggcccagtacacctccaagacatgcagcaactgtgggtttaccatcaccagcgccgactacgacagggtgctggagaagctgaagaagacagcaacaggctggatgaccacaattaacggcaaggagctgaaggtggagggccagattacctactacaacagatacaagagacagaacgtagtcaaggacctgtccgtcgagctggatagactgagcgaagaatctgtgaacaacgacatctcctcctggacaaagggcagaagcggagaagctctgagcctcctgaagaaaagattctcccatagacccgtgcaggagaagttcgtgtgcctgaactgcggcttcgagacacacgcagccgagcaagccgccctgaacatcgccagatcctggctgttcctgcggagccaggagtacaagaaataccagacaaacaagacaaccggcaacaccgataagagagccttcgtcgagacctggcagtccttttaccggaagaagcttaaggaggtgtggaaacctgccgtgcggtctggcggatctggcggaggctccaccagccccaagaaaaagagaaaagtctaagctgccttctgcggggcttgccttctggccatgcccttcttctctcccttgcacctgtacctcttggtctttgaataaagcctgagtaggaaggctagcaaaaaaaaaaaaaaaaaaaaaaaaaaaaaaaaaaaaaaaaaaaaaaaaaaaaaaaaaaaaaaaaaaaaaaaaaaaaaaaa

SEQ ID NO: 10123 - RNA, 8787 nt, synthetic construct
  source 1..8787: mol_type = other RNA
aggaaataagagagaaaagaagagtaagaagaaatataagagccaccatggcccctaagaagaagcgtaaagtgagccggatgaaccacgaccaggagttcgacccccctaaggtgtaccctcccgtccccgccgagaagagaaagcccatccgggtcctgagcctgttcgatggcatcgccaccggtctgctggtgctgaaggacctgggcatccaggtggataggtacattgcctccgaggtgtgcgaggactccatcaccgtgggaatggtgcgtcatcagggcaagatcatgtacgtgggcgacgtgcggagcgtgacacagaagcatatccaggagtggggccctttcgacctggtgatcggcggcagcccttgcaatgacctgagcatcgtgaacccagcccggaagggcctgtacgagggaaccggcagactgttcttcgagttttacagactgctgcacgacgcccggcctaaggaaggcgacgaccggcccttcttttggctgttcgagaatgtggtggccatgggagtcagcgacaagcgggatattagccggttcctggagagcaaccccgtgatgatcgatgccaaggaagtgagcgccgcccaccgggccagatacttctggggcaatctgcctggcatgaacagacccctggccagcaccgtgaacgacaagctggagctgcaggagtgcctggagcacggccggatcgccaagttcagcaaggtgagaaccatcaccacccgaagcaacagcatcaaacaaggcaaggaccagcactttcctgtgttcatgaacgagaaggaggacatcctgtggtgtaccgagatggagagagtgttcgggttcccagtccactacacagatgtcagcaacatgtctagactggccagacagagactgctgggaagaagctggtccgtccctgtgatcagacacctgttcgcccctctgaaggagtacttcgcctgcgtgagcagcggcaacagcaacgccaacagccggggccccagcttctctagcggcctggtgccactgtccctgagagggagccacatgggccccatggagatctacaaaaccgtgagcgcctggaagcggcagcctgtgcgcgtgctgagcctgtttcggaatatcgataaagtcctgaaaagcctgggattcctggagagcggctctggctccggcggtggcaccctgaagtacgtggaggatgtgacaaacgtggtcagacgggatgtggagaagtggggccccttcgatctggtgtacggcagcacccaacccctgggcagctcttgtgaccggtgccctggctggtacatgtttcagttccaccggatcctgcagtacgccctgccgagacaggagtcccagcggccattcttttggattttcatggacaacttgctgctgaccgaggatgaccaggaaactaccactcggttcctgcagaccgaagccgtgaccctgcaggacgtgagaggccgggactaccagaacgccatgcgggtgtggtccaacatccctggactgaaaagcaagcacgcacctctgacccctaaagaagaggagtacctgcaggcccaggtgcggagcagaagcaagctggacgcccctaaggtggatctgctggtgaagaattgcctcctgcccctgagagagtacttcaagtatttcagccagaatagtctgcccctgggaggcagcggcggcggcaagcccggcgtggtgaggttcgtggacgtggccgtgtacttcagccccgaggagtgggcctgcctgaggcccgcccagagggccctgtacagggacgtgatgagggagacctacggccacctgggcgccctgggcttccccggccccaagcccgccctgatcagctggatggagcaggagaacgaggcctggagccccgccgcccaggaccccgaggagagggagaacctgggcggcgtgcccggcggcccaagcagcggcgcccctcctcccagcggcggcaggcggcccaagcagcggcgcccctcctcccagcggcggcagcccagccggctccccaacctctaccgaggagggcacctctgagtccgccacccccgagagcggccctggcacctccaccgagcccagcgagggcagcgcacccggcagccctgccggcagccccacctccacagaggagggaaccagcaccgagcccagcgaaggcagcgccccaggcaccagcaccgagcctagtgagcaggagattaaacggatcaacaagatcagaagaagacttgtgaaagacagcaacaccaagaaggccggcaagacaggccccatgaaaaccctgctggttagagtgatgacacccgatctgagagagcggctggaaaacctgagaaagaagcctgaaaatatcccccagcccatcagcaatacatctagagccaacctgaataagctgctgaccgattacaccgaaatgaagaaggcgatcctgcatgtgtactgggaagagttccagaaggaccctgtgggcctgatgagccgggtggcccagcctgccagcaagaagatcgatcagaacaagctgaaacctgagatggacgagaagggcaacctgaccaccgccggctttgcctgctctcagtgtggccagcccctgttcgtgtacaagctggagcaggtgtctgagaagggcaaggcttacaccaactacttcggacggtgcaatgtggccgagcacgaaaagctgatcctgctggcccagctgaagcccgagaaggatagcgacgaagccgtgacatatagcctgggaaagtttgggcagagggccctggatttctacagcattcatgtgaccaaggagtccacccaccccgtgaagcccctggcccagatcgccggaaacagatacgcctccggacctgtgggaaaggccctgagcgacgcatgtatgggcacaatcgcctccttcctgtctaagtaccaggacatcatcatcgaacaccagaaggtggtgaagggcaaccagaagagactggagagcctgcgggagctggccggcaaggaaaacctggaataccctagcgtgaccctgccacctcagcctcacaccaaggagggcgttgatgcctacaacgaagtgatcgcccgggtgcgaatgtgggtgaacctgaacctgtggcagaagctgaagctaagcagagatgatgccaagcctctgctgagactgaagggattcccttcctttcctctggtcgagagacaggccaacgaagtggactggtgggacatggtgtgtaacgtgaagaagctgatcaacgagaaaaaggaggatggcaaggtgttttggcagaatctggctggctacaagagacaggaagccctgagaccatacctgagcagcgaggaagatcggaagaagggaaagaaattcgctcggtaccagctgggcgacctgctgctgcacctggaaaagaagcacggcgaggactggggaaaggtgtacgacgaggcctgggagcggattgacaagaaagtggaaggcctgagcaagcacatcaagctggaagaggaacggagaagcgaggacgcccagagcaaggccgccctgaccgactggctgcgggctaaggccagcttcgtgatcgagggcctgaaggaggccgacaaggacgagttctgcagatgcgagctgaagctgcagaagtggtacggggacctgcggggaaagcccttcgccatcgaagccgagaacagcatcctggacatcagcggcttcagcaagcagtacaactgtgccttcatctggcagaaggacggcgtgaagaagctgaacctgtacctgatcatcaactacttcaagggcggcaagctgcggttcaagaagatcaaacctgaagccttcgaagccaacagattctacaccgtgatcaacaaaaagagcggcgagatcgtgcccatggaggtgaacttcaacttcgacgaccccaacctgatcatcctgcctctggcctttggcaagagacagggcagagaattcatctggaacgacctgctgtccctggaaaccggcagcctgaagctggccaacggaagagtgatcgagaagacactgtacaacagaagaacccggcaggatgagcctgccctgttcgtggccctgaccttcgagcggcgggaggtcctggactcctccaatatcaaaccaatgaacctgatcggcgtggcaagaggcgaaaacatccccgccgtgatcgccctgaccgaccccgagggctgcccactgagccggtttaaggatagcctgggaaacccaacccacatcctgagaatcggcgagagctataaggagaagcagcggaccatccaggccaagaaggaggtggagcagcggagagccggcggctacagccggaagtacgccagcaaagccaagaatctggcagacgatatggtgagaaacaccgctagagatctgctgtactacgccgtgacccaggatgccatgctgatcttcgccaacctgagccggggcttcggccggcagggcaagcggaccttcatggccgagagacagtacacacggatggaggactggctgaccgccaagctggcctacgagggcctgagcaagacctacctgtccaagacactggcccagtacacctccaagacatgcagcaactgtgggtttaccatcaccagcgccgactacgacagggtgctggagaagctgaagaagacagcaacaggctggatgaccacaattaacggcaaggagctgaaggtggagggccagattacctactacaacagatacaagagacagaacgtagtcaaggacctgtccgtcgagctggatagactgagcgaagaatctgtgaacaacgacatctcctcctggacaaagggcagaagcggagaagctctgagcctcctgaagaaaagattctcccatagacccgtgcaggagaagttcgtgtgcctgaactgcggcttcgagacacacgcagccgagcaagccgccctgaacatcgccagatcctggctgttcctgcggagccaggagtacaagaaataccagacaaacaagacaaccggcaacaccgataagagagccttcgtcgagacctggcagtccttttaccggaagaagcttaaggaggtgtggaaacctgccgtgcggtctggcggatctggcggaggctccaccagccccaagaaaaagagaaaagtctaagctgccttctgcggggcttgccttctggccatgcccttcttctctcccttgcacctgtacctcttggtctttgaataaagcctgagtaggaaggctagcaaaaaaaaaaaaaaaaaaaaaaaaaaaaaaaaaaaaaaaaaaaaaaaaaaaaaaaaaaaaaaaaaaaaaaaaaaaaaaaagcccagccggctccccaacctctaccgaggagggcacctctgagtccgccacccccgagagcggccctggcacctccaccgagcccagcgagggcagcgcacccggcagccctgccggcagccccacctccacagaggagggaaccagcaccgagcccagcgaaggcagcgccccaggcaccagcaccgagcctagtgagcaggagattaaacggatcaacaagatcagaagaagacttgtgaaagacagcaacaccaagaaggccggcaagacaggccccatgaaaaccctgctggttagagtgatgacacccgatctgagagagcggctggaaaacctgagaaagaagcctgaaaatatcccccagcccatcagcaatacatctagagccaacctgaataagctgctgaccgattacaccgaaatgaagaaggcgatcctgcatgtgtactgggaagagttccagaaggaccctgtgggcctgatgagccgggtggcccagcctgccagcaagaagatcgatcagaacaagctgaaacctgagatggacgagaagggcaacctgaccaccgccggctttgcctgctctcagtgtggccagcccctgttcgtgtacaagctggagcaggtgtctgagaagggcaaggcttacaccaactacttcggacggtgcaatgtggccgagcacgaaaagctgatcctgctggcccagctgaagcccgagaaggatagcgacgaagccgtgacatatagcctgggaaagtttgggcagagggccctggatttctacagcattcatgtgaccaaggagtccacccaccccgtgaagcccctggcccagatcgccggaaacagatacgcctccggacctgtgggaaaggccctgagcgacgcatgtatgggcacaatcgcctccttcctgtctaagtaccaggacatcatcatcgaacaccagaaggtggtgaagggcaaccagaagagactggagagcctgcgggagctggccggcaaggaaaacctggaataccctagcgtgaccctgccacctcagcctcacaccaaggagggcgttgatgcctacaacgaagtgatcgcccgggtgcgaatgtgggtgaacctgaacctgtggcagaagctgaagctaagcagagatgatgccaagcctctgctgagactgaagggattcccttcctttcctctggtcgagagacaggccaacgaagtggactggtgggacatggtgtgtaacgtgaagaagctgatcaacgagaaaaaggaggatggcaaggtgttttggcagaatctggctggctacaagagacaggaagccctgagaccatacctgagcagcgaggaagatcggaagaagggaaagaaattcgctcggtaccagctgggcgacctgctgctgcacctggaaaagaagcacggcgaggactggggaaaggtgtacgacgaggcctgggagcggattgacaagaaagtggaaggcctgagcaagcacatcaagctggaagaggaacggagaagcgaggacgcccagagcaaggccgccctgaccgactggctgcgggctaaggccagcttcgtgatcgagggcctgaaggaggccgacaaggacgagttctgcagatgcgagctgaagctgcagaagtggtacggggacctgcggggaaagcccttcgccatcgaagccgagaacagcatcctggacatcagcggcttcagcaagcagtacaactgtgccttcatctggcagaaggacggcgtgaagaagctgaacctgtacctgatcatcaactacttcaagggcggcaagctgcggttcaagaagatcaaacctgaagccttcgaagccaacagattctacaccgtgatcaacaaaaagagcggcgagatcgtgcccatggaggtgaacttcaacttcgacgaccccaacctgatcatcctgcctctggcctttggcaagagacagggcagagaattcatctggaacgacctgctgtccctggaaaccggcagcctgaagctggccaacggaagagtgatcgagaagacactgtacaacagaagaacccggcaggatgagcctgccctgttcgtggccctgaccttcgagcggcgggaggtcctggactcctccaatatcaaaccaatgaacctgatcggcgtggcaagaggcgaaaacatccccgccgtgatcgccctgaccgaccccgagggctgcccactgagccggtttaaggatagcctgggaaacccaacccacatcctgagaatcggcgagagctataaggagaagcagcggaccatccaggccaagaaggaggtggagcagcggagagccggcggctacagccggaagtacgccagcaaagccaagaatctggcagacgatatggtgagaaacaccgctagagatctgctgtactacgccgtgacccaggatgccatgctgatcttcgccaacctgagccggggcttcggccggcagggcaagcggaccttcatggccgagagacagtacacacggatggaggactggctgaccgccaagctggcctacgagggcctgagcaagacctacctgtccaagacactggcccagtacacctccaagacatgcagcaactgtgggtttaccatcaccagcgccgactacgacagggtgctggagaagctgaagaagacagcaacaggctggatgaccacaattaacggcaaggagctgaaggtggagggccagattacctactacaacagatacaagagacagaacgtagtcaaggacctgtccgtcgagctggatagactgagcgaagaatctgtgaacaacgacatctcctcctggacaaagggcagaagcggagaagctctgagcctcctgaagaaaagattctcccatagacccgtgcaggagaagttcgtgtgcctgaactgcggcttcgagacacacgcagccgagcaagccgccctgaacatcgccagatcctggctgttcctgcggagccaggagtacaagaaataccagacaaacaagacaaccggcaacaccgataagagagccttcgtcgagacctggcagtccttttaccggaagaagcttaaggaggtgtggaaacctgccgtgcggtctggcggatctggcggaggctccaccagccccaagaaaaagagaaaagtctaagctgccttctgcggggcttgccttctggccatgcccttcttctctcccttgcacctgtacctcttggtctttgaataaagcctgagtaggaaggctagcaaaaaaaaaaaaaaaaaaaaaaaaaaaaaaaaaaaaaaaaaaaaaaaaaaaaaaaaaaaaaaaaaaaaaaaaaaaaaaaa

SEQ ID NO: 10124 - RNA, 8787 nt, synthetic construct
  source 1..8787: mol_type = other RNA
aggaaataagagagaaaagaagagtaagaagaaatataagagccaccatggcccctaagaagaagcgtaaagtgagccggatgaaccacgaccaggagttcgacccccctaaggtgtaccctcccgtccccgccgagaagagaaagcccatccgggtcctgagcctgttcgatggcatcgccaccggtctgctggtgctgaaggacctgggcatccaggtggataggtacattgcctccgaggtgtgcgaggactccatcaccgtgggaatggtgcgtcatcagggcaagatcatgtacgtgggcgacgtgcggagcgtgacacagaagcatatccaggagtggggccctttcgacctggtgatcggcggcagcccttgcaatgacctgagcatcgtgaacccagcccggaagggcctgtacgagggaaccggcagactgttcttcgagttttacagactgctgcacgacgcccggcctaaggaaggcgacgaccggcccttcttttggctgttcgagaatgtggtggccatgggagtcagcgacaagcgggatattagccggttcctggagagcaaccccgtgatgatcgatgccaaggaagtgagcgccgcccaccgggccagatacttctggggcaatctgcctggcatgaacagacccctggccagcaccgtgaacgacaagctggagctgcaggagtgcctggagcacggccggatcgccaagttcagcaaggtgagaaccatcaccacccgaagcaacagcatcaaacaaggcaaggaccagcactttcctgtgttcatgaacgagaaggaggacatcctgtggtgtaccgagatggagagagtgttcgggttcccagtccactacacagatgtcagcaacatgtctagactggccagacagagactgctgggaagaagctggtccgtccctgtgatcagacacctgttcgcccctctgaaggagtacttcgcctgcgtgagcagcggcaacagcaacgccaacagccggggccccagcttctctagcggcctggtgccactgtccctgagagggagccacatgggccccatggagatctacaaaaccgtgagcgcctggaagcggcagcctgtgcgcgtgctgagcctgtttcggaatatcgataaagtcctgaaaagcctgggattcctggagagcggctctggctccggcggtggcaccctgaagtacgtggaggatgtgacaaacgtggtcagacgggatgtggagaagtggggccccttcgatctggtgtacggcagcacccaacccctgggcagctcttgtgaccggtgccctggctggtacatgtttcagttccaccggatcctgcagtacgccctgccgagacaggagtcccagcggccattcttttggattttcatggacaacttgctgctgaccgaggatgaccaggaaactaccactcggttcctgcagaccgaagccgtgaccctgcaggacgtgagaggccgggactaccagaacgccatgcgggtgtggtccaacatccctggactgaaaagcaagcacgcacctctgacccctaaagaagaggagtacctgcaggcccaggtgcggagcagaagcaagctggacgcccctaaggtggatctgctggtgaagaattgcctcctgcccctgagagagtacttcaagtatttcagccagaatagtctgcccctgggaggcagcggcggcggcgtggtgttcaccgacgtggccgtggacttcagccaggaggagtgggagtgcctggacagctaccagaggagcctgtacagggacgtgatcctggagaactacagcaacctggtgagcctgggcggcggcagcatcagcaagcccgacgtggtgaccctgctggagcagggcaaggagccctggatggtggtgagggacaccaagatcaggtggagcctgggcctggagagcaactacgacgccggcggcccaagcagcggcgcccctcctcccagcggcggcaggcggcccaagcagcggcgcccctcctcccagcggcggcagcccagccggctccccaacctctaccgaggagggcacctctgagtccgccacccccgagagcggccctggcacctccaccgagcccagcgagggcagcgcacccggcagccctgccggcagccccacctccacagaggagggaaccagcaccgagcccagcgaaggcagcgccccaggcaccagcaccgagcctagtgagcaggagattaaacggatcaacaagatcagaagaagacttgtgaaagacagcaacaccaagaaggccggcaagacaggccccatgaaaaccctgctggttagagtgatgacacccgatctgagagagcggctggaaaacctgagaaagaagcctgaaaatatcccccagcccatcagcaatacatctagagccaacctgaataagctgctgaccgattacaccgaaatgaagaaggcgatcctgcatgtgtactgggaagagttccagaaggaccctgtgggcctgatgagccgggtggcccagcctgccagcaagaagatcgatcagaacaagctgaaacctgagatggacgagaagggcaacctgaccaccgccggctttgcctgctctcagtgtggccagcccctgttcgtgtacaagctggagcaggtgtctgagaagggcaaggcttacaccaactacttcggacggtgcaatgtggccgagcacgaaaagctgatcctgctggcccagctgaagcccgagaaggatagcgacgaagccgtgacatatagcctgggaaagtttgggcagagggccctggatttctacagcattcatgtgaccaaggagtccacccaccccgtgaagcccctggcccagatcgccggaaacagatacgcctccggacctgtgggaaaggccctgagcgacgcatgtatgggcacaatcgcctccttcctgtctaagtaccaggacatcatcatcgaacaccagaaggtggtgaagggcaaccagaagagactggagagcctgcgggagctggccggcaaggaaaacctggaataccctagcgtgaccctgccacctcagcctcacaccaaggagggcgttgatgcctacaacgaagtgatcgcccgggtgcgaatgtgggtgaacctgaacctgtggcagaagctgaagctaagcagagatgatgccaagcctctgctgagactgaagggattcccttcctttcctctggtcgagagacaggccaacgaagtggactggtgggacatggtgtgtaacgtgaagaagctgatcaacgagaaaaaggaggatggcaaggtgttttggcagaatctggctggctacaagagacaggaagccctgagaccatacctgagcagcgaggaagatcggaagaagggaaagaaattcgctcggtaccagctgggcgacctgctgctgcacctggaaaagaagcacggcgaggactggggaaaggtgtacgacgaggcctgggagcggattgacaagaaagtggaaggcctgagcaagcacatcaagctggaagaggaacggagaagcgaggacgcccagagcaaggccgccctgaccgactggctgcgggctaaggccagcttcgtgatcgagggcctgaaggaggccgacaaggacgagttctgcagatgcgagctgaagctgcagaagtggtacggggacctgcggggaaagcccttcgccatcgaagccgagaacagcatcctggacatcagcggcttcagcaagcagtacaactgtgccttcatctggcagaaggacggcgtgaagaagctgaacctgtacctgatcatcaactacttcaagggcggcaagctgcggttcaagaagatcaaacctgaagccttcgaagccaacagattctacaccgtgatcaacaaaaagagcggcgagatcgtgcccatggaggtgaacttcaacttcgacgaccccaacctgatcatcctgcctctggcctttggcaagagacagggcagagaattcatctggaacgacctgctgtccctggaaaccggcagcctgaagctggccaacggaagagtgatcgagaagacactgtacaacagaagaacccggcaggatgagcctgccctgttcgtggccctgaccttcgagcggcgggaggtcctggactcctccaatatcaaaccaatgaacctgatcggcgtggcaagaggcgaaaacatccccgccgtgatcgccctgaccgaccccgagggctgcccactgagccggtttaaggatagcctgggaaacccaacccacatcctgagaatcggcgagagctataaggagaagcagcggaccatccaggccaagaaggaggtggagcagcggagagccggcggctacagccggaagtacgccagcaaagccaagaatctggcagacgatatggtgagaaacaccgctagagatctgctgtactacgccgtgacccaggatgccatgctgatcttcgccaacctgagccggggcttcggccggcagggcaagcggaccttcatggccgagagacagtacacacggatggaggactggctgaccgccaagctggcctacgagggcctgagcaagacctacctgtccaagacactggcccagtacacctccaagacatgcagcaactgtgggtttaccatcaccagcgccgactacgacagggtgctggagaagctgaagaagacagcaacaggctggatgaccacaattaacggcaaggagctgaaggtggagggccagattacctactacaacagatacaagagacagaacgtagtcaaggacctgtccgtcgagctggatagactgagcgaagaatctgtgaacaacgacatctcctcctggacaaagggcagaagcggagaagctctgagcctcctgaagaaaagattctcccatagacccgtgcaggagaagttcgtgtgcctgaactgcggcttcgagacacacgcagccgagcaagccgccctgaacatcgccagatcctggctgttcctgcggagccaggagtacaagaaataccagacaaacaagacaaccggcaacaccgataagagagccttcgtcgagacctggcagtccttttaccggaagaagcttaaggaggtgtggaaacctgccgtgcggtctggcggatctggcggaggctccaccagccccaagaaaaagagaaaagtctaagctgccttctgcggggcttgccttctggccatgcccttcttctctcccttgcacctgtacctcttggtctttgaataaagcctgagtaggaaggctagcaaaaaaaaaaaaaaaaaaaaaaaaaaaaaaaaaaaaaaaaaaaaaaaaaaaaaaaaaaaaaaaaaaaaaaaaaaaaaaaagcccagccggctccccaacctctaccgaggagggcacctctgagtccgccacccccgagagcggccctggcacctccaccgagcccagcgagggcagcgcacccggcagccctgccggcagccccacctccacagaggagggaaccagcaccgagcccagcgaaggcagcgccccaggcaccagcaccgagcctagtgagcaggagattaaacggatcaacaagatcagaagaagacttgtgaaagacagcaacaccaagaaggccggcaagacaggccccatgaaaaccctgctggttagagtgatgacacccgatctgagagagcggctggaaaacctgagaaagaagcctgaaaatatcccccagcccatcagcaatacatctagagccaacctgaataagctgctgaccgattacaccgaaatgaagaaggcgatcctgcatgtgtactgggaagagttccagaaggaccctgtgggcctgatgagccgggtggcccagcctgccagcaagaagatcgatcagaacaagctgaaacctgagatggacgagaagggcaacctgaccaccgccggctttgcctgctctcagtgtggccagcccctgttcgtgtacaagctggagcaggtgtctgagaagggcaaggcttacaccaactacttcggacggtgcaatgtggccgagcacgaaaagctgatcctgctggcccagctgaagcccgagaaggatagcgacgaagccgtgacatatagcctgggaaagtttgggcagagggccctggatttctacagcattcatgtgaccaaggagtccacccaccccgtgaagcccctggcccagatcgccggaaacagatacgcctccggacctgtgggaaaggccctgagcgacgcatgtatgggcacaatcgcctccttcctgtctaagtaccaggacatcatcatcgaacaccagaaggtggtgaagggcaaccagaagagactggagagcctgcgggagctggccggcaaggaaaacctggaataccctagcgtgaccctgccacctcagcctcacaccaaggagggcgttgatgcctacaacgaagtgatcgcccgggtgcgaatgtgggtgaacctgaacctgtggcagaagctgaagctaagcagagatgatgccaagcctctgctgagactgaagggattcccttcctttcctctggtcgagagacaggccaacgaagtggactggtgggacatggtgtgtaacgtgaagaagctgatcaacgagaaaaaggaggatggcaaggtgttttggcagaatctggctggctacaagagacaggaagccctgagaccatacctgagcagcgaggaagatcggaagaagggaaagaaattcgctcggtaccagctgggcgacctgctgctgcacctggaaaagaagcacggcgaggactggggaaaggtgtacgacgaggcctgggagcggattgacaagaaagtggaaggcctgagcaagcacatcaagctggaagaggaacggagaagcgaggacgcccagagcaaggccgccctgaccgactggctgcgggctaaggccagcttcgtgatcgagggcctgaaggaggccgacaaggacgagttctgcagatgcgagctgaagctgcagaagtggtacggggacctgcggggaaagcccttcgccatcgaagccgagaacagcatcctggacatcagcggcttcagcaagcagtacaactgtgccttcatctggcagaaggacggcgtgaagaagctgaacctgtacctgatcatcaactacttcaagggcggcaagctgcggttcaagaagatcaaacctgaagccttcgaagccaacagattctacaccgtgatcaacaaaaagagcggcgagatcgtgcccatggaggtgaacttcaacttcgacgaccccaacctgatcatcctgcctctggcctttggcaagagacagggcagagaattcatctggaacgacctgctgtccctggaaaccggcagcctgaagctggccaacggaagagtgatcgagaagacactgtacaacagaagaacccggcaggatgagcctgccctgttcgtggccctgaccttcgagcggcgggaggtcctggactcctccaatatcaaaccaatgaacctgatcggcgtggcaagaggcgaaaacatccccgccgtgatcgccctgaccgaccccgagggctgcccactgagccggtttaaggatagcctgggaaacccaacccacatcctgagaatcggcgagagctataaggagaagcagcggaccatccaggccaagaaggaggtggagcagcggagagccggcggctacagccggaagtacgccagcaaagccaagaatctggcagacgatatggtgagaaacaccgctagagatctgctgtactacgccgtgacccaggatgccatgctgatcttcgccaacctgagccggggcttcggccggcagggcaagcggaccttcatggccgagagacagtacacacggatggaggactggctgaccgccaagctggcctacgagggcctgagcaagacctacctgtccaagacactggcccagtacacctccaagacatgcagcaactgtgggtttaccatcaccagcgccgactacgacagggtgctggagaagctgaagaagacagcaacaggctggatgaccacaattaacggcaaggagctgaaggtggagggccagattacctactacaacagatacaagagacagaacgtagtcaaggacctgtccgtcgagctggatagactgagcgaagaatctgtgaacaacgacatctcctcctggacaaagggcagaagcggagaagctctgagcctcctgaagaaaagattctcccatagacccgtgcaggagaagttcgtgtgcctgaactgcggcttcgagacacacgcagccgagcaagccgccctgaacatcgccagatcctggctgttcctgcggagccaggagtacaagaaataccagacaaacaagacaaccggcaacaccgataagagagccttcgtcgagacctggcagtccttttaccggaagaagcttaaggaggtgtggaaacctgccgtgcggtctggcggatctggcggaggctccaccagccccaagaaaaagagaaaagtctaagctgccttctgcggggcttgccttctggccatgcccttcttctctcccttgcacctgtacctcttggtctttgaataaagcctgagtaggaaggctagcaaaaaaaaaaaaaaaaaaaaaaaaaaaaaaaaaaaaaaaaaaaaaaaaaaaaaaaaaaaaaaaaaaaaaaaaaaaaaaaa

SEQ ID NO: 10125 - RNA, 8787 nt, synthetic construct
  source 1..8787: mol_type = other RNA
aggaaataagagagaaaagaagagtaagaagaaatataagagccaccatggcccctaagaagaagcgtaaagtgagccggatgaaccacgaccaggagttcgacccccctaaggtgtaccctcccgtccccgccgagaagagaaagcccatccgggtcctgagcctgttcgatggcatcgccaccggtctgctggtgctgaaggacctgggcatccaggtggataggtacattgcctccgaggtgtgcgaggactccatcaccgtgggaatggtgcgtcatcagggcaagatcatgtacgtgggcgacgtgcggagcgtgacacagaagcatatccaggagtggggccctttcgacctggtgatcggcggcagcccttgcaatgacctgagcatcgtgaacccagcccggaagggcctgtacgagggaaccggcagactgttcttcgagttttacagactgctgcacgacgcccggcctaaggaaggcgacgaccggcccttcttttggctgttcgagaatgtggtggccatgggagtcagcgacaagcgggatattagccggttcctggagagcaaccccgtgatgatcgatgccaaggaagtgagcgccgcccaccgggccagatacttctggggcaatctgcctggcatgaacagacccctggccagcaccgtgaacgacaagctggagctgcaggagtgcctggagcacggccggatcgccaagttcagcaaggtgagaaccatcaccacccgaagcaacagcatcaaacaaggcaaggaccagcactttcctgtgttcatgaacgagaaggaggacatcctgtggtgtaccgagatggagagagtgttcgggttcccagtccactacacagatgtcagcaacatgtctagactggccagacagagactgctgggaagaagctggtccgtccctgtgatcagacacctgttcgcccctctgaaggagtacttcgcctgcgtgagcagcggcaacagcaacgccaacagccggggccccagcttctctagcggcctggtgccactgtccctgagagggagccacatgggccccatggagatctacaaaaccgtgagcgcctggaagcggcagcctgtgcgcgtgctgagcctgtttcggaatatcgataaagtcctgaaaagcctgggattcctggagagcggctctggctccggcggtggcaccctgaagtacgtggaggatgtgacaaacgtggtcagacgggatgtggagaagtggggccccttcgatctggtgtacggcagcacccaacccctgggcagctcttgtgaccggtgccctggctggtacatgtttcagttccaccggatcctgcagtacgccctgccgagacaggagtcccagcggccattcttttggattttcatggacaacttgctgctgaccgaggatgaccaggaaactaccactcggttcctgcagaccgaagccgtgaccctgcaggacgtgagaggccgggactaccagaacgccatgcgggtgtggtccaacatccctggactgaaaagcaagcacgcacctctgacccctaaagaagaggagtacctgcaggcccaggtgcggagcagaagcaagctggacgcccctaaggtggatctgctggtgaagaattgcctcctgcccctgagagagtacttcaagtatttcagccagaatagtctgcccctgggaggcagcggcggcggcctgcaggacagcgtgaccttcaaggacgtggccgtggacttcagccaggaggagtgggagaggctgaaccccgcccagaggagcctgtacaggaccgtggtgctggagaactactggaacctggtgagcgtgggcgcctgcgtgagcaagagccacctgatcagcctgctggagcacggcaaggccccctgggacatgaggggcgaggtgaccgagagcaccagccaggacggcgagagcgtgggcggcccaagcagcggcgcccctcctcccagcggcggcaggcggcccaagcagcggcgcccctcctcccagcggcggcagcccagccggctccccaacctctaccgaggagggcacctctgagtccgccacccccgagagcggccctggcacctccaccgagcccagcgagggcagcgcacccggcagccctgccggcagccccacctccacagaggagggaaccagcaccgagcccagcgaaggcagcgccccaggcaccagcaccgagcctagtgagcaggagattaaacggatcaacaagatcagaagaagacttgtgaaagacagcaacaccaagaaggccggcaagacaggccccatgaaaaccctgctggttagagtgatgacacccgatctgagagagcggctggaaaacctgagaaagaagcctgaaaatatcccccagcccatcagcaatacatctagagccaacctgaataagctgctgaccgattacaccgaaatgaagaaggcgatcctgcatgtgtactgggaagagttccagaaggaccctgtgggcctgatgagccgggtggcccagcctgccagcaagaagatcgatcagaacaagctgaaacctgagatggacgagaagggcaacctgaccaccgccggctttgcctgctctcagtgtggccagcccctgttcgtgtacaagctggagcaggtgtctgagaagggcaaggcttacaccaactacttcggacggtgcaatgtggccgagcacgaaaagctgatcctgctggcccagctgaagcccgagaaggatagcgacgaagccgtgacatatagcctgggaaagtttgggcagagggccctggatttctacagcattcatgtgaccaaggagtccacccaccccgtgaagcccctggcccagatcgccggaaacagatacgcctccggacctgtgggaaaggccctgagcgacgcatgtatgggcacaatcgcctccttcctgtctaagtaccaggacatcatcatcgaacaccagaaggtggtgaagggcaaccagaagagactggagagcctgcgggagctggccggcaaggaaaacctggaataccctagcgtgaccctgccacctcagcctcacaccaaggagggcgttgatgcctacaacgaagtgatcgcccgggtgcgaatgtgggtgaacctgaacctgtggcagaagctgaagctaagcagagatgatgccaagcctctgctgagactgaagggattcccttcctttcctctggtcgagagacaggccaacgaagtggactggtgggacatggtgtgtaacgtgaagaagctgatcaacgagaaaaaggaggatggcaaggtgttttggcagaatctggctggctacaagagacaggaagccctgagaccatacctgagcagcgaggaagatcggaagaagggaaagaaattcgctcggtaccagctgggcgacctgctgctgcacctggaaaagaagcacggcgaggactggggaaaggtgtacgacgaggcctgggagcggattgacaagaaagtggaaggcctgagcaagcacatcaagctggaagaggaacggagaagcgaggacgcccagagcaaggccgccctgaccgactggctgcgggctaaggccagcttcgtgatcgagggcctgaaggaggccgacaaggacgagttctgcagatgcgagctgaagctgcagaagtggtacggggacctgcggggaaagcccttcgccatcgaagccgagaacagcatcctggacatcagcggcttcagcaagcagtacaactgtgccttcatctggcagaaggacggcgtgaagaagctgaacctgtacctgatcatcaactacttcaagggcggcaagctgcggttcaagaagatcaaacctgaagccttcgaagccaacagattctacaccgtgatcaacaaaaagagcggcgagatcgtgcccatggaggtgaacttcaacttcgacgaccccaacctgatcatcctgcctctggcctttggcaagagacagggcagagaattcatctggaacgacctgctgtccctggaaaccggcagcctgaagctggccaacggaagagtgatcgagaagacactgtacaacagaagaacccggcaggatgagcctgccctgttcgtggccctgaccttcgagcggcgggaggtcctggactcctccaatatcaaaccaatgaacctgatcggcgtggcaagaggcgaaaacatccccgccgtgatcgccctgaccgaccccgagggctgcccactgagccggtttaaggatagcctgggaaacccaacccacatcctgagaatcggcgagagctataaggagaagcagcggaccatccaggccaagaaggaggtggagcagcggagagccggcggctacagccggaagtacgccagcaaagccaagaatctggcagacgatatggtgagaaacaccgctagagatctgctgtactacgccgtgacccaggatgccatgctgatcttcgccaacctgagccggggcttcggccggcagggcaagcggaccttcatggccgagagacagtacacacggatggaggactggctgaccgccaagctggcctacgagggcctgagcaagacctacctgtccaagacactggcccagtacacctccaagacatgcagcaactgtgggtttaccatcaccagcgccgactacgacagggtgctggagaagctgaagaagacagcaacaggctggatgaccacaattaacggcaaggagctgaaggtggagggccagattacctactacaacagatacaagagacagaacgtagtcaaggacctgtccgtcgagctggatagactgagcgaagaatctgtgaacaacgacatctcctcctggacaaagggcagaagcggagaagctctgagcctcctgaagaaaagattctcccatagacccgtgcaggagaagttcgtgtgcctgaactgcggcttcgagacacacgcagccgagcaagccgccctgaacatcgccagatcctggctgttcctgcggagccaggagtacaagaaataccagacaaacaagacaaccggcaacaccgataagagagccttcgtcgagacctggcagtccttttaccggaagaagcttaaggaggtgtggaaacctgccgtgcggtctggcggatctggcggaggctccaccagccccaagaaaaagagaaaagtctaagctgccttctgcggggcttgccttctggccatgcccttcttctctcccttgcacctgtacctcttggtctttgaataaagcctgagtaggaaggctagcaaaaaaaaaaaaaaaaaaaaaaaaaaaaaaaaaaaaaaaaaaaaaaaaaaaaaaaaaaaaaaaaaaaaaaaaaaaaaaaagcccagccggctccccaacctctaccgaggagggcacctctgagtccgccacccccgagagcggccctggcacctccaccgagcccagcgagggcagcgcacccggcagccctgccggcagccccacctccacagaggagggaaccagcaccgagcccagcgaaggcagcgccccaggcaccagcaccgagcctagtgagcaggagattaaacggatcaacaagatcagaagaagacttgtgaaagacagcaacaccaagaaggccggcaagacaggccccatgaaaaccctgctggttagagtgatgacacccgatctgagagagcggctggaaaacctgagaaagaagcctgaaaatatcccccagcccatcagcaatacatctagagccaacctgaataagctgctgaccgattacaccgaaatgaagaaggcgatcctgcatgtgtactgggaagagttccagaaggaccctgtgggcctgatgagccgggtggcccagcctgccagcaagaagatcgatcagaacaagctgaaacctgagatggacgagaagggcaacctgaccaccgccggctttgcctgctctcagtgtggccagcccctgttcgtgtacaagctggagcaggtgtctgagaagggcaaggcttacaccaactacttcggacggtgcaatgtggccgagcacgaaaagctgatcctgctggcccagctgaagcccgagaaggatagcgacgaagccgtgacatatagcctgggaaagtttgggcagagggccctggatttctacagcattcatgtgaccaaggagtccacccaccccgtgaagcccctggcccagatcgccggaaacagatacgcctccggacctgtgggaaaggccctgagcgacgcatgtatgggcacaatcgcctccttcctgtctaagtaccaggacatcatcatcgaacaccagaaggtggtgaagggcaaccagaagagactggagagcctgcgggagctggccggcaaggaaaacctggaataccctagcgtgaccctgccacctcagcctcacaccaaggagggcgttgatgcctacaacgaagtgatcgcccgggtgcgaatgtgggtgaacctgaacctgtggcagaagctgaagctaagcagagatgatgccaagcctctgctgagactgaagggattcccttcctttcctctggtcgagagacaggccaacgaagtggactggtgggacatggtgtgtaacgtgaagaagctgatcaacgagaaaaaggaggatggcaaggtgttttggcagaatctggctggctacaagagacaggaagccctgagaccatacctgagcagcgaggaagatcggaagaagggaaagaaattcgctcggtaccagctgggcgacctgctgctgcacctggaaaagaagcacggcgaggactggggaaaggtgtacgacgaggcctgggagcggattgacaagaaagtggaaggcctgagcaagcacatcaagctggaagaggaacggagaagcgaggacgcccagagcaaggccgccctgaccgactggctgcgggctaaggccagcttcgtgatcgagggcctgaaggaggccgacaaggacgagttctgcagatgcgagctgaagctgcagaagtggtacggggacctgcggggaaagcccttcgccatcgaagccgagaacagcatcctggacatcagcggcttcagcaagcagtacaactgtgccttcatctggcagaaggacggcgtgaagaagctgaacctgtacctgatcatcaactacttcaagggcggcaagctgcggttcaagaagatcaaacctgaagccttcgaagccaacagattctacaccgtgatcaacaaaaagagcggcgagatcgtgcccatggaggtgaacttcaacttcgacgaccccaacctgatcatcctgcctctggcctttggcaagagacagggcagagaattcatctggaacgacctgctgtccctggaaaccggcagcctgaagctggccaacggaagagtgatcgagaagacactgtacaacagaagaacccggcaggatgagcctgccctgttcgtggccctgaccttcgagcggcgggaggtcctggactcctccaatatcaaaccaatgaacctgatcggcgtggcaagaggcgaaaacatccccgccgtgatcgccctgaccgaccccgagggctgcccactgagccggtttaaggatagcctgggaaacccaacccacatcctgagaatcggcgagagctataaggagaagcagcggaccatccaggccaagaaggaggtggagcagcggagagccggcggctacagccggaagtacgccagcaaagccaagaatctggcagacgatatggtgagaaacaccgctagagatctgctgtactacgccgtgacccaggatgccatgctgatcttcgccaacctgagccggggcttcggccggcagggcaagcggaccttcatggccgagagacagtacacacggatggaggactggctgaccgccaagctggcctacgagggcctgagcaagacctacctgtccaagacactggcccagtacacctccaagacatgcagcaactgtgggtttaccatcaccagcgccgactacgacagggtgctggagaagctgaagaagacagcaacaggctggatgaccacaattaacggcaaggagctgaaggtggagggccagattacctactacaacagatacaagagacagaacgtagtcaaggacctgtccgtcgagctggatagactgagcgaagaatctgtgaacaacgacatctcctcctggacaaagggcagaagcggagaagctctgagcctcctgaagaaaagattctcccatagacccgtgcaggagaagttcgtgtgcctgaactgcggcttcgagacacacgcagccgagcaagccgccctgaacatcgccagatcctggctgttcctgcggagccaggagtacaagaaataccagacaaacaagacaaccggcaacaccgataagagagccttcgtcgagacctggcagtccttttaccggaagaagcttaaggaggtgtggaaacctgccgtgcggtctggcggatctggcggaggctccaccagccccaagaaaaagagaaaagtctaagctgccttctgcggggcttgccttctggccatgcccttcttctctcccttgcacctgtacctcttggtctttgaataaagcctgagtaggaaggctagcaaaaaaaaaaaaaaaaaaaaaaaaaaaaaaaaaaaaaaaaaaaaaaaaaaaaaaaaaaaaaaaaaaaaaaaaaaaaaaaa

SEQ ID NO: 10126 - RNA, 8787 nt, synthetic construct
  source 1..8787: mol_type = other RNA
aggaaataagagagaaaagaagagtaagaagaaatataagagccaccatggcccctaagaagaagcgtaaagtgagccggatgaaccacgaccaggagttcgacccccctaaggtgtaccctcccgtccccgccgagaagagaaagcccatccgggtcctgagcctgttcgatggcatcgccaccggtctgctggtgctgaaggacctgggcatccaggtggataggtacattgcctccgaggtgtgcgaggactccatcaccgtgggaatggtgcgtcatcagggcaagatcatgtacgtgggcgacgtgcggagcgtgacacagaagcatatccaggagtggggccctttcgacctggtgatcggcggcagcccttgcaatgacctgagcatcgtgaacccagcccggaagggcctgtacgagggaaccggcagactgttcttcgagttttacagactgctgcacgacgcccggcctaaggaaggcgacgaccggcccttcttttggctgttcgagaatgtggtggccatgggagtcagcgacaagcgggatattagccggttcctggagagcaaccccgtgatgatcgatgccaaggaagtgagcgccgcccaccgggccagatacttctggggcaatctgcctggcatgaacagacccctggccagcaccgtgaacgacaagctggagctgcaggagtgcctggagcacggccggatcgccaagttcagcaaggtgagaaccatcaccacccgaagcaacagcatcaaacaaggcaaggaccagcactttcctgtgttcatgaacgagaaggaggacatcctgtggtgtaccgagatggagagagtgttcgggttcccagtccactacacagatgtcagcaacatgtctagactggccagacagagactgctgggaagaagctggtccgtccctgtgatcagacacctgttcgcccctctgaaggagtacttcgcctgcgtgagcagcggcaacagcaacgccaacagccggggccccagcttctctagcggcctggtgccactgtccctgagagggagccacatgggccccatggagatctacaaaaccgtgagcgcctggaagcggcagcctgtgcgcgtgctgagcctgtttcggaatatcgataaagtcctgaaaagcctgggattcctggagagcggctctggctccggcggtggcaccctgaagtacgtggaggatgtgacaaacgtggtcagacgggatgtggagaagtggggccccttcgatctggtgtacggcagcacccaacccctgggcagctcttgtgaccggtgccctggctggtacatgtttcagttccaccggatcctgcagtacgccctgccgagacaggagtcccagcggccattcttttggattttcatggacaacttgctgctgaccgaggatgaccaggaaactaccactcggttcctgcagaccgaagccgtgaccctgcaggacgtgagaggccgggactaccagaacgccatgcgggtgtggtccaacatccctggactgaaaagcaagcacgcacctctgacccctaaagaagaggagtacctgcaggcccaggtgcggagcagaagcaagctggacgcccctaaggtggatctgctggtgaagaattgcctcctgcccctgagagagtacttcaagtatttcagccagaatagtctgcccctgggaggcagcggcggcggcccccaggagagcgtgaccttcgaggacgtggccgtgtacttcacccagaaggagtgggagggcctggcccccgcccagagggccctgtacagggacgtgatgctggagaactacggcaacctggtgagcctggccttcctgttccccaagcccgccgtgatcagccagctggagcagggcgagaagccctggatccagaccccccagaggcccctggacaagaagaagacctacaagggctgcggcggcccaagcagcggcgcccctcctcccagcggcggcaggcggcccaagcagcggcgcccctcctcccagcggcggcagcccagccggctccccaacctctaccgaggagggcacctctgagtccgccacccccgagagcggccctggcacctccaccgagcccagcgagggcagcgcacccggcagccctgccggcagccccacctccacagaggagggaaccagcaccgagcccagcgaaggcagcgccccaggcaccagcaccgagcctagtgagcaggagattaaacggatcaacaagatcagaagaagacttgtgaaagacagcaacaccaagaaggccggcaagacaggccccatgaaaaccctgctggttagagtgatgacacccgatctgagagagcggctggaaaacctgagaaagaagcctgaaaatatcccccagcccatcagcaatacatctagagccaacctgaataagctgctgaccgattacaccgaaatgaagaaggcgatcctgcatgtgtactgggaagagttccagaaggaccctgtgggcctgatgagccgggtggcccagcctgccagcaagaagatcgatcagaacaagctgaaacctgagatggacgagaagggcaacctgaccaccgccggctttgcctgctctcagtgtggccagcccctgttcgtgtacaagctggagcaggtgtctgagaagggcaaggcttacaccaactacttcggacggtgcaatgtggccgagcacgaaaagctgatcctgctggcccagctgaagcccgagaaggatagcgacgaagccgtgacatatagcctgggaaagtttgggcagagggccctggatttctacagcattcatgtgaccaaggagtccacccaccccgtgaagcccctggcccagatcgccggaaacagatacgcctccggacctgtgggaaaggccctgagcgacgcatgtatgggcacaatcgcctccttcctgtctaagtaccaggacatcatcatcgaacaccagaaggtggtgaagggcaaccagaagagactggagagcctgcgggagctggccggcaaggaaaacctggaataccctagcgtgaccctgccacctcagcctcacaccaaggagggcgttgatgcctacaacgaagtgatcgcccgggtgcgaatgtgggtgaacctgaacctgtggcagaagctgaagctaagcagagatgatgccaagcctctgctgagactgaagggattcccttcctttcctctggtcgagagacaggccaacgaagtggactggtgggacatggtgtgtaacgtgaagaagctgatcaacgagaaaaaggaggatggcaaggtgttttggcagaatctggctggctacaagagacaggaagccctgagaccatacctgagcagcgaggaagatcggaagaagggaaagaaattcgctcggtaccagctgggcgacctgctgctgcacctggaaaagaagcacggcgaggactggggaaaggtgtacgacgaggcctgggagcggattgacaagaaagtggaaggcctgagcaagcacatcaagctggaagaggaacggagaagcgaggacgcccagagcaaggccgccctgaccgactggctgcgggctaaggccagcttcgtgatcgagggcctgaaggaggccgacaaggacgagttctgcagatgcgagctgaagctgcagaagtggtacggggacctgcggggaaagcccttcgccatcgaagccgagaacagcatcctggacatcagcggcttcagcaagcagtacaactgtgccttcatctggcagaaggacggcgtgaagaagctgaacctgtacctgatcatcaactacttcaagggcggcaagctgcggttcaagaagatcaaacctgaagccttcgaagccaacagattctacaccgtgatcaacaaaaagagcggcgagatcgtgcccatggaggtgaacttcaacttcgacgaccccaacctgatcatcctgcctctggcctttggcaagagacagggcagagaattcatctggaacgacctgctgtccctggaaaccggcagcctgaagctggccaacggaagagtgatcgagaagacactgtacaacagaagaacccggcaggatgagcctgccctgttcgtggccctgaccttcgagcggcgggaggtcctggactcctccaatatcaaaccaatgaacctgatcggcgtggcaagaggcgaaaacatccccgccgtgatcgccctgaccgaccccgagggctgcccactgagccggtttaaggatagcctgggaaacccaacccacatcctgagaatcggcgagagctataaggagaagcagcggaccatccaggccaagaaggaggtggagcagcggagagccggcggctacagccggaagtacgccagcaaagccaagaatctggcagacgatatggtgagaaacaccgctagagatctgctgtactacgccgtgacccaggatgccatgctgatcttcgccaacctgagccggggcttcggccggcagggcaagcggaccttcatggccgagagacagtacacacggatggaggactggctgaccgccaagctggcctacgagggcctgagcaagacctacctgtccaagacactggcccagtacacctccaagacatgcagcaactgtgggtttaccatcaccagcgccgactacgacagggtgctggagaagctgaagaagacagcaacaggctggatgaccacaattaacggcaaggagctgaaggtggagggccagattacctactacaacagatacaagagacagaacgtagtcaaggacctgtccgtcgagctggatagactgagcgaagaatctgtgaacaacgacatctcctcctggacaaagggcagaagcggagaagctctgagcctcctgaagaaaagattctcccatagacccgtgcaggagaagttcgtgtgcctgaactgcggcttcgagacacacgcagccgagcaagccgccctgaacatcgccagatcctggctgttcctgcggagccaggagtacaagaaataccagacaaacaagacaaccggcaacaccgataagagagccttcgtcgagacctggcagtccttttaccggaagaagcttaaggaggtgtggaaacctgccgtgcggtctggcggatctggcggaggctccaccagccccaagaaaaagagaaaagtctaagctgccttctgcggggcttgccttctggccatgcccttcttctctcccttgcacctgtacctcttggtctttgaataaagcctgagtaggaaggctagcaaaaaaaaaaaaaaaaaaaaaaaaaaaaaaaaaaaaaaaaaaaaaaaaaaaaaaaaaaaaaaaaaaaaaaaaaaaaaaaagcccagccggctccccaacctctaccgaggagggcacctctgagtccgccacccccgagagcggccctggcacctccaccgagcccagcgagggcagcgcacccggcagccctgccggcagccccacctccacagaggagggaaccagcaccgagcccagcgaaggcagcgccccaggcaccagcaccgagcctagtgagcaggagattaaacggatcaacaagatcagaagaagacttgtgaaagacagcaacaccaagaaggccggcaagacaggccccatgaaaaccctgctggttagagtgatgacacccgatctgagagagcggctggaaaacctgagaaagaagcctgaaaatatcccccagcccatcagcaatacatctagagccaacctgaataagctgctgaccgattacaccgaaatgaagaaggcgatcctgcatgtgtactgggaagagttccagaaggaccctgtgggcctgatgagccgggtggcccagcctgccagcaagaagatcgatcagaacaagctgaaacctgagatggacgagaagggcaacctgaccaccgccggctttgcctgctctcagtgtggccagcccctgttcgtgtacaagctggagcaggtgtctgagaagggcaaggcttacaccaactacttcggacggtgcaatgtggccgagcacgaaaagctgatcctgctggcccagctgaagcccgagaaggatagcgacgaagccgtgacatatagcctgggaaagtttgggcagagggccctggatttctacagcattcatgtgaccaaggagtccacccaccccgtgaagcccctggcccagatcgccggaaacagatacgcctccggacctgtgggaaaggccctgagcgacgcatgtatgggcacaatcgcctccttcctgtctaagtaccaggacatcatcatcgaacaccagaaggtggtgaagggcaaccagaagagactggagagcctgcgggagctggccggcaaggaaaacctggaataccctagcgtgaccctgccacctcagcctcacaccaaggagggcgttgatgcctacaacgaagtgatcgcccgggtgcgaatgtgggtgaacctgaacctgtggcagaagctgaagctaagcagagatgatgccaagcctctgctgagactgaagggattcccttcctttcctctggtcgagagacaggccaacgaagtggactggtgggacatggtgtgtaacgtgaagaagctgatcaacgagaaaaaggaggatggcaaggtgttttggcagaatctggctggctacaagagacaggaagccctgagaccatacctgagcagcgaggaagatcggaagaagggaaagaaattcgctcggtaccagctgggcgacctgctgctgcacctggaaaagaagcacggcgaggactggggaaaggtgtacgacgaggcctgggagcggattgacaagaaagtggaaggcctgagcaagcacatcaagctggaagaggaacggagaagcgaggacgcccagagcaaggccgccctgaccgactggctgcgggctaaggccagcttcgtgatcgagggcctgaaggaggccgacaaggacgagttctgcagatgcgagctgaagctgcagaagtggtacggggacctgcggggaaagcccttcgccatcgaagccgagaacagcatcctggacatcagcggcttcagcaagcagtacaactgtgccttcatctggcagaaggacggcgtgaagaagctgaacctgtacctgatcatcaactacttcaagggcggcaagctgcggttcaagaagatcaaacctgaagccttcgaagccaacagattctacaccgtgatcaacaaaaagagcggcgagatcgtgcccatggaggtgaacttcaacttcgacgaccccaacctgatcatcctgcctctggcctttggcaagagacagggcagagaattcatctggaacgacctgctgtccctggaaaccggcagcctgaagctggccaacggaagagtgatcgagaagacactgtacaacagaagaacccggcaggatgagcctgccctgttcgtggccctgaccttcgagcggcgggaggtcctggactcctccaatatcaaaccaatgaacctgatcggcgtggcaagaggcgaaaacatccccgccgtgatcgccctgaccgaccccgagggctgcccactgagccggtttaaggatagcctgggaaacccaacccacatcctgagaatcggcgagagctataaggagaagcagcggaccatccaggccaagaaggaggtggagcagcggagagccggcggctacagccggaagtacgccagcaaagccaagaatctggcagacgatatggtgagaaacaccgctagagatctgctgtactacgccgtgacccaggatgccatgctgatcttcgccaacctgagccggggcttcggccggcagggcaagcggaccttcatggccgagagacagtacacacggatggaggactggctgaccgccaagctggcctacgagggcctgagcaagacctacctgtccaagacactggcccagtacacctccaagacatgcagcaactgtgggtttaccatcaccagcgccgactacgacagggtgctggagaagctgaagaagacagcaacaggctggatgaccacaattaacggcaaggagctgaaggtggagggccagattacctactacaacagatacaagagacagaacgtagtcaaggacctgtccgtcgagctggatagactgagcgaagaatctgtgaacaacgacatctcctcctggacaaagggcagaagcggagaagctctgagcctcctgaagaaaagattctcccatagacccgtgcaggagaagttcgtgtgcctgaactgcggcttcgagacacacgcagccgagcaagccgccctgaacatcgccagatcctggctgttcctgcggagccaggagtacaagaaataccagacaaacaagacaaccggcaacaccgataagagagccttcgtcgagacctggcagtccttttaccggaagaagcttaaggaggtgtggaaacctgccgtgcggtctggcggatctggcggaggctccaccagccccaagaaaaagagaaaagtctaagctgccttctgcggggcttgccttctggccatgcccttcttctctcccttgcacctgtacctcttggtctttgaataaagcctgagtaggaaggctagcaaaaaaaaaaaaaaaaaaaaaaaaaaaaaaaaaaaaaaaaaaaaaaaaaaaaaaaaaaaaaaaaaaaaaaaaaaaaaaaa

SEQ ID NO: 10127 - RNA, 8787 nt, synthetic construct
  source 1..8787: mol_type = other RNA
aggaaataagagagaaaagaagagtaagaagaaatataagagccaccatggcccctaagaagaagcgtaaagtgagccggatgaaccacgaccaggagttcgacccccctaaggtgtaccctcccgtccccgccgagaagagaaagcccatccgggtcctgagcctgttcgatggcatcgccaccggtctgctggtgctgaaggacctgggcatccaggtggataggtacattgcctccgaggtgtgcgaggactccatcaccgtgggaatggtgcgtcatcagggcaagatcatgtacgtgggcgacgtgcggagcgtgacacagaagcatatccaggagtggggccctttcgacctggtgatcggcggcagcccttgcaatgacctgagcatcgtgaacccagcccggaagggcctgtacgagggaaccggcagactgttcttcgagttttacagactgctgcacgacgcccggcctaaggaaggcgacgaccggcccttcttttggctgttcgagaatgtggtggccatgggagtcagcgacaagcgggatattagccggttcctggagagcaaccccgtgatgatcgatgccaaggaagtgagcgccgcccaccgggccagatacttctggggcaatctgcctggcatgaacagacccctggccagcaccgtgaacgacaagctggagctgcaggagtgcctggagcacggccggatcgccaagttcagcaaggtgagaaccatcaccacccgaagcaacagcatcaaacaaggcaaggaccagcactttcctgtgttcatgaacgagaaggaggacatcctgtggtgtaccgagatggagagagtgttcgggttcccagtccactacacagatgtcagcaacatgtctagactggccagacagagactgctgggaagaagctggtccgtccctgtgatcagacacctgttcgcccctctgaaggagtacttcgcctgcgtgagcagcggcaacagcaacgccaacagccggggccccagcttctctagcggcctggtgccactgtccctgagagggagccacatgggccccatggagatctacaaaaccgtgagcgcctggaagcggcagcctgtgcgcgtgctgagcctgtttcggaatatcgataaagtcctgaaaagcctgggattcctggagagcggctctggctccggcggtggcaccctgaagtacgtggaggatgtgacaaacgtggtcagacgggatgtggagaagtggggccccttcgatctggtgtacggcagcacccaacccctgggcagctcttgtgaccggtgccctggctggtacatgtttcagttccaccggatcctgcagtacgccctgccgagacaggagtcccagcggccattcttttggattttcatggacaacttgctgctgaccgaggatgaccaggaaactaccactcggttcctgcagaccgaagccgtgaccctgcaggacgtgagaggccgggactaccagaacgccatgcgggtgtggtccaacatccctggactgaaaagcaagcacgcacctctgacccctaaagaagaggagtacctgcaggcccaggtgcggagcagaagcaagctggacgcccctaaggtggatctgctggtgaagaattgcctcctgcccctgagagagtacttcaagtatttcagccagaatagtctgcccctgggaggcagcggcggcggcatgcccgccaacgaggacgccccccagcccggcgagcacggcagcgcctgcgaggtgagcgtgagcttcgaggacgtgaccgtggacttcagcagggaggagtggcagcagctggacagcacccagaggaggctgtaccaggacgtgatgctggagaactacagccacctgctgagcgtgggcttcgaggtgcccaagcccgaggtgatcttcaagctggagcagggcgagggcccctggaccggcggcccaagcagcggcgcccctcctcccagcggcggcaggcggcccaagcagcggcgcccctcctcccagcggcggcagcccagccggctccccaacctctaccgaggagggcacctctgagtccgccacccccgagagcggccctggcacctccaccgagcccagcgagggcagcgcacccggcagccctgccggcagccccacctccacagaggagggaaccagcaccgagcccagcgaaggcagcgccccaggcaccagcaccgagcctagtgagcaggagattaaacggatcaacaagatcagaagaagacttgtgaaagacagcaacaccaagaaggccggcaagacaggccccatgaaaaccctgctggttagagtgatgacacccgatctgagagagcggctggaaaacctgagaaagaagcctgaaaatatcccccagcccatcagcaatacatctagagccaacctgaataagctgctgaccgattacaccgaaatgaagaaggcgatcctgcatgtgtactgggaagagttccagaaggaccctgtgggcctgatgagccgggtggcccagcctgccagcaagaagatcgatcagaacaagctgaaacctgagatggacgagaagggcaacctgaccaccgccggctttgcctgctctcagtgtggccagcccctgttcgtgtacaagctggagcaggtgtctgagaagggcaaggcttacaccaactacttcggacggtgcaatgtggccgagcacgaaaagctgatcctgctggcccagctgaagcccgagaaggatagcgacgaagccgtgacatatagcctgggaaagtttgggcagagggccctggatttctacagcattcatgtgaccaaggagtccacccaccccgtgaagcccctggcccagatcgccggaaacagatacgcctccggacctgtgggaaaggccctgagcgacgcatgtatgggcacaatcgcctccttcctgtctaagtaccaggacatcatcatcgaacaccagaaggtggtgaagggcaaccagaagagactggagagcctgcgggagctggccggcaaggaaaacctggaataccctagcgtgaccctgccacctcagcctcacaccaaggagggcgttgatgcctacaacgaagtgatcgcccgggtgcgaatgtgggtgaacctgaacctgtggcagaagctgaagctaagcagagatgatgccaagcctctgctgagactgaagggattcccttcctttcctctggtcgagagacaggccaacgaagtggactggtgggacatggtgtgtaacgtgaagaagctgatcaacgagaaaaaggaggatggcaaggtgttttggcagaatctggctggctacaagagacaggaagccctgagaccatacctgagcagcgaggaagatcggaagaagggaaagaaattcgctcggtaccagctgggcgacctgctgctgcacctggaaaagaagcacggcgaggactggggaaaggtgtacgacgaggcctgggagcggattgacaagaaagtggaaggcctgagcaagcacatcaagctggaagaggaacggagaagcgaggacgcccagagcaaggccgccctgaccgactggctgcgggctaaggccagcttcgtgatcgagggcctgaaggaggccgacaaggacgagttctgcagatgcgagctgaagctgcagaagtggtacggggacctgcggggaaagcccttcgccatcgaagccgagaacagcatcctggacatcagcggcttcagcaagcagtacaactgtgccttcatctggcagaaggacggcgtgaagaagctgaacctgtacctgatcatcaactacttcaagggcggcaagctgcggttcaagaagatcaaacctgaagccttcgaagccaacagattctacaccgtgatcaacaaaaagagcggcgagatcgtgcccatggaggtgaacttcaacttcgacgaccccaacctgatcatcctgcctctggcctttggcaagagacagggcagagaattcatctggaacgacctgctgtccctggaaaccggcagcctgaagctggccaacggaagagtgatcgagaagacactgtacaacagaagaacccggcaggatgagcctgccctgttcgtggccctgaccttcgagcggcgggaggtcctggactcctccaatatcaaaccaatgaacctgatcggcgtggcaagaggcgaaaacatccccgccgtgatcgccctgaccgaccccgagggctgcccactgagccggtttaaggatagcctgggaaacccaacccacatcctgagaatcggcgagagctataaggagaagcagcggaccatccaggccaagaaggaggtggagcagcggagagccggcggctacagccggaagtacgccagcaaagccaagaatctggcagacgatatggtgagaaacaccgctagagatctgctgtactacgccgtgacccaggatgccatgctgatcttcgccaacctgagccggggcttcggccggcagggcaagcggaccttcatggccgagagacagtacacacggatggaggactggctgaccgccaagctggcctacgagggcctgagcaagacctacctgtccaagacactggcccagtacacctccaagacatgcagcaactgtgggtttaccatcaccagcgccgactacgacagggtgctggagaagctgaagaagacagcaacaggctggatgaccacaattaacggcaaggagctgaaggtggagggccagattacctactacaacagatacaagagacagaacgtagtcaaggacctgtccgtcgagctggatagactgagcgaagaatctgtgaacaacgacatctcctcctggacaaagggcagaagcggagaagctctgagcctcctgaagaaaagattctcccatagacccgtgcaggagaagttcgtgtgcctgaactgcggcttcgagacacacgcagccgagcaagccgccctgaacatcgccagatcctggctgttcctgcggagccaggagtacaagaaataccagacaaacaagacaaccggcaacaccgataagagagccttcgtcgagacctggcagtccttttaccggaagaagcttaaggaggtgtggaaacctgccgtgcggtctggcggatctggcggaggctccaccagccccaagaaaaagagaaaagtctaagctgccttctgcggggcttgccttctggccatgcccttcttctctcccttgcacctgtacctcttggtctttgaataaagcctgagtaggaaggctagcaaaaaaaaaaaaaaaaaaaaaaaaaaaaaaaaaaaaaaaaaaaaaaaaaaaaaaaaaaaaaaaaaaaaaaaaaaaaaaaagcccagccggctccccaacctctaccgaggagggcacctctgagtccgccacccccgagagcggccctggcacctccaccgagcccagcgagggcagcgcacccggcagccctgccggcagccccacctccacagaggagggaaccagcaccgagcccagcgaaggcagcgccccaggcaccagcaccgagcctagtgagcaggagattaaacggatcaacaagatcagaagaagacttgtgaaagacagcaacaccaagaaggccggcaagacaggccccatgaaaaccctgctggttagagtgatgacacccgatctgagagagcggctggaaaacctgagaaagaagcctgaaaatatcccccagcccatcagcaatacatctagagccaacctgaataagctgctgaccgattacaccgaaatgaagaaggcgatcctgcatgtgtactgggaagagttccagaaggaccctgtgggcctgatgagccgggtggcccagcctgccagcaagaagatcgatcagaacaagctgaaacctgagatggacgagaagggcaacctgaccaccgccggctttgcctgctctcagtgtggccagcccctgttcgtgtacaagctggagcaggtgtctgagaagggcaaggcttacaccaactacttcggacggtgcaatgtggccgagcacgaaaagctgatcctgctggcccagctgaagcccgagaaggatagcgacgaagccgtgacatatagcctgggaaagtttgggcagagggccctggatttctacagcattcatgtgaccaaggagtccacccaccccgtgaagcccctggcccagatcgccggaaacagatacgcctccggacctgtgggaaaggccctgagcgacgcatgtatgggcacaatcgcctccttcctgtctaagtaccaggacatcatcatcgaacaccagaaggtggtgaagggcaaccagaagagactggagagcctgcgggagctggccggcaaggaaaacctggaataccctagcgtgaccctgccacctcagcctcacaccaaggagggcgttgatgcctacaacgaagtgatcgcccgggtgcgaatgtgggtgaacctgaacctgtggcagaagctgaagctaagcagagatgatgccaagcctctgctgagactgaagggattcccttcctttcctctggtcgagagacaggccaacgaagtggactggtgggacatggtgtgtaacgtgaagaagctgatcaacgagaaaaaggaggatggcaaggtgttttggcagaatctggctggctacaagagacaggaagccctgagaccatacctgagcagcgaggaagatcggaagaagggaaagaaattcgctcggtaccagctgggcgacctgctgctgcacctggaaaagaagcacggcgaggactggggaaaggtgtacgacgaggcctgggagcggattgacaagaaagtggaaggcctgagcaagcacatcaagctggaagaggaacggagaagcgaggacgcccagagcaaggccgccctgaccgactggctgcgggctaaggccagcttcgtgatcgagggcctgaaggaggccgacaaggacgagttctgcagatgcgagctgaagctgcagaagtggtacggggacctgcggggaaagcccttcgccatcgaagccgagaacagcatcctggacatcagcggcttcagcaagcagtacaactgtgccttcatctggcagaaggacggcgtgaagaagctgaacctgtacctgatcatcaactacttcaagggcggcaagctgcggttcaagaagatcaaacctgaagccttcgaagccaacagattctacaccgtgatcaacaaaaagagcggcgagatcgtgcccatggaggtgaacttcaacttcgacgaccccaacctgatcatcctgcctctggcctttggcaagagacagggcagagaattcatctggaacgacctgctgtccctggaaaccggcagcctgaagctggccaacggaagagtgatcgagaagacactgtacaacagaagaacccggcaggatgagcctgccctgttcgtggccctgaccttcgagcggcgggaggtcctggactcctccaatatcaaaccaatgaacctgatcggcgtggcaagaggcgaaaacatccccgccgtgatcgccctgaccgaccccgagggctgcccactgagccggtttaaggatagcctgggaaacccaacccacatcctgagaatcggcgagagctataaggagaagcagcggaccatccaggccaagaaggaggtggagcagcggagagccggcggctacagccggaagtacgccagcaaagccaagaatctggcagacgatatggtgagaaacaccgctagagatctgctgtactacgccgtgacccaggatgccatgctgatcttcgccaacctgagccggggcttcggccggcagggcaagcggaccttcatggccgagagacagtacacacggatggaggactggctgaccgccaagctggcctacgagggcctgagcaagacctacctgtccaagacactggcccagtacacctccaagacatgcagcaactgtgggtttaccatcaccagcgccgactacgacagggtgctggagaagctgaagaagacagcaacaggctggatgaccacaattaacggcaaggagctgaaggtggagggccagattacctactacaacagatacaagagacagaacgtagtcaaggacctgtccgtcgagctggatagactgagcgaagaatctgtgaacaacgacatctcctcctggacaaagggcagaagcggagaagctctgagcctcctgaagaaaagattctcccatagacccgtgcaggagaagttcgtgtgcctgaactgcggcttcgagacacacgcagccgagcaagccgccctgaacatcgccagatcctggctgttcctgcggagccaggagtacaagaaataccagacaaacaagacaaccggcaacaccgataagagagccttcgtcgagacctggcagtccttttaccggaagaagcttaaggaggtgtggaaacctgccgtgcggtctggcggatctggcggaggctccaccagccccaagaaaaagagaaaagtctaagctgccttctgcggggcttgccttctggccatgcccttcttctctcccttgcacctgtacctcttggtctttgaataaagcctgagtaggaaggctagcaaaaaaaaaaaaaaaaaaaaaaaaaaaaaaaaaaaaaaaaaaaaaaaaaaaaaaaaaaaaaaaaaaaaaaaaaaaaaaaa

SEQ ID NO: 10128 - RNA, 8787 nt, synthetic construct
  source 1..8787: mol_type = other RNA
aggaaataagagagaaaagaagagtaagaagaaatataagagccaccatggcccctaagaagaagcgtaaagtgagccggatgaaccacgaccaggagttcgacccccctaaggtgtaccctcccgtccccgccgagaagagaaagcccatccgggtcctgagcctgttcgatggcatcgccaccggtctgctggtgctgaaggacctgggcatccaggtggataggtacattgcctccgaggtgtgcgaggactccatcaccgtgggaatggtgcgtcatcagggcaagatcatgtacgtgggcgacgtgcggagcgtgacacagaagcatatccaggagtggggccctttcgacctggtgatcggcggcagcccttgcaatgacctgagcatcgtgaacccagcccggaagggcctgtacgagggaaccggcagactgttcttcgagttttacagactgctgcacgacgcccggcctaaggaaggcgacgaccggcccttcttttggctgttcgagaatgtggtggccatgggagtcagcgacaagcgggatattagccggttcctggagagcaaccccgtgatgatcgatgccaaggaagtgagcgccgcccaccgggccagatacttctggggcaatctgcctggcatgaacagacccctggccagcaccgtgaacgacaagctggagctgcaggagtgcctggagcacggccggatcgccaagttcagcaaggtgagaaccatcaccacccgaagcaacagcatcaaacaaggcaaggaccagcactttcctgtgttcatgaacgagaaggaggacatcctgtggtgtaccgagatggagagagtgttcgggttcccagtccactacacagatgtcagcaacatgtctagactggccagacagagactgctgggaagaagctggtccgtccctgtgatcagacacctgttcgcccctctgaaggagtacttcgcctgcgtgagcagcggcaacagcaacgccaacagccggggccccagcttctctagcggcctggtgccactgtccctgagagggagccacatgggccccatggagatctacaaaaccgtgagcgcctggaagcggcagcctgtgcgcgtgctgagcctgtttcggaatatcgataaagtcctgaaaagcctgggattcctggagagcggctctggctccggcggtggcaccctgaagtacgtggaggatgtgacaaacgtggtcagacgggatgtggagaagtggggccccttcgatctggtgtacggcagcacccaacccctgggcagctcttgtgaccggtgccctggctggtacatgtttcagttccaccggatcctgcagtacgccctgccgagacaggagtcccagcggccattcttttggattttcatggacaacttgctgctgaccgaggatgaccaggaaactaccactcggttcctgcagaccgaagccgtgaccctgcaggacgtgagaggccgggactaccagaacgccatgcgggtgtggtccaacatccctggactgaaaagcaagcacgcacctctgacccctaaagaagaggagtacctgcaggcccaggtgcggagcagaagcaagctggacgcccctaaggtggatctgctggtgaagaattgcctcctgcccctgagagagtacttcaagtatttcagccagaatagtctgcccctgggaggcagcggcggcggcgcccaggaggccgtgaccttcaaggacgtggccgtggacttcaccagggaggagtggaggctgctgagccccccccagaaggagctgtacaaggaggtgatgctggagaacgcccagaacctgctgaccgtgggcctgcccgccccccccgagaacgtgatcagcgccctgggcgccgagggcagccccgtggacgccaggggcaggaggcccgagggcgcctgctgccccggcgagatcatcggcggcccaagcagcggcgcccctcctcccagcggcggcaggcggcccaagcagcggcgcccctcctcccagcggcggcagcccagccggctccccaacctctaccgaggagggcacctctgagtccgccacccccgagagcggccctggcacctccaccgagcccagcgagggcagcgcacccggcagccctgccggcagccccacctccacagaggagggaaccagcaccgagcccagcgaaggcagcgccccaggcaccagcaccgagcctagtgagcaggagattaaacggatcaacaagatcagaagaagacttgtgaaagacagcaacaccaagaaggccggcaagacaggccccatgaaaaccctgctggttagagtgatgacacccgatctgagagagcggctggaaaacctgagaaagaagcctgaaaatatcccccagcccatcagcaatacatctagagccaacctgaataagctgctgaccgattacaccgaaatgaagaaggcgatcctgcatgtgtactgggaagagttccagaaggaccctgtgggcctgatgagccgggtggcccagcctgccagcaagaagatcgatcagaacaagctgaaacctgagatggacgagaagggcaacctgaccaccgccggctttgcctgctctcagtgtggccagcccctgttcgtgtacaagctggagcaggtgtctgagaagggcaaggcttacaccaactacttcggacggtgcaatgtggccgagcacgaaaagctgatcctgctggcccagctgaagcccgagaaggatagcgacgaagccgtgacatatagcctgggaaagtttgggcagagggccctggatttctacagcattcatgtgaccaaggagtccacccaccccgtgaagcccctggcccagatcgccggaaacagatacgcctccggacctgtgggaaaggccctgagcgacgcatgtatgggcacaatcgcctccttcctgtctaagtaccaggacatcatcatcgaacaccagaaggtggtgaagggcaaccagaagagactggagagcctgcgggagctggccggcaaggaaaacctggaataccctagcgtgaccctgccacctcagcctcacaccaaggagggcgttgatgcctacaacgaagtgatcgcccgggtgcgaatgtgggtgaacctgaacctgtggcagaagctgaagctaagcagagatgatgccaagcctctgctgagactgaagggattcccttcctttcctctggtcgagagacaggccaacgaagtggactggtgggacatggtgtgtaacgtgaagaagctgatcaacgagaaaaaggaggatggcaaggtgttttggcagaatctggctggctacaagagacaggaagccctgagaccatacctgagcagcgaggaagatcggaagaagggaaagaaattcgctcggtaccagctgggcgacctgctgctgcacctggaaaagaagcacggcgaggactggggaaaggtgtacgacgaggcctgggagcggattgacaagaaagtggaaggcctgagcaagcacatcaagctggaagaggaacggagaagcgaggacgcccagagcaaggccgccctgaccgactggctgcgggctaaggccagcttcgtgatcgagggcctgaaggaggccgacaaggacgagttctgcagatgcgagctgaagctgcagaagtggtacggggacctgcggggaaagcccttcgccatcgaagccgagaacagcatcctggacatcagcggcttcagcaagcagtacaactgtgccttcatctggcagaaggacggcgtgaagaagctgaacctgtacctgatcatcaactacttcaagggcggcaagctgcggttcaagaagatcaaacctgaagccttcgaagccaacagattctacaccgtgatcaacaaaaagagcggcgagatcgtgcccatggaggtgaacttcaacttcgacgaccccaacctgatcatcctgcctctggcctttggcaagagacagggcagagaattcatctggaacgacctgctgtccctggaaaccggcagcctgaagctggccaacggaagagtgatcgagaagacactgtacaacagaagaacccggcaggatgagcctgccctgttcgtggccctgaccttcgagcggcgggaggtcctggactcctccaatatcaaaccaatgaacctgatcggcgtggcaagaggcgaaaacatccccgccgtgatcgccctgaccgaccccgagggctgcccactgagccggtttaaggatagcctgggaaacccaacccacatcctgagaatcggcgagagctataaggagaagcagcggaccatccaggccaagaaggaggtggagcagcggagagccggcggctacagccggaagtacgccagcaaagccaagaatctggcagacgatatggtgagaaacaccgctagagatctgctgtactacgccgtgacccaggatgccatgctgatcttcgccaacctgagccggggcttcggccggcagggcaagcggaccttcatggccgagagacagtacacacggatggaggactggctgaccgccaagctggcctacgagggcctgagcaagacctacctgtccaagacactggcccagtacacctccaagacatgcagcaactgtgggtttaccatcaccagcgccgactacgacagggtgctggagaagctgaagaagacagcaacaggctggatgaccacaattaacggcaaggagctgaaggtggagggccagattacctactacaacagatacaagagacagaacgtagtcaaggacctgtccgtcgagctggatagactgagcgaagaatctgtgaacaacgacatctcctcctggacaaagggcagaagcggagaagctctgagcctcctgaagaaaagattctcccatagacccgtgcaggagaagttcgtgtgcctgaactgcggcttcgagacacacgcagccgagcaagccgccctgaacatcgccagatcctggctgttcctgcggagccaggagtacaagaaataccagacaaacaagacaaccggcaacaccgataagagagccttcgtcgagacctggcagtccttttaccggaagaagcttaaggaggtgtggaaacctgccgtgcggtctggcggatctggcggaggctccaccagccccaagaaaaagagaaaagtctaagctgccttctgcggggcttgccttctggccatgcccttcttctctcccttgcacctgtacctcttggtctttgaataaagcctgagtaggaaggctagcaaaaaaaaaaaaaaaaaaaaaaaaaaaaaaaaaaaaaaaaaaaaaaaaaaaaaaaaaaaaaaaaaaaaaaaaaaaaaaaagcccagccggctccccaacctctaccgaggagggcacctctgagtccgccacccccgagagcggccctggcacctccaccgagcccagcgagggcagcgcacccggcagccctgccggcagccccacctccacagaggagggaaccagcaccgagcccagcgaaggcagcgccccaggcaccagcaccgagcctagtgagcaggagattaaacggatcaacaagatcagaagaagacttgtgaaagacagcaacaccaagaaggccggcaagacaggccccatgaaaaccctgctggttagagtgatgacacccgatctgagagagcggctggaaaacctgagaaagaagcctgaaaatatcccccagcccatcagcaatacatctagagccaacctgaataagctgctgaccgattacaccgaaatgaagaaggcgatcctgcatgtgtactgggaagagttccagaaggaccctgtgggcctgatgagccgggtggcccagcctgccagcaagaagatcgatcagaacaagctgaaacctgagatggacgagaagggcaacctgaccaccgccggctttgcctgctctcagtgtggccagcccctgttcgtgtacaagctggagcaggtgtctgagaagggcaaggcttacaccaactacttcggacggtgcaatgtggccgagcacgaaaagctgatcctgctggcccagctgaagcccgagaaggatagcgacgaagccgtgacatatagcctgggaaagtttgggcagagggccctggatttctacagcattcatgtgaccaaggagtccacccaccccgtgaagcccctggcccagatcgccggaaacagatacgcctccggacctgtgggaaaggccctgagcgacgcatgtatgggcacaatcgcctccttcctgtctaagtaccaggacatcatcatcgaacaccagaaggtggtgaagggcaaccagaagagactggagagcctgcgggagctggccggcaaggaaaacctggaataccctagcgtgaccctgccacctcagcctcacaccaaggagggcgttgatgcctacaacgaagtgatcgcccgggtgcgaatgtgggtgaacctgaacctgtggcagaagctgaagctaagcagagatgatgccaagcctctgctgagactgaagggattcccttcctttcctctggtcgagagacaggccaacgaagtggactggtgggacatggtgtgtaacgtgaagaagctgatcaacgagaaaaaggaggatggcaaggtgttttggcagaatctggctggctacaagagacaggaagccctgagaccatacctgagcagcgaggaagatcggaagaagggaaagaaattcgctcggtaccagctgggcgacctgctgctgcacctggaaaagaagcacggcgaggactggggaaaggtgtacgacgaggcctgggagcggattgacaagaaagtggaaggcctgagcaagcacatcaagctggaagaggaacggagaagcgaggacgcccagagcaaggccgccctgaccgactggctgcgggctaaggccagcttcgtgatcgagggcctgaaggaggccgacaaggacgagttctgcagatgcgagctgaagctgcagaagtggtacggggacctgcggggaaagcccttcgccatcgaagccgagaacagcatcctggacatcagcggcttcagcaagcagtacaactgtgccttcatctggcagaaggacggcgtgaagaagctgaacctgtacctgatcatcaactacttcaagggcggcaagctgcggttcaagaagatcaaacctgaagccttcgaagccaacagattctacaccgtgatcaacaaaaagagcggcgagatcgtgcccatggaggtgaacttcaacttcgacgaccccaacctgatcatcctgcctctggcctttggcaagagacagggcagagaattcatctggaacgacctgctgtccctggaaaccggcagcctgaagctggccaacggaagagtgatcgagaagacactgtacaacagaagaacccggcaggatgagcctgccctgttcgtggccctgaccttcgagcggcgggaggtcctggactcctccaatatcaaaccaatgaacctgatcggcgtggcaagaggcgaaaacatccccgccgtgatcgccctgaccgaccccgagggctgcccactgagccggtttaaggatagcctgggaaacccaacccacatcctgagaatcggcgagagctataaggagaagcagcggaccatccaggccaagaaggaggtggagcagcggagagccggcggctacagccggaagtacgccagcaaagccaagaatctggcagacgatatggtgagaaacaccgctagagatctgctgtactacgccgtgacccaggatgccatgctgatcttcgccaacctgagccggggcttcggccggcagggcaagcggaccttcatggccgagagacagtacacacggatggaggactggctgaccgccaagctggcctacgagggcctgagcaagacctacctgtccaagacactggcccagtacacctccaagacatgcagcaactgtgggtttaccatcaccagcgccgactacgacagggtgctggagaagctgaagaagacagcaacaggctggatgaccacaattaacggcaaggagctgaaggtggagggccagattacctactacaacagatacaagagacagaacgtagtcaaggacctgtccgtcgagctggatagactgagcgaagaatctgtgaacaacgacatctcctcctggacaaagggcagaagcggagaagctctgagcctcctgaagaaaagattctcccatagacccgtgcaggagaagttcgtgtgcctgaactgcggcttcgagacacacgcagccgagcaagccgccctgaacatcgccagatcctggctgttcctgcggagccaggagtacaagaaataccagacaaacaagacaaccggcaacaccgataagagagccttcgtcgagacctggcagtccttttaccggaagaagcttaaggaggtgtggaaacctgccgtgcggtctggcggatctggcggaggctccaccagccccaagaaaaagagaaaagtctaagctgccttctgcggggcttgccttctggccatgcccttcttctctcccttgcacctgtacctcttggtctttgaataaagcctgagtaggaaggctagcaaaaaaaaaaaaaaaaaaaaaaaaaaaaaaaaaaaaaaaaaaaaaaaaaaaaaaaaaaaaaaaaaaaaaaaaaaaaaaaa

SEQ ID NO: 10129 - RNA, 8787 nt, synthetic construct
  source 1..8787: mol_type = other RNA
aggaaataagagagaaaagaagagtaagaagaaatataagagccaccatggcccctaagaagaagcgtaaagtgagccggatgaaccacgaccaggagttcgacccccctaaggtgtaccctcccgtccccgccgagaagagaaagcccatccgggtcctgagcctgttcgatggcatcgccaccggtctgctggtgctgaaggacctgggcatccaggtggataggtacattgcctccgaggtgtgcgaggactccatcaccgtgggaatggtgcgtcatcagggcaagatcatgtacgtgggcgacgtgcggagcgtgacacagaagcatatccaggagtggggccctttcgacctggtgatcggcggcagcccttgcaatgacctgagcatcgtgaacccagcccggaagggcctgtacgagggaaccggcagactgttcttcgagttttacagactgctgcacgacgcccggcctaaggaaggcgacgaccggcccttcttttggctgttcgagaatgtggtggccatgggagtcagcgacaagcgggatattagccggttcctggagagcaaccccgtgatgatcgatgccaaggaagtgagcgccgcccaccgggccagatacttctggggcaatctgcctggcatgaacagacccctggccagcaccgtgaacgacaagctggagctgcaggagtgcctggagcacggccggatcgccaagttcagcaaggtgagaaccatcaccacccgaagcaacagcatcaaacaaggcaaggaccagcactttcctgtgttcatgaacgagaaggaggacatcctgtggtgtaccgagatggagagagtgttcgggttcccagtccactacacagatgtcagcaacatgtctagactggccagacagagactgctgggaagaagctggtccgtccctgtgatcagacacctgttcgcccctctgaaggagtacttcgcctgcgtgagcagcggcaacagcaacgccaacagccggggccccagcttctctagcggcctggtgccactgtccctgagagggagccacatgggccccatggagatctacaaaaccgtgagcgcctggaagcggcagcctgtgcgcgtgctgagcctgtttcggaatatcgataaagtcctgaaaagcctgggattcctggagagcggctctggctccggcggtggcaccctgaagtacgtggaggatgtgacaaacgtggtcagacgggatgtggagaagtggggccccttcgatctggtgtacggcagcacccaacccctgggcagctcttgtgaccggtgccctggctggtacatgtttcagttccaccggatcctgcagtacgccctgccgagacaggagtcccagcggccattcttttggattttcatggacaacttgctgctgaccgaggatgaccaggaaactaccactcggttcctgcagaccgaagccgtgaccctgcaggacgtgagaggccgggactaccagaacgccatgcgggtgtggtccaacatccctggactgaaaagcaagcacgcacctctgacccctaaagaagaggagtacctgcaggcccaggtgcggagcagaagcaagctggacgcccctaaggtggatctgctggtgaagaattgcctcctgcccctgagagagtacttcaagtatttcagccagaatagtctgcccctgggaggcagcggcggcggcttcaaggagctggtggtgttcagggacgtggccgtggagttctgcagggaggagtgggagtgcctggaccccaggcagaggagcctgtacagggacgtgatgctggagacctacggcaacttcgtgagcctgggcctggccatcagcaagcccagcgtgatcagcctgctggagcagggcaaggagccctggatggtggagcaggccggctggtaccccgacctgctgagcgtgaacgagaccggcggcccaagcagcggcgcccctcctcccagcggcggcaggcggcccaagcagcggcgcccctcctcccagcggcggcagcccagccggctccccaacctctaccgaggagggcacctctgagtccgccacccccgagagcggccctggcacctccaccgagcccagcgagggcagcgcacccggcagccctgccggcagccccacctccacagaggagggaaccagcaccgagcccagcgaaggcagcgccccaggcaccagcaccgagcctagtgagcaggagattaaacggatcaacaagatcagaagaagacttgtgaaagacagcaacaccaagaaggccggcaagacaggccccatgaaaaccctgctggttagagtgatgacacccgatctgagagagcggctggaaaacctgagaaagaagcctgaaaatatcccccagcccatcagcaatacatctagagccaacctgaataagctgctgaccgattacaccgaaatgaagaaggcgatcctgcatgtgtactgggaagagttccagaaggaccctgtgggcctgatgagccgggtggcccagcctgccagcaagaagatcgatcagaacaagctgaaacctgagatggacgagaagggcaacctgaccaccgccggctttgcctgctctcagtgtggccagcccctgttcgtgtacaagctggagcaggtgtctgagaagggcaaggcttacaccaactacttcggacggtgcaatgtggccgagcacgaaaagctgatcctgctggcccagctgaagcccgagaaggatagcgacgaagccgtgacatatagcctgggaaagtttgggcagagggccctggatttctacagcattcatgtgaccaaggagtccacccaccccgtgaagcccctggcccagatcgccggaaacagatacgcctccggacctgtgggaaaggccctgagcgacgcatgtatgggcacaatcgcctccttcctgtctaagtaccaggacatcatcatcgaacaccagaaggtggtgaagggcaaccagaagagactggagagcctgcgggagctggccggcaaggaaaacctggaataccctagcgtgaccctgccacctcagcctcacaccaaggagggcgttgatgcctacaacgaagtgatcgcccgggtgcgaatgtgggtgaacctgaacctgtggcagaagctgaagctaagcagagatgatgccaagcctctgctgagactgaagggattcccttcctttcctctggtcgagagacaggccaacgaagtggactggtgggacatggtgtgtaacgtgaagaagctgatcaacgagaaaaaggaggatggcaaggtgttttggcagaatctggctggctacaagagacaggaagccctgagaccatacctgagcagcgaggaagatcggaagaagggaaagaaattcgctcggtaccagctgggcgacctgctgctgcacctggaaaagaagcacggcgaggactggggaaaggtgtacgacgaggcctgggagcggattgacaagaaagtggaaggcctgagcaagcacatcaagctggaagaggaacggagaagcgaggacgcccagagcaaggccgccctgaccgactggctgcgggctaaggccagcttcgtgatcgagggcctgaaggaggccgacaaggacgagttctgcagatgcgagctgaagctgcagaagtggtacggggacctgcggggaaagcccttcgccatcgaagccgagaacagcatcctggacatcagcggcttcagcaagcagtacaactgtgccttcatctggcagaaggacggcgtgaagaagctgaacctgtacctgatcatcaactacttcaagggcggcaagctgcggttcaagaagatcaaacctgaagccttcgaagccaacagattctacaccgtgatcaacaaaaagagcggcgagatcgtgcccatggaggtgaacttcaacttcgacgaccccaacctgatcatcctgcctctggcctttggcaagagacagggcagagaattcatctggaacgacctgctgtccctggaaaccggcagcctgaagctggccaacggaagagtgatcgagaagacactgtacaacagaagaacccggcaggatgagcctgccctgttcgtggccctgaccttcgagcggcgggaggtcctggactcctccaatatcaaaccaatgaacctgatcggcgtggcaagaggcgaaaacatccccgccgtgatcgccctgaccgaccccgagggctgcccactgagccggtttaaggatagcctgggaaacccaacccacatcctgagaatcggcgagagctataaggagaagcagcggaccatccaggccaagaaggaggtggagcagcggagagccggcggctacagccggaagtacgccagcaaagccaagaatctggcagacgatatggtgagaaacaccgctagagatctgctgtactacgccgtgacccaggatgccatgctgatcttcgccaacctgagccggggcttcggccggcagggcaagcggaccttcatggccgagagacagtacacacggatggaggactggctgaccgccaagctggcctacgagggcctgagcaagacctacctgtccaagacactggcccagtacacctccaagacatgcagcaactgtgggtttaccatcaccagcgccgactacgacagggtgctggagaagctgaagaagacagcaacaggctggatgaccacaattaacggcaaggagctgaaggtggagggccagattacctactacaacagatacaagagacagaacgtagtcaaggacctgtccgtcgagctggatagactgagcgaagaatctgtgaacaacgacatctcctcctggacaaagggcagaagcggagaagctctgagcctcctgaagaaaagattctcccatagacccgtgcaggagaagttcgtgtgcctgaactgcggcttcgagacacacgcagccgagcaagccgccctgaacatcgccagatcctggctgttcctgcggagccaggagtacaagaaataccagacaaacaagacaaccggcaacaccgataagagagccttcgtcgagacctggcagtccttttaccggaagaagcttaaggaggtgtggaaacctgccgtgcggtctggcggatctggcggaggctccaccagccccaagaaaaagagaaaagtctaagctgccttctgcggggcttgccttctggccatgcccttcttctctcccttgcacctgtacctcttggtctttgaataaagcctgagtaggaaggctagcaaaaaaaaaaaaaaaaaaaaaaaaaaaaaaaaaaaaaaaaaaaaaaaaaaaaaaaaaaaaaaaaaaaaaaaaaaaaaaaagcccagccggctccccaacctctaccgaggagggcacctctgagtccgccacccccgagagcggccctggcacctccaccgagcccagcgagggcagcgcacccggcagccctgccggcagccccacctccacagaggagggaaccagcaccgagcccagcgaaggcagcgccccaggcaccagcaccgagcctagtgagcaggagattaaacggatcaacaagatcagaagaagacttgtgaaagacagcaacaccaagaaggccggcaagacaggccccatgaaaaccctgctggttagagtgatgacacccgatctgagagagcggctggaaaacctgagaaagaagcctgaaaatatcccccagcccatcagcaatacatctagagccaacctgaataagctgctgaccgattacaccgaaatgaagaaggcgatcctgcatgtgtactgggaagagttccagaaggaccctgtgggcctgatgagccgggtggcccagcctgccagcaagaagatcgatcagaacaagctgaaacctgagatggacgagaagggcaacctgaccaccgccggctttgcctgctctcagtgtggccagcccctgttcgtgtacaagctggagcaggtgtctgagaagggcaaggcttacaccaactacttcggacggtgcaatgtggccgagcacgaaaagctgatcctgctggcccagctgaagcccgagaaggatagcgacgaagccgtgacatatagcctgggaaagtttgggcagagggccctggatttctacagcattcatgtgaccaaggagtccacccaccccgtgaagcccctggcccagatcgccggaaacagatacgcctccggacctgtgggaaaggccctgagcgacgcatgtatgggcacaatcgcctccttcctgtctaagtaccaggacatcatcatcgaacaccagaaggtggtgaagggcaaccagaagagactggagagcctgcgggagctggccggcaaggaaaacctggaataccctagcgtgaccctgccacctcagcctcacaccaaggagggcgttgatgcctacaacgaagtgatcgcccgggtgcgaatgtgggtgaacctgaacctgtggcagaagctgaagctaagcagagatgatgccaagcctctgctgagactgaagggattcccttcctttcctctggtcgagagacaggccaacgaagtggactggtgggacatggtgtgtaacgtgaagaagctgatcaacgagaaaaaggaggatggcaaggtgttttggcagaatctggctggctacaagagacaggaagccctgagaccatacctgagcagcgaggaagatcggaagaagggaaagaaattcgctcggtaccagctgggcgacctgctgctgcacctggaaaagaagcacggcgaggactggggaaaggtgtacgacgaggcctgggagcggattgacaagaaagtggaaggcctgagcaagcacatcaagctggaagaggaacggagaagcgaggacgcccagagcaaggccgccctgaccgactggctgcgggctaaggccagcttcgtgatcgagggcctgaaggaggccgacaaggacgagttctgcagatgcgagctgaagctgcagaagtggtacggggacctgcggggaaagcccttcgccatcgaagccgagaacagcatcctggacatcagcggcttcagcaagcagtacaactgtgccttcatctggcagaaggacggcgtgaagaagctgaacctgtacctgatcatcaactacttcaagggcggcaagctgcggttcaagaagatcaaacctgaagccttcgaagccaacagattctacaccgtgatcaacaaaaagagcggcgagatcgtgcccatggaggtgaacttcaacttcgacgaccccaacctgatcatcctgcctctggcctttggcaagagacagggcagagaattcatctggaacgacctgctgtccctggaaaccggcagcctgaagctggccaacggaagagtgatcgagaagacactgtacaacagaagaacccggcaggatgagcctgccctgttcgtggccctgaccttcgagcggcgggaggtcctggactcctccaatatcaaaccaatgaacctgatcggcgtggcaagaggcgaaaacatccccgccgtgatcgccctgaccgaccccgagggctgcccactgagccggtttaaggatagcctgggaaacccaacccacatcctgagaatcggcgagagctataaggagaagcagcggaccatccaggccaagaaggaggtggagcagcggagagccggcggctacagccggaagtacgccagcaaagccaagaatctggcagacgatatggtgagaaacaccgctagagatctgctgtactacgccgtgacccaggatgccatgctgatcttcgccaacctgagccggggcttcggccggcagggcaagcggaccttcatggccgagagacagtacacacggatggaggactggctgaccgccaagctggcctacgagggcctgagcaagacctacctgtccaagacactggcccagtacacctccaagacatgcagcaactgtgggtttaccatcaccagcgccgactacgacagggtgctggagaagctgaagaagacagcaacaggctggatgaccacaattaacggcaaggagctgaaggtggagggccagattacctactacaacagatacaagagacagaacgtagtcaaggacctgtccgtcgagctggatagactgagcgaagaatctgtgaacaacgacatctcctcctggacaaagggcagaagcggagaagctctgagcctcctgaagaaaagattctcccatagacccgtgcaggagaagttcgtgtgcctgaactgcggcttcgagacacacgcagccgagcaagccgccctgaacatcgccagatcctggctgttcctgcggagccaggagtacaagaaataccagacaaacaagacaaccggcaacaccgataagagagccttcgtcgagacctggcagtccttttaccggaagaagcttaaggaggtgtggaaacctgccgtgcggtctggcggatctggcggaggctccaccagccccaagaaaaagagaaaagtctaagctgccttctgcggggcttgccttctggccatgcccttcttctctcccttgcacctgtacctcttggtctttgaataaagcctgagtaggaaggctagcaaaaaaaaaaaaaaaaaaaaaaaaaaaaaaaaaaaaaaaaaaaaaaaaaaaaaaaaaaaaaaaaaaaaaaaaaaaaaaaa

SEQ ID NO: 10130 - RNA, 8787 nt, synthetic construct
  source 1..8787: mol_type = other RNA
aggaaataagagagaaaagaagagtaagaagaaatataagagccaccatggcccctaagaagaagcgtaaagtgagccggatgaaccacgaccaggagttcgacccccctaaggtgtaccctcccgtccccgccgagaagagaaagcccatccgggtcctgagcctgttcgatggcatcgccaccggtctgctggtgctgaaggacctgggcatccaggtggataggtacattgcctccgaggtgtgcgaggactccatcaccgtgggaatggtgcgtcatcagggcaagatcatgtacgtgggcgacgtgcggagcgtgacacagaagcatatccaggagtggggccctttcgacctggtgatcggcggcagcccttgcaatgacctgagcatcgtgaacccagcccggaagggcctgtacgagggaaccggcagactgttcttcgagttttacagactgctgcacgacgcccggcctaaggaaggcgacgaccggcccttcttttggctgttcgagaatgtggtggccatgggagtcagcgacaagcgggatattagccggttcctggagagcaaccccgtgatgatcgatgccaaggaagtgagcgccgcccaccgggccagatacttctggggcaatctgcctggcatgaacagacccctggccagcaccgtgaacgacaagctggagctgcaggagtgcctggagcacggccggatcgccaagttcagcaaggtgagaaccatcaccacccgaagcaacagcatcaaacaaggcaaggaccagcactttcctgtgttcatgaacgagaaggaggacatcctgtggtgtaccgagatggagagagtgttcgggttcccagtccactacacagatgtcagcaacatgtctagactggccagacagagactgctgggaagaagctggtccgtccctgtgatcagacacctgttcgcccctctgaaggagtacttcgcctgcgtgagcagcggcaacagcaacgccaacagccggggccccagcttctctagcggcctggtgccactgtccctgagagggagccacatgggccccatggagatctacaaaaccgtgagcgcctggaagcggcagcctgtgcgcgtgctgagcctgtttcggaatatcgataaagtcctgaaaagcctgggattcctggagagcggctctggctccggcggtggcaccctgaagtacgtggaggatgtgacaaacgtggtcagacgggatgtggagaagtggggccccttcgatctggtgtacggcagcacccaacccctgggcagctcttgtgaccggtgccctggctggtacatgtttcagttccaccggatcctgcagtacgccctgccgagacaggagtcccagcggccattcttttggattttcatggacaacttgctgctgaccgaggatgaccaggaaactaccactcggttcctgcagaccgaagccgtgaccctgcaggacgtgagaggccgggactaccagaacgccatgcgggtgtggtccaacatccctggactgaaaagcaagcacgcacctctgacccctaaagaagaggagtacctgcaggcccaggtgcggagcagaagcaagctggacgcccctaaggtggatctgctggtgaagaattgcctcctgcccctgagagagtacttcaagtatttcagccagaatagtctgcccctgggaggcagcggcggcggcgccgagaccagcagcagcggcctgctggaggagcagaagatgatgaagagccagggcctggtgagcttcaaggacgtggccgtggacttcacccaggaggagtggcagcagctggaccccagccagaggaccctgtacagggacgtgatgctggagaactacagccacctggtgagcatgggctaccccgtgagcaagcccgacgtgatcagcaagctggagcagggcgaggagccctggatcggcggcccaagcagcggcgcccctcctcccagcggcggcaggcggcccaagcagcggcgcccctcctcccagcggcggcagcccagccggctccccaacctctaccgaggagggcacctctgagtccgccacccccgagagcggccctggcacctccaccgagcccagcgagggcagcgcacccggcagccctgccggcagccccacctccacagaggagggaaccagcaccgagcccagcgaaggcagcgccccaggcaccagcaccgagcctagtgagcaggagattaaacggatcaacaagatcagaagaagacttgtgaaagacagcaacaccaagaaggccggcaagacaggccccatgaaaaccctgctggttagagtgatgacacccgatctgagagagcggctggaaaacctgagaaagaagcctgaaaatatcccccagcccatcagcaatacatctagagccaacctgaataagctgctgaccgattacaccgaaatgaagaaggcgatcctgcatgtgtactgggaagagttccagaaggaccctgtgggcctgatgagccgggtggcccagcctgccagcaagaagatcgatcagaacaagctgaaacctgagatggacgagaagggcaacctgaccaccgccggctttgcctgctctcagtgtggccagcccctgttcgtgtacaagctggagcaggtgtctgagaagggcaaggcttacaccaactacttcggacggtgcaatgtggccgagcacgaaaagctgatcctgctggcccagctgaagcccgagaaggatagcgacgaagccgtgacatatagcctgggaaagtttgggcagagggccctggatttctacagcattcatgtgaccaaggagtccacccaccccgtgaagcccctggcccagatcgccggaaacagatacgcctccggacctgtgggaaaggccctgagcgacgcatgtatgggcacaatcgcctccttcctgtctaagtaccaggacatcatcatcgaacaccagaaggtggtgaagggcaaccagaagagactggagagcctgcgggagctggccggcaaggaaaacctggaataccctagcgtgaccctgccacctcagcctcacaccaaggagggcgttgatgcctacaacgaagtgatcgcccgggtgcgaatgtgggtgaacctgaacctgtggcagaagctgaagctaagcagagatgatgccaagcctctgctgagactgaagggattcccttcctttcctctggtcgagagacaggccaacgaagtggactggtgggacatggtgtgtaacgtgaagaagctgatcaacgagaaaaaggaggatggcaaggtgttttggcagaatctggctggctacaagagacaggaagccctgagaccatacctgagcagcgaggaagatcggaagaagggaaagaaattcgctcggtaccagctgggcgacctgctgctgcacctggaaaagaagcacggcgaggactggggaaaggtgtacgacgaggcctgggagcggattgacaagaaagtggaaggcctgagcaagcacatcaagctggaagaggaacggagaagcgaggacgcccagagcaaggccgccctgaccgactggctgcgggctaaggccagcttcgtgatcgagggcctgaaggaggccgacaaggacgagttctgcagatgcgagctgaagctgcagaagtggtacggggacctgcggggaaagcccttcgccatcgaagccgagaacagcatcctggacatcagcggcttcagcaagcagtacaactgtgccttcatctggcagaaggacggcgtgaagaagctgaacctgtacctgatcatcaactacttcaagggcggcaagctgcggttcaagaagatcaaacctgaagccttcgaagccaacagattctacaccgtgatcaacaaaaagagcggcgagatcgtgcccatggaggtgaacttcaacttcgacgaccccaacctgatcatcctgcctctggcctttggcaagagacagggcagagaattcatctggaacgacctgctgtccctggaaaccggcagcctgaagctggccaacggaagagtgatcgagaagacactgtacaacagaagaacccggcaggatgagcctgccctgttcgtggccctgaccttcgagcggcgggaggtcctggactcctccaatatcaaaccaatgaacctgatcggcgtggcaagaggcgaaaacatccccgccgtgatcgccctgaccgaccccgagggctgcccactgagccggtttaaggatagcctgggaaacccaacccacatcctgagaatcggcgagagctataaggagaagcagcggaccatccaggccaagaaggaggtggagcagcggagagccggcggctacagccggaagtacgccagcaaagccaagaatctggcagacgatatggtgagaaacaccgctagagatctgctgtactacgccgtgacccaggatgccatgctgatcttcgccaacctgagccggggcttcggccggcagggcaagcggaccttcatggccgagagacagtacacacggatggaggactggctgaccgccaagctggcctacgagggcctgagcaagacctacctgtccaagacactggcccagtacacctccaagacatgcagcaactgtgggtttaccatcaccagcgccgactacgacagggtgctggagaagctgaagaagacagcaacaggctggatgaccacaattaacggcaaggagctgaaggtggagggccagattacctactacaacagatacaagagacagaacgtagtcaaggacctgtccgtcgagctggatagactgagcgaagaatctgtgaacaacgacatctcctcctggacaaagggcagaagcggagaagctctgagcctcctgaagaaaagattctcccatagacccgtgcaggagaagttcgtgtgcctgaactgcggcttcgagacacacgcagccgagcaagccgccctgaacatcgccagatcctggctgttcctgcggagccaggagtacaagaaataccagacaaacaagacaaccggcaacaccgataagagagccttcgtcgagacctggcagtccttttaccggaagaagcttaaggaggtgtggaaacctgccgtgcggtctggcggatctggcggaggctccaccagccccaagaaaaagagaaaagtctaagctgccttctgcggggcttgccttctggccatgcccttcttctctcccttgcacctgtacctcttggtctttgaataaagcctgagtaggaaggctagcaaaaaaaaaaaaaaaaaaaaaaaaaaaaaaaaaaaaaaaaaaaaaaaaaaaaaaaaaaaaaaaaaaaaaaaaaaaaaaaagcccagccggctccccaacctctaccgaggagggcacctctgagtccgccacccccgagagcggccctggcacctccaccgagcccagcgagggcagcgcacccggcagccctgccggcagccccacctccacagaggagggaaccagcaccgagcccagcgaaggcagcgccccaggcaccagcaccgagcctagtgagcaggagattaaacggatcaacaagatcagaagaagacttgtgaaagacagcaacaccaagaaggccggcaagacaggccccatgaaaaccctgctggttagagtgatgacacccgatctgagagagcggctggaaaacctgagaaagaagcctgaaaatatcccccagcccatcagcaatacatctagagccaacctgaataagctgctgaccgattacaccgaaatgaagaaggcgatcctgcatgtgtactgggaagagttccagaaggaccctgtgggcctgatgagccgggtggcccagcctgccagcaagaagatcgatcagaacaagctgaaacctgagatggacgagaagggcaacctgaccaccgccggctttgcctgctctcagtgtggccagcccctgttcgtgtacaagctggagcaggtgtctgagaagggcaaggcttacaccaactacttcggacggtgcaatgtggccgagcacgaaaagctgatcctgctggcccagctgaagcccgagaaggatagcgacgaagccgtgacatatagcctgggaaagtttgggcagagggccctggatttctacagcattcatgtgaccaaggagtccacccaccccgtgaagcccctggcccagatcgccggaaacagatacgcctccggacctgtgggaaaggccctgagcgacgcatgtatgggcacaatcgcctccttcctgtctaagtaccaggacatcatcatcgaacaccagaaggtggtgaagggcaaccagaagagactggagagcctgcgggagctggccggcaaggaaaacctggaataccctagcgtgaccctgccacctcagcctcacaccaaggagggcgttgatgcctacaacgaagtgatcgcccgggtgcgaatgtgggtgaacctgaacctgtggcagaagctgaagctaagcagagatgatgccaagcctctgctgagactgaagggattcccttcctttcctctggtcgagagacaggccaacgaagtggactggtgggacatggtgtgtaacgtgaagaagctgatcaacgagaaaaaggaggatggcaaggtgttttggcagaatctggctggctacaagagacaggaagccctgagaccatacctgagcagcgaggaagatcggaagaagggaaagaaattcgctcggtaccagctgggcgacctgctgctgcacctggaaaagaagcacggcgaggactggggaaaggtgtacgacgaggcctgggagcggattgacaagaaagtggaaggcctgagcaagcacatcaagctggaagaggaacggagaagcgaggacgcccagagcaaggccgccctgaccgactggctgcgggctaaggccagcttcgtgatcgagggcctgaaggaggccgacaaggacgagttctgcagatgcgagctgaagctgcagaagtggtacggggacctgcggggaaagcccttcgccatcgaagccgagaacagcatcctggacatcagcggcttcagcaagcagtacaactgtgccttcatctggcagaaggacggcgtgaagaagctgaacctgtacctgatcatcaactacttcaagggcggcaagctgcggttcaagaagatcaaacctgaagccttcgaagccaacagattctacaccgtgatcaacaaaaagagcggcgagatcgtgcccatggaggtgaacttcaacttcgacgaccccaacctgatcatcctgcctctggcctttggcaagagacagggcagagaattcatctggaacgacctgctgtccctggaaaccggcagcctgaagctggccaacggaagagtgatcgagaagacactgtacaacagaagaacccggcaggatgagcctgccctgttcgtggccctgaccttcgagcggcgggaggtcctggactcctccaatatcaaaccaatgaacctgatcggcgtggcaagaggcgaaaacatccccgccgtgatcgccctgaccgaccccgagggctgcccactgagccggtttaaggatagcctgggaaacccaacccacatcctgagaatcggcgagagctataaggagaagcagcggaccatccaggccaagaaggaggtggagcagcggagagccggcggctacagccggaagtacgccagcaaagccaagaatctggcagacgatatggtgagaaacaccgctagagatctgctgtactacgccgtgacccaggatgccatgctgatcttcgccaacctgagccggggcttcggccggcagggcaagcggaccttcatggccgagagacagtacacacggatggaggactggctgaccgccaagctggcctacgagggcctgagcaagacctacctgtccaagacactggcccagtacacctccaagacatgcagcaactgtgggtttaccatcaccagcgccgactacgacagggtgctggagaagctgaagaagacagcaacaggctggatgaccacaattaacggcaaggagctgaaggtggagggccagattacctactacaacagatacaagagacagaacgtagtcaaggacctgtccgtcgagctggatagactgagcgaagaatctgtgaacaacgacatctcctcctggacaaagggcagaagcggagaagctctgagcctcctgaagaaaagattctcccatagacccgtgcaggagaagttcgtgtgcctgaactgcggcttcgagacacacgcagccgagcaagccgccctgaacatcgccagatcctggctgttcctgcggagccaggagtacaagaaataccagacaaacaagacaaccggcaacaccgataagagagccttcgtcgagacctggcagtccttttaccggaagaagcttaaggaggtgtggaaacctgccgtgcggtctggcggatctggcggaggctccaccagccccaagaaaaagagaaaagtctaagctgccttctgcggggcttgccttctggccatgcccttcttctctcccttgcacctgtacctcttggtctttgaataaagcctgagtaggaaggctagcaaaaaaaaaaaaaaaaaaaaaaaaaaaaaaaaaaaaaaaaaaaaaaaaaaaaaaaaaaaaaaaaaaaaaaaaaaaaaaaa

SEQ ID NO: 10131 - RNA, 8787 nt, synthetic construct
  source 1..8787: mol_type = other RNA
aggaaataagagagaaaagaagagtaagaagaaatataagagccaccatggcccctaagaagaagcgtaaagtgagccggatgaaccacgaccaggagttcgacccccctaaggtgtaccctcccgtccccgccgagaagagaaagcccatccgggtcctgagcctgttcgatggcatcgccaccggtctgctggtgctgaaggacctgggcatccaggtggataggtacattgcctccgaggtgtgcgaggactccatcaccgtgggaatggtgcgtcatcagggcaagatcatgtacgtgggcgacgtgcggagcgtgacacagaagcatatccaggagtggggccctttcgacctggtgatcggcggcagcccttgcaatgacctgagcatcgtgaacccagcccggaagggcctgtacgagggaaccggcagactgttcttcgagttttacagactgctgcacgacgcccggcctaaggaaggcgacgaccggcccttcttttggctgttcgagaatgtggtggccatgggagtcagcgacaagcgggatattagccggttcctggagagcaaccccgtgatgatcgatgccaaggaagtgagcgccgcccaccgggccagatacttctggggcaatctgcctggcatgaacagacccctggccagcaccgtgaacgacaagctggagctgcaggagtgcctggagcacggccggatcgccaagttcagcaaggtgagaaccatcaccacccgaagcaacagcatcaaacaaggcaaggaccagcactttcctgtgttcatgaacgagaaggaggacatcctgtggtgtaccgagatggagagagtgttcgggttcccagtccactacacagatgtcagcaacatgtctagactggccagacagagactgctgggaagaagctggtccgtccctgtgatcagacacctgttcgcccctctgaaggagtacttcgcctgcgtgagcagcggcaacagcaacgccaacagccggggccccagcttctctagcggcctggtgccactgtccctgagagggagccacatgggccccatggagatctacaaaaccgtgagcgcctggaagcggcagcctgtgcgcgtgctgagcctgtttcggaatatcgataaagtcctgaaaagcctgggattcctggagagcggctctggctccggcggtggcaccctgaagtacgtggaggatgtgacaaacgtggtcagacgggatgtggagaagtggggccccttcgatctggtgtacggcagcacccaacccctgggcagctcttgtgaccggtgccctggctggtacatgtttcagttccaccggatcctgcagtacgccctgccgagacaggagtcccagcggccattcttttggattttcatggacaacttgctgctgaccgaggatgaccaggaaactaccactcggttcctgcagaccgaagccgtgaccctgcaggacgtgagaggccgggactaccagaacgccatgcgggtgtggtccaacatccctggactgaaaagcaagcacgcacctctgacccctaaagaagaggagtacctgcaggcccaggtgcggagcagaagcaagctggacgcccctaaggtggatctgctggtgaagaattgcctcctgcccctgagagagtacttcaagtatttcagccagaatagtctgcccctgggaggcagcggcggcggcttccaggacctgctgagcttcaccgacgtggccatcgacttcagcgccgacgagtgcgagtgcctggagcccgcccagtggaacctgtacaaggaggtgatgctggagaactacagcaacctggtgttcctgggcctggccttcagcaagccctacctggtgaccttcctggagcagagcagcgacccctggagcatgaagaggaaggccagcgccgccatccacctgggcctgaagccccacggcggcccaagcagcggcgcccctcctcccagcggcggcaggcggcccaagcagcggcgcccctcctcccagcggcggcagcccagccggctccccaacctctaccgaggagggcacctctgagtccgccacccccgagagcggccctggcacctccaccgagcccagcgagggcagcgcacccggcagccctgccggcagccccacctccacagaggagggaaccagcaccgagcccagcgaaggcagcgccccaggcaccagcaccgagcctagtgagcaggagattaaacggatcaacaagatcagaagaagacttgtgaaagacagcaacaccaagaaggccggcaagacaggccccatgaaaaccctgctggttagagtgatgacacccgatctgagagagcggctggaaaacctgagaaagaagcctgaaaatatcccccagcccatcagcaatacatctagagccaacctgaataagctgctgaccgattacaccgaaatgaagaaggcgatcctgcatgtgtactgggaagagttccagaaggaccctgtgggcctgatgagccgggtggcccagcctgccagcaagaagatcgatcagaacaagctgaaacctgagatggacgagaagggcaacctgaccaccgccggctttgcctgctctcagtgtggccagcccctgttcgtgtacaagctggagcaggtgtctgagaagggcaaggcttacaccaactacttcggacggtgcaatgtggccgagcacgaaaagctgatcctgctggcccagctgaagcccgagaaggatagcgacgaagccgtgacatatagcctgggaaagtttgggcagagggccctggatttctacagcattcatgtgaccaaggagtccacccaccccgtgaagcccctggcccagatcgccggaaacagatacgcctccggacctgtgggaaaggccctgagcgacgcatgtatgggcacaatcgcctccttcctgtctaagtaccaggacatcatcatcgaacaccagaaggtggtgaagggcaaccagaagagactggagagcctgcgggagctggccggcaaggaaaacctggaataccctagcgtgaccctgccacctcagcctcacaccaaggagggcgttgatgcctacaacgaagtgatcgcccgggtgcgaatgtgggtgaacctgaacctgtggcagaagctgaagctaagcagagatgatgccaagcctctgctgagactgaagggattcccttcctttcctctggtcgagagacaggccaacgaagtggactggtgggacatggtgtgtaacgtgaagaagctgatcaacgagaaaaaggaggatggcaaggtgttttggcagaatctggctggctacaagagacaggaagccctgagaccatacctgagcagcgaggaagatcggaagaagggaaagaaattcgctcggtaccagctgggcgacctgctgctgcacctggaaaagaagcacggcgaggactggggaaaggtgtacgacgaggcctgggagcggattgacaagaaagtggaaggcctgagcaagcacatcaagctggaagaggaacggagaagcgaggacgcccagagcaaggccgccctgaccgactggctgcgggctaaggccagcttcgtgatcgagggcctgaaggaggccgacaaggacgagttctgcagatgcgagctgaagctgcagaagtggtacggggacctgcggggaaagcccttcgccatcgaagccgagaacagcatcctggacatcagcggcttcagcaagcagtacaactgtgccttcatctggcagaaggacggcgtgaagaagctgaacctgtacctgatcatcaactacttcaagggcggcaagctgcggttcaagaagatcaaacctgaagccttcgaagccaacagattctacaccgtgatcaacaaaaagagcggcgagatcgtgcccatggaggtgaacttcaacttcgacgaccccaacctgatcatcctgcctctggcctttggcaagagacagggcagagaattcatctggaacgacctgctgtccctggaaaccggcagcctgaagctggccaacggaagagtgatcgagaagacactgtacaacagaagaacccggcaggatgagcctgccctgttcgtggccctgaccttcgagcggcgggaggtcctggactcctccaatatcaaaccaatgaacctgatcggcgtggcaagaggcgaaaacatccccgccgtgatcgccctgaccgaccccgagggctgcccactgagccggtttaaggatagcctgggaaacccaacccacatcctgagaatcggcgagagctataaggagaagcagcggaccatccaggccaagaaggaggtggagcagcggagagccggcggctacagccggaagtacgccagcaaagccaagaatctggcagacgatatggtgagaaacaccgctagagatctgctgtactacgccgtgacccaggatgccatgctgatcttcgccaacctgagccggggcttcggccggcagggcaagcggaccttcatggccgagagacagtacacacggatggaggactggctgaccgccaagctggcctacgagggcctgagcaagacctacctgtccaagacactggcccagtacacctccaagacatgcagcaactgtgggtttaccatcaccagcgccgactacgacagggtgctggagaagctgaagaagacagcaacaggctggatgaccacaattaacggcaaggagctgaaggtggagggccagattacctactacaacagatacaagagacagaacgtagtcaaggacctgtccgtcgagctggatagactgagcgaagaatctgtgaacaacgacatctcctcctggacaaagggcagaagcggagaagctctgagcctcctgaagaaaagattctcccatagacccgtgcaggagaagttcgtgtgcctgaactgcggcttcgagacacacgcagccgagcaagccgccctgaacatcgccagatcctggctgttcctgcggagccaggagtacaagaaataccagacaaacaagacaaccggcaacaccgataagagagccttcgtcgagacctggcagtccttttaccggaagaagcttaaggaggtgtggaaacctgccgtgcggtctggcggatctggcggaggctccaccagccccaagaaaaagagaaaagtctaagctgccttctgcggggcttgccttctggccatgcccttcttctctcccttgcacctgtacctcttggtctttgaataaagcctgagtaggaaggctagcaaaaaaaaaaaaaaaaaaaaaaaaaaaaaaaaaaaaaaaaaaaaaaaaaaaaaaaaaaaaaaaaaaaaaaaaaaaaaaaagcccagccggctccccaacctctaccgaggagggcacctctgagtccgccacccccgagagcggccctggcacctccaccgagcccagcgagggcagcgcacccggcagccctgccggcagccccacctccacagaggagggaaccagcaccgagcccagcgaaggcagcgccccaggcaccagcaccgagcctagtgagcaggagattaaacggatcaacaagatcagaagaagacttgtgaaagacagcaacaccaagaaggccggcaagacaggccccatgaaaaccctgctggttagagtgatgacacccgatctgagagagcggctggaaaacctgagaaagaagcctgaaaatatcccccagcccatcagcaatacatctagagccaacctgaataagctgctgaccgattacaccgaaatgaagaaggcgatcctgcatgtgtactgggaagagttccagaaggaccctgtgggcctgatgagccgggtggcccagcctgccagcaagaagatcgatcagaacaagctgaaacctgagatggacgagaagggcaacctgaccaccgccggctttgcctgctctcagtgtggccagcccctgttcgtgtacaagctggagcaggtgtctgagaagggcaaggcttacaccaactacttcggacggtgcaatgtggccgagcacgaaaagctgatcctgctggcccagctgaagcccgagaaggatagcgacgaagccgtgacatatagcctgggaaagtttgggcagagggccctggatttctacagcattcatgtgaccaaggagtccacccaccccgtgaagcccctggcccagatcgccggaaacagatacgcctccggacctgtgggaaaggccctgagcgacgcatgtatgggcacaatcgcctccttcctgtctaagtaccaggacatcatcatcgaacaccagaaggtggtgaagggcaaccagaagagactggagagcctgcgggagctggccggcaaggaaaacctggaataccctagcgtgaccctgccacctcagcctcacaccaaggagggcgttgatgcctacaacgaagtgatcgcccgggtgcgaatgtgggtgaacctgaacctgtggcagaagctgaagctaagcagagatgatgccaagcctctgctgagactgaagggattcccttcctttcctctggtcgagagacaggccaacgaagtggactggtgggacatggtgtgtaacgtgaagaagctgatcaacgagaaaaaggaggatggcaaggtgttttggcagaatctggctggctacaagagacaggaagccctgagaccatacctgagcagcgaggaagatcggaagaagggaaagaaattcgctcggtaccagctgggcgacctgctgctgcacctggaaaagaagcacggcgaggactggggaaaggtgtacgacgaggcctgggagcggattgacaagaaagtggaaggcctgagcaagcacatcaagctggaagaggaacggagaagcgaggacgcccagagcaaggccgccctgaccgactggctgcgggctaaggccagcttcgtgatcgagggcctgaaggaggccgacaaggacgagttctgcagatgcgagctgaagctgcagaagtggtacggggacctgcggggaaagcccttcgccatcgaagccgagaacagcatcctggacatcagcggcttcagcaagcagtacaactgtgccttcatctggcagaaggacggcgtgaagaagctgaacctgtacctgatcatcaactacttcaagggcggcaagctgcggttcaagaagatcaaacctgaagccttcgaagccaacagattctacaccgtgatcaacaaaaagagcggcgagatcgtgcccatggaggtgaacttcaacttcgacgaccccaacctgatcatcctgcctctggcctttggcaagagacagggcagagaattcatctggaacgacctgctgtccctggaaaccggcagcctgaagctggccaacggaagagtgatcgagaagacactgtacaacagaagaacccggcaggatgagcctgccctgttcgtggccctgaccttcgagcggcgggaggtcctggactcctccaatatcaaaccaatgaacctgatcggcgtggcaagaggcgaaaacatccccgccgtgatcgccctgaccgaccccgagggctgcccactgagccggtttaaggatagcctgggaaacccaacccacatcctgagaatcggcgagagctataaggagaagcagcggaccatccaggccaagaaggaggtggagcagcggagagccggcggctacagccggaagtacgccagcaaagccaagaatctggcagacgatatggtgagaaacaccgctagagatctgctgtactacgccgtgacccaggatgccatgctgatcttcgccaacctgagccggggcttcggccggcagggcaagcggaccttcatggccgagagacagtacacacggatggaggactggctgaccgccaagctggcctacgagggcctgagcaagacctacctgtccaagacactggcccagtacacctccaagacatgcagcaactgtgggtttaccatcaccagcgccgactacgacagggtgctggagaagctgaagaagacagcaacaggctggatgaccacaattaacggcaaggagctgaaggtggagggccagattacctactacaacagatacaagagacagaacgtagtcaaggacctgtccgtcgagctggatagactgagcgaagaatctgtgaacaacgacatctcctcctggacaaagggcagaagcggagaagctctgagcctcctgaagaaaagattctcccatagacccgtgcaggagaagttcgtgtgcctgaactgcggcttcgagacacacgcagccgagcaagccgccctgaacatcgccagatcctggctgttcctgcggagccaggagtacaagaaataccagacaaacaagacaaccggcaacaccgataagagagccttcgtcgagacctggcagtccttttaccggaagaagcttaaggaggtgtggaaacctgccgtgcggtctggcggatctggcggaggctccaccagccccaagaaaaagagaaaagtctaagctgccttctgcggggcttgccttctggccatgcccttcttctctcccttgcacctgtacctcttggtctttgaataaagcctgagtaggaaggctagcaaaaaaaaaaaaaaaaaaaaaaaaaaaaaaaaaaaaaaaaaaaaaaaaaaaaaaaaaaaaaaaaaaaaaaaaaaaaaaaa

SEQ ID NO: 10132 - RNA, 8787 nt, synthetic construct
  source 1..8787: mol_type = other RNA
aggaaataagagagaaaagaagagtaagaagaaatataagagccaccatggcccctaagaagaagcgtaaagtgagccggatgaaccacgaccaggagttcgacccccctaaggtgtaccctcccgtccccgccgagaagagaaagcccatccgggtcctgagcctgttcgatggcatcgccaccggtctgctggtgctgaaggacctgggcatccaggtggataggtacattgcctccgaggtgtgcgaggactccatcaccgtgggaatggtgcgtcatcagggcaagatcatgtacgtgggcgacgtgcggagcgtgacacagaagcatatccaggagtggggccctttcgacctggtgatcggcggcagcccttgcaatgacctgagcatcgtgaacccagcccggaagggcctgtacgagggaaccggcagactgttcttcgagttttacagactgctgcacgacgcccggcctaaggaaggcgacgaccggcccttcttttggctgttcgagaatgtggtggccatgggagtcagcgacaagcgggatattagccggttcctggagagcaaccccgtgatgatcgatgccaaggaagtgagcgccgcccaccgggccagatacttctggggcaatctgcctggcatgaacagacccctggccagcaccgtgaacgacaagctggagctgcaggagtgcctggagcacggccggatcgccaagttcagcaaggtgagaaccatcaccacccgaagcaacagcatcaaacaaggcaaggaccagcactttcctgtgttcatgaacgagaaggaggacatcctgtggtgtaccgagatggagagagtgttcgggttcccagtccactacacagatgtcagcaacatgtctagactggccagacagagactgctgggaagaagctggtccgtccctgtgatcagacacctgttcgcccctctgaaggagtacttcgcctgcgtgagcagcggcaacagcaacgccaacagccggggccccagcttctctagcggcctggtgccactgtccctgagagggagccacatgggccccatggagatctacaaaaccgtgagcgcctggaagcggcagcctgtgcgcgtgctgagcctgtttcggaatatcgataaagtcctgaaaagcctgggattcctggagagcggctctggctccggcggtggcaccctgaagtacgtggaggatgtgacaaacgtggtcagacgggatgtggagaagtggggccccttcgatctggtgtacggcagcacccaacccctgggcagctcttgtgaccggtgccctggctggtacatgtttcagttccaccggatcctgcagtacgccctgccgagacaggagtcccagcggccattcttttggattttcatggacaacttgctgctgaccgaggatgaccaggaaactaccactcggttcctgcagaccgaagccgtgaccctgcaggacgtgagaggccgggactaccagaacgccatgcgggtgtggtccaacatccctggactgaaaagcaagcacgcacctctgacccctaaagaagaggagtacctgcaggcccaggtgcggagcagaagcaagctggacgcccctaaggtggatctgctggtgaagaattgcctcctgcccctgagagagtacttcaagtatttcagccagaatagtctgcccctgggaggcagcggcggcggccccaaggtgaccgtgagcttcgaggacgtgagcgtgtacttcaccaagaccgagtggaagctgctggacctgaagcagaggaacctgtacaagcaggtgatgctggagaactacagccacctggtgagcgtgggcttcgccttcagcaagcccaacctggtgagccagctggagaggggcgagaagccctggatcagggacgacaggatggagagcgccgccaggagcagggccggcaacaggggcggcccaagcagcggcgcccctcctcccagcggcggcaggcggcccaagcagcggcgcccctcctcccagcggcggcagcccagccggctccccaacctctaccgaggagggcacctctgagtccgccacccccgagagcggccctggcacctccaccgagcccagcgagggcagcgcacccggcagccctgccggcagccccacctccacagaggagggaaccagcaccgagcccagcgaaggcagcgccccaggcaccagcaccgagcctagtgagcaggagattaaacggatcaacaagatcagaagaagacttgtgaaagacagcaacaccaagaaggccggcaagacaggccccatgaaaaccctgctggttagagtgatgacacccgatctgagagagcggctggaaaacctgagaaagaagcctgaaaatatcccccagcccatcagcaatacatctagagccaacctgaataagctgctgaccgattacaccgaaatgaagaaggcgatcctgcatgtgtactgggaagagttccagaaggaccctgtgggcctgatgagccgggtggcccagcctgccagcaagaagatcgatcagaacaagctgaaacctgagatggacgagaagggcaacctgaccaccgccggctttgcctgctctcagtgtggccagcccctgttcgtgtacaagctggagcaggtgtctgagaagggcaaggcttacaccaactacttcggacggtgcaatgtggccgagcacgaaaagctgatcctgctggcccagctgaagcccgagaaggatagcgacgaagccgtgacatatagcctgggaaagtttgggcagagggccctggatttctacagcattcatgtgaccaaggagtccacccaccccgtgaagcccctggcccagatcgccggaaacagatacgcctccggacctgtgggaaaggccctgagcgacgcatgtatgggcacaatcgcctccttcctgtctaagtaccaggacatcatcatcgaacaccagaaggtggtgaagggcaaccagaagagactggagagcctgcgggagctggccggcaaggaaaacctggaataccctagcgtgaccctgccacctcagcctcacaccaaggagggcgttgatgcctacaacgaagtgatcgcccgggtgcgaatgtgggtgaacctgaacctgtggcagaagctgaagctaagcagagatgatgccaagcctctgctgagactgaagggattcccttcctttcctctggtcgagagacaggccaacgaagtggactggtgggacatggtgtgtaacgtgaagaagctgatcaacgagaaaaaggaggatggcaaggtgttttggcagaatctggctggctacaagagacaggaagccctgagaccatacctgagcagcgaggaagatcggaagaagggaaagaaattcgctcggtaccagctgggcgacctgctgctgcacctggaaaagaagcacggcgaggactggggaaaggtgtacgacgaggcctgggagcggattgacaagaaagtggaaggcctgagcaagcacatcaagctggaagaggaacggagaagcgaggacgcccagagcaaggccgccctgaccgactggctgcgggctaaggccagcttcgtgatcgagggcctgaaggaggccgacaaggacgagttctgcagatgcgagctgaagctgcagaagtggtacggggacctgcggggaaagcccttcgccatcgaagccgagaacagcatcctggacatcagcggcttcagcaagcagtacaactgtgccttcatctggcagaaggacggcgtgaagaagctgaacctgtacctgatcatcaactacttcaagggcggcaagctgcggttcaagaagatcaaacctgaagccttcgaagccaacagattctacaccgtgatcaacaaaaagagcggcgagatcgtgcccatggaggtgaacttcaacttcgacgaccccaacctgatcatcctgcctctggcctttggcaagagacagggcagagaattcatctggaacgacctgctgtccctggaaaccggcagcctgaagctggccaacggaagagtgatcgagaagacactgtacaacagaagaacccggcaggatgagcctgccctgttcgtggccctgaccttcgagcggcgggaggtcctggactcctccaatatcaaaccaatgaacctgatcggcgtggcaagaggcgaaaacatccccgccgtgatcgccctgaccgaccccgagggctgcccactgagccggtttaaggatagcctgggaaacccaacccacatcctgagaatcggcgagagctataaggagaagcagcggaccatccaggccaagaaggaggtggagcagcggagagccggcggctacagccggaagtacgccagcaaagccaagaatctggcagacgatatggtgagaaacaccgctagagatctgctgtactacgccgtgacccaggatgccatgctgatcttcgccaacctgagccggggcttcggccggcagggcaagcggaccttcatggccgagagacagtacacacggatggaggactggctgaccgccaagctggcctacgagggcctgagcaagacctacctgtccaagacactggcccagtacacctccaagacatgcagcaactgtgggtttaccatcaccagcgccgactacgacagggtgctggagaagctgaagaagacagcaacaggctggatgaccacaattaacggcaaggagctgaaggtggagggccagattacctactacaacagatacaagagacagaacgtagtcaaggacctgtccgtcgagctggatagactgagcgaagaatctgtgaacaacgacatctcctcctggacaaagggcagaagcggagaagctctgagcctcctgaagaaaagattctcccatagacccgtgcaggagaagttcgtgtgcctgaactgcggcttcgagacacacgcagccgagcaagccgccctgaacatcgccagatcctggctgttcctgcggagccaggagtacaagaaataccagacaaacaagacaaccggcaacaccgataagagagccttcgtcgagacctggcagtccttttaccggaagaagcttaaggaggtgtggaaacctgccgtgcggtctggcggatctggcggaggctccaccagccccaagaaaaagagaaaagtctaagctgccttctgcggggcttgccttctggccatgcccttcttctctcccttgcacctgtacctcttggtctttgaataaagcctgagtaggaaggctagcaaaaaaaaaaaaaaaaaaaaaaaaaaaaaaaaaaaaaaaaaaaaaaaaaaaaaaaaaaaaaaaaaaaaaaaaaaaaaaaagcccagccggctccccaacctctaccgaggagggcacctctgagtccgccacccccgagagcggccctggcacctccaccgagcccagcgagggcagcgcacccggcagccctgccggcagccccacctccacagaggagggaaccagcaccgagcccagcgaaggcagcgccccaggcaccagcaccgagcctagtgagcaggagattaaacggatcaacaagatcagaagaagacttgtgaaagacagcaacaccaagaaggccggcaagacaggccccatgaaaaccctgctggttagagtgatgacacccgatctgagagagcggctggaaaacctgagaaagaagcctgaaaatatcccccagcccatcagcaatacatctagagccaacctgaataagctgctgaccgattacaccgaaatgaagaaggcgatcctgcatgtgtactgggaagagttccagaaggaccctgtgggcctgatgagccgggtggcccagcctgccagcaagaagatcgatcagaacaagctgaaacctgagatggacgagaagggcaacctgaccaccgccggctttgcctgctctcagtgtggccagcccctgttcgtgtacaagctggagcaggtgtctgagaagggcaaggcttacaccaactacttcggacggtgcaatgtggccgagcacgaaaagctgatcctgctggcccagctgaagcccgagaaggatagcgacgaagccgtgacatatagcctgggaaagtttgggcagagggccctggatttctacagcattcatgtgaccaaggagtccacccaccccgtgaagcccctggcccagatcgccggaaacagatacgcctccggacctgtgggaaaggccctgagcgacgcatgtatgggcacaatcgcctccttcctgtctaagtaccaggacatcatcatcgaacaccagaaggtggtgaagggcaaccagaagagactggagagcctgcgggagctggccggcaaggaaaacctggaataccctagcgtgaccctgccacctcagcctcacaccaaggagggcgttgatgcctacaacgaagtgatcgcccgggtgcgaatgtgggtgaacctgaacctgtggcagaagctgaagctaagcagagatgatgccaagcctctgctgagactgaagggattcccttcctttcctctggtcgagagacaggccaacgaagtggactggtgggacatggtgtgtaacgtgaagaagctgatcaacgagaaaaaggaggatggcaaggtgttttggcagaatctggctggctacaagagacaggaagccctgagaccatacctgagcagcgaggaagatcggaagaagggaaagaaattcgctcggtaccagctgggcgacctgctgctgcacctggaaaagaagcacggcgaggactggggaaaggtgtacgacgaggcctgggagcggattgacaagaaagtggaaggcctgagcaagcacatcaagctggaagaggaacggagaagcgaggacgcccagagcaaggccgccctgaccgactggctgcgggctaaggccagcttcgtgatcgagggcctgaaggaggccgacaaggacgagttctgcagatgcgagctgaagctgcagaagtggtacggggacctgcggggaaagcccttcgccatcgaagccgagaacagcatcctggacatcagcggcttcagcaagcagtacaactgtgccttcatctggcagaaggacggcgtgaagaagctgaacctgtacctgatcatcaactacttcaagggcggcaagctgcggttcaagaagatcaaacctgaagccttcgaagccaacagattctacaccgtgatcaacaaaaagagcggcgagatcgtgcccatggaggtgaacttcaacttcgacgaccccaacctgatcatcctgcctctggcctttggcaagagacagggcagagaattcatctggaacgacctgctgtccctggaaaccggcagcctgaagctggccaacggaagagtgatcgagaagacactgtacaacagaagaacccggcaggatgagcctgccctgttcgtggccctgaccttcgagcggcgggaggtcctggactcctccaatatcaaaccaatgaacctgatcggcgtggcaagaggcgaaaacatccccgccgtgatcgccctgaccgaccccgagggctgcccactgagccggtttaaggatagcctgggaaacccaacccacatcctgagaatcggcgagagctataaggagaagcagcggaccatccaggccaagaaggaggtggagcagcggagagccggcggctacagccggaagtacgccagcaaagccaagaatctggcagacgatatggtgagaaacaccgctagagatctgctgtactacgccgtgacccaggatgccatgctgatcttcgccaacctgagccggggcttcggccggcagggcaagcggaccttcatggccgagagacagtacacacggatggaggactggctgaccgccaagctggcctacgagggcctgagcaagacctacctgtccaagacactggcccagtacacctccaagacatgcagcaactgtgggtttaccatcaccagcgccgactacgacagggtgctggagaagctgaagaagacagcaacaggctggatgaccacaattaacggcaaggagctgaaggtggagggccagattacctactacaacagatacaagagacagaacgtagtcaaggacctgtccgtcgagctggatagactgagcgaagaatctgtgaacaacgacatctcctcctggacaaagggcagaagcggagaagctctgagcctcctgaagaaaagattctcccatagacccgtgcaggagaagttcgtgtgcctgaactgcggcttcgagacacacgcagccgagcaagccgccctgaacatcgccagatcctggctgttcctgcggagccaggagtacaagaaataccagacaaacaagacaaccggcaacaccgataagagagccttcgtcgagacctggcagtccttttaccggaagaagcttaaggaggtgtggaaacctgccgtgcggtctggcggatctggcggaggctccaccagccccaagaaaaagagaaaagtctaagctgccttctgcggggcttgccttctggccatgcccttcttctctcccttgcacctgtacctcttggtctttgaataaagcctgagtaggaaggctagcaaaaaaaaaaaaaaaaaaaaaaaaaaaaaaaaaaaaaaaaaaaaaaaaaaaaaaaaaaaaaaaaaaaaaaaaaaaaaaaa

SEQ ID NO: 10133 - RNA, 8787 nt, synthetic construct
  source 1..8787: mol_type = other RNA
aggaaataagagagaaaagaagagtaagaagaaatataagagccaccatggcccctaagaagaagcgtaaagtgagccggatgaaccacgaccaggagttcgacccccctaaggtgtaccctcccgtccccgccgagaagagaaagcccatccgggtcctgagcctgttcgatggcatcgccaccggtctgctggtgctgaaggacctgggcatccaggtggataggtacattgcctccgaggtgtgcgaggactccatcaccgtgggaatggtgcgtcatcagggcaagatcatgtacgtgggcgacgtgcggagcgtgacacagaagcatatccaggagtggggccctttcgacctggtgatcggcggcagcccttgcaatgacctgagcatcgtgaacccagcccggaagggcctgtacgagggaaccggcagactgttcttcgagttttacagactgctgcacgacgcccggcctaaggaaggcgacgaccggcccttcttttggctgttcgagaatgtggtggccatgggagtcagcgacaagcgggatattagccggttcctggagagcaaccccgtgatgatcgatgccaaggaagtgagcgccgcccaccgggccagatacttctggggcaatctgcctggcatgaacagacccctggccagcaccgtgaacgacaagctggagctgcaggagtgcctggagcacggccggatcgccaagttcagcaaggtgagaaccatcaccacccgaagcaacagcatcaaacaaggcaaggaccagcactttcctgtgttcatgaacgagaaggaggacatcctgtggtgtaccgagatggagagagtgttcgggttcccagtccactacacagatgtcagcaacatgtctagactggccagacagagactgctgggaagaagctggtccgtccctgtgatcagacacctgttcgcccctctgaaggagtacttcgcctgcgtgagcagcggcaacagcaacgccaacagccggggccccagcttctctagcggcctggtgccactgtccctgagagggagccacatgggccccatggagatctacaaaaccgtgagcgcctggaagcggcagcctgtgcgcgtgctgagcctgtttcggaatatcgataaagtcctgaaaagcctgggattcctggagagcggctctggctccggcggtggcaccctgaagtacgtggaggatgtgacaaacgtggtcagacgggatgtggagaagtggggccccttcgatctggtgtacggcagcacccaacccctgggcagctcttgtgaccggtgccctggctggtacatgtttcagttccaccggatcctgcagtacgccctgccgagacaggagtcccagcggccattcttttggattttcatggacaacttgctgctgaccgaggatgaccaggaaactaccactcggttcctgcagaccgaagccgtgaccctgcaggacgtgagaggccgggactaccagaacgccatgcgggtgtggtccaacatccctggactgaaaagcaagcacgcacctctgacccctaaagaagaggagtacctgcaggcccaggtgcggagcagaagcaagctggacgcccctaaggtggatctgctggtgaagaattgcctcctgcccctgagagagtacttcaagtatttcagccagaatagtctgcccctgggaggcagcggcggcggcttccaccagctggtgaccttcgaggacgtggccgtgtacctgagcaaggaggagtggaagaggctgaacctggcccagagggagctgtacagggacgtgatgctggagaactacgagaacctgctgagcctgggcttccccgtgagcaagcccgacatcatcagccagctggagcagaggaaggaggcctggatcgtgcagggccccgagaagaggaagttcagccagaacgcccacagggacggcggcccaagcagcggcgcccctcctcccagcggcggcaggcggcccaagcagcggcgcccctcctcccagcggcggcagcccagccggctccccaacctctaccgaggagggcacctctgagtccgccacccccgagagcggccctggcacctccaccgagcccagcgagggcagcgcacccggcagccctgccggcagccccacctccacagaggagggaaccagcaccgagcccagcgaaggcagcgccccaggcaccagcaccgagcctagtgagcaggagattaaacggatcaacaagatcagaagaagacttgtgaaagacagcaacaccaagaaggccggcaagacaggccccatgaaaaccctgctggttagagtgatgacacccgatctgagagagcggctggaaaacctgagaaagaagcctgaaaatatcccccagcccatcagcaatacatctagagccaacctgaataagctgctgaccgattacaccgaaatgaagaaggcgatcctgcatgtgtactgggaagagttccagaaggaccctgtgggcctgatgagccgggtggcccagcctgccagcaagaagatcgatcagaacaagctgaaacctgagatggacgagaagggcaacctgaccaccgccggctttgcctgctctcagtgtggccagcccctgttcgtgtacaagctggagcaggtgtctgagaagggcaaggcttacaccaactacttcggacggtgcaatgtggccgagcacgaaaagctgatcctgctggcccagctgaagcccgagaaggatagcgacgaagccgtgacatatagcctgggaaagtttgggcagagggccctggatttctacagcattcatgtgaccaaggagtccacccaccccgtgaagcccctggcccagatcgccggaaacagatacgcctccggacctgtgggaaaggccctgagcgacgcatgtatgggcacaatcgcctccttcctgtctaagtaccaggacatcatcatcgaacaccagaaggtggtgaagggcaaccagaagagactggagagcctgcgggagctggccggcaaggaaaacctggaataccctagcgtgaccctgccacctcagcctcacaccaaggagggcgttgatgcctacaacgaagtgatcgcccgggtgcgaatgtgggtgaacctgaacctgtggcagaagctgaagctaagcagagatgatgccaagcctctgctgagactgaagggattcccttcctttcctctggtcgagagacaggccaacgaagtggactggtgggacatggtgtgtaacgtgaagaagctgatcaacgagaaaaaggaggatggcaaggtgttttggcagaatctggctggctacaagagacaggaagccctgagaccatacctgagcagcgaggaagatcggaagaagggaaagaaattcgctcggtaccagctgggcgacctgctgctgcacctggaaaagaagcacggcgaggactggggaaaggtgtacgacgaggcctgggagcggattgacaagaaagtggaaggcctgagcaagcacatcaagctggaagaggaacggagaagcgaggacgcccagagcaaggccgccctgaccgactggctgcgggctaaggccagcttcgtgatcgagggcctgaaggaggccgacaaggacgagttctgcagatgcgagctgaagctgcagaagtggtacggggacctgcggggaaagcccttcgccatcgaagccgagaacagcatcctggacatcagcggcttcagcaagcagtacaactgtgccttcatctggcagaaggacggcgtgaagaagctgaacctgtacctgatcatcaactacttcaagggcggcaagctgcggttcaagaagatcaaacctgaagccttcgaagccaacagattctacaccgtgatcaacaaaaagagcggcgagatcgtgcccatggaggtgaacttcaacttcgacgaccccaacctgatcatcctgcctctggcctttggcaagagacagggcagagaattcatctggaacgacctgctgtccctggaaaccggcagcctgaagctggccaacggaagagtgatcgagaagacactgtacaacagaagaacccggcaggatgagcctgccctgttcgtggccctgaccttcgagcggcgggaggtcctggactcctccaatatcaaaccaatgaacctgatcggcgtggcaagaggcgaaaacatccccgccgtgatcgccctgaccgaccccgagggctgcccactgagccggtttaaggatagcctgggaaacccaacccacatcctgagaatcggcgagagctataaggagaagcagcggaccatccaggccaagaaggaggtggagcagcggagagccggcggctacagccggaagtacgccagcaaagccaagaatctggcagacgatatggtgagaaacaccgctagagatctgctgtactacgccgtgacccaggatgccatgctgatcttcgccaacctgagccggggcttcggccggcagggcaagcggaccttcatggccgagagacagtacacacggatggaggactggctgaccgccaagctggcctacgagggcctgagcaagacctacctgtccaagacactggcccagtacacctccaagacatgcagcaactgtgggtttaccatcaccagcgccgactacgacagggtgctggagaagctgaagaagacagcaacaggctggatgaccacaattaacggcaaggagctgaaggtggagggccagattacctactacaacagatacaagagacagaacgtagtcaaggacctgtccgtcgagctggatagactgagcgaagaatctgtgaacaacgacatctcctcctggacaaagggcagaagcggagaagctctgagcctcctgaagaaaagattctcccatagacccgtgcaggagaagttcgtgtgcctgaactgcggcttcgagacacacgcagccgagcaagccgccctgaacatcgccagatcctggctgttcctgcggagccaggagtacaagaaataccagacaaacaagacaaccggcaacaccgataagagagccttcgtcgagacctggcagtccttttaccggaagaagcttaaggaggtgtggaaacctgccgtgcggtctggcggatctggcggaggctccaccagccccaagaaaaagagaaaagtctaagctgccttctgcggggcttgccttctggccatgcccttcttctctcccttgcacctgtacctcttggtctttgaataaagcctgagtaggaaggctagcaaaaaaaaaaaaaaaaaaaaaaaaaaaaaaaaaaaaaaaaaaaaaaaaaaaaaaaaaaaaaaaaaaaaaaaaaaaaaaaagcccagccggctccccaacctctaccgaggagggcacctctgagtccgccacccccgagagcggccctggcacctccaccgagcccagcgagggcagcgcacccggcagccctgccggcagccccacctccacagaggagggaaccagcaccgagcccagcgaaggcagcgccccaggcaccagcaccgagcctagtgagcaggagattaaacggatcaacaagatcagaagaagacttgtgaaagacagcaacaccaagaaggccggcaagacaggccccatgaaaaccctgctggttagagtgatgacacccgatctgagagagcggctggaaaacctgagaaagaagcctgaaaatatcccccagcccatcagcaatacatctagagccaacctgaataagctgctgaccgattacaccgaaatgaagaaggcgatcctgcatgtgtactgggaagagttccagaaggaccctgtgggcctgatgagccgggtggcccagcctgccagcaagaagatcgatcagaacaagctgaaacctgagatggacgagaagggcaacctgaccaccgccggctttgcctgctctcagtgtggccagcccctgttcgtgtacaagctggagcaggtgtctgagaagggcaaggcttacaccaactacttcggacggtgcaatgtggccgagcacgaaaagctgatcctgctggcccagctgaagcccgagaaggatagcgacgaagccgtgacatatagcctgggaaagtttgggcagagggccctggatttctacagcattcatgtgaccaaggagtccacccaccccgtgaagcccctggcccagatcgccggaaacagatacgcctccggacctgtgggaaaggccctgagcgacgcatgtatgggcacaatcgcctccttcctgtctaagtaccaggacatcatcatcgaacaccagaaggtggtgaagggcaaccagaagagactggagagcctgcgggagctggccggcaaggaaaacctggaataccctagcgtgaccctgccacctcagcctcacaccaaggagggcgttgatgcctacaacgaagtgatcgcccgggtgcgaatgtgggtgaacctgaacctgtggcagaagctgaagctaagcagagatgatgccaagcctctgctgagactgaagggattcccttcctttcctctggtcgagagacaggccaacgaagtggactggtgggacatggtgtgtaacgtgaagaagctgatcaacgagaaaaaggaggatggcaaggtgttttggcagaatctggctggctacaagagacaggaagccctgagaccatacctgagcagcgaggaagatcggaagaagggaaagaaattcgctcggtaccagctgggcgacctgctgctgcacctggaaaagaagcacggcgaggactggggaaaggtgtacgacgaggcctgggagcggattgacaagaaagtggaaggcctgagcaagcacatcaagctggaagaggaacggagaagcgaggacgcccagagcaaggccgccctgaccgactggctgcgggctaaggccagcttcgtgatcgagggcctgaaggaggccgacaaggacgagttctgcagatgcgagctgaagctgcagaagtggtacggggacctgcggggaaagcccttcgccatcgaagccgagaacagcatcctggacatcagcggcttcagcaagcagtacaactgtgccttcatctggcagaaggacggcgtgaagaagctgaacctgtacctgatcatcaactacttcaagggcggcaagctgcggttcaagaagatcaaacctgaagccttcgaagccaacagattctacaccgtgatcaacaaaaagagcggcgagatcgtgcccatggaggtgaacttcaacttcgacgaccccaacctgatcatcctgcctctggcctttggcaagagacagggcagagaattcatctggaacgacctgctgtccctggaaaccggcagcctgaagctggccaacggaagagtgatcgagaagacactgtacaacagaagaacccggcaggatgagcctgccctgttcgtggccctgaccttcgagcggcgggaggtcctggactcctccaatatcaaaccaatgaacctgatcggcgtggcaagaggcgaaaacatccccgccgtgatcgccctgaccgaccccgagggctgcccactgagccggtttaaggatagcctgggaaacccaacccacatcctgagaatcggcgagagctataaggagaagcagcggaccatccaggccaagaaggaggtggagcagcggagagccggcggctacagccggaagtacgccagcaaagccaagaatctggcagacgatatggtgagaaacaccgctagagatctgctgtactacgccgtgacccaggatgccatgctgatcttcgccaacctgagccggggcttcggccggcagggcaagcggaccttcatggccgagagacagtacacacggatggaggactggctgaccgccaagctggcctacgagggcctgagcaagacctacctgtccaagacactggcccagtacacctccaagacatgcagcaactgtgggtttaccatcaccagcgccgactacgacagggtgctggagaagctgaagaagacagcaacaggctggatgaccacaattaacggcaaggagctgaaggtggagggccagattacctactacaacagatacaagagacagaacgtagtcaaggacctgtccgtcgagctggatagactgagcgaagaatctgtgaacaacgacatctcctcctggacaaagggcagaagcggagaagctctgagcctcctgaagaaaagattctcccatagacccgtgcaggagaagttcgtgtgcctgaactgcggcttcgagacacacgcagccgagcaagccgccctgaacatcgccagatcctggctgttcctgcggagccaggagtacaagaaataccagacaaacaagacaaccggcaacaccgataagagagccttcgtcgagacctggcagtccttttaccggaagaagcttaaggaggtgtggaaacctgccgtgcggtctggcggatctggcggaggctccaccagccccaagaaaaagagaaaagtctaagctgccttctgcggggcttgccttctggccatgcccttcttctctcccttgcacctgtacctcttggtctttgaataaagcctgagtaggaaggctagcaaaaaaaaaaaaaaaaaaaaaaaaaaaaaaaaaaaaaaaaaaaaaaaaaaaaaaaaaaaaaaaaaaaaaaaaaaaaaaaa

SEQ ID NO: 10134 - RNA, 8787 nt, synthetic construct
  source 1..8787: mol_type = other RNA
aggaaataagagagaaaagaagagtaagaagaaatataagagccaccatggcccctaagaagaagcgtaaagtgagccggatgaaccacgaccaggagttcgacccccctaaggtgtaccctcccgtccccgccgagaagagaaagcccatccgggtcctgagcctgttcgatggcatcgccaccggtctgctggtgctgaaggacctgggcatccaggtggataggtacattgcctccgaggtgtgcgaggactccatcaccgtgggaatggtgcgtcatcagggcaagatcatgtacgtgggcgacgtgcggagcgtgacacagaagcatatccaggagtggggccctttcgacctggtgatcggcggcagcccttgcaatgacctgagcatcgtgaacccagcccggaagggcctgtacgagggaaccggcagactgttcttcgagttttacagactgctgcacgacgcccggcctaaggaaggcgacgaccggcccttcttttggctgttcgagaatgtggtggccatgggagtcagcgacaagcgggatattagccggttcctggagagcaaccccgtgatgatcgatgccaaggaagtgagcgccgcccaccgggccagatacttctggggcaatctgcctggcatgaacagacccctggccagcaccgtgaacgacaagctggagctgcaggagtgcctggagcacggccggatcgccaagttcagcaaggtgagaaccatcaccacccgaagcaacagcatcaaacaaggcaaggaccagcactttcctgtgttcatgaacgagaaggaggacatcctgtggtgtaccgagatggagagagtgttcgggttcccagtccactacacagatgtcagcaacatgtctagactggccagacagagactgctgggaagaagctggtccgtccctgtgatcagacacctgttcgcccctctgaaggagtacttcgcctgcgtgagcagcggcaacagcaacgccaacagccggggccccagcttctctagcggcctggtgccactgtccctgagagggagccacatgggccccatggagatctacaaaaccgtgagcgcctggaagcggcagcctgtgcgcgtgctgagcctgtttcggaatatcgataaagtcctgaaaagcctgggattcctggagagcggctctggctccggcggtggcaccctgaagtacgtggaggatgtgacaaacgtggtcagacgggatgtggagaagtggggccccttcgatctggtgtacggcagcacccaacccctgggcagctcttgtgaccggtgccctggctggtacatgtttcagttccaccggatcctgcagtacgccctgccgagacaggagtcccagcggccattcttttggattttcatggacaacttgctgctgaccgaggatgaccaggaaactaccactcggttcctgcagaccgaagccgtgaccctgcaggacgtgagaggccgggactaccagaacgccatgcgggtgtggtccaacatccctggactgaaaagcaagcacgcacctctgacccctaaagaagaggagtacctgcaggcccaggtgcggagcagaagcaagctggacgcccctaaggtggatctgctggtgaagaattgcctcctgcccctgagagagtacttcaagtatttcagccagaatagtctgcccctgggaggcagcggcggcggcgccagggccagcctgagcttcgaggacgtggccgtgggcttcagctgggaggagtggcagctgctggcccccagccagaaggacctgtacagggacgtgatgctggagaactacaggaacctggtgagcgtgggctaccaggccagcaagctggacagcctgttccagagcgagcagggcggccccccctggaccgtggagggcgccgcccagagccagacctgccccgaggagatctgggagggcggcccaagcagcggcgcccctcctcccagcggcggcaggcggcccaagcagcggcgcccctcctcccagcggcggcagcccagccggctccccaacctctaccgaggagggcacctctgagtccgccacccccgagagcggccctggcacctccaccgagcccagcgagggcagcgcacccggcagccctgccggcagccccacctccacagaggagggaaccagcaccgagcccagcgaaggcagcgccccaggcaccagcaccgagcctagtgagcaggagattaaacggatcaacaagatcagaagaagacttgtgaaagacagcaacaccaagaaggccggcaagacaggccccatgaaaaccctgctggttagagtgatgacacccgatctgagagagcggctggaaaacctgagaaagaagcctgaaaatatcccccagcccatcagcaatacatctagagccaacctgaataagctgctgaccgattacaccgaaatgaagaaggcgatcctgcatgtgtactgggaagagttccagaaggaccctgtgggcctgatgagccgggtggcccagcctgccagcaagaagatcgatcagaacaagctgaaacctgagatggacgagaagggcaacctgaccaccgccggctttgcctgctctcagtgtggccagcccctgttcgtgtacaagctggagcaggtgtctgagaagggcaaggcttacaccaactacttcggacggtgcaatgtggccgagcacgaaaagctgatcctgctggcccagctgaagcccgagaaggatagcgacgaagccgtgacatatagcctgggaaagtttgggcagagggccctggatttctacagcattcatgtgaccaaggagtccacccaccccgtgaagcccctggcccagatcgccggaaacagatacgcctccggacctgtgggaaaggccctgagcgacgcatgtatgggcacaatcgcctccttcctgtctaagtaccaggacatcatcatcgaacaccagaaggtggtgaagggcaaccagaagagactggagagcctgcgggagctggccggcaaggaaaacctggaataccctagcgtgaccctgccacctcagcctcacaccaaggagggcgttgatgcctacaacgaagtgatcgcccgggtgcgaatgtgggtgaacctgaacctgtggcagaagctgaagctaagcagagatgatgccaagcctctgctgagactgaagggattcccttcctttcctctggtcgagagacaggccaacgaagtggactggtgggacatggtgtgtaacgtgaagaagctgatcaacgagaaaaaggaggatggcaaggtgttttggcagaatctggctggctacaagagacaggaagccctgagaccatacctgagcagcgaggaagatcggaagaagggaaagaaattcgctcggtaccagctgggcgacctgctgctgcacctggaaaagaagcacggcgaggactggggaaaggtgtacgacgaggcctgggagcggattgacaagaaagtggaaggcctgagcaagcacatcaagctggaagaggaacggagaagcgaggacgcccagagcaaggccgccctgaccgactggctgcgggctaaggccagcttcgtgatcgagggcctgaaggaggccgacaaggacgagttctgcagatgcgagctgaagctgcagaagtggtacggggacctgcggggaaagcccttcgccatcgaagccgagaacagcatcctggacatcagcggcttcagcaagcagtacaactgtgccttcatctggcagaaggacggcgtgaagaagctgaacctgtacctgatcatcaactacttcaagggcggcaagctgcggttcaagaagatcaaacctgaagccttcgaagccaacagattctacaccgtgatcaacaaaaagagcggcgagatcgtgcccatggaggtgaacttcaacttcgacgaccccaacctgatcatcctgcctctggcctttggcaagagacagggcagagaattcatctggaacgacctgctgtccctggaaaccggcagcctgaagctggccaacggaagagtgatcgagaagacactgtacaacagaagaacccggcaggatgagcctgccctgttcgtggccctgaccttcgagcggcgggaggtcctggactcctccaatatcaaaccaatgaacctgatcggcgtggcaagaggcgaaaacatccccgccgtgatcgccctgaccgaccccgagggctgcccactgagccggtttaaggatagcctgggaaacccaacccacatcctgagaatcggcgagagctataaggagaagcagcggaccatccaggccaagaaggaggtggagcagcggagagccggcggctacagccggaagtacgccagcaaagccaagaatctggcagacgatatggtgagaaacaccgctagagatctgctgtactacgccgtgacccaggatgccatgctgatcttcgccaacctgagccggggcttcggccggcagggcaagcggaccttcatggccgagagacagtacacacggatggaggactggctgaccgccaagctggcctacgagggcctgagcaagacctacctgtccaagacactggcccagtacacctccaagacatgcagcaactgtgggtttaccatcaccagcgccgactacgacagggtgctggagaagctgaagaagacagcaacaggctggatgaccacaattaacggcaaggagctgaaggtggagggccagattacctactacaacagatacaagagacagaacgtagtcaaggacctgtccgtcgagctggatagactgagcgaagaatctgtgaacaacgacatctcctcctggacaaagggcagaagcggagaagctctgagcctcctgaagaaaagattctcccatagacccgtgcaggagaagttcgtgtgcctgaactgcggcttcgagacacacgcagccgagcaagccgccctgaacatcgccagatcctggctgttcctgcggagccaggagtacaagaaataccagacaaacaagacaaccggcaacaccgataagagagccttcgtcgagacctggcagtccttttaccggaagaagcttaaggaggtgtggaaacctgccgtgcggtctggcggatctggcggaggctccaccagccccaagaaaaagagaaaagtctaagctgccttctgcggggcttgccttctggccatgcccttcttctctcccttgcacctgtacctcttggtctttgaataaagcctgagtaggaaggctagcaaaaaaaaaaaaaaaaaaaaaaaaaaaaaaaaaaaaaaaaaaaaaaaaaaaaaaaaaaaaaaaaaaaaaaaaaaaaaaaagcccagccggctccccaacctctaccgaggagggcacctctgagtccgccacccccgagagcggccctggcacctccaccgagcccagcgagggcagcgcacccggcagccctgccggcagccccacctccacagaggagggaaccagcaccgagcccagcgaaggcagcgccccaggcaccagcaccgagcctagtgagcaggagattaaacggatcaacaagatcagaagaagacttgtgaaagacagcaacaccaagaaggccggcaagacaggccccatgaaaaccctgctggttagagtgatgacacccgatctgagagagcggctggaaaacctgagaaagaagcctgaaaatatcccccagcccatcagcaatacatctagagccaacctgaataagctgctgaccgattacaccgaaatgaagaaggcgatcctgcatgtgtactgggaagagttccagaaggaccctgtgggcctgatgagccgggtggcccagcctgccagcaagaagatcgatcagaacaagctgaaacctgagatggacgagaagggcaacctgaccaccgccggctttgcctgctctcagtgtggccagcccctgttcgtgtacaagctggagcaggtgtctgagaagggcaaggcttacaccaactacttcggacggtgcaatgtggccgagcacgaaaagctgatcctgctggcccagctgaagcccgagaaggatagcgacgaagccgtgacatatagcctgggaaagtttgggcagagggccctggatttctacagcattcatgtgaccaaggagtccacccaccccgtgaagcccctggcccagatcgccggaaacagatacgcctccggacctgtgggaaaggccctgagcgacgcatgtatgggcacaatcgcctccttcctgtctaagtaccaggacatcatcatcgaacaccagaaggtggtgaagggcaaccagaagagactggagagcctgcgggagctggccggcaaggaaaacctggaataccctagcgtgaccctgccacctcagcctcacaccaaggagggcgttgatgcctacaacgaagtgatcgcccgggtgcgaatgtgggtgaacctgaacctgtggcagaagctgaagctaagcagagatgatgccaagcctctgctgagactgaagggattcccttcctttcctctggtcgagagacaggccaacgaagtggactggtgggacatggtgtgtaacgtgaagaagctgatcaacgagaaaaaggaggatggcaaggtgttttggcagaatctggctggctacaagagacaggaagccctgagaccatacctgagcagcgaggaagatcggaagaagggaaagaaattcgctcggtaccagctgggcgacctgctgctgcacctggaaaagaagcacggcgaggactggggaaaggtgtacgacgaggcctgggagcggattgacaagaaagtggaaggcctgagcaagcacatcaagctggaagaggaacggagaagcgaggacgcccagagcaaggccgccctgaccgactggctgcgggctaaggccagcttcgtgatcgagggcctgaaggaggccgacaaggacgagttctgcagatgcgagctgaagctgcagaagtggtacggggacctgcggggaaagcccttcgccatcgaagccgagaacagcatcctggacatcagcggcttcagcaagcagtacaactgtgccttcatctggcagaaggacggcgtgaagaagctgaacctgtacctgatcatcaactacttcaagggcggcaagctgcggttcaagaagatcaaacctgaagccttcgaagccaacagattctacaccgtgatcaacaaaaagagcggcgagatcgtgcccatggaggtgaacttcaacttcgacgaccccaacctgatcatcctgcctctggcctttggcaagagacagggcagagaattcatctggaacgacctgctgtccctggaaaccggcagcctgaagctggccaacggaagagtgatcgagaagacactgtacaacagaagaacccggcaggatgagcctgccctgttcgtggccctgaccttcgagcggcgggaggtcctggactcctccaatatcaaaccaatgaacctgatcggcgtggcaagaggcgaaaacatccccgccgtgatcgccctgaccgaccccgagggctgcccactgagccggtttaaggatagcctgggaaacccaacccacatcctgagaatcggcgagagctataaggagaagcagcggaccatccaggccaagaaggaggtggagcagcggagagccggcggctacagccggaagtacgccagcaaagccaagaatctggcagacgatatggtgagaaacaccgctagagatctgctgtactacgccgtgacccaggatgccatgctgatcttcgccaacctgagccggggcttcggccggcagggcaagcggaccttcatggccgagagacagtacacacggatggaggactggctgaccgccaagctggcctacgagggcctgagcaagacctacctgtccaagacactggcccagtacacctccaagacatgcagcaactgtgggtttaccatcaccagcgccgactacgacagggtgctggagaagctgaagaagacagcaacaggctggatgaccacaattaacggcaaggagctgaaggtggagggccagattacctactacaacagatacaagagacagaacgtagtcaaggacctgtccgtcgagctggatagactgagcgaagaatctgtgaacaacgacatctcctcctggacaaagggcagaagcggagaagctctgagcctcctgaagaaaagattctcccatagacccgtgcaggagaagttcgtgtgcctgaactgcggcttcgagacacacgcagccgagcaagccgccctgaacatcgccagatcctggctgttcctgcggagccaggagtacaagaaataccagacaaacaagacaaccggcaacaccgataagagagccttcgtcgagacctggcagtccttttaccggaagaagcttaaggaggtgtggaaacctgccgtgcggtctggcggatctggcggaggctccaccagccccaagaaaaagagaaaagtctaagctgccttctgcggggcttgccttctggccatgcccttcttctctcccttgcacctgtacctcttggtctttgaataaagcctgagtaggaaggctagcaaaaaaaaaaaaaaaaaaaaaaaaaaaaaaaaaaaaaaaaaaaaaaaaaaaaaaaaaaaaaaaaaaaaaaaaaaaaaaaa

SEQ ID NO: 10135 - RNA, 8784 nt, synthetic construct
  source 1..8784: mol_type = other RNA
aggaaataagagagaaaagaagagtaagaagaaatataagagccaccatggcccctaagaagaagcgtaaagtgagccggatgaaccacgaccaggagttcgacccccctaaggtgtaccctcccgtccccgccgagaagagaaagcccatccgggtcctgagcctgttcgatggcatcgccaccggtctgctggtgctgaaggacctgggcatccaggtggataggtacattgcctccgaggtgtgcgaggactccatcaccgtgggaatggtgcgtcatcagggcaagatcatgtacgtgggcgacgtgcggagcgtgacacagaagcatatccaggagtggggccctttcgacctggtgatcggcggcagcccttgcaatgacctgagcatcgtgaacccagcccggaagggcctgtacgagggaaccggcagactgttcttcgagttttacagactgctgcacgacgcccggcctaaggaaggcgacgaccggcccttcttttggctgttcgagaatgtggtggccatgggagtcagcgacaagcgggatattagccggttcctggagagcaaccccgtgatgatcgatgccaaggaagtgagcgccgcccaccgggccagatacttctggggcaatctgcctggcatgaacagacccctggccagcaccgtgaacgacaagctggagctgcaggagtgcctggagcacggccggatcgccaagttcagcaaggtgagaaccatcaccacccgaagcaacagcatcaaacaaggcaaggaccagcactttcctgtgttcatgaacgagaaggaggacatcctgtggtgtaccgagatggagagagtgttcgggttcccagtccactacacagatgtcagcaacatgtctagactggccagacagagactgctgggaagaagctggtccgtccctgtgatcagacacctgttcgcccctctgaaggagtacttcgcctgcgtgagcagcggcaacagcaacgccaacagccggggccccagcttctctagcggcctggtgccactgtccctgagagggagccacatgggccccatggagatctacaaaaccgtgagcgcctggaagcggcagcctgtgcgcgtgctgagcctgtttcggaatatcgataaagtcctgaaaagcctgggattcctggagagcggctctggctccggcggtggcaccctgaagtacgtggaggatgtgacaaacgtggtcagacgggatgtggagaagtggggccccttcgatctggtgtacggcagcacccaacccctgggcagctcttgtgaccggtgccctggctggtacatgtttcagttccaccggatcctgcagtacgccctgccgagacaggagtcccagcggccattcttttggattttcatggacaacttgctgctgaccgaggatgaccaggaaactaccactcggttcctgcagaccgaagccgtgaccctgcaggacgtgagaggccgggactaccagaacgccatgcgggtgtggtccaacatccctggactgaaaagcaagcacgcacctctgacccctaaagaagaggagtacctgcaggcccaggtgcggagcagaagcaagctggacgcccctaaggtggatctgctggtgaagaattgcctcctgcccctgagagagtacttcaagtatttcagccagaatagtctgcccctgggaggcagcggcggcggcacccagcccgacgaggacctgcacctgcaggccgaggagacccagctggtgaaggagagcgtgaccttcaaggacgtggccatcgacttcaccctggaggagtggagactgatggaccccacccagagaaacctgcacaaggacgtgatgctggagaactacagaaacctggtgagcctgggcctggccgtgagcaagcccgacatgatcagccacctggagaacggcaagggcccctggggcggcccaagcagcggcgcccctcctcccagcggcggcaggcggcccaagcagcggcgcccctcctcccagcggcggcagcccagccggctccccaacctctaccgaggagggcacctctgagtccgccacccccgagagcggccctggcacctccaccgagcccagcgagggcagcgcacccggcagccctgccggcagccccacctccacagaggagggaaccagcaccgagcccagcgaaggcagcgccccaggcaccagcaccgagcctagtgagcaggagattaaacggatcaacaagatcagaagaagacttgtgaaagacagcaacaccaagaaggccggcaagacaggccccatgaaaaccctgctggttagagtgatgacacccgatctgagagagcggctggaaaacctgagaaagaagcctgaaaatatcccccagcccatcagcaatacatctagagccaacctgaataagctgctgaccgattacaccgaaatgaagaaggcgatcctgcatgtgtactgggaagagttccagaaggaccctgtgggcctgatgagccgggtggcccagcctgccagcaagaagatcgatcagaacaagctgaaacctgagatggacgagaagggcaacctgaccaccgccggctttgcctgctctcagtgtggccagcccctgttcgtgtacaagctggagcaggtgtctgagaagggcaaggcttacaccaactacttcggacggtgcaatgtggccgagcacgaaaagctgatcctgctggcccagctgaagcccgagaaggatagcgacgaagccgtgacatatagcctgggaaagtttgggcagagggccctggatttctacagcattcatgtgaccaaggagtccacccaccccgtgaagcccctggcccagatcgccggaaacagatacgcctccggacctgtgggaaaggccctgagcgacgcatgtatgggcacaatcgcctccttcctgtctaagtaccaggacatcatcatcgaacaccagaaggtggtgaagggcaaccagaagagactggagagcctgcgggagctggccggcaaggaaaacctggaataccctagcgtgaccctgccacctcagcctcacaccaaggagggcgttgatgcctacaacgaagtgatcgcccgggtgcgaatgtgggtgaacctgaacctgtggcagaagctgaagctaagcagagatgatgccaagcctctgctgagactgaagggattcccttcctttcctctggtcgagagacaggccaacgaagtggactggtgggacatggtgtgtaacgtgaagaagctgatcaacgagaaaaaggaggatggcaaggtgttttggcagaatctggctggctacaagagacaggaagccctgagaccatacctgagcagcgaggaagatcggaagaagggaaagaaattcgctcggtaccagctgggcgacctgctgctgcacctggaaaagaagcacggcgaggactggggaaaggtgtacgacgaggcctgggagcggattgacaagaaagtggaaggcctgagcaagcacatcaagctggaagaggaacggagaagcgaggacgcccagagcaaggccgccctgaccgactggctgcgggctaaggccagcttcgtgatcgagggcctgaaggaggccgacaaggacgagttctgcagatgcgagctgaagctgcagaagtggtacggggacctgcggggaaagcccttcgccatcgaagccgagaacagcatcctggacatcagcggcttcagcaagcagtacaactgtgccttcatctggcagaaggacggcgtgaagaagctgaacctgtacctgatcatcaactacttcaagggcggcaagctgcggttcaagaagatcaaacctgaagccttcgaagccaacagattctacaccgtgatcaacaaaaagagcggcgagatcgtgcccatggaggtgaacttcaacttcgacgaccccaacctgatcatcctgcctctggcctttggcaagagacagggcagagaattcatctggaacgacctgctgtccctggaaaccggcagcctgaagctggccaacggaagagtgatcgagaagacactgtacaacagaagaacccggcaggatgagcctgccctgttcgtggccctgaccttcgagcggcgggaggtcctggactcctccaatatcaaaccaatgaacctgatcggcgtggcaagaggcgaaaacatccccgccgtgatcgccctgaccgaccccgagggctgcccactgagccggtttaaggatagcctgggaaacccaacccacatcctgagaatcggcgagagctataaggagaagcagcggaccatccaggccaagaaggaggtggagcagcggagagccggcggctacagccggaagtacgccagcaaagccaagaatctggcagacgatatggtgagaaacaccgctagagatctgctgtactacgccgtgacccaggatgccatgctgatcttcgccaacctgagccggggcttcggccggcagggcaagcggaccttcatggccgagagacagtacacacggatggaggactggctgaccgccaagctggcctacgagggcctgagcaagacctacctgtccaagacactggcccagtacacctccaagacatgcagcaactgtgggtttaccatcaccagcgccgactacgacagggtgctggagaagctgaagaagacagcaacaggctggatgaccacaattaacggcaaggagctgaaggtggagggccagattacctactacaacagatacaagagacagaacgtagtcaaggacctgtccgtcgagctggatagactgagcgaagaatctgtgaacaacgacatctcctcctggacaaagggcagaagcggagaagctctgagcctcctgaagaaaagattctcccatagacccgtgcaggagaagttcgtgtgcctgaactgcggcttcgagacacacgcagccgagcaagccgccctgaacatcgccagatcctggctgttcctgcggagccaggagtacaagaaataccagacaaacaagacaaccggcaacaccgataagagagccttcgtcgagacctggcagtccttttaccggaagaagcttaaggaggtgtggaaacctgccgtgcggtctggcggatctggcggaggctccaccagccccaagaaaaagagaaaagtctaagctgccttctgcggggcttgccttctggccatgcccttcttctctcccttgcacctgtacctcttggtctttgaataaagcctgagtaggaaggctagcaaaaaaaaaaaaaaaaaaaaaaaaaaaaaaaaaaaaaaaaaaaaaaaaaaaaaaaaaaaaaaaaaaaaaaaaaaaaaaaagcccagccggctccccaacctctaccgaggagggcacctctgagtccgccacccccgagagcggccctggcacctccaccgagcccagcgagggcagcgcacccggcagccctgccggcagccccacctccacagaggagggaaccagcaccgagcccagcgaaggcagcgccccaggcaccagcaccgagcctagtgagcaggagattaaacggatcaacaagatcagaagaagacttgtgaaagacagcaacaccaagaaggccggcaagacaggccccatgaaaaccctgctggttagagtgatgacacccgatctgagagagcggctggaaaacctgagaaagaagcctgaaaatatcccccagcccatcagcaatacatctagagccaacctgaataagctgctgaccgattacaccgaaatgaagaaggcgatcctgcatgtgtactgggaagagttccagaaggaccctgtgggcctgatgagccgggtggcccagcctgccagcaagaagatcgatcagaacaagctgaaacctgagatggacgagaagggcaacctgaccaccgccggctttgcctgctctcagtgtggccagcccctgttcgtgtacaagctggagcaggtgtctgagaagggcaaggcttacaccaactacttcggacggtgcaatgtggccgagcacgaaaagctgatcctgctggcccagctgaagcccgagaaggatagcgacgaagccgtgacatatagcctgggaaagtttgggcagagggccctggatttctacagcattcatgtgaccaaggagtccacccaccccgtgaagcccctggcccagatcgccggaaacagatacgcctccggacctgtgggaaaggccctgagcgacgcatgtatgggcacaatcgcctccttcctgtctaagtaccaggacatcatcatcgaacaccagaaggtggtgaagggcaaccagaagagactggagagcctgcgggagctggccggcaaggaaaacctggaataccctagcgtgaccctgccacctcagcctcacaccaaggagggcgttgatgcctacaacgaagtgatcgcccgggtgcgaatgtgggtgaacctgaacctgtggcagaagctgaagctaagcagagatgatgccaagcctctgctgagactgaagggattcccttcctttcctctggtcgagagacaggccaacgaagtggactggtgggacatggtgtgtaacgtgaagaagctgatcaacgagaaaaaggaggatggcaaggtgttttggcagaatctggctggctacaagagacaggaagccctgagaccatacctgagcagcgaggaagatcggaagaagggaaagaaattcgctcggtaccagctgggcgacctgctgctgcacctggaaaagaagcacggcgaggactggggaaaggtgtacgacgaggcctgggagcggattgacaagaaagtggaaggcctgagcaagcacatcaagctggaagaggaacggagaagcgaggacgcccagagcaaggccgccctgaccgactggctgcgggctaaggccagcttcgtgatcgagggcctgaaggaggccgacaaggacgagttctgcagatgcgagctgaagctgcagaagtggtacggggacctgcggggaaagcccttcgccatcgaagccgagaacagcatcctggacatcagcggcttcagcaagcagtacaactgtgccttcatctggcagaaggacggcgtgaagaagctgaacctgtacctgatcatcaactacttcaagggcggcaagctgcggttcaagaagatcaaacctgaagccttcgaagccaacagattctacaccgtgatcaacaaaaagagcggcgagatcgtgcccatggaggtgaacttcaacttcgacgaccccaacctgatcatcctgcctctggcctttggcaagagacagggcagagaattcatctggaacgacctgctgtccctggaaaccggcagcctgaagctggccaacggaagagtgatcgagaagacactgtacaacagaagaacccggcaggatgagcctgccctgttcgtggccctgaccttcgagcggcgggaggtcctggactcctccaatatcaaaccaatgaacctgatcggcgtggcaagaggcgaaaacatccccgccgtgatcgccctgaccgaccccgagggctgcccactgagccggtttaaggatagcctgggaaacccaacccacatcctgagaatcggcgagagctataaggagaagcagcggaccatccaggccaagaaggaggtggagcagcggagagccggcggctacagccggaagtacgccagcaaagccaagaatctggcagacgatatggtgagaaacaccgctagagatctgctgtactacgccgtgacccaggatgccatgctgatcttcgccaacctgagccggggcttcggccggcagggcaagcggaccttcatggccgagagacagtacacacggatggaggactggctgaccgccaagctggcctacgagggcctgagcaagacctacctgtccaagacactggcccagtacacctccaagacatgcagcaactgtgggtttaccatcaccagcgccgactacgacagggtgctggagaagctgaagaagacagcaacaggctggatgaccacaattaacggcaaggagctgaaggtggagggccagattacctactacaacagatacaagagacagaacgtagtcaaggacctgtccgtcgagctggatagactgagcgaagaatctgtgaacaacgacatctcctcctggacaaagggcagaagcggagaagctctgagcctcctgaagaaaagattctcccatagacccgtgcaggagaagttcgtgtgcctgaactgcggcttcgagacacacgcagccgagcaagccgccctgaacatcgccagatcctggctgttcctgcggagccaggagtacaagaaataccagacaaacaagacaaccggcaacaccgataagagagccttcgtcgagacctggcagtccttttaccggaagaagcttaaggaggtgtggaaacctgccgtgcggtctggcggatctggcggaggctccaccagccccaagaaaaagagaaaagtctaagctgccttctgcggggcttgccttctggccatgcccttcttctctcccttgcacctgtacctcttggtctttgaataaagcctgagtaggaaggctagcaaaaaaaaaaaaaaaaaaaaaaaaaaaaaaaaaaaaaaaaaaaaaaaaaaaaaaaaaaaaaaaaaaaaaaaaaaaaaaaa

SEQ ID NO: 10136 - RNA, 8787 nt, synthetic construct
  source 1..8787: mol_type = other RNA
aggaaataagagagaaaagaagagtaagaagaaatataagagccaccatggcccctaagaagaagcgtaaagtgagccggatgaaccacgaccaggagttcgacccccctaaggtgtaccctcccgtccccgccgagaagagaaagcccatccgggtcctgagcctgttcgatggcatcgccaccggtctgctggtgctgaaggacctgggcatccaggtggataggtacattgcctccgaggtgtgcgaggactccatcaccgtgggaatggtgcgtcatcagggcaagatcatgtacgtgggcgacgtgcggagcgtgacacagaagcatatccaggagtggggccctttcgacctggtgatcggcggcagcccttgcaatgacctgagcatcgtgaacccagcccggaagggcctgtacgagggaaccggcagactgttcttcgagttttacagactgctgcacgacgcccggcctaaggaaggcgacgaccggcccttcttttggctgttcgagaatgtggtggccatgggagtcagcgacaagcgggatattagccggttcctggagagcaaccccgtgatgatcgatgccaaggaagtgagcgccgcccaccgggccagatacttctggggcaatctgcctggcatgaacagacccctggccagcaccgtgaacgacaagctggagctgcaggagtgcctggagcacggccggatcgccaagttcagcaaggtgagaaccatcaccacccgaagcaacagcatcaaacaaggcaaggaccagcactttcctgtgttcatgaacgagaaggaggacatcctgtggtgtaccgagatggagagagtgttcgggttcccagtccactacacagatgtcagcaacatgtctagactggccagacagagactgctgggaagaagctggtccgtccctgtgatcagacacctgttcgcccctctgaaggagtacttcgcctgcgtgagcagcggcaacagcaacgccaacagccggggccccagcttctctagcggcctggtgccactgtccctgagagggagccacatgggccccatggagatctacaaaaccgtgagcgcctggaagcggcagcctgtgcgcgtgctgagcctgtttcggaatatcgataaagtcctgaaaagcctgggattcctggagagcggctctggctccggcggtggcaccctgaagtacgtggaggatgtgacaaacgtggtcagacgggatgtggagaagtggggccccttcgatctggtgtacggcagcacccaacccctgggcagctcttgtgaccggtgccctggctggtacatgtttcagttccaccggatcctgcagtacgccctgccgagacaggagtcccagcggccattcttttggattttcatggacaacttgctgctgaccgaggatgaccaggaaactaccactcggttcctgcagaccgaagccgtgaccctgcaggacgtgagaggccgggactaccagaacgccatgcgggtgtggtccaacatccctggactgaaaagcaagcacgcacctctgacccctaaagaagaggagtacctgcaggcccaggtgcggagcagaagcaagctggacgcccctaaggtggatctgctggtgaagaattgcctcctgcccctgagagagtacttcaagtatttcagccagaatagtctgcccctgggaggcagcggcggcggcagctacaggagcaagaccatggcccagggcagcctgaccttcagcgacgtggccatcggcttcagccagcaggagtgggagtgcctggaccccgtgcagaagaccctgtacagggacgtgatgatggagaactacggcaacctggtgagcctgggccacagcatcagcaagcccaacgtgatcaccctgctggagcagggcaaggagccctggatcgtggtgagggaggagaccaggagctggggcggcccaagcagcggcgcccctcctcccagcggcggcaggcggcccaagcagcggcgcccctcctcccagcggcggcagcccagccggctccccaacctctaccgaggagggcacctctgagtccgccacccccgagagcggccctggcacctccaccgagcccagcgagggcagcgcacccggcagccctgccggcagccccacctccacagaggagggaaccagcaccgagcccagcgaaggcagcgccccaggcaccagcaccgagcctagtgagcaggagattaaacggatcaacaagatcagaagaagacttgtgaaagacagcaacaccaagaaggccggcaagacaggccccatgaaaaccctgctggttagagtgatgacacccgatctgagagagcggctggaaaacctgagaaagaagcctgaaaatatcccccagcccatcagcaatacatctagagccaacctgaataagctgctgaccgattacaccgaaatgaagaaggcgatcctgcatgtgtactgggaagagttccagaaggaccctgtgggcctgatgagccgggtggcccagcctgccagcaagaagatcgatcagaacaagctgaaacctgagatggacgagaagggcaacctgaccaccgccggctttgcctgctctcagtgtggccagcccctgttcgtgtacaagctggagcaggtgtctgagaagggcaaggcttacaccaactacttcggacggtgcaatgtggccgagcacgaaaagctgatcctgctggcccagctgaagcccgagaaggatagcgacgaagccgtgacatatagcctgggaaagtttgggcagagggccctggatttctacagcattcatgtgaccaaggagtccacccaccccgtgaagcccctggcccagatcgccggaaacagatacgcctccggacctgtgggaaaggccctgagcgacgcatgtatgggcacaatcgcctccttcctgtctaagtaccaggacatcatcatcgaacaccagaaggtggtgaagggcaaccagaagagactggagagcctgcgggagctggccggcaaggaaaacctggaataccctagcgtgaccctgccacctcagcctcacaccaaggagggcgttgatgcctacaacgaagtgatcgcccgggtgcgaatgtgggtgaacctgaacctgtggcagaagctgaagctaagcagagatgatgccaagcctctgctgagactgaagggattcccttcctttcctctggtcgagagacaggccaacgaagtggactggtgggacatggtgtgtaacgtgaagaagctgatcaacgagaaaaaggaggatggcaaggtgttttggcagaatctggctggctacaagagacaggaagccctgagaccatacctgagcagcgaggaagatcggaagaagggaaagaaattcgctcggtaccagctgggcgacctgctgctgcacctggaaaagaagcacggcgaggactggggaaaggtgtacgacgaggcctgggagcggattgacaagaaagtggaaggcctgagcaagcacatcaagctggaagaggaacggagaagcgaggacgcccagagcaaggccgccctgaccgactggctgcgggctaaggccagcttcgtgatcgagggcctgaaggaggccgacaaggacgagttctgcagatgcgagctgaagctgcagaagtggtacggggacctgcggggaaagcccttcgccatcgaagccgagaacagcatcctggacatcagcggcttcagcaagcagtacaactgtgccttcatctggcagaaggacggcgtgaagaagctgaacctgtacctgatcatcaactacttcaagggcggcaagctgcggttcaagaagatcaaacctgaagccttcgaagccaacagattctacaccgtgatcaacaaaaagagcggcgagatcgtgcccatggaggtgaacttcaacttcgacgaccccaacctgatcatcctgcctctggcctttggcaagagacagggcagagaattcatctggaacgacctgctgtccctggaaaccggcagcctgaagctggccaacggaagagtgatcgagaagacactgtacaacagaagaacccggcaggatgagcctgccctgttcgtggccctgaccttcgagcggcgggaggtcctggactcctccaatatcaaaccaatgaacctgatcggcgtggcaagaggcgaaaacatccccgccgtgatcgccctgaccgaccccgagggctgcccactgagccggtttaaggatagcctgggaaacccaacccacatcctgagaatcggcgagagctataaggagaagcagcggaccatccaggccaagaaggaggtggagcagcggagagccggcggctacagccggaagtacgccagcaaagccaagaatctggcagacgatatggtgagaaacaccgctagagatctgctgtactacgccgtgacccaggatgccatgctgatcttcgccaacctgagccggggcttcggccggcagggcaagcggaccttcatggccgagagacagtacacacggatggaggactggctgaccgccaagctggcctacgagggcctgagcaagacctacctgtccaagacactggcccagtacacctccaagacatgcagcaactgtgggtttaccatcaccagcgccgactacgacagggtgctggagaagctgaagaagacagcaacaggctggatgaccacaattaacggcaaggagctgaaggtggagggccagattacctactacaacagatacaagagacagaacgtagtcaaggacctgtccgtcgagctggatagactgagcgaagaatctgtgaacaacgacatctcctcctggacaaagggcagaagcggagaagctctgagcctcctgaagaaaagattctcccatagacccgtgcaggagaagttcgtgtgcctgaactgcggcttcgagacacacgcagccgagcaagccgccctgaacatcgccagatcctggctgttcctgcggagccaggagtacaagaaataccagacaaacaagacaaccggcaacaccgataagagagccttcgtcgagacctggcagtccttttaccggaagaagcttaaggaggtgtggaaacctgccgtgcggtctggcggatctggcggaggctccaccagccccaagaaaaagagaaaagtctaagctgccttctgcggggcttgccttctggccatgcccttcttctctcccttgcacctgtacctcttggtctttgaataaagcctgagtaggaaggctagcaaaaaaaaaaaaaaaaaaaaaaaaaaaaaaaaaaaaaaaaaaaaaaaaaaaaaaaaaaaaaaaaaaaaaaaaaaaaaaaagcccagccggctccccaacctctaccgaggagggcacctctgagtccgccacccccgagagcggccctggcacctccaccgagcccagcgagggcagcgcacccggcagccctgccggcagccccacctccacagaggagggaaccagcaccgagcccagcgaaggcagcgccccaggcaccagcaccgagcctagtgagcaggagattaaacggatcaacaagatcagaagaagacttgtgaaagacagcaacaccaagaaggccggcaagacaggccccatgaaaaccctgctggttagagtgatgacacccgatctgagagagcggctggaaaacctgagaaagaagcctgaaaatatcccccagcccatcagcaatacatctagagccaacctgaataagctgctgaccgattacaccgaaatgaagaaggcgatcctgcatgtgtactgggaagagttccagaaggaccctgtgggcctgatgagccgggtggcccagcctgccagcaagaagatcgatcagaacaagctgaaacctgagatggacgagaagggcaacctgaccaccgccggctttgcctgctctcagtgtggccagcccctgttcgtgtacaagctggagcaggtgtctgagaagggcaaggcttacaccaactacttcggacggtgcaatgtggccgagcacgaaaagctgatcctgctggcccagctgaagcccgagaaggatagcgacgaagccgtgacatatagcctgggaaagtttgggcagagggccctggatttctacagcattcatgtgaccaaggagtccacccaccccgtgaagcccctggcccagatcgccggaaacagatacgcctccggacctgtgggaaaggccctgagcgacgcatgtatgggcacaatcgcctccttcctgtctaagtaccaggacatcatcatcgaacaccagaaggtggtgaagggcaaccagaagagactggagagcctgcgggagctggccggcaaggaaaacctggaataccctagcgtgaccctgccacctcagcctcacaccaaggagggcgttgatgcctacaacgaagtgatcgcccgggtgcgaatgtgggtgaacctgaacctgtggcagaagctgaagctaagcagagatgatgccaagcctctgctgagactgaagggattcccttcctttcctctggtcgagagacaggccaacgaagtggactggtgggacatggtgtgtaacgtgaagaagctgatcaacgagaaaaaggaggatggcaaggtgttttggcagaatctggctggctacaagagacaggaagccctgagaccatacctgagcagcgaggaagatcggaagaagggaaagaaattcgctcggtaccagctgggcgacctgctgctgcacctggaaaagaagcacggcgaggactggggaaaggtgtacgacgaggcctgggagcggattgacaagaaagtggaaggcctgagcaagcacatcaagctggaagaggaacggagaagcgaggacgcccagagcaaggccgccctgaccgactggctgcgggctaaggccagcttcgtgatcgagggcctgaaggaggccgacaaggacgagttctgcagatgcgagctgaagctgcagaagtggtacggggacctgcggggaaagcccttcgccatcgaagccgagaacagcatcctggacatcagcggcttcagcaagcagtacaactgtgccttcatctggcagaaggacggcgtgaagaagctgaacctgtacctgatcatcaactacttcaagggcggcaagctgcggttcaagaagatcaaacctgaagccttcgaagccaacagattctacaccgtgatcaacaaaaagagcggcgagatcgtgcccatggaggtgaacttcaacttcgacgaccccaacctgatcatcctgcctctggcctttggcaagagacagggcagagaattcatctggaacgacctgctgtccctggaaaccggcagcctgaagctggccaacggaagagtgatcgagaagacactgtacaacagaagaacccggcaggatgagcctgccctgttcgtggccctgaccttcgagcggcgggaggtcctggactcctccaatatcaaaccaatgaacctgatcggcgtggcaagaggcgaaaacatccccgccgtgatcgccctgaccgaccccgagggctgcccactgagccggtttaaggatagcctgggaaacccaacccacatcctgagaatcggcgagagctataaggagaagcagcggaccatccaggccaagaaggaggtggagcagcggagagccggcggctacagccggaagtacgccagcaaagccaagaatctggcagacgatatggtgagaaacaccgctagagatctgctgtactacgccgtgacccaggatgccatgctgatcttcgccaacctgagccggggcttcggccggcagggcaagcggaccttcatggccgagagacagtacacacggatggaggactggctgaccgccaagctggcctacgagggcctgagcaagacctacctgtccaagacactggcccagtacacctccaagacatgcagcaactgtgggtttaccatcaccagcgccgactacgacagggtgctggagaagctgaagaagacagcaacaggctggatgaccacaattaacggcaaggagctgaaggtggagggccagattacctactacaacagatacaagagacagaacgtagtcaaggacctgtccgtcgagctggatagactgagcgaagaatctgtgaacaacgacatctcctcctggacaaagggcagaagcggagaagctctgagcctcctgaagaaaagattctcccatagacccgtgcaggagaagttcgtgtgcctgaactgcggcttcgagacacacgcagccgagcaagccgccctgaacatcgccagatcctggctgttcctgcggagccaggagtacaagaaataccagacaaacaagacaaccggcaacaccgataagagagccttcgtcgagacctggcagtccttttaccggaagaagcttaaggaggtgtggaaacctgccgtgcggtctggcggatctggcggaggctccaccagccccaagaaaaagagaaaagtctaagctgccttctgcggggcttgccttctggccatgcccttcttctctcccttgcacctgtacctcttggtctttgaataaagcctgagtaggaaggctagcaaaaaaaaaaaaaaaaaaaaaaaaaaaaaaaaaaaaaaaaaaaaaaaaaaaaaaaaaaaaaaaaaaaaaaaaaaaaaaaa

SEQ ID NO: 10137 - RNA, 8787 nt, synthetic construct
  source 1..8787: mol_type = other RNA
aggaaataagagagaaaagaagagtaagaagaaatataagagccaccatggcccctaagaagaagcgtaaagtgagccggatgaaccacgaccaggagttcgacccccctaaggtgtaccctcccgtccccgccgagaagagaaagcccatccgggtcctgagcctgttcgatggcatcgccaccggtctgctggtgctgaaggacctgggcatccaggtggataggtacattgcctccgaggtgtgcgaggactccatcaccgtgggaatggtgcgtcatcagggcaagatcatgtacgtgggcgacgtgcggagcgtgacacagaagcatatccaggagtggggccctttcgacctggtgatcggcggcagcccttgcaatgacctgagcatcgtgaacccagcccggaagggcctgtacgagggaaccggcagactgttcttcgagttttacagactgctgcacgacgcccggcctaaggaaggcgacgaccggcccttcttttggctgttcgagaatgtggtggccatgggagtcagcgacaagcgggatattagccggttcctggagagcaaccccgtgatgatcgatgccaaggaagtgagcgccgcccaccgggccagatacttctggggcaatctgcctggcatgaacagacccctggccagcaccgtgaacgacaagctggagctgcaggagtgcctggagcacggccggatcgccaagttcagcaaggtgagaaccatcaccacccgaagcaacagcatcaaacaaggcaaggaccagcactttcctgtgttcatgaacgagaaggaggacatcctgtggtgtaccgagatggagagagtgttcgggttcccagtccactacacagatgtcagcaacatgtctagactggccagacagagactgctgggaagaagctggtccgtccctgtgatcagacacctgttcgcccctctgaaggagtacttcgcctgcgtgagcagcggcaacagcaacgccaacagccggggccccagcttctctagcggcctggtgccactgtccctgagagggagccacatgggccccatggagatctacaaaaccgtgagcgcctggaagcggcagcctgtgcgcgtgctgagcctgtttcggaatatcgataaagtcctgaaaagcctgggattcctggagagcggctctggctccggcggtggcaccctgaagtacgtggaggatgtgacaaacgtggtcagacgggatgtggagaagtggggccccttcgatctggtgtacggcagcacccaacccctgggcagctcttgtgaccggtgccctggctggtacatgtttcagttccaccggatcctgcagtacgccctgccgagacaggagtcccagcggccattcttttggattttcatggacaacttgctgctgaccgaggatgaccaggaaactaccactcggttcctgcagaccgaagccgtgaccctgcaggacgtgagaggccgggactaccagaacgccatgcgggtgtggtccaacatccctggactgaaaagcaagcacgcacctctgacccctaaagaagaggagtacctgcaggcccaggtgcggagcagaagcaagctggacgcccctaaggtggatctgctggtgaagaattgcctcctgcccctgagagagtacttcaagtatttcagccagaatagtctgcccctgggaggcagcggcggcggcgaggaggtgcccgtggtgttcgaggacgtggccgtgtacttcaccagggaggagtggggcaccctggacaagaggcagaaggagctgtacagggacgtgatgaggatgaactacgagctgctggccagcctgggccccgccgccgccaagcccgccctgatcagcaagctggagaggagggccgccccctggatccaggaccccaacggccccaagtggggcaagggcaggccccccggcaagggcggcccaagcagcggcgcccctcctcccagcggcggcaggcggcccaagcagcggcgcccctcctcccagcggcggcagcccagccggctccccaacctctaccgaggagggcacctctgagtccgccacccccgagagcggccctggcacctccaccgagcccagcgagggcagcgcacccggcagccctgccggcagccccacctccacagaggagggaaccagcaccgagcccagcgaaggcagcgccccaggcaccagcaccgagcctagtgagcaggagattaaacggatcaacaagatcagaagaagacttgtgaaagacagcaacaccaagaaggccggcaagacaggccccatgaaaaccctgctggttagagtgatgacacccgatctgagagagcggctggaaaacctgagaaagaagcctgaaaatatcccccagcccatcagcaatacatctagagccaacctgaataagctgctgaccgattacaccgaaatgaagaaggcgatcctgcatgtgtactgggaagagttccagaaggaccctgtgggcctgatgagccgggtggcccagcctgccagcaagaagatcgatcagaacaagctgaaacctgagatggacgagaagggcaacctgaccaccgccggctttgcctgctctcagtgtggccagcccctgttcgtgtacaagctggagcaggtgtctgagaagggcaaggcttacaccaactacttcggacggtgcaatgtggccgagcacgaaaagctgatcctgctggcccagctgaagcccgagaaggatagcgacgaagccgtgacatatagcctgggaaagtttgggcagagggccctggatttctacagcattcatgtgaccaaggagtccacccaccccgtgaagcccctggcccagatcgccggaaacagatacgcctccggacctgtgggaaaggccctgagcgacgcatgtatgggcacaatcgcctccttcctgtctaagtaccaggacatcatcatcgaacaccagaaggtggtgaagggcaaccagaagagactggagagcctgcgggagctggccggcaaggaaaacctggaataccctagcgtgaccctgccacctcagcctcacaccaaggagggcgttgatgcctacaacgaagtgatcgcccgggtgcgaatgtgggtgaacctgaacctgtggcagaagctgaagctaagcagagatgatgccaagcctctgctgagactgaagggattcccttcctttcctctggtcgagagacaggccaacgaagtggactggtgggacatggtgtgtaacgtgaagaagctgatcaacgagaaaaaggaggatggcaaggtgttttggcagaatctggctggctacaagagacaggaagccctgagaccatacctgagcagcgaggaagatcggaagaagggaaagaaattcgctcggtaccagctgggcgacctgctgctgcacctggaaaagaagcacggcgaggactggggaaaggtgtacgacgaggcctgggagcggattgacaagaaagtggaaggcctgagcaagcacatcaagctggaagaggaacggagaagcgaggacgcccagagcaaggccgccctgaccgactggctgcgggctaaggccagcttcgtgatcgagggcctgaaggaggccgacaaggacgagttctgcagatgcgagctgaagctgcagaagtggtacggggacctgcggggaaagcccttcgccatcgaagccgagaacagcatcctggacatcagcggcttcagcaagcagtacaactgtgccttcatctggcagaaggacggcgtgaagaagctgaacctgtacctgatcatcaactacttcaagggcggcaagctgcggttcaagaagatcaaacctgaagccttcgaagccaacagattctacaccgtgatcaacaaaaagagcggcgagatcgtgcccatggaggtgaacttcaacttcgacgaccccaacctgatcatcctgcctctggcctttggcaagagacagggcagagaattcatctggaacgacctgctgtccctggaaaccggcagcctgaagctggccaacggaagagtgatcgagaagacactgtacaacagaagaacccggcaggatgagcctgccctgttcgtggccctgaccttcgagcggcgggaggtcctggactcctccaatatcaaaccaatgaacctgatcggcgtggcaagaggcgaaaacatccccgccgtgatcgccctgaccgaccccgagggctgcccactgagccggtttaaggatagcctgggaaacccaacccacatcctgagaatcggcgagagctataaggagaagcagcggaccatccaggccaagaaggaggtggagcagcggagagccggcggctacagccggaagtacgccagcaaagccaagaatctggcagacgatatggtgagaaacaccgctagagatctgctgtactacgccgtgacccaggatgccatgctgatcttcgccaacctgagccggggcttcggccggcagggcaagcggaccttcatggccgagagacagtacacacggatggaggactggctgaccgccaagctggcctacgagggcctgagcaagacctacctgtccaagacactggcccagtacacctccaagacatgcagcaactgtgggtttaccatcaccagcgccgactacgacagggtgctggagaagctgaagaagacagcaacaggctggatgaccacaattaacggcaaggagctgaaggtggagggccagattacctactacaacagatacaagagacagaacgtagtcaaggacctgtccgtcgagctggatagactgagcgaagaatctgtgaacaacgacatctcctcctggacaaagggcagaagcggagaagctctgagcctcctgaagaaaagattctcccatagacccgtgcaggagaagttcgtgtgcctgaactgcggcttcgagacacacgcagccgagcaagccgccctgaacatcgccagatcctggctgttcctgcggagccaggagtacaagaaataccagacaaacaagacaaccggcaacaccgataagagagccttcgtcgagacctggcagtccttttaccggaagaagcttaaggaggtgtggaaacctgccgtgcggtctggcggatctggcggaggctccaccagccccaagaaaaagagaaaagtctaagctgccttctgcggggcttgccttctggccatgcccttcttctctcccttgcacctgtacctcttggtctttgaataaagcctgagtaggaaggctagcaaaaaaaaaaaaaaaaaaaaaaaaaaaaaaaaaaaaaaaaaaaaaaaaaaaaaaaaaaaaaaaaaaaaaaaaaaaaaaaagcccagccggctccccaacctctaccgaggagggcacctctgagtccgccacccccgagagcggccctggcacctccaccgagcccagcgagggcagcgcacccggcagccctgccggcagccccacctccacagaggagggaaccagcaccgagcccagcgaaggcagcgccccaggcaccagcaccgagcctagtgagcaggagattaaacggatcaacaagatcagaagaagacttgtgaaagacagcaacaccaagaaggccggcaagacaggccccatgaaaaccctgctggttagagtgatgacacccgatctgagagagcggctggaaaacctgagaaagaagcctgaaaatatcccccagcccatcagcaatacatctagagccaacctgaataagctgctgaccgattacaccgaaatgaagaaggcgatcctgcatgtgtactgggaagagttccagaaggaccctgtgggcctgatgagccgggtggcccagcctgccagcaagaagatcgatcagaacaagctgaaacctgagatggacgagaagggcaacctgaccaccgccggctttgcctgctctcagtgtggccagcccctgttcgtgtacaagctggagcaggtgtctgagaagggcaaggcttacaccaactacttcggacggtgcaatgtggccgagcacgaaaagctgatcctgctggcccagctgaagcccgagaaggatagcgacgaagccgtgacatatagcctgggaaagtttgggcagagggccctggatttctacagcattcatgtgaccaaggagtccacccaccccgtgaagcccctggcccagatcgccggaaacagatacgcctccggacctgtgggaaaggccctgagcgacgcatgtatgggcacaatcgcctccttcctgtctaagtaccaggacatcatcatcgaacaccagaaggtggtgaagggcaaccagaagagactggagagcctgcgggagctggccggcaaggaaaacctggaataccctagcgtgaccctgccacctcagcctcacaccaaggagggcgttgatgcctacaacgaagtgatcgcccgggtgcgaatgtgggtgaacctgaacctgtggcagaagctgaagctaagcagagatgatgccaagcctctgctgagactgaagggattcccttcctttcctctggtcgagagacaggccaacgaagtggactggtgggacatggtgtgtaacgtgaagaagctgatcaacgagaaaaaggaggatggcaaggtgttttggcagaatctggctggctacaagagacaggaagccctgagaccatacctgagcagcgaggaagatcggaagaagggaaagaaattcgctcggtaccagctgggcgacctgctgctgcacctggaaaagaagcacggcgaggactggggaaaggtgtacgacgaggcctgggagcggattgacaagaaagtggaaggcctgagcaagcacatcaagctggaagaggaacggagaagcgaggacgcccagagcaaggccgccctgaccgactggctgcgggctaaggccagcttcgtgatcgagggcctgaaggaggccgacaaggacgagttctgcagatgcgagctgaagctgcagaagtggtacggggacctgcggggaaagcccttcgccatcgaagccgagaacagcatcctggacatcagcggcttcagcaagcagtacaactgtgccttcatctggcagaaggacggcgtgaagaagctgaacctgtacctgatcatcaactacttcaagggcggcaagctgcggttcaagaagatcaaacctgaagccttcgaagccaacagattctacaccgtgatcaacaaaaagagcggcgagatcgtgcccatggaggtgaacttcaacttcgacgaccccaacctgatcatcctgcctctggcctttggcaagagacagggcagagaattcatctggaacgacctgctgtccctggaaaccggcagcctgaagctggccaacggaagagtgatcgagaagacactgtacaacagaagaacccggcaggatgagcctgccctgttcgtggccctgaccttcgagcggcgggaggtcctggactcctccaatatcaaaccaatgaacctgatcggcgtggcaagaggcgaaaacatccccgccgtgatcgccctgaccgaccccgagggctgcccactgagccggtttaaggatagcctgggaaacccaacccacatcctgagaatcggcgagagctataaggagaagcagcggaccatccaggccaagaaggaggtggagcagcggagagccggcggctacagccggaagtacgccagcaaagccaagaatctggcagacgatatggtgagaaacaccgctagagatctgctgtactacgccgtgacccaggatgccatgctgatcttcgccaacctgagccggggcttcggccggcagggcaagcggaccttcatggccgagagacagtacacacggatggaggactggctgaccgccaagctggcctacgagggcctgagcaagacctacctgtccaagacactggcccagtacacctccaagacatgcagcaactgtgggtttaccatcaccagcgccgactacgacagggtgctggagaagctgaagaagacagcaacaggctggatgaccacaattaacggcaaggagctgaaggtggagggccagattacctactacaacagatacaagagacagaacgtagtcaaggacctgtccgtcgagctggatagactgagcgaagaatctgtgaacaacgacatctcctcctggacaaagggcagaagcggagaagctctgagcctcctgaagaaaagattctcccatagacccgtgcaggagaagttcgtgtgcctgaactgcggcttcgagacacacgcagccgagcaagccgccctgaacatcgccagatcctggctgttcctgcggagccaggagtacaagaaataccagacaaacaagacaaccggcaacaccgataagagagccttcgtcgagacctggcagtccttttaccggaagaagcttaaggaggtgtggaaacctgccgtgcggtctggcggatctggcggaggctccaccagccccaagaaaaagagaaaagtctaagctgccttctgcggggcttgccttctggccatgcccttcttctctcccttgcacctgtacctcttggtctttgaataaagcctgagtaggaaggctagcaaaaaaaaaaaaaaaaaaaaaaaaaaaaaaaaaaaaaaaaaaaaaaaaaaaaaaaaaaaaaaaaaaaaaaaaaaaaaaaa

SEQ ID NO: 10138 - RNA, 8787 nt, synthetic construct
  source 1..8787: mol_type = other RNA
aggaaataagagagaaaagaagagtaagaagaaatataagagccaccatggcccctaagaagaagcgtaaagtgagccggatgaaccacgaccaggagttcgacccccctaaggtgtaccctcccgtccccgccgagaagagaaagcccatccgggtcctgagcctgttcgatggcatcgccaccggtctgctggtgctgaaggacctgggcatccaggtggataggtacattgcctccgaggtgtgcgaggactccatcaccgtgggaatggtgcgtcatcagggcaagatcatgtacgtgggcgacgtgcggagcgtgacacagaagcatatccaggagtggggccctttcgacctggtgatcggcggcagcccttgcaatgacctgagcatcgtgaacccagcccggaagggcctgtacgagggaaccggcagactgttcttcgagttttacagactgctgcacgacgcccggcctaaggaaggcgacgaccggcccttcttttggctgttcgagaatgtggtggccatgggagtcagcgacaagcgggatattagccggttcctggagagcaaccccgtgatgatcgatgccaaggaagtgagcgccgcccaccgggccagatacttctggggcaatctgcctggcatgaacagacccctggccagcaccgtgaacgacaagctggagctgcaggagtgcctggagcacggccggatcgccaagttcagcaaggtgagaaccatcaccacccgaagcaacagcatcaaacaaggcaaggaccagcactttcctgtgttcatgaacgagaaggaggacatcctgtggtgtaccgagatggagagagtgttcgggttcccagtccactacacagatgtcagcaacatgtctagactggccagacagagactgctgggaagaagctggtccgtccctgtgatcagacacctgttcgcccctctgaaggagtacttcgcctgcgtgagcagcggcaacagcaacgccaacagccggggccccagcttctctagcggcctggtgccactgtccctgagagggagccacatgggccccatggagatctacaaaaccgtgagcgcctggaagcggcagcctgtgcgcgtgctgagcctgtttcggaatatcgataaagtcctgaaaagcctgggattcctggagagcggctctggctccggcggtggcaccctgaagtacgtggaggatgtgacaaacgtggtcagacgggatgtggagaagtggggccccttcgatctggtgtacggcagcacccaacccctgggcagctcttgtgaccggtgccctggctggtacatgtttcagttccaccggatcctgcagtacgccctgccgagacaggagtcccagcggccattcttttggattttcatggacaacttgctgctgaccgaggatgaccaggaaactaccactcggttcctgcagaccgaagccgtgaccctgcaggacgtgagaggccgggactaccagaacgccatgcgggtgtggtccaacatccctggactgaaaagcaagcacgcacctctgacccctaaagaagaggagtacctgcaggcccaggtgcggagcagaagcaagctggacgcccctaaggtggatctgctggtgaagaattgcctcctgcccctgagagagtacttcaagtatttcagccagaatagtctgcccctgggaggcagcggcggcggcatgatcgagagccagatcagcttcgaggacgtggccgtggacttcaccctggaggagtggcagctgctgaaccccacccagaagaacctgtacagggacgtgatgctggagaactacagcaacctggccttcctgggctaccagatcatcaagcccgacgccgtgttccagctggagcaggaggagcagtggatcaccgacgaggagatcctgaaccacagctgccccgaggaggtgtggctgggcggcccaagcagcggcgcccctcctcccagcggcggcaggcggcccaagcagcggcgcccctcctcccagcggcggcagcccagccggctccccaacctctaccgaggagggcacctctgagtccgccacccccgagagcggccctggcacctccaccgagcccagcgagggcagcgcacccggcagccctgccggcagccccacctccacagaggagggaaccagcaccgagcccagcgaaggcagcgccccaggcaccagcaccgagcctagtgagcaggagattaaacggatcaacaagatcagaagaagacttgtgaaagacagcaacaccaagaaggccggcaagacaggccccatgaaaaccctgctggttagagtgatgacacccgatctgagagagcggctggaaaacctgagaaagaagcctgaaaatatcccccagcccatcagcaatacatctagagccaacctgaataagctgctgaccgattacaccgaaatgaagaaggcgatcctgcatgtgtactgggaagagttccagaaggaccctgtgggcctgatgagccgggtggcccagcctgccagcaagaagatcgatcagaacaagctgaaacctgagatggacgagaagggcaacctgaccaccgccggctttgcctgctctcagtgtggccagcccctgttcgtgtacaagctggagcaggtgtctgagaagggcaaggcttacaccaactacttcggacggtgcaatgtggccgagcacgaaaagctgatcctgctggcccagctgaagcccgagaaggatagcgacgaagccgtgacatatagcctgggaaagtttgggcagagggccctggatttctacagcattcatgtgaccaaggagtccacccaccccgtgaagcccctggcccagatcgccggaaacagatacgcctccggacctgtgggaaaggccctgagcgacgcatgtatgggcacaatcgcctccttcctgtctaagtaccaggacatcatcatcgaacaccagaaggtggtgaagggcaaccagaagagactggagagcctgcgggagctggccggcaaggaaaacctggaataccctagcgtgaccctgccacctcagcctcacaccaaggagggcgttgatgcctacaacgaagtgatcgcccgggtgcgaatgtgggtgaacctgaacctgtggcagaagctgaagctaagcagagatgatgccaagcctctgctgagactgaagggattcccttcctttcctctggtcgagagacaggccaacgaagtggactggtgggacatggtgtgtaacgtgaagaagctgatcaacgagaaaaaggaggatggcaaggtgttttggcagaatctggctggctacaagagacaggaagccctgagaccatacctgagcagcgaggaagatcggaagaagggaaagaaattcgctcggtaccagctgggcgacctgctgctgcacctggaaaagaagcacggcgaggactggggaaaggtgtacgacgaggcctgggagcggattgacaagaaagtggaaggcctgagcaagcacatcaagctggaagaggaacggagaagcgaggacgcccagagcaaggccgccctgaccgactggctgcgggctaaggccagcttcgtgatcgagggcctgaaggaggccgacaaggacgagttctgcagatgcgagctgaagctgcagaagtggtacggggacctgcggggaaagcccttcgccatcgaagccgagaacagcatcctggacatcagcggcttcagcaagcagtacaactgtgccttcatctggcagaaggacggcgtgaagaagctgaacctgtacctgatcatcaactacttcaagggcggcaagctgcggttcaagaagatcaaacctgaagccttcgaagccaacagattctacaccgtgatcaacaaaaagagcggcgagatcgtgcccatggaggtgaacttcaacttcgacgaccccaacctgatcatcctgcctctggcctttggcaagagacagggcagagaattcatctggaacgacctgctgtccctggaaaccggcagcctgaagctggccaacggaagagtgatcgagaagacactgtacaacagaagaacccggcaggatgagcctgccctgttcgtggccctgaccttcgagcggcgggaggtcctggactcctccaatatcaaaccaatgaacctgatcggcgtggcaagaggcgaaaacatccccgccgtgatcgccctgaccgaccccgagggctgcccactgagccggtttaaggatagcctgggaaacccaacccacatcctgagaatcggcgagagctataaggagaagcagcggaccatccaggccaagaaggaggtggagcagcggagagccggcggctacagccggaagtacgccagcaaagccaagaatctggcagacgatatggtgagaaacaccgctagagatctgctgtactacgccgtgacccaggatgccatgctgatcttcgccaacctgagccggggcttcggccggcagggcaagcggaccttcatggccgagagacagtacacacggatggaggactggctgaccgccaagctggcctacgagggcctgagcaagacctacctgtccaagacactggcccagtacacctccaagacatgcagcaactgtgggtttaccatcaccagcgccgactacgacagggtgctggagaagctgaagaagacagcaacaggctggatgaccacaattaacggcaaggagctgaaggtggagggccagattacctactacaacagatacaagagacagaacgtagtcaaggacctgtccgtcgagctggatagactgagcgaagaatctgtgaacaacgacatctcctcctggacaaagggcagaagcggagaagctctgagcctcctgaagaaaagattctcccatagacccgtgcaggagaagttcgtgtgcctgaactgcggcttcgagacacacgcagccgagcaagccgccctgaacatcgccagatcctggctgttcctgcggagccaggagtacaagaaataccagacaaacaagacaaccggcaacaccgataagagagccttcgtcgagacctggcagtccttttaccggaagaagcttaaggaggtgtggaaacctgccgtgcggtctggcggatctggcggaggctccaccagccccaagaaaaagagaaaagtctaagctgccttctgcggggcttgccttctggccatgcccttcttctctcccttgcacctgtacctcttggtctttgaataaagcctgagtaggaaggctagcaaaaaaaaaaaaaaaaaaaaaaaaaaaaaaaaaaaaaaaaaaaaaaaaaaaaaaaaaaaaaaaaaaaaaaaaaaaaaaaagcccagccggctccccaacctctaccgaggagggcacctctgagtccgccacccccgagagcggccctggcacctccaccgagcccagcgagggcagcgcacccggcagccctgccggcagccccacctccacagaggagggaaccagcaccgagcccagcgaaggcagcgccccaggcaccagcaccgagcctagtgagcaggagattaaacggatcaacaagatcagaagaagacttgtgaaagacagcaacaccaagaaggccggcaagacaggccccatgaaaaccctgctggttagagtgatgacacccgatctgagagagcggctggaaaacctgagaaagaagcctgaaaatatcccccagcccatcagcaatacatctagagccaacctgaataagctgctgaccgattacaccgaaatgaagaaggcgatcctgcatgtgtactgggaagagttccagaaggaccctgtgggcctgatgagccgggtggcccagcctgccagcaagaagatcgatcagaacaagctgaaacctgagatggacgagaagggcaacctgaccaccgccggctttgcctgctctcagtgtggccagcccctgttcgtgtacaagctggagcaggtgtctgagaagggcaaggcttacaccaactacttcggacggtgcaatgtggccgagcacgaaaagctgatcctgctggcccagctgaagcccgagaaggatagcgacgaagccgtgacatatagcctgggaaagtttgggcagagggccctggatttctacagcattcatgtgaccaaggagtccacccaccccgtgaagcccctggcccagatcgccggaaacagatacgcctccggacctgtgggaaaggccctgagcgacgcatgtatgggcacaatcgcctccttcctgtctaagtaccaggacatcatcatcgaacaccagaaggtggtgaagggcaaccagaagagactggagagcctgcgggagctggccggcaaggaaaacctggaataccctagcgtgaccctgccacctcagcctcacaccaaggagggcgttgatgcctacaacgaagtgatcgcccgggtgcgaatgtgggtgaacctgaacctgtggcagaagctgaagctaagcagagatgatgccaagcctctgctgagactgaagggattcccttcctttcctctggtcgagagacaggccaacgaagtggactggtgggacatggtgtgtaacgtgaagaagctgatcaacgagaaaaaggaggatggcaaggtgttttggcagaatctggctggctacaagagacaggaagccctgagaccatacctgagcagcgaggaagatcggaagaagggaaagaaattcgctcggtaccagctgggcgacctgctgctgcacctggaaaagaagcacggcgaggactggggaaaggtgtacgacgaggcctgggagcggattgacaagaaagtggaaggcctgagcaagcacatcaagctggaagaggaacggagaagcgaggacgcccagagcaaggccgccctgaccgactggctgcgggctaaggccagcttcgtgatcgagggcctgaaggaggccgacaaggacgagttctgcagatgcgagctgaagctgcagaagtggtacggggacctgcggggaaagcccttcgccatcgaagccgagaacagcatcctggacatcagcggcttcagcaagcagtacaactgtgccttcatctggcagaaggacggcgtgaagaagctgaacctgtacctgatcatcaactacttcaagggcggcaagctgcggttcaagaagatcaaacctgaagccttcgaagccaacagattctacaccgtgatcaacaaaaagagcggcgagatcgtgcccatggaggtgaacttcaacttcgacgaccccaacctgatcatcctgcctctggcctttggcaagagacagggcagagaattcatctggaacgacctgctgtccctggaaaccggcagcctgaagctggccaacggaagagtgatcgagaagacactgtacaacagaagaacccggcaggatgagcctgccctgttcgtggccctgaccttcgagcggcgggaggtcctggactcctccaatatcaaaccaatgaacctgatcggcgtggcaagaggcgaaaacatccccgccgtgatcgccctgaccgaccccgagggctgcccactgagccggtttaaggatagcctgggaaacccaacccacatcctgagaatcggcgagagctataaggagaagcagcggaccatccaggccaagaaggaggtggagcagcggagagccggcggctacagccggaagtacgccagcaaagccaagaatctggcagacgatatggtgagaaacaccgctagagatctgctgtactacgccgtgacccaggatgccatgctgatcttcgccaacctgagccggggcttcggccggcagggcaagcggaccttcatggccgagagacagtacacacggatggaggactggctgaccgccaagctggcctacgagggcctgagcaagacctacctgtccaagacactggcccagtacacctccaagacatgcagcaactgtgggtttaccatcaccagcgccgactacgacagggtgctggagaagctgaagaagacagcaacaggctggatgaccacaattaacggcaaggagctgaaggtggagggccagattacctactacaacagatacaagagacagaacgtagtcaaggacctgtccgtcgagctggatagactgagcgaagaatctgtgaacaacgacatctcctcctggacaaagggcagaagcggagaagctctgagcctcctgaagaaaagattctcccatagacccgtgcaggagaagttcgtgtgcctgaactgcggcttcgagacacacgcagccgagcaagccgccctgaacatcgccagatcctggctgttcctgcggagccaggagtacaagaaataccagacaaacaagacaaccggcaacaccgataagagagccttcgtcgagacctggcagtccttttaccggaagaagcttaaggaggtgtggaaacctgccgtgcggtctggcggatctggcggaggctccaccagccccaagaaaaagagaaaagtctaagctgccttctgcggggcttgccttctggccatgcccttcttctctcccttgcacctgtacctcttggtctttgaataaagcctgagtaggaaggctagcaaaaaaaaaaaaaaaaaaaaaaaaaaaaaaaaaaaaaaaaaaaaaaaaaaaaaaaaaaaaaaaaaaaaaaaaaaaaaaaa

SEQ ID NO: 10139 - RNA, 8787 nt, synthetic construct
  source 1..8787: mol_type = other RNA
aggaaataagagagaaaagaagagtaagaagaaatataagagccaccatggcccctaagaagaagcgtaaagtgagccggatgaaccacgaccaggagttcgacccccctaaggtgtaccctcccgtccccgccgagaagagaaagcccatccgggtcctgagcctgttcgatggcatcgccaccggtctgctggtgctgaaggacctgggcatccaggtggataggtacattgcctccgaggtgtgcgaggactccatcaccgtgggaatggtgcgtcatcagggcaagatcatgtacgtgggcgacgtgcggagcgtgacacagaagcatatccaggagtggggccctttcgacctggtgatcggcggcagcccttgcaatgacctgagcatcgtgaacccagcccggaagggcctgtacgagggaaccggcagactgttcttcgagttttacagactgctgcacgacgcccggcctaaggaaggcgacgaccggcccttcttttggctgttcgagaatgtggtggccatgggagtcagcgacaagcgggatattagccggttcctggagagcaaccccgtgatgatcgatgccaaggaagtgagcgccgcccaccgggccagatacttctggggcaatctgcctggcatgaacagacccctggccagcaccgtgaacgacaagctggagctgcaggagtgcctggagcacggccggatcgccaagttcagcaaggtgagaaccatcaccacccgaagcaacagcatcaaacaaggcaaggaccagcactttcctgtgttcatgaacgagaaggaggacatcctgtggtgtaccgagatggagagagtgttcgggttcccagtccactacacagatgtcagcaacatgtctagactggccagacagagactgctgggaagaagctggtccgtccctgtgatcagacacctgttcgcccctctgaaggagtacttcgcctgcgtgagcagcggcaacagcaacgccaacagccggggccccagcttctctagcggcctggtgccactgtccctgagagggagccacatgggccccatggagatctacaaaaccgtgagcgcctggaagcggcagcctgtgcgcgtgctgagcctgtttcggaatatcgataaagtcctgaaaagcctgggattcctggagagcggctctggctccggcggtggcaccctgaagtacgtggaggatgtgacaaacgtggtcagacgggatgtggagaagtggggccccttcgatctggtgtacggcagcacccaacccctgggcagctcttgtgaccggtgccctggctggtacatgtttcagttccaccggatcctgcagtacgccctgccgagacaggagtcccagcggccattcttttggattttcatggacaacttgctgctgaccgaggatgaccaggaaactaccactcggttcctgcagaccgaagccgtgaccctgcaggacgtgagaggccgggactaccagaacgccatgcgggtgtggtccaacatccctggactgaaaagcaagcacgcacctctgacccctaaagaagaggagtacctgcaggcccaggtgcggagcagaagcaagctggacgcccctaaggtggatctgctggtgaagaattgcctcctgcccctgagagagtacttcaagtatttcagccagaatagtctgcccctgggaggcagcggcggcggccagatgcccgtgaagttcgaggacatcgccgtgagcttcagccaggaggagtgggagtacctggacgaggagcagaaggagctgtacagggaggtgatgaaggagaactaccagaccctgatcagcctgggcaccggcagccccagcatcacccccgacatcatcagccacatcgagaggggcgaggagccctacatcagggaggagcccggcagcgaggagagggagcccggcaggagcagcggcggcccaagcagcggcgcccctcctcccagcggcggcaggcggcccaagcagcggcgcccctcctcccagcggcggcagcccagccggctccccaacctctaccgaggagggcacctctgagtccgccacccccgagagcggccctggcacctccaccgagcccagcgagggcagcgcacccggcagccctgccggcagccccacctccacagaggagggaaccagcaccgagcccagcgaaggcagcgccccaggcaccagcaccgagcctagtgagcaggagattaaacggatcaacaagatcagaagaagacttgtgaaagacagcaacaccaagaaggccggcaagacaggccccatgaaaaccctgctggttagagtgatgacacccgatctgagagagcggctggaaaacctgagaaagaagcctgaaaatatcccccagcccatcagcaatacatctagagccaacctgaataagctgctgaccgattacaccgaaatgaagaaggcgatcctgcatgtgtactgggaagagttccagaaggaccctgtgggcctgatgagccgggtggcccagcctgccagcaagaagatcgatcagaacaagctgaaacctgagatggacgagaagggcaacctgaccaccgccggctttgcctgctctcagtgtggccagcccctgttcgtgtacaagctggagcaggtgtctgagaagggcaaggcttacaccaactacttcggacggtgcaatgtggccgagcacgaaaagctgatcctgctggcccagctgaagcccgagaaggatagcgacgaagccgtgacatatagcctgggaaagtttgggcagagggccctggatttctacagcattcatgtgaccaaggagtccacccaccccgtgaagcccctggcccagatcgccggaaacagatacgcctccggacctgtgggaaaggccctgagcgacgcatgtatgggcacaatcgcctccttcctgtctaagtaccaggacatcatcatcgaacaccagaaggtggtgaagggcaaccagaagagactggagagcctgcgggagctggccggcaaggaaaacctggaataccctagcgtgaccctgccacctcagcctcacaccaaggagggcgttgatgcctacaacgaagtgatcgcccgggtgcgaatgtgggtgaacctgaacctgtggcagaagctgaagctaagcagagatgatgccaagcctctgctgagactgaagggattcccttcctttcctctggtcgagagacaggccaacgaagtggactggtgggacatggtgtgtaacgtgaagaagctgatcaacgagaaaaaggaggatggcaaggtgttttggcagaatctggctggctacaagagacaggaagccctgagaccatacctgagcagcgaggaagatcggaagaagggaaagaaattcgctcggtaccagctgggcgacctgctgctgcacctggaaaagaagcacggcgaggactggggaaaggtgtacgacgaggcctgggagcggattgacaagaaagtggaaggcctgagcaagcacatcaagctggaagaggaacggagaagcgaggacgcccagagcaaggccgccctgaccgactggctgcgggctaaggccagcttcgtgatcgagggcctgaaggaggccgacaaggacgagttctgcagatgcgagctgaagctgcagaagtggtacggggacctgcggggaaagcccttcgccatcgaagccgagaacagcatcctggacatcagcggcttcagcaagcagtacaactgtgccttcatctggcagaaggacggcgtgaagaagctgaacctgtacctgatcatcaactacttcaagggcggcaagctgcggttcaagaagatcaaacctgaagccttcgaagccaacagattctacaccgtgatcaacaaaaagagcggcgagatcgtgcccatggaggtgaacttcaacttcgacgaccccaacctgatcatcctgcctctggcctttggcaagagacagggcagagaattcatctggaacgacctgctgtccctggaaaccggcagcctgaagctggccaacggaagagtgatcgagaagacactgtacaacagaagaacccggcaggatgagcctgccctgttcgtggccctgaccttcgagcggcgggaggtcctggactcctccaatatcaaaccaatgaacctgatcggcgtggcaagaggcgaaaacatccccgccgtgatcgccctgaccgaccccgagggctgcccactgagccggtttaaggatagcctgggaaacccaacccacatcctgagaatcggcgagagctataaggagaagcagcggaccatccaggccaagaaggaggtggagcagcggagagccggcggctacagccggaagtacgccagcaaagccaagaatctggcagacgatatggtgagaaacaccgctagagatctgctgtactacgccgtgacccaggatgccatgctgatcttcgccaacctgagccggggcttcggccggcagggcaagcggaccttcatggccgagagacagtacacacggatggaggactggctgaccgccaagctggcctacgagggcctgagcaagacctacctgtccaagacactggcccagtacacctccaagacatgcagcaactgtgggtttaccatcaccagcgccgactacgacagggtgctggagaagctgaagaagacagcaacaggctggatgaccacaattaacggcaaggagctgaaggtggagggccagattacctactacaacagatacaagagacagaacgtagtcaaggacctgtccgtcgagctggatagactgagcgaagaatctgtgaacaacgacatctcctcctggacaaagggcagaagcggagaagctctgagcctcctgaagaaaagattctcccatagacccgtgcaggagaagttcgtgtgcctgaactgcggcttcgagacacacgcagccgagcaagccgccctgaacatcgccagatcctggctgttcctgcggagccaggagtacaagaaataccagacaaacaagacaaccggcaacaccgataagagagccttcgtcgagacctggcagtccttttaccggaagaagcttaaggaggtgtggaaacctgccgtgcggtctggcggatctggcggaggctccaccagccccaagaaaaagagaaaagtctaagctgccttctgcggggcttgccttctggccatgcccttcttctctcccttgcacctgtacctcttggtctttgaataaagcctgagtaggaaggctagcaaaaaaaaaaaaaaaaaaaaaaaaaaaaaaaaaaaaaaaaaaaaaaaaaaaaaaaaaaaaaaaaaaaaaaaaaaaaaaaagcccagccggctccccaacctctaccgaggagggcacctctgagtccgccacccccgagagcggccctggcacctccaccgagcccagcgagggcagcgcacccggcagccctgccggcagccccacctccacagaggagggaaccagcaccgagcccagcgaaggcagcgccccaggcaccagcaccgagcctagtgagcaggagattaaacggatcaacaagatcagaagaagacttgtgaaagacagcaacaccaagaaggccggcaagacaggccccatgaaaaccctgctggttagagtgatgacacccgatctgagagagcggctggaaaacctgagaaagaagcctgaaaatatcccccagcccatcagcaatacatctagagccaacctgaataagctgctgaccgattacaccgaaatgaagaaggcgatcctgcatgtgtactgggaagagttccagaaggaccctgtgggcctgatgagccgggtggcccagcctgccagcaagaagatcgatcagaacaagctgaaacctgagatggacgagaagggcaacctgaccaccgccggctttgcctgctctcagtgtggccagcccctgttcgtgtacaagctggagcaggtgtctgagaagggcaaggcttacaccaactacttcggacggtgcaatgtggccgagcacgaaaagctgatcctgctggcccagctgaagcccgagaaggatagcgacgaagccgtgacatatagcctgggaaagtttgggcagagggccctggatttctacagcattcatgtgaccaaggagtccacccaccccgtgaagcccctggcccagatcgccggaaacagatacgcctccggacctgtgggaaaggccctgagcgacgcatgtatgggcacaatcgcctccttcctgtctaagtaccaggacatcatcatcgaacaccagaaggtggtgaagggcaaccagaagagactggagagcctgcgggagctggccggcaaggaaaacctggaataccctagcgtgaccctgccacctcagcctcacaccaaggagggcgttgatgcctacaacgaagtgatcgcccgggtgcgaatgtgggtgaacctgaacctgtggcagaagctgaagctaagcagagatgatgccaagcctctgctgagactgaagggattcccttcctttcctctggtcgagagacaggccaacgaagtggactggtgggacatggtgtgtaacgtgaagaagctgatcaacgagaaaaaggaggatggcaaggtgttttggcagaatctggctggctacaagagacaggaagccctgagaccatacctgagcagcgaggaagatcggaagaagggaaagaaattcgctcggtaccagctgggcgacctgctgctgcacctggaaaagaagcacggcgaggactggggaaaggtgtacgacgaggcctgggagcggattgacaagaaagtggaaggcctgagcaagcacatcaagctggaagaggaacggagaagcgaggacgcccagagcaaggccgccctgaccgactggctgcgggctaaggccagcttcgtgatcgagggcctgaaggaggccgacaaggacgagttctgcagatgcgagctgaagctgcagaagtggtacggggacctgcggggaaagcccttcgccatcgaagccgagaacagcatcctggacatcagcggcttcagcaagcagtacaactgtgccttcatctggcagaaggacggcgtgaagaagctgaacctgtacctgatcatcaactacttcaagggcggcaagctgcggttcaagaagatcaaacctgaagccttcgaagccaacagattctacaccgtgatcaacaaaaagagcggcgagatcgtgcccatggaggtgaacttcaacttcgacgaccccaacctgatcatcctgcctctggcctttggcaagagacagggcagagaattcatctggaacgacctgctgtccctggaaaccggcagcctgaagctggccaacggaagagtgatcgagaagacactgtacaacagaagaacccggcaggatgagcctgccctgttcgtggccctgaccttcgagcggcgggaggtcctggactcctccaatatcaaaccaatgaacctgatcggcgtggcaagaggcgaaaacatccccgccgtgatcgccctgaccgaccccgagggctgcccactgagccggtttaaggatagcctgggaaacccaacccacatcctgagaatcggcgagagctataaggagaagcagcggaccatccaggccaagaaggaggtggagcagcggagagccggcggctacagccggaagtacgccagcaaagccaagaatctggcagacgatatggtgagaaacaccgctagagatctgctgtactacgccgtgacccaggatgccatgctgatcttcgccaacctgagccggggcttcggccggcagggcaagcggaccttcatggccgagagacagtacacacggatggaggactggctgaccgccaagctggcctacgagggcctgagcaagacctacctgtccaagacactggcccagtacacctccaagacatgcagcaactgtgggtttaccatcaccagcgccgactacgacagggtgctggagaagctgaagaagacagcaacaggctggatgaccacaattaacggcaaggagctgaaggtggagggccagattacctactacaacagatacaagagacagaacgtagtcaaggacctgtccgtcgagctggatagactgagcgaagaatctgtgaacaacgacatctcctcctggacaaagggcagaagcggagaagctctgagcctcctgaagaaaagattctcccatagacccgtgcaggagaagttcgtgtgcctgaactgcggcttcgagacacacgcagccgagcaagccgccctgaacatcgccagatcctggctgttcctgcggagccaggagtacaagaaataccagacaaacaagacaaccggcaacaccgataagagagccttcgtcgagacctggcagtccttttaccggaagaagcttaaggaggtgtggaaacctgccgtgcggtctggcggatctggcggaggctccaccagccccaagaaaaagagaaaagtctaagctgccttctgcggggcttgccttctggccatgcccttcttctctcccttgcacctgtacctcttggtctttgaataaagcctgagtaggaaggctagcaaaaaaaaaaaaaaaaaaaaaaaaaaaaaaaaaaaaaaaaaaaaaaaaaaaaaaaaaaaaaaaaaaaaaaaaaaaaaaaa

SEQ ID NO: 10140 - RNA, 8787 nt, synthetic construct
  source 1..8787: mol_type = other RNA
aggaaataagagagaaaagaagagtaagaagaaatataagagccaccatggcccctaagaagaagcgtaaagtgagccggatgaaccacgaccaggagttcgacccccctaaggtgtaccctcccgtccccgccgagaagagaaagcccatccgggtcctgagcctgttcgatggcatcgccaccggtctgctggtgctgaaggacctgggcatccaggtggataggtacattgcctccgaggtgtgcgaggactccatcaccgtgggaatggtgcgtcatcagggcaagatcatgtacgtgggcgacgtgcggagcgtgacacagaagcatatccaggagtggggccctttcgacctggtgatcggcggcagcccttgcaatgacctgagcatcgtgaacccagcccggaagggcctgtacgagggaaccggcagactgttcttcgagttttacagactgctgcacgacgcccggcctaaggaaggcgacgaccggcccttcttttggctgttcgagaatgtggtggccatgggagtcagcgacaagcgggatattagccggttcctggagagcaaccccgtgatgatcgatgccaaggaagtgagcgccgcccaccgggccagatacttctggggcaatctgcctggcatgaacagacccctggccagcaccgtgaacgacaagctggagctgcaggagtgcctggagcacggccggatcgccaagttcagcaaggtgagaaccatcaccacccgaagcaacagcatcaaacaaggcaaggaccagcactttcctgtgttcatgaacgagaaggaggacatcctgtggtgtaccgagatggagagagtgttcgggttcccagtccactacacagatgtcagcaacatgtctagactggccagacagagactgctgggaagaagctggtccgtccctgtgatcagacacctgttcgcccctctgaaggagtacttcgcctgcgtgagcagcggcaacagcaacgccaacagccggggccccagcttctctagcggcctggtgccactgtccctgagagggagccacatgggccccatggagatctacaaaaccgtgagcgcctggaagcggcagcctgtgcgcgtgctgagcctgtttcggaatatcgataaagtcctgaaaagcctgggattcctggagagcggctctggctccggcggtggcaccctgaagtacgtggaggatgtgacaaacgtggtcagacgggatgtggagaagtggggccccttcgatctggtgtacggcagcacccaacccctgggcagctcttgtgaccggtgccctggctggtacatgtttcagttccaccggatcctgcagtacgccctgccgagacaggagtcccagcggccattcttttggattttcatggacaacttgctgctgaccgaggatgaccaggaaactaccactcggttcctgcagaccgaagccgtgaccctgcaggacgtgagaggccgggactaccagaacgccatgcgggtgtggtccaacatccctggactgaaaagcaagcacgcacctctgacccctaaagaagaggagtacctgcaggcccaggtgcggagcagaagcaagctggacgcccctaaggtggatctgctggtgaagaattgcctcctgcccctgagagagtacttcaagtatttcagccagaatagtctgcccctgggaggcagcggcggcggccaccaggaggtggtgaccttcgaggacgtggccgtgtacttcacccagaccgagtgggccggcctgagccccgcccagagggccctgtacaggagcgtgatgctggagatctacggcaacctgaccagcctgggctaccccgtgcccaagcccgccctggtgagcctgctggagaggggcgacctgccctggggcctggagacccaggacgacccccccgcccagggcaccaagcacatctgcggcggcccaagcagcggcgcccctcctcccagcggcggcaggcggcccaagcagcggcgcccctcctcccagcggcggcagcccagccggctccccaacctctaccgaggagggcacctctgagtccgccacccccgagagcggccctggcacctccaccgagcccagcgagggcagcgcacccggcagccctgccggcagccccacctccacagaggagggaaccagcaccgagcccagcgaaggcagcgccccaggcaccagcaccgagcctagtgagcaggagattaaacggatcaacaagatcagaagaagacttgtgaaagacagcaacaccaagaaggccggcaagacaggccccatgaaaaccctgctggttagagtgatgacacccgatctgagagagcggctggaaaacctgagaaagaagcctgaaaatatcccccagcccatcagcaatacatctagagccaacctgaataagctgctgaccgattacaccgaaatgaagaaggcgatcctgcatgtgtactgggaagagttccagaaggaccctgtgggcctgatgagccgggtggcccagcctgccagcaagaagatcgatcagaacaagctgaaacctgagatggacgagaagggcaacctgaccaccgccggctttgcctgctctcagtgtggccagcccctgttcgtgtacaagctggagcaggtgtctgagaagggcaaggcttacaccaactacttcggacggtgcaatgtggccgagcacgaaaagctgatcctgctggcccagctgaagcccgagaaggatagcgacgaagccgtgacatatagcctgggaaagtttgggcagagggccctggatttctacagcattcatgtgaccaaggagtccacccaccccgtgaagcccctggcccagatcgccggaaacagatacgcctccggacctgtgggaaaggccctgagcgacgcatgtatgggcacaatcgcctccttcctgtctaagtaccaggacatcatcatcgaacaccagaaggtggtgaagggcaaccagaagagactggagagcctgcgggagctggccggcaaggaaaacctggaataccctagcgtgaccctgccacctcagcctcacaccaaggagggcgttgatgcctacaacgaagtgatcgcccgggtgcgaatgtgggtgaacctgaacctgtggcagaagctgaagctaagcagagatgatgccaagcctctgctgagactgaagggattcccttcctttcctctggtcgagagacaggccaacgaagtggactggtgggacatggtgtgtaacgtgaagaagctgatcaacgagaaaaaggaggatggcaaggtgttttggcagaatctggctggctacaagagacaggaagccctgagaccatacctgagcagcgaggaagatcggaagaagggaaagaaattcgctcggtaccagctgggcgacctgctgctgcacctggaaaagaagcacggcgaggactggggaaaggtgtacgacgaggcctgggagcggattgacaagaaagtggaaggcctgagcaagcacatcaagctggaagaggaacggagaagcgaggacgcccagagcaaggccgccctgaccgactggctgcgggctaaggccagcttcgtgatcgagggcctgaaggaggccgacaaggacgagttctgcagatgcgagctgaagctgcagaagtggtacggggacctgcggggaaagcccttcgccatcgaagccgagaacagcatcctggacatcagcggcttcagcaagcagtacaactgtgccttcatctggcagaaggacggcgtgaagaagctgaacctgtacctgatcatcaactacttcaagggcggcaagctgcggttcaagaagatcaaacctgaagccttcgaagccaacagattctacaccgtgatcaacaaaaagagcggcgagatcgtgcccatggaggtgaacttcaacttcgacgaccccaacctgatcatcctgcctctggcctttggcaagagacagggcagagaattcatctggaacgacctgctgtccctggaaaccggcagcctgaagctggccaacggaagagtgatcgagaagacactgtacaacagaagaacccggcaggatgagcctgccctgttcgtggccctgaccttcgagcggcgggaggtcctggactcctccaatatcaaaccaatgaacctgatcggcgtggcaagaggcgaaaacatccccgccgtgatcgccctgaccgaccccgagggctgcccactgagccggtttaaggatagcctgggaaacccaacccacatcctgagaatcggcgagagctataaggagaagcagcggaccatccaggccaagaaggaggtggagcagcggagagccggcggctacagccggaagtacgccagcaaagccaagaatctggcagacgatatggtgagaaacaccgctagagatctgctgtactacgccgtgacccaggatgccatgctgatcttcgccaacctgagccggggcttcggccggcagggcaagcggaccttcatggccgagagacagtacacacggatggaggactggctgaccgccaagctggcctacgagggcctgagcaagacctacctgtccaagacactggcccagtacacctccaagacatgcagcaactgtgggtttaccatcaccagcgccgactacgacagggtgctggagaagctgaagaagacagcaacaggctggatgaccacaattaacggcaaggagctgaaggtggagggccagattacctactacaacagatacaagagacagaacgtagtcaaggacctgtccgtcgagctggatagactgagcgaagaatctgtgaacaacgacatctcctcctggacaaagggcagaagcggagaagctctgagcctcctgaagaaaagattctcccatagacccgtgcaggagaagttcgtgtgcctgaactgcggcttcgagacacacgcagccgagcaagccgccctgaacatcgccagatcctggctgttcctgcggagccaggagtacaagaaataccagacaaacaagacaaccggcaacaccgataagagagccttcgtcgagacctggcagtccttttaccggaagaagcttaaggaggtgtggaaacctgccgtgcggtctggcggatctggcggaggctccaccagccccaagaaaaagagaaaagtctaagctgccttctgcggggcttgccttctggccatgcccttcttctctcccttgcacctgtacctcttggtctttgaataaagcctgagtaggaaggctagcaaaaaaaaaaaaaaaaaaaaaaaaaaaaaaaaaaaaaaaaaaaaaaaaaaaaaaaaaaaaaaaaaaaaaaaaaaaaaaaagcccagccggctccccaacctctaccgaggagggcacctctgagtccgccacccccgagagcggccctggcacctccaccgagcccagcgagggcagcgcacccggcagccctgccggcagccccacctccacagaggagggaaccagcaccgagcccagcgaaggcagcgccccaggcaccagcaccgagcctagtgagcaggagattaaacggatcaacaagatcagaagaagacttgtgaaagacagcaacaccaagaaggccggcaagacaggccccatgaaaaccctgctggttagagtgatgacacccgatctgagagagcggctggaaaacctgagaaagaagcctgaaaatatcccccagcccatcagcaatacatctagagccaacctgaataagctgctgaccgattacaccgaaatgaagaaggcgatcctgcatgtgtactgggaagagttccagaaggaccctgtgggcctgatgagccgggtggcccagcctgccagcaagaagatcgatcagaacaagctgaaacctgagatggacgagaagggcaacctgaccaccgccggctttgcctgctctcagtgtggccagcccctgttcgtgtacaagctggagcaggtgtctgagaagggcaaggcttacaccaactacttcggacggtgcaatgtggccgagcacgaaaagctgatcctgctggcccagctgaagcccgagaaggatagcgacgaagccgtgacatatagcctgggaaagtttgggcagagggccctggatttctacagcattcatgtgaccaaggagtccacccaccccgtgaagcccctggcccagatcgccggaaacagatacgcctccggacctgtgggaaaggccctgagcgacgcatgtatgggcacaatcgcctccttcctgtctaagtaccaggacatcatcatcgaacaccagaaggtggtgaagggcaaccagaagagactggagagcctgcgggagctggccggcaaggaaaacctggaataccctagcgtgaccctgccacctcagcctcacaccaaggagggcgttgatgcctacaacgaagtgatcgcccgggtgcgaatgtgggtgaacctgaacctgtggcagaagctgaagctaagcagagatgatgccaagcctctgctgagactgaagggattcccttcctttcctctggtcgagagacaggccaacgaagtggactggtgggacatggtgtgtaacgtgaagaagctgatcaacgagaaaaaggaggatggcaaggtgttttggcagaatctggctggctacaagagacaggaagccctgagaccatacctgagcagcgaggaagatcggaagaagggaaagaaattcgctcggtaccagctgggcgacctgctgctgcacctggaaaagaagcacggcgaggactggggaaaggtgtacgacgaggcctgggagcggattgacaagaaagtggaaggcctgagcaagcacatcaagctggaagaggaacggagaagcgaggacgcccagagcaaggccgccctgaccgactggctgcgggctaaggccagcttcgtgatcgagggcctgaaggaggccgacaaggacgagttctgcagatgcgagctgaagctgcagaagtggtacggggacctgcggggaaagcccttcgccatcgaagccgagaacagcatcctggacatcagcggcttcagcaagcagtacaactgtgccttcatctggcagaaggacggcgtgaagaagctgaacctgtacctgatcatcaactacttcaagggcggcaagctgcggttcaagaagatcaaacctgaagccttcgaagccaacagattctacaccgtgatcaacaaaaagagcggcgagatcgtgcccatggaggtgaacttcaacttcgacgaccccaacctgatcatcctgcctctggcctttggcaagagacagggcagagaattcatctggaacgacctgctgtccctggaaaccggcagcctgaagctggccaacggaagagtgatcgagaagacactgtacaacagaagaacccggcaggatgagcctgccctgttcgtggccctgaccttcgagcggcgggaggtcctggactcctccaatatcaaaccaatgaacctgatcggcgtggcaagaggcgaaaacatccccgccgtgatcgccctgaccgaccccgagggctgcccactgagccggtttaaggatagcctgggaaacccaacccacatcctgagaatcggcgagagctataaggagaagcagcggaccatccaggccaagaaggaggtggagcagcggagagccggcggctacagccggaagtacgccagcaaagccaagaatctggcagacgatatggtgagaaacaccgctagagatctgctgtactacgccgtgacccaggatgccatgctgatcttcgccaacctgagccggggcttcggccggcagggcaagcggaccttcatggccgagagacagtacacacggatggaggactggctgaccgccaagctggcctacgagggcctgagcaagacctacctgtccaagacactggcccagtacacctccaagacatgcagcaactgtgggtttaccatcaccagcgccgactacgacagggtgctggagaagctgaagaagacagcaacaggctggatgaccacaattaacggcaaggagctgaaggtggagggccagattacctactacaacagatacaagagacagaacgtagtcaaggacctgtccgtcgagctggatagactgagcgaagaatctgtgaacaacgacatctcctcctggacaaagggcagaagcggagaagctctgagcctcctgaagaaaagattctcccatagacccgtgcaggagaagttcgtgtgcctgaactgcggcttcgagacacacgcagccgagcaagccgccctgaacatcgccagatcctggctgttcctgcggagccaggagtacaagaaataccagacaaacaagacaaccggcaacaccgataagagagccttcgtcgagacctggcagtccttttaccggaagaagcttaaggaggtgtggaaacctgccgtgcggtctggcggatctggcggaggctccaccagccccaagaaaaagagaaaagtctaagctgccttctgcggggcttgccttctggccatgcccttcttctctcccttgcacctgtacctcttggtctttgaataaagcctgagtaggaaggctagcaaaaaaaaaaaaaaaaaaaaaaaaaaaaaaaaaaaaaaaaaaaaaaaaaaaaaaaaaaaaaaaaaaaaaaaaaaaaaaaa

SEQ ID NO: 10141 - RNA, 8787 nt, synthetic construct
  source 1..8787: mol_type = other RNA
aggaaataagagagaaaagaagagtaagaagaaatataagagccaccatggcccctaagaagaagcgtaaagtgagccggatgaaccacgaccaggagttcgacccccctaaggtgtaccctcccgtccccgccgagaagagaaagcccatccgggtcctgagcctgttcgatggcatcgccaccggtctgctggtgctgaaggacctgggcatccaggtggataggtacattgcctccgaggtgtgcgaggactccatcaccgtgggaatggtgcgtcatcagggcaagatcatgtacgtgggcgacgtgcggagcgtgacacagaagcatatccaggagtggggccctttcgacctggtgatcggcggcagcccttgcaatgacctgagcatcgtgaacccagcccggaagggcctgtacgagggaaccggcagactgttcttcgagttttacagactgctgcacgacgcccggcctaaggaaggcgacgaccggcccttcttttggctgttcgagaatgtggtggccatgggagtcagcgacaagcgggatattagccggttcctggagagcaaccccgtgatgatcgatgccaaggaagtgagcgccgcccaccgggccagatacttctggggcaatctgcctggcatgaacagacccctggccagcaccgtgaacgacaagctggagctgcaggagtgcctggagcacggccggatcgccaagttcagcaaggtgagaaccatcaccacccgaagcaacagcatcaaacaaggcaaggaccagcactttcctgtgttcatgaacgagaaggaggacatcctgtggtgtaccgagatggagagagtgttcgggttcccagtccactacacagatgtcagcaacatgtctagactggccagacagagactgctgggaagaagctggtccgtccctgtgatcagacacctgttcgcccctctgaaggagtacttcgcctgcgtgagcagcggcaacagcaacgccaacagccggggccccagcttctctagcggcctggtgccactgtccctgagagggagccacatgggccccatggagatctacaaaaccgtgagcgcctggaagcggcagcctgtgcgcgtgctgagcctgtttcggaatatcgataaagtcctgaaaagcctgggattcctggagagcggctctggctccggcggtggcaccctgaagtacgtggaggatgtgacaaacgtggtcagacgggatgtggagaagtggggccccttcgatctggtgtacggcagcacccaacccctgggcagctcttgtgaccggtgccctggctggtacatgtttcagttccaccggatcctgcagtacgccctgccgagacaggagtcccagcggccattcttttggattttcatggacaacttgctgctgaccgaggatgaccaggaaactaccactcggttcctgcagaccgaagccgtgaccctgcaggacgtgagaggccgggactaccagaacgccatgcgggtgtggtccaacatccctggactgaaaagcaagcacgcacctctgacccctaaagaagaggagtacctgcaggcccaggtgcggagcagaagcaagctggacgcccctaaggtggatctgctggtgaagaattgcctcctgcccctgagagagtacttcaagtatttcagccagaatagtctgcccctgggaggcagcggcggcggcagcctggagagcgacctgttcagggacgtggccgtggtgttcagccaggaggagtgggagcagctggtgcccacccagagggacctgtacagggacgtgatgctggagacctacaacaacctggtgagcctgggcctggccatcagcaagcccgacgtgatcagcttcctggagcagggcaaggagccctggatggtggagaaggccgccaccggcggcctgtgccccgtgctggagagcaggggcggcccaagcagcggcgcccctcctcccagcggcggcaggcggcccaagcagcggcgcccctcctcccagcggcggcagcccagccggctccccaacctctaccgaggagggcacctctgagtccgccacccccgagagcggccctggcacctccaccgagcccagcgagggcagcgcacccggcagccctgccggcagccccacctccacagaggagggaaccagcaccgagcccagcgaaggcagcgccccaggcaccagcaccgagcctagtgagcaggagattaaacggatcaacaagatcagaagaagacttgtgaaagacagcaacaccaagaaggccggcaagacaggccccatgaaaaccctgctggttagagtgatgacacccgatctgagagagcggctggaaaacctgagaaagaagcctgaaaatatcccccagcccatcagcaatacatctagagccaacctgaataagctgctgaccgattacaccgaaatgaagaaggcgatcctgcatgtgtactgggaagagttccagaaggaccctgtgggcctgatgagccgggtggcccagcctgccagcaagaagatcgatcagaacaagctgaaacctgagatggacgagaagggcaacctgaccaccgccggctttgcctgctctcagtgtggccagcccctgttcgtgtacaagctggagcaggtgtctgagaagggcaaggcttacaccaactacttcggacggtgcaatgtggccgagcacgaaaagctgatcctgctggcccagctgaagcccgagaaggatagcgacgaagccgtgacatatagcctgggaaagtttgggcagagggccctggatttctacagcattcatgtgaccaaggagtccacccaccccgtgaagcccctggcccagatcgccggaaacagatacgcctccggacctgtgggaaaggccctgagcgacgcatgtatgggcacaatcgcctccttcctgtctaagtaccaggacatcatcatcgaacaccagaaggtggtgaagggcaaccagaagagactggagagcctgcgggagctggccggcaaggaaaacctggaataccctagcgtgaccctgccacctcagcctcacaccaaggagggcgttgatgcctacaacgaagtgatcgcccgggtgcgaatgtgggtgaacctgaacctgtggcagaagctgaagctaagcagagatgatgccaagcctctgctgagactgaagggattcccttcctttcctctggtcgagagacaggccaacgaagtggactggtgggacatggtgtgtaacgtgaagaagctgatcaacgagaaaaaggaggatggcaaggtgttttggcagaatctggctggctacaagagacaggaagccctgagaccatacctgagcagcgaggaagatcggaagaagggaaagaaattcgctcggtaccagctgggcgacctgctgctgcacctggaaaagaagcacggcgaggactggggaaaggtgtacgacgaggcctgggagcggattgacaagaaagtggaaggcctgagcaagcacatcaagctggaagaggaacggagaagcgaggacgcccagagcaaggccgccctgaccgactggctgcgggctaaggccagcttcgtgatcgagggcctgaaggaggccgacaaggacgagttctgcagatgcgagctgaagctgcagaagtggtacggggacctgcggggaaagcccttcgccatcgaagccgagaacagcatcctggacatcagcggcttcagcaagcagtacaactgtgccttcatctggcagaaggacggcgtgaagaagctgaacctgtacctgatcatcaactacttcaagggcggcaagctgcggttcaagaagatcaaacctgaagccttcgaagccaacagattctacaccgtgatcaacaaaaagagcggcgagatcgtgcccatggaggtgaacttcaacttcgacgaccccaacctgatcatcctgcctctggcctttggcaagagacagggcagagaattcatctggaacgacctgctgtccctggaaaccggcagcctgaagctggccaacggaagagtgatcgagaagacactgtacaacagaagaacccggcaggatgagcctgccctgttcgtggccctgaccttcgagcggcgggaggtcctggactcctccaatatcaaaccaatgaacctgatcggcgtggcaagaggcgaaaacatccccgccgtgatcgccctgaccgaccccgagggctgcccactgagccggtttaaggatagcctgggaaacccaacccacatcctgagaatcggcgagagctataaggagaagcagcggaccatccaggccaagaaggaggtggagcagcggagagccggcggctacagccggaagtacgccagcaaagccaagaatctggcagacgatatggtgagaaacaccgctagagatctgctgtactacgccgtgacccaggatgccatgctgatcttcgccaacctgagccggggcttcggccggcagggcaagcggaccttcatggccgagagacagtacacacggatggaggactggctgaccgccaagctggcctacgagggcctgagcaagacctacctgtccaagacactggcccagtacacctccaagacatgcagcaactgtgggtttaccatcaccagcgccgactacgacagggtgctggagaagctgaagaagacagcaacaggctggatgaccacaattaacggcaaggagctgaaggtggagggccagattacctactacaacagatacaagagacagaacgtagtcaaggacctgtccgtcgagctggatagactgagcgaagaatctgtgaacaacgacatctcctcctggacaaagggcagaagcggagaagctctgagcctcctgaagaaaagattctcccatagacccgtgcaggagaagttcgtgtgcctgaactgcggcttcgagacacacgcagccgagcaagccgccctgaacatcgccagatcctggctgttcctgcggagccaggagtacaagaaataccagacaaacaagacaaccggcaacaccgataagagagccttcgtcgagacctggcagtccttttaccggaagaagcttaaggaggtgtggaaacctgccgtgcggtctggcggatctggcggaggctccaccagccccaagaaaaagagaaaagtctaagctgccttctgcggggcttgccttctggccatgcccttcttctctcccttgcacctgtacctcttggtctttgaataaagcctgagtaggaaggctagcaaaaaaaaaaaaaaaaaaaaaaaaaaaaaaaaaaaaaaaaaaaaaaaaaaaaaaaaaaaaaaaaaaaaaaaaaaaaaaaagcccagccggctccccaacctctaccgaggagggcacctctgagtccgccacccccgagagcggccctggcacctccaccgagcccagcgagggcagcgcacccggcagccctgccggcagccccacctccacagaggagggaaccagcaccgagcccagcgaaggcagcgccccaggcaccagcaccgagcctagtgagcaggagattaaacggatcaacaagatcagaagaagacttgtgaaagacagcaacaccaagaaggccggcaagacaggccccatgaaaaccctgctggttagagtgatgacacccgatctgagagagcggctggaaaacctgagaaagaagcctgaaaatatcccccagcccatcagcaatacatctagagccaacctgaataagctgctgaccgattacaccgaaatgaagaaggcgatcctgcatgtgtactgggaagagttccagaaggaccctgtgggcctgatgagccgggtggcccagcctgccagcaagaagatcgatcagaacaagctgaaacctgagatggacgagaagggcaacctgaccaccgccggctttgcctgctctcagtgtggccagcccctgttcgtgtacaagctggagcaggtgtctgagaagggcaaggcttacaccaactacttcggacggtgcaatgtggccgagcacgaaaagctgatcctgctggcccagctgaagcccgagaaggatagcgacgaagccgtgacatatagcctgggaaagtttgggcagagggccctggatttctacagcattcatgtgaccaaggagtccacccaccccgtgaagcccctggcccagatcgccggaaacagatacgcctccggacctgtgggaaaggccctgagcgacgcatgtatgggcacaatcgcctccttcctgtctaagtaccaggacatcatcatcgaacaccagaaggtggtgaagggcaaccagaagagactggagagcctgcgggagctggccggcaaggaaaacctggaataccctagcgtgaccctgccacctcagcctcacaccaaggagggcgttgatgcctacaacgaagtgatcgcccgggtgcgaatgtgggtgaacctgaacctgtggcagaagctgaagctaagcagagatgatgccaagcctctgctgagactgaagggattcccttcctttcctctggtcgagagacaggccaacgaagtggactggtgggacatggtgtgtaacgtgaagaagctgatcaacgagaaaaaggaggatggcaaggtgttttggcagaatctggctggctacaagagacaggaagccctgagaccatacctgagcagcgaggaagatcggaagaagggaaagaaattcgctcggtaccagctgggcgacctgctgctgcacctggaaaagaagcacggcgaggactggggaaaggtgtacgacgaggcctgggagcggattgacaagaaagtggaaggcctgagcaagcacatcaagctggaagaggaacggagaagcgaggacgcccagagcaaggccgccctgaccgactggctgcgggctaaggccagcttcgtgatcgagggcctgaaggaggccgacaaggacgagttctgcagatgcgagctgaagctgcagaagtggtacggggacctgcggggaaagcccttcgccatcgaagccgagaacagcatcctggacatcagcggcttcagcaagcagtacaactgtgccttcatctggcagaaggacggcgtgaagaagctgaacctgtacctgatcatcaactacttcaagggcggcaagctgcggttcaagaagatcaaacctgaagccttcgaagccaacagattctacaccgtgatcaacaaaaagagcggcgagatcgtgcccatggaggtgaacttcaacttcgacgaccccaacctgatcatcctgcctctggcctttggcaagagacagggcagagaattcatctggaacgacctgctgtccctggaaaccggcagcctgaagctggccaacggaagagtgatcgagaagacactgtacaacagaagaacccggcaggatgagcctgccctgttcgtggccctgaccttcgagcggcgggaggtcctggactcctccaatatcaaaccaatgaacctgatcggcgtggcaagaggcgaaaacatccccgccgtgatcgccctgaccgaccccgagggctgcccactgagccggtttaaggatagcctgggaaacccaacccacatcctgagaatcggcgagagctataaggagaagcagcggaccatccaggccaagaaggaggtggagcagcggagagccggcggctacagccggaagtacgccagcaaagccaagaatctggcagacgatatggtgagaaacaccgctagagatctgctgtactacgccgtgacccaggatgccatgctgatcttcgccaacctgagccggggcttcggccggcagggcaagcggaccttcatggccgagagacagtacacacggatggaggactggctgaccgccaagctggcctacgagggcctgagcaagacctacctgtccaagacactggcccagtacacctccaagacatgcagcaactgtgggtttaccatcaccagcgccgactacgacagggtgctggagaagctgaagaagacagcaacaggctggatgaccacaattaacggcaaggagctgaaggtggagggccagattacctactacaacagatacaagagacagaacgtagtcaaggacctgtccgtcgagctggatagactgagcgaagaatctgtgaacaacgacatctcctcctggacaaagggcagaagcggagaagctctgagcctcctgaagaaaagattctcccatagacccgtgcaggagaagttcgtgtgcctgaactgcggcttcgagacacacgcagccgagcaagccgccctgaacatcgccagatcctggctgttcctgcggagccaggagtacaagaaataccagacaaacaagacaaccggcaacaccgataagagagccttcgtcgagacctggcagtccttttaccggaagaagcttaaggaggtgtggaaacctgccgtgcggtctggcggatctggcggaggctccaccagccccaagaaaaagagaaaagtctaagctgccttctgcggggcttgccttctggccatgcccttcttctctcccttgcacctgtacctcttggtctttgaataaagcctgagtaggaaggctagcaaaaaaaaaaaaaaaaaaaaaaaaaaaaaaaaaaaaaaaaaaaaaaaaaaaaaaaaaaaaaaaaaaaaaaaaaaaaaaaa

SEQ ID NO: 10142 - RNA, 8787 nt, synthetic construct
  source 1..8787: mol_type = other RNA
aggaaataagagagaaaagaagagtaagaagaaatataagagccaccatggcccctaagaagaagcgtaaagtgagccggatgaaccacgaccaggagttcgacccccctaaggtgtaccctcccgtccccgccgagaagagaaagcccatccgggtcctgagcctgttcgatggcatcgccaccggtctgctggtgctgaaggacctgggcatccaggtggataggtacattgcctccgaggtgtgcgaggactccatcaccgtgggaatggtgcgtcatcagggcaagatcatgtacgtgggcgacgtgcggagcgtgacacagaagcatatccaggagtggggccctttcgacctggtgatcggcggcagcccttgcaatgacctgagcatcgtgaacccagcccggaagggcctgtacgagggaaccggcagactgttcttcgagttttacagactgctgcacgacgcccggcctaaggaaggcgacgaccggcccttcttttggctgttcgagaatgtggtggccatgggagtcagcgacaagcgggatattagccggttcctggagagcaaccccgtgatgatcgatgccaaggaagtgagcgccgcccaccgggccagatacttctggggcaatctgcctggcatgaacagacccctggccagcaccgtgaacgacaagctggagctgcaggagtgcctggagcacggccggatcgccaagttcagcaaggtgagaaccatcaccacccgaagcaacagcatcaaacaaggcaaggaccagcactttcctgtgttcatgaacgagaaggaggacatcctgtggtgtaccgagatggagagagtgttcgggttcccagtccactacacagatgtcagcaacatgtctagactggccagacagagactgctgggaagaagctggtccgtccctgtgatcagacacctgttcgcccctctgaaggagtacttcgcctgcgtgagcagcggcaacagcaacgccaacagccggggccccagcttctctagcggcctggtgccactgtccctgagagggagccacatgggccccatggagatctacaaaaccgtgagcgcctggaagcggcagcctgtgcgcgtgctgagcctgtttcggaatatcgataaagtcctgaaaagcctgggattcctggagagcggctctggctccggcggtggcaccctgaagtacgtggaggatgtgacaaacgtggtcagacgggatgtggagaagtggggccccttcgatctggtgtacggcagcacccaacccctgggcagctcttgtgaccggtgccctggctggtacatgtttcagttccaccggatcctgcagtacgccctgccgagacaggagtcccagcggccattcttttggattttcatggacaacttgctgctgaccgaggatgaccaggaaactaccactcggttcctgcagaccgaagccgtgaccctgcaggacgtgagaggccgggactaccagaacgccatgcgggtgtggtccaacatccctggactgaaaagcaagcacgcacctctgacccctaaagaagaggagtacctgcaggcccaggtgcggagcagaagcaagctggacgcccctaaggtggatctgctggtgaagaattgcctcctgcccctgagagagtacttcaagtatttcagccagaatagtctgcccctgggaggcagcggcggcggccaggccggcagcgacctgttcagggacgtggccgtggtgttcagccaggaggagtgggagcagctggcccccacccagagggacctgtacagggacgtgatgctggagacctacagcaacctggtgagcctgggcctggccgtgagcaagcccgacgtgatcagcttcctggagcagggcaaggagccctggaccgtggagggcgtggccaccggcggcctgtgccccgtgctgaagagcaggggcggcccaagcagcggcgcccctcctcccagcggcggcaggcggcccaagcagcggcgcccctcctcccagcggcggcagcccagccggctccccaacctctaccgaggagggcacctctgagtccgccacccccgagagcggccctggcacctccaccgagcccagcgagggcagcgcacccggcagccctgccggcagccccacctccacagaggagggaaccagcaccgagcccagcgaaggcagcgccccaggcaccagcaccgagcctagtgagcaggagattaaacggatcaacaagatcagaagaagacttgtgaaagacagcaacaccaagaaggccggcaagacaggccccatgaaaaccctgctggttagagtgatgacacccgatctgagagagcggctggaaaacctgagaaagaagcctgaaaatatcccccagcccatcagcaatacatctagagccaacctgaataagctgctgaccgattacaccgaaatgaagaaggcgatcctgcatgtgtactgggaagagttccagaaggaccctgtgggcctgatgagccgggtggcccagcctgccagcaagaagatcgatcagaacaagctgaaacctgagatggacgagaagggcaacctgaccaccgccggctttgcctgctctcagtgtggccagcccctgttcgtgtacaagctggagcaggtgtctgagaagggcaaggcttacaccaactacttcggacggtgcaatgtggccgagcacgaaaagctgatcctgctggcccagctgaagcccgagaaggatagcgacgaagccgtgacatatagcctgggaaagtttgggcagagggccctggatttctacagcattcatgtgaccaaggagtccacccaccccgtgaagcccctggcccagatcgccggaaacagatacgcctccggacctgtgggaaaggccctgagcgacgcatgtatgggcacaatcgcctccttcctgtctaagtaccaggacatcatcatcgaacaccagaaggtggtgaagggcaaccagaagagactggagagcctgcgggagctggccggcaaggaaaacctggaataccctagcgtgaccctgccacctcagcctcacaccaaggagggcgttgatgcctacaacgaagtgatcgcccgggtgcgaatgtgggtgaacctgaacctgtggcagaagctgaagctaagcagagatgatgccaagcctctgctgagactgaagggattcccttcctttcctctggtcgagagacaggccaacgaagtggactggtgggacatggtgtgtaacgtgaagaagctgatcaacgagaaaaaggaggatggcaaggtgttttggcagaatctggctggctacaagagacaggaagccctgagaccatacctgagcagcgaggaagatcggaagaagggaaagaaattcgctcggtaccagctgggcgacctgctgctgcacctggaaaagaagcacggcgaggactggggaaaggtgtacgacgaggcctgggagcggattgacaagaaagtggaaggcctgagcaagcacatcaagctggaagaggaacggagaagcgaggacgcccagagcaaggccgccctgaccgactggctgcgggctaaggccagcttcgtgatcgagggcctgaaggaggccgacaaggacgagttctgcagatgcgagctgaagctgcagaagtggtacggggacctgcggggaaagcccttcgccatcgaagccgagaacagcatcctggacatcagcggcttcagcaagcagtacaactgtgccttcatctggcagaaggacggcgtgaagaagctgaacctgtacctgatcatcaactacttcaagggcggcaagctgcggttcaagaagatcaaacctgaagccttcgaagccaacagattctacaccgtgatcaacaaaaagagcggcgagatcgtgcccatggaggtgaacttcaacttcgacgaccccaacctgatcatcctgcctctggcctttggcaagagacagggcagagaattcatctggaacgacctgctgtccctggaaaccggcagcctgaagctggccaacggaagagtgatcgagaagacactgtacaacagaagaacccggcaggatgagcctgccctgttcgtggccctgaccttcgagcggcgggaggtcctggactcctccaatatcaaaccaatgaacctgatcggcgtggcaagaggcgaaaacatccccgccgtgatcgccctgaccgaccccgagggctgcccactgagccggtttaaggatagcctgggaaacccaacccacatcctgagaatcggcgagagctataaggagaagcagcggaccatccaggccaagaaggaggtggagcagcggagagccggcggctacagccggaagtacgccagcaaagccaagaatctggcagacgatatggtgagaaacaccgctagagatctgctgtactacgccgtgacccaggatgccatgctgatcttcgccaacctgagccggggcttcggccggcagggcaagcggaccttcatggccgagagacagtacacacggatggaggactggctgaccgccaagctggcctacgagggcctgagcaagacctacctgtccaagacactggcccagtacacctccaagacatgcagcaactgtgggtttaccatcaccagcgccgactacgacagggtgctggagaagctgaagaagacagcaacaggctggatgaccacaattaacggcaaggagctgaaggtggagggccagattacctactacaacagatacaagagacagaacgtagtcaaggacctgtccgtcgagctggatagactgagcgaagaatctgtgaacaacgacatctcctcctggacaaagggcagaagcggagaagctctgagcctcctgaagaaaagattctcccatagacccgtgcaggagaagttcgtgtgcctgaactgcggcttcgagacacacgcagccgagcaagccgccctgaacatcgccagatcctggctgttcctgcggagccaggagtacaagaaataccagacaaacaagacaaccggcaacaccgataagagagccttcgtcgagacctggcagtccttttaccggaagaagcttaaggaggtgtggaaacctgccgtgcggtctggcggatctggcggaggctccaccagccccaagaaaaagagaaaagtctaagctgccttctgcggggcttgccttctggccatgcccttcttctctcccttgcacctgtacctcttggtctttgaataaagcctgagtaggaaggctagcaaaaaaaaaaaaaaaaaaaaaaaaaaaaaaaaaaaaaaaaaaaaaaaaaaaaaaaaaaaaaaaaaaaaaaaaaaaaaaaagcccagccggctccccaacctctaccgaggagggcacctctgagtccgccacccccgagagcggccctggcacctccaccgagcccagcgagggcagcgcacccggcagccctgccggcagccccacctccacagaggagggaaccagcaccgagcccagcgaaggcagcgccccaggcaccagcaccgagcctagtgagcaggagattaaacggatcaacaagatcagaagaagacttgtgaaagacagcaacaccaagaaggccggcaagacaggccccatgaaaaccctgctggttagagtgatgacacccgatctgagagagcggctggaaaacctgagaaagaagcctgaaaatatcccccagcccatcagcaatacatctagagccaacctgaataagctgctgaccgattacaccgaaatgaagaaggcgatcctgcatgtgtactgggaagagttccagaaggaccctgtgggcctgatgagccgggtggcccagcctgccagcaagaagatcgatcagaacaagctgaaacctgagatggacgagaagggcaacctgaccaccgccggctttgcctgctctcagtgtggccagcccctgttcgtgtacaagctggagcaggtgtctgagaagggcaaggcttacaccaactacttcggacggtgcaatgtggccgagcacgaaaagctgatcctgctggcccagctgaagcccgagaaggatagcgacgaagccgtgacatatagcctgggaaagtttgggcagagggccctggatttctacagcattcatgtgaccaaggagtccacccaccccgtgaagcccctggcccagatcgccggaaacagatacgcctccggacctgtgggaaaggccctgagcgacgcatgtatgggcacaatcgcctccttcctgtctaagtaccaggacatcatcatcgaacaccagaaggtggtgaagggcaaccagaagagactggagagcctgcgggagctggccggcaaggaaaacctggaataccctagcgtgaccctgccacctcagcctcacaccaaggagggcgttgatgcctacaacgaagtgatcgcccgggtgcgaatgtgggtgaacctgaacctgtggcagaagctgaagctaagcagagatgatgccaagcctctgctgagactgaagggattcccttcctttcctctggtcgagagacaggccaacgaagtggactggtgggacatggtgtgtaacgtgaagaagctgatcaacgagaaaaaggaggatggcaaggtgttttggcagaatctggctggctacaagagacaggaagccctgagaccatacctgagcagcgaggaagatcggaagaagggaaagaaattcgctcggtaccagctgggcgacctgctgctgcacctggaaaagaagcacggcgaggactggggaaaggtgtacgacgaggcctgggagcggattgacaagaaagtggaaggcctgagcaagcacatcaagctggaagaggaacggagaagcgaggacgcccagagcaaggccgccctgaccgactggctgcgggctaaggccagcttcgtgatcgagggcctgaaggaggccgacaaggacgagttctgcagatgcgagctgaagctgcagaagtggtacggggacctgcggggaaagcccttcgccatcgaagccgagaacagcatcctggacatcagcggcttcagcaagcagtacaactgtgccttcatctggcagaaggacggcgtgaagaagctgaacctgtacctgatcatcaactacttcaagggcggcaagctgcggttcaagaagatcaaacctgaagccttcgaagccaacagattctacaccgtgatcaacaaaaagagcggcgagatcgtgcccatggaggtgaacttcaacttcgacgaccccaacctgatcatcctgcctctggcctttggcaagagacagggcagagaattcatctggaacgacctgctgtccctggaaaccggcagcctgaagctggccaacggaagagtgatcgagaagacactgtacaacagaagaacccggcaggatgagcctgccctgttcgtggccctgaccttcgagcggcgggaggtcctggactcctccaatatcaaaccaatgaacctgatcggcgtggcaagaggcgaaaacatccccgccgtgatcgccctgaccgaccccgagggctgcccactgagccggtttaaggatagcctgggaaacccaacccacatcctgagaatcggcgagagctataaggagaagcagcggaccatccaggccaagaaggaggtggagcagcggagagccggcggctacagccggaagtacgccagcaaagccaagaatctggcagacgatatggtgagaaacaccgctagagatctgctgtactacgccgtgacccaggatgccatgctgatcttcgccaacctgagccggggcttcggccggcagggcaagcggaccttcatggccgagagacagtacacacggatggaggactggctgaccgccaagctggcctacgagggcctgagcaagacctacctgtccaagacactggcccagtacacctccaagacatgcagcaactgtgggtttaccatcaccagcgccgactacgacagggtgctggagaagctgaagaagacagcaacaggctggatgaccacaattaacggcaaggagctgaaggtggagggccagattacctactacaacagatacaagagacagaacgtagtcaaggacctgtccgtcgagctggatagactgagcgaagaatctgtgaacaacgacatctcctcctggacaaagggcagaagcggagaagctctgagcctcctgaagaaaagattctcccatagacccgtgcaggagaagttcgtgtgcctgaactgcggcttcgagacacacgcagccgagcaagccgccctgaacatcgccagatcctggctgttcctgcggagccaggagtacaagaaataccagacaaacaagacaaccggcaacaccgataagagagccttcgtcgagacctggcagtccttttaccggaagaagcttaaggaggtgtggaaacctgccgtgcggtctggcggatctggcggaggctccaccagccccaagaaaaagagaaaagtctaagctgccttctgcggggcttgccttctggccatgcccttcttctctcccttgcacctgtacctcttggtctttgaataaagcctgagtaggaaggctagcaaaaaaaaaaaaaaaaaaaaaaaaaaaaaaaaaaaaaaaaaaaaaaaaaaaaaaaaaaaaaaaaaaaaaaaaaaaaaaaa

SEQ ID NO: 10143 - RNA, 8787 nt, synthetic construct
  source 1..8787: mol_type = other RNA
aggaaataagagagaaaagaagagtaagaagaaatataagagccaccatggcccctaagaagaagcgtaaagtgagccggatgaaccacgaccaggagttcgacccccctaaggtgtaccctcccgtccccgccgagaagagaaagcccatccgggtcctgagcctgttcgatggcatcgccaccggtctgctggtgctgaaggacctgggcatccaggtggataggtacattgcctccgaggtgtgcgaggactccatcaccgtgggaatggtgcgtcatcagggcaagatcatgtacgtgggcgacgtgcggagcgtgacacagaagcatatccaggagtggggccctttcgacctggtgatcggcggcagcccttgcaatgacctgagcatcgtgaacccagcccggaagggcctgtacgagggaaccggcagactgttcttcgagttttacagactgctgcacgacgcccggcctaaggaaggcgacgaccggcccttcttttggctgttcgagaatgtggtggccatgggagtcagcgacaagcgggatattagccggttcctggagagcaaccccgtgatgatcgatgccaaggaagtgagcgccgcccaccgggccagatacttctggggcaatctgcctggcatgaacagacccctggccagcaccgtgaacgacaagctggagctgcaggagtgcctggagcacggccggatcgccaagttcagcaaggtgagaaccatcaccacccgaagcaacagcatcaaacaaggcaaggaccagcactttcctgtgttcatgaacgagaaggaggacatcctgtggtgtaccgagatggagagagtgttcgggttcccagtccactacacagatgtcagcaacatgtctagactggccagacagagactgctgggaagaagctggtccgtccctgtgatcagacacctgttcgcccctctgaaggagtacttcgcctgcgtgagcagcggcaacagcaacgccaacagccggggccccagcttctctagcggcctggtgccactgtccctgagagggagccacatgggccccatggagatctacaaaaccgtgagcgcctggaagcggcagcctgtgcgcgtgctgagcctgtttcggaatatcgataaagtcctgaaaagcctgggattcctggagagcggctctggctccggcggtggcaccctgaagtacgtggaggatgtgacaaacgtggtcagacgggatgtggagaagtggggccccttcgatctggtgtacggcagcacccaacccctgggcagctcttgtgaccggtgccctggctggtacatgtttcagttccaccggatcctgcagtacgccctgccgagacaggagtcccagcggccattcttttggattttcatggacaacttgctgctgaccgaggatgaccaggaaactaccactcggttcctgcagaccgaagccgtgaccctgcaggacgtgagaggccgggactaccagaacgccatgcgggtgtggtccaacatccctggactgaaaagcaagcacgcacctctgacccctaaagaagaggagtacctgcaggcccaggtgcggagcagaagcaagctggacgcccctaaggtggatctgctggtgaagaattgcctcctgcccctgagagagtacttcaagtatttcagccagaatagtctgcccctgggaggcagcggcggcggcagccaggagcccgtgaccttcgccgacgtggccgtggtgttcacccccgaggagtgggtgttcctggacagcacccagaggagcctgtacagggacgtgatgctggagaactacaggaacctggccagcgtggccggcgaccagctgaggaagcccaacgccagcagcgacctggagcagaggggcgagcagtggaacaccgagaggggcgtgatcagcgacacctgccccgagccccagctgggcggcccaagcagcggcgcccctcctcccagcggcggcaggcggcccaagcagcggcgcccctcctcccagcggcggcagcccagccggctccccaacctctaccgaggagggcacctctgagtccgccacccccgagagcggccctggcacctccaccgagcccagcgagggcagcgcacccggcagccctgccggcagccccacctccacagaggagggaaccagcaccgagcccagcgaaggcagcgccccaggcaccagcaccgagcctagtgagcaggagattaaacggatcaacaagatcagaagaagacttgtgaaagacagcaacaccaagaaggccggcaagacaggccccatgaaaaccctgctggttagagtgatgacacccgatctgagagagcggctggaaaacctgagaaagaagcctgaaaatatcccccagcccatcagcaatacatctagagccaacctgaataagctgctgaccgattacaccgaaatgaagaaggcgatcctgcatgtgtactgggaagagttccagaaggaccctgtgggcctgatgagccgggtggcccagcctgccagcaagaagatcgatcagaacaagctgaaacctgagatggacgagaagggcaacctgaccaccgccggctttgcctgctctcagtgtggccagcccctgttcgtgtacaagctggagcaggtgtctgagaagggcaaggcttacaccaactacttcggacggtgcaatgtggccgagcacgaaaagctgatcctgctggcccagctgaagcccgagaaggatagcgacgaagccgtgacatatagcctgggaaagtttgggcagagggccctggatttctacagcattcatgtgaccaaggagtccacccaccccgtgaagcccctggcccagatcgccggaaacagatacgcctccggacctgtgggaaaggccctgagcgacgcatgtatgggcacaatcgcctccttcctgtctaagtaccaggacatcatcatcgaacaccagaaggtggtgaagggcaaccagaagagactggagagcctgcgggagctggccggcaaggaaaacctggaataccctagcgtgaccctgccacctcagcctcacaccaaggagggcgttgatgcctacaacgaagtgatcgcccgggtgcgaatgtgggtgaacctgaacctgtggcagaagctgaagctaagcagagatgatgccaagcctctgctgagactgaagggattcccttcctttcctctggtcgagagacaggccaacgaagtggactggtgggacatggtgtgtaacgtgaagaagctgatcaacgagaaaaaggaggatggcaaggtgttttggcagaatctggctggctacaagagacaggaagccctgagaccatacctgagcagcgaggaagatcggaagaagggaaagaaattcgctcggtaccagctgggcgacctgctgctgcacctggaaaagaagcacggcgaggactggggaaaggtgtacgacgaggcctgggagcggattgacaagaaagtggaaggcctgagcaagcacatcaagctggaagaggaacggagaagcgaggacgcccagagcaaggccgccctgaccgactggctgcgggctaaggccagcttcgtgatcgagggcctgaaggaggccgacaaggacgagttctgcagatgcgagctgaagctgcagaagtggtacggggacctgcggggaaagcccttcgccatcgaagccgagaacagcatcctggacatcagcggcttcagcaagcagtacaactgtgccttcatctggcagaaggacggcgtgaagaagctgaacctgtacctgatcatcaactacttcaagggcggcaagctgcggttcaagaagatcaaacctgaagccttcgaagccaacagattctacaccgtgatcaacaaaaagagcggcgagatcgtgcccatggaggtgaacttcaacttcgacgaccccaacctgatcatcctgcctctggcctttggcaagagacagggcagagaattcatctggaacgacctgctgtccctggaaaccggcagcctgaagctggccaacggaagagtgatcgagaagacactgtacaacagaagaacccggcaggatgagcctgccctgttcgtggccctgaccttcgagcggcgggaggtcctggactcctccaatatcaaaccaatgaacctgatcggcgtggcaagaggcgaaaacatccccgccgtgatcgccctgaccgaccccgagggctgcccactgagccggtttaaggatagcctgggaaacccaacccacatcctgagaatcggcgagagctataaggagaagcagcggaccatccaggccaagaaggaggtggagcagcggagagccggcggctacagccggaagtacgccagcaaagccaagaatctggcagacgatatggtgagaaacaccgctagagatctgctgtactacgccgtgacccaggatgccatgctgatcttcgccaacctgagccggggcttcggccggcagggcaagcggaccttcatggccgagagacagtacacacggatggaggactggctgaccgccaagctggcctacgagggcctgagcaagacctacctgtccaagacactggcccagtacacctccaagacatgcagcaactgtgggtttaccatcaccagcgccgactacgacagggtgctggagaagctgaagaagacagcaacaggctggatgaccacaattaacggcaaggagctgaaggtggagggccagattacctactacaacagatacaagagacagaacgtagtcaaggacctgtccgtcgagctggatagactgagcgaagaatctgtgaacaacgacatctcctcctggacaaagggcagaagcggagaagctctgagcctcctgaagaaaagattctcccatagacccgtgcaggagaagttcgtgtgcctgaactgcggcttcgagacacacgcagccgagcaagccgccctgaacatcgccagatcctggctgttcctgcggagccaggagtacaagaaataccagacaaacaagacaaccggcaacaccgataagagagccttcgtcgagacctggcagtccttttaccggaagaagcttaaggaggtgtggaaacctgccgtgcggtctggcggatctggcggaggctccaccagccccaagaaaaagagaaaagtctaagctgccttctgcggggcttgccttctggccatgcccttcttctctcccttgcacctgtacctcttggtctttgaataaagcctgagtaggaaggctagcaaaaaaaaaaaaaaaaaaaaaaaaaaaaaaaaaaaaaaaaaaaaaaaaaaaaaaaaaaaaaaaaaaaaaaaaaaaaaaaagcccagccggctccccaacctctaccgaggagggcacctctgagtccgccacccccgagagcggccctggcacctccaccgagcccagcgagggcagcgcacccggcagccctgccggcagccccacctccacagaggagggaaccagcaccgagcccagcgaaggcagcgccccaggcaccagcaccgagcctagtgagcaggagattaaacggatcaacaagatcagaagaagacttgtgaaagacagcaacaccaagaaggccggcaagacaggccccatgaaaaccctgctggttagagtgatgacacccgatctgagagagcggctggaaaacctgagaaagaagcctgaaaatatcccccagcccatcagcaatacatctagagccaacctgaataagctgctgaccgattacaccgaaatgaagaaggcgatcctgcatgtgtactgggaagagttccagaaggaccctgtgggcctgatgagccgggtggcccagcctgccagcaagaagatcgatcagaacaagctgaaacctgagatggacgagaagggcaacctgaccaccgccggctttgcctgctctcagtgtggccagcccctgttcgtgtacaagctggagcaggtgtctgagaagggcaaggcttacaccaactacttcggacggtgcaatgtggccgagcacgaaaagctgatcctgctggcccagctgaagcccgagaaggatagcgacgaagccgtgacatatagcctgggaaagtttgggcagagggccctggatttctacagcattcatgtgaccaaggagtccacccaccccgtgaagcccctggcccagatcgccggaaacagatacgcctccggacctgtgggaaaggccctgagcgacgcatgtatgggcacaatcgcctccttcctgtctaagtaccaggacatcatcatcgaacaccagaaggtggtgaagggcaaccagaagagactggagagcctgcgggagctggccggcaaggaaaacctggaataccctagcgtgaccctgccacctcagcctcacaccaaggagggcgttgatgcctacaacgaagtgatcgcccgggtgcgaatgtgggtgaacctgaacctgtggcagaagctgaagctaagcagagatgatgccaagcctctgctgagactgaagggattcccttcctttcctctggtcgagagacaggccaacgaagtggactggtgggacatggtgtgtaacgtgaagaagctgatcaacgagaaaaaggaggatggcaaggtgttttggcagaatctggctggctacaagagacaggaagccctgagaccatacctgagcagcgaggaagatcggaagaagggaaagaaattcgctcggtaccagctgggcgacctgctgctgcacctggaaaagaagcacggcgaggactggggaaaggtgtacgacgaggcctgggagcggattgacaagaaagtggaaggcctgagcaagcacatcaagctggaagaggaacggagaagcgaggacgcccagagcaaggccgccctgaccgactggctgcgggctaaggccagcttcgtgatcgagggcctgaaggaggccgacaaggacgagttctgcagatgcgagctgaagctgcagaagtggtacggggacctgcggggaaagcccttcgccatcgaagccgagaacagcatcctggacatcagcggcttcagcaagcagtacaactgtgccttcatctggcagaaggacggcgtgaagaagctgaacctgtacctgatcatcaactacttcaagggcggcaagctgcggttcaagaagatcaaacctgaagccttcgaagccaacagattctacaccgtgatcaacaaaaagagcggcgagatcgtgcccatggaggtgaacttcaacttcgacgaccccaacctgatcatcctgcctctggcctttggcaagagacagggcagagaattcatctggaacgacctgctgtccctggaaaccggcagcctgaagctggccaacggaagagtgatcgagaagacactgtacaacagaagaacccggcaggatgagcctgccctgttcgtggccctgaccttcgagcggcgggaggtcctggactcctccaatatcaaaccaatgaacctgatcggcgtggcaagaggcgaaaacatccccgccgtgatcgccctgaccgaccccgagggctgcccactgagccggtttaaggatagcctgggaaacccaacccacatcctgagaatcggcgagagctataaggagaagcagcggaccatccaggccaagaaggaggtggagcagcggagagccggcggctacagccggaagtacgccagcaaagccaagaatctggcagacgatatggtgagaaacaccgctagagatctgctgtactacgccgtgacccaggatgccatgctgatcttcgccaacctgagccggggcttcggccggcagggcaagcggaccttcatggccgagagacagtacacacggatggaggactggctgaccgccaagctggcctacgagggcctgagcaagacctacctgtccaagacactggcccagtacacctccaagacatgcagcaactgtgggtttaccatcaccagcgccgactacgacagggtgctggagaagctgaagaagacagcaacaggctggatgaccacaattaacggcaaggagctgaaggtggagggccagattacctactacaacagatacaagagacagaacgtagtcaaggacctgtccgtcgagctggatagactgagcgaagaatctgtgaacaacgacatctcctcctggacaaagggcagaagcggagaagctctgagcctcctgaagaaaagattctcccatagacccgtgcaggagaagttcgtgtgcctgaactgcggcttcgagacacacgcagccgagcaagccgccctgaacatcgccagatcctggctgttcctgcggagccaggagtacaagaaataccagacaaacaagacaaccggcaacaccgataagagagccttcgtcgagacctggcagtccttttaccggaagaagcttaaggaggtgtggaaacctgccgtgcggtctggcggatctggcggaggctccaccagccccaagaaaaagagaaaagtctaagctgccttctgcggggcttgccttctggccatgcccttcttctctcccttgcacctgtacctcttggtctttgaataaagcctgagtaggaaggctagcaaaaaaaaaaaaaaaaaaaaaaaaaaaaaaaaaaaaaaaaaaaaaaaaaaaaaaaaaaaaaaaaaaaaaaaaaaaaaaaa

SEQ ID NO: 10144 - RNA, 8787 nt, synthetic construct
  source 1..8787: mol_type = other RNA
aggaaataagagagaaaagaagagtaagaagaaatataagagccaccatggcccctaagaagaagcgtaaagtgagccggatgaaccacgaccaggagttcgacccccctaaggtgtaccctcccgtccccgccgagaagagaaagcccatccgggtcctgagcctgttcgatggcatcgccaccggtctgctggtgctgaaggacctgggcatccaggtggataggtacattgcctccgaggtgtgcgaggactccatcaccgtgggaatggtgcgtcatcagggcaagatcatgtacgtgggcgacgtgcggagcgtgacacagaagcatatccaggagtggggccctttcgacctggtgatcggcggcagcccttgcaatgacctgagcatcgtgaacccagcccggaagggcctgtacgagggaaccggcagactgttcttcgagttttacagactgctgcacgacgcccggcctaaggaaggcgacgaccggcccttcttttggctgttcgagaatgtggtggccatgggagtcagcgacaagcgggatattagccggttcctggagagcaaccccgtgatgatcgatgccaaggaagtgagcgccgcccaccgggccagatacttctggggcaatctgcctggcatgaacagacccctggccagcaccgtgaacgacaagctggagctgcaggagtgcctggagcacggccggatcgccaagttcagcaaggtgagaaccatcaccacccgaagcaacagcatcaaacaaggcaaggaccagcactttcctgtgttcatgaacgagaaggaggacatcctgtggtgtaccgagatggagagagtgttcgggttcccagtccactacacagatgtcagcaacatgtctagactggccagacagagactgctgggaagaagctggtccgtccctgtgatcagacacctgttcgcccctctgaaggagtacttcgcctgcgtgagcagcggcaacagcaacgccaacagccggggccccagcttctctagcggcctggtgccactgtccctgagagggagccacatgggccccatggagatctacaaaaccgtgagcgcctggaagcggcagcctgtgcgcgtgctgagcctgtttcggaatatcgataaagtcctgaaaagcctgggattcctggagagcggctctggctccggcggtggcaccctgaagtacgtggaggatgtgacaaacgtggtcagacgggatgtggagaagtggggccccttcgatctggtgtacggcagcacccaacccctgggcagctcttgtgaccggtgccctggctggtacatgtttcagttccaccggatcctgcagtacgccctgccgagacaggagtcccagcggccattcttttggattttcatggacaacttgctgctgaccgaggatgaccaggaaactaccactcggttcctgcagaccgaagccgtgaccctgcaggacgtgagaggccgggactaccagaacgccatgcgggtgtggtccaacatccctggactgaaaagcaagcacgcacctctgacccctaaagaagaggagtacctgcaggcccaggtgcggagcagaagcaagctggacgcccctaaggtggatctgctggtgaagaattgcctcctgcccctgagagagtacttcaagtatttcagccagaatagtctgcccctgggaggcagcggcggcggccccctgaccttcgaggacgtggccctgtacttcagcgaggaggagtggctgatcatggaccccaaccagaggaccctgtacctggacgtgatgcaggagctgtacgagaacgtgaccagcctgggcctgaagctgaagaacgacaccggcaacgacccccccgtgagcctgcccaccctggagatccagcccagcggctgcgaggtggtgaggaaggccaccatgaaggacgccgagaccaccggcggcccaagcagcggcgcccctcctcccagcggcggcaggcggcccaagcagcggcgcccctcctcccagcggcggcagcccagccggctccccaacctctaccgaggagggcacctctgagtccgccacccccgagagcggccctggcacctccaccgagcccagcgagggcagcgcacccggcagccctgccggcagccccacctccacagaggagggaaccagcaccgagcccagcgaaggcagcgccccaggcaccagcaccgagcctagtgagcaggagattaaacggatcaacaagatcagaagaagacttgtgaaagacagcaacaccaagaaggccggcaagacaggccccatgaaaaccctgctggttagagtgatgacacccgatctgagagagcggctggaaaacctgagaaagaagcctgaaaatatcccccagcccatcagcaatacatctagagccaacctgaataagctgctgaccgattacaccgaaatgaagaaggcgatcctgcatgtgtactgggaagagttccagaaggaccctgtgggcctgatgagccgggtggcccagcctgccagcaagaagatcgatcagaacaagctgaaacctgagatggacgagaagggcaacctgaccaccgccggctttgcctgctctcagtgtggccagcccctgttcgtgtacaagctggagcaggtgtctgagaagggcaaggcttacaccaactacttcggacggtgcaatgtggccgagcacgaaaagctgatcctgctggcccagctgaagcccgagaaggatagcgacgaagccgtgacatatagcctgggaaagtttgggcagagggccctggatttctacagcattcatgtgaccaaggagtccacccaccccgtgaagcccctggcccagatcgccggaaacagatacgcctccggacctgtgggaaaggccctgagcgacgcatgtatgggcacaatcgcctccttcctgtctaagtaccaggacatcatcatcgaacaccagaaggtggtgaagggcaaccagaagagactggagagcctgcgggagctggccggcaaggaaaacctggaataccctagcgtgaccctgccacctcagcctcacaccaaggagggcgttgatgcctacaacgaagtgatcgcccgggtgcgaatgtgggtgaacctgaacctgtggcagaagctgaagctaagcagagatgatgccaagcctctgctgagactgaagggattcccttcctttcctctggtcgagagacaggccaacgaagtggactggtgggacatggtgtgtaacgtgaagaagctgatcaacgagaaaaaggaggatggcaaggtgttttggcagaatctggctggctacaagagacaggaagccctgagaccatacctgagcagcgaggaagatcggaagaagggaaagaaattcgctcggtaccagctgggcgacctgctgctgcacctggaaaagaagcacggcgaggactggggaaaggtgtacgacgaggcctgggagcggattgacaagaaagtggaaggcctgagcaagcacatcaagctggaagaggaacggagaagcgaggacgcccagagcaaggccgccctgaccgactggctgcgggctaaggccagcttcgtgatcgagggcctgaaggaggccgacaaggacgagttctgcagatgcgagctgaagctgcagaagtggtacggggacctgcggggaaagcccttcgccatcgaagccgagaacagcatcctggacatcagcggcttcagcaagcagtacaactgtgccttcatctggcagaaggacggcgtgaagaagctgaacctgtacctgatcatcaactacttcaagggcggcaagctgcggttcaagaagatcaaacctgaagccttcgaagccaacagattctacaccgtgatcaacaaaaagagcggcgagatcgtgcccatggaggtgaacttcaacttcgacgaccccaacctgatcatcctgcctctggcctttggcaagagacagggcagagaattcatctggaacgacctgctgtccctggaaaccggcagcctgaagctggccaacggaagagtgatcgagaagacactgtacaacagaagaacccggcaggatgagcctgccctgttcgtggccctgaccttcgagcggcgggaggtcctggactcctccaatatcaaaccaatgaacctgatcggcgtggcaagaggcgaaaacatccccgccgtgatcgccctgaccgaccccgagggctgcccactgagccggtttaaggatagcctgggaaacccaacccacatcctgagaatcggcgagagctataaggagaagcagcggaccatccaggccaagaaggaggtggagcagcggagagccggcggctacagccggaagtacgccagcaaagccaagaatctggcagacgatatggtgagaaacaccgctagagatctgctgtactacgccgtgacccaggatgccatgctgatcttcgccaacctgagccggggcttcggccggcagggcaagcggaccttcatggccgagagacagtacacacggatggaggactggctgaccgccaagctggcctacgagggcctgagcaagacctacctgtccaagacactggcccagtacacctccaagacatgcagcaactgtgggtttaccatcaccagcgccgactacgacagggtgctggagaagctgaagaagacagcaacaggctggatgaccacaattaacggcaaggagctgaaggtggagggccagattacctactacaacagatacaagagacagaacgtagtcaaggacctgtccgtcgagctggatagactgagcgaagaatctgtgaacaacgacatctcctcctggacaaagggcagaagcggagaagctctgagcctcctgaagaaaagattctcccatagacccgtgcaggagaagttcgtgtgcctgaactgcggcttcgagacacacgcagccgagcaagccgccctgaacatcgccagatcctggctgttcctgcggagccaggagtacaagaaataccagacaaacaagacaaccggcaacaccgataagagagccttcgtcgagacctggcagtccttttaccggaagaagcttaaggaggtgtggaaacctgccgtgcggtctggcggatctggcggaggctccaccagccccaagaaaaagagaaaagtctaagctgccttctgcggggcttgccttctggccatgcccttcttctctcccttgcacctgtacctcttggtctttgaataaagcctgagtaggaaggctagcaaaaaaaaaaaaaaaaaaaaaaaaaaaaaaaaaaaaaaaaaaaaaaaaaaaaaaaaaaaaaaaaaaaaaaaaaaaaaaaagcccagccggctccccaacctctaccgaggagggcacctctgagtccgccacccccgagagcggccctggcacctccaccgagcccagcgagggcagcgcacccggcagccctgccggcagccccacctccacagaggagggaaccagcaccgagcccagcgaaggcagcgccccaggcaccagcaccgagcctagtgagcaggagattaaacggatcaacaagatcagaagaagacttgtgaaagacagcaacaccaagaaggccggcaagacaggccccatgaaaaccctgctggttagagtgatgacacccgatctgagagagcggctggaaaacctgagaaagaagcctgaaaatatcccccagcccatcagcaatacatctagagccaacctgaataagctgctgaccgattacaccgaaatgaagaaggcgatcctgcatgtgtactgggaagagttccagaaggaccctgtgggcctgatgagccgggtggcccagcctgccagcaagaagatcgatcagaacaagctgaaacctgagatggacgagaagggcaacctgaccaccgccggctttgcctgctctcagtgtggccagcccctgttcgtgtacaagctggagcaggtgtctgagaagggcaaggcttacaccaactacttcggacggtgcaatgtggccgagcacgaaaagctgatcctgctggcccagctgaagcccgagaaggatagcgacgaagccgtgacatatagcctgggaaagtttgggcagagggccctggatttctacagcattcatgtgaccaaggagtccacccaccccgtgaagcccctggcccagatcgccggaaacagatacgcctccggacctgtgggaaaggccctgagcgacgcatgtatgggcacaatcgcctccttcctgtctaagtaccaggacatcatcatcgaacaccagaaggtggtgaagggcaaccagaagagactggagagcctgcgggagctggccggcaaggaaaacctggaataccctagcgtgaccctgccacctcagcctcacaccaaggagggcgttgatgcctacaacgaagtgatcgcccgggtgcgaatgtgggtgaacctgaacctgtggcagaagctgaagctaagcagagatgatgccaagcctctgctgagactgaagggattcccttcctttcctctggtcgagagacaggccaacgaagtggactggtgggacatggtgtgtaacgtgaagaagctgatcaacgagaaaaaggaggatggcaaggtgttttggcagaatctggctggctacaagagacaggaagccctgagaccatacctgagcagcgaggaagatcggaagaagggaaagaaattcgctcggtaccagctgggcgacctgctgctgcacctggaaaagaagcacggcgaggactggggaaaggtgtacgacgaggcctgggagcggattgacaagaaagtggaaggcctgagcaagcacatcaagctggaagaggaacggagaagcgaggacgcccagagcaaggccgccctgaccgactggctgcgggctaaggccagcttcgtgatcgagggcctgaaggaggccgacaaggacgagttctgcagatgcgagctgaagctgcagaagtggtacggggacctgcggggaaagcccttcgccatcgaagccgagaacagcatcctggacatcagcggcttcagcaagcagtacaactgtgccttcatctggcagaaggacggcgtgaagaagctgaacctgtacctgatcatcaactacttcaagggcggcaagctgcggttcaagaagatcaaacctgaagccttcgaagccaacagattctacaccgtgatcaacaaaaagagcggcgagatcgtgcccatggaggtgaacttcaacttcgacgaccccaacctgatcatcctgcctctggcctttggcaagagacagggcagagaattcatctggaacgacctgctgtccctggaaaccggcagcctgaagctggccaacggaagagtgatcgagaagacactgtacaacagaagaacccggcaggatgagcctgccctgttcgtggccctgaccttcgagcggcgggaggtcctggactcctccaatatcaaaccaatgaacctgatcggcgtggcaagaggcgaaaacatccccgccgtgatcgccctgaccgaccccgagggctgcccactgagccggtttaaggatagcctgggaaacccaacccacatcctgagaatcggcgagagctataaggagaagcagcggaccatccaggccaagaaggaggtggagcagcggagagccggcggctacagccggaagtacgccagcaaagccaagaatctggcagacgatatggtgagaaacaccgctagagatctgctgtactacgccgtgacccaggatgccatgctgatcttcgccaacctgagccggggcttcggccggcagggcaagcggaccttcatggccgagagacagtacacacggatggaggactggctgaccgccaagctggcctacgagggcctgagcaagacctacctgtccaagacactggcccagtacacctccaagacatgcagcaactgtgggtttaccatcaccagcgccgactacgacagggtgctggagaagctgaagaagacagcaacaggctggatgaccacaattaacggcaaggagctgaaggtggagggccagattacctactacaacagatacaagagacagaacgtagtcaaggacctgtccgtcgagctggatagactgagcgaagaatctgtgaacaacgacatctcctcctggacaaagggcagaagcggagaagctctgagcctcctgaagaaaagattctcccatagacccgtgcaggagaagttcgtgtgcctgaactgcggcttcgagacacacgcagccgagcaagccgccctgaacatcgccagatcctggctgttcctgcggagccaggagtacaagaaataccagacaaacaagacaaccggcaacaccgataagagagccttcgtcgagacctggcagtccttttaccggaagaagcttaaggaggtgtggaaacctgccgtgcggtctggcggatctggcggaggctccaccagccccaagaaaaagagaaaagtctaagctgccttctgcggggcttgccttctggccatgcccttcttctctcccttgcacctgtacctcttggtctttgaataaagcctgagtaggaaggctagcaaaaaaaaaaaaaaaaaaaaaaaaaaaaaaaaaaaaaaaaaaaaaaaaaaaaaaaaaaaaaaaaaaaaaaaaaaaaaaaa

SEQ ID NO: 10145 - RNA, 8787 nt, synthetic construct
  source 1..8787: mol_type = other RNA
aggaaataagagagaaaagaagagtaagaagaaatataagagccaccatggcccctaagaagaagcgtaaagtgagccggatgaaccacgaccaggagttcgacccccctaaggtgtaccctcccgtccccgccgagaagagaaagcccatccgggtcctgagcctgttcgatggcatcgccaccggtctgctggtgctgaaggacctgggcatccaggtggataggtacattgcctccgaggtgtgcgaggactccatcaccgtgggaatggtgcgtcatcagggcaagatcatgtacgtgggcgacgtgcggagcgtgacacagaagcatatccaggagtggggccctttcgacctggtgatcggcggcagcccttgcaatgacctgagcatcgtgaacccagcccggaagggcctgtacgagggaaccggcagactgttcttcgagttttacagactgctgcacgacgcccggcctaaggaaggcgacgaccggcccttcttttggctgttcgagaatgtggtggccatgggagtcagcgacaagcgggatattagccggttcctggagagcaaccccgtgatgatcgatgccaaggaagtgagcgccgcccaccgggccagatacttctggggcaatctgcctggcatgaacagacccctggccagcaccgtgaacgacaagctggagctgcaggagtgcctggagcacggccggatcgccaagttcagcaaggtgagaaccatcaccacccgaagcaacagcatcaaacaaggcaaggaccagcactttcctgtgttcatgaacgagaaggaggacatcctgtggtgtaccgagatggagagagtgttcgggttcccagtccactacacagatgtcagcaacatgtctagactggccagacagagactgctgggaagaagctggtccgtccctgtgatcagacacctgttcgcccctctgaaggagtacttcgcctgcgtgagcagcggcaacagcaacgccaacagccggggccccagcttctctagcggcctggtgccactgtccctgagagggagccacatgggccccatggagatctacaaaaccgtgagcgcctggaagcggcagcctgtgcgcgtgctgagcctgtttcggaatatcgataaagtcctgaaaagcctgggattcctggagagcggctctggctccggcggtggcaccctgaagtacgtggaggatgtgacaaacgtggtcagacgggatgtggagaagtggggccccttcgatctggtgtacggcagcacccaacccctgggcagctcttgtgaccggtgccctggctggtacatgtttcagttccaccggatcctgcagtacgccctgccgagacaggagtcccagcggccattcttttggattttcatggacaacttgctgctgaccgaggatgaccaggaaactaccactcggttcctgcagaccgaagccgtgaccctgcaggacgtgagaggccgggactaccagaacgccatgcgggtgtggtccaacatccctggactgaaaagcaagcacgcacctctgacccctaaagaagaggagtacctgcaggcccaggtgcggagcagaagcaagctggacgcccctaaggtggatctgctggtgaagaattgcctcctgcccctgagagagtacttcaagtatttcagccagaatagtctgcccctgggaggcagcggcggcggcagcaggaagcccgtgagcttcgccgacgtggccgtgtacttcagccccgaggagtggggctgcctgaggcccgtgcagagggccctgtacagggacgtgatgagggagacctacggccacctgggcgccctgggcttccaggacaccaagcccgccctgatcagctggatggaggaggaggccgagctgtggggcagcgacgccagggaccccgagctgggcgagtgcctgagcgaggacaccggcggcccaagcagcggcgcccctcctcccagcggcggcaggcggcccaagcagcggcgcccctcctcccagcggcggcagcccagccggctccccaacctctaccgaggagggcacctctgagtccgccacccccgagagcggccctggcacctccaccgagcccagcgagggcagcgcacccggcagccctgccggcagccccacctccacagaggagggaaccagcaccgagcccagcgaaggcagcgccccaggcaccagcaccgagcctagtgagcaggagattaaacggatcaacaagatcagaagaagacttgtgaaagacagcaacaccaagaaggccggcaagacaggccccatgaaaaccctgctggttagagtgatgacacccgatctgagagagcggctggaaaacctgagaaagaagcctgaaaatatcccccagcccatcagcaatacatctagagccaacctgaataagctgctgaccgattacaccgaaatgaagaaggcgatcctgcatgtgtactgggaagagttccagaaggaccctgtgggcctgatgagccgggtggcccagcctgccagcaagaagatcgatcagaacaagctgaaacctgagatggacgagaagggcaacctgaccaccgccggctttgcctgctctcagtgtggccagcccctgttcgtgtacaagctggagcaggtgtctgagaagggcaaggcttacaccaactacttcggacggtgcaatgtggccgagcacgaaaagctgatcctgctggcccagctgaagcccgagaaggatagcgacgaagccgtgacatatagcctgggaaagtttgggcagagggccctggatttctacagcattcatgtgaccaaggagtccacccaccccgtgaagcccctggcccagatcgccggaaacagatacgcctccggacctgtgggaaaggccctgagcgacgcatgtatgggcacaatcgcctccttcctgtctaagtaccaggacatcatcatcgaacaccagaaggtggtgaagggcaaccagaagagactggagagcctgcgggagctggccggcaaggaaaacctggaataccctagcgtgaccctgccacctcagcctcacaccaaggagggcgttgatgcctacaacgaagtgatcgcccgggtgcgaatgtgggtgaacctgaacctgtggcagaagctgaagctaagcagagatgatgccaagcctctgctgagactgaagggattcccttcctttcctctggtcgagagacaggccaacgaagtggactggtgggacatggtgtgtaacgtgaagaagctgatcaacgagaaaaaggaggatggcaaggtgttttggcagaatctggctggctacaagagacaggaagccctgagaccatacctgagcagcgaggaagatcggaagaagggaaagaaattcgctcggtaccagctgggcgacctgctgctgcacctggaaaagaagcacggcgaggactggggaaaggtgtacgacgaggcctgggagcggattgacaagaaagtggaaggcctgagcaagcacatcaagctggaagaggaacggagaagcgaggacgcccagagcaaggccgccctgaccgactggctgcgggctaaggccagcttcgtgatcgagggcctgaaggaggccgacaaggacgagttctgcagatgcgagctgaagctgcagaagtggtacggggacctgcggggaaagcccttcgccatcgaagccgagaacagcatcctggacatcagcggcttcagcaagcagtacaactgtgccttcatctggcagaaggacggcgtgaagaagctgaacctgtacctgatcatcaactacttcaagggcggcaagctgcggttcaagaagatcaaacctgaagccttcgaagccaacagattctacaccgtgatcaacaaaaagagcggcgagatcgtgcccatggaggtgaacttcaacttcgacgaccccaacctgatcatcctgcctctggcctttggcaagagacagggcagagaattcatctggaacgacctgctgtccctggaaaccggcagcctgaagctggccaacggaagagtgatcgagaagacactgtacaacagaagaacccggcaggatgagcctgccctgttcgtggccctgaccttcgagcggcgggaggtcctggactcctccaatatcaaaccaatgaacctgatcggcgtggcaagaggcgaaaacatccccgccgtgatcgccctgaccgaccccgagggctgcccactgagccggtttaaggatagcctgggaaacccaacccacatcctgagaatcggcgagagctataaggagaagcagcggaccatccaggccaagaaggaggtggagcagcggagagccggcggctacagccggaagtacgccagcaaagccaagaatctggcagacgatatggtgagaaacaccgctagagatctgctgtactacgccgtgacccaggatgccatgctgatcttcgccaacctgagccggggcttcggccggcagggcaagcggaccttcatggccgagagacagtacacacggatggaggactggctgaccgccaagctggcctacgagggcctgagcaagacctacctgtccaagacactggcccagtacacctccaagacatgcagcaactgtgggtttaccatcaccagcgccgactacgacagggtgctggagaagctgaagaagacagcaacaggctggatgaccacaattaacggcaaggagctgaaggtggagggccagattacctactacaacagatacaagagacagaacgtagtcaaggacctgtccgtcgagctggatagactgagcgaagaatctgtgaacaacgacatctcctcctggacaaagggcagaagcggagaagctctgagcctcctgaagaaaagattctcccatagacccgtgcaggagaagttcgtgtgcctgaactgcggcttcgagacacacgcagccgagcaagccgccctgaacatcgccagatcctggctgttcctgcggagccaggagtacaagaaataccagacaaacaagacaaccggcaacaccgataagagagccttcgtcgagacctggcagtccttttaccggaagaagcttaaggaggtgtggaaacctgccgtgcggtctggcggatctggcggaggctccaccagccccaagaaaaagagaaaagtctaagctgccttctgcggggcttgccttctggccatgcccttcttctctcccttgcacctgtacctcttggtctttgaataaagcctgagtaggaaggctagcaaaaaaaaaaaaaaaaaaaaaaaaaaaaaaaaaaaaaaaaaaaaaaaaaaaaaaaaaaaaaaaaaaaaaaaaaaaaaaaagcccagccggctccccaacctctaccgaggagggcacctctgagtccgccacccccgagagcggccctggcacctccaccgagcccagcgagggcagcgcacccggcagccctgccggcagccccacctccacagaggagggaaccagcaccgagcccagcgaaggcagcgccccaggcaccagcaccgagcctagtgagcaggagattaaacggatcaacaagatcagaagaagacttgtgaaagacagcaacaccaagaaggccggcaagacaggccccatgaaaaccctgctggttagagtgatgacacccgatctgagagagcggctggaaaacctgagaaagaagcctgaaaatatcccccagcccatcagcaatacatctagagccaacctgaataagctgctgaccgattacaccgaaatgaagaaggcgatcctgcatgtgtactgggaagagttccagaaggaccctgtgggcctgatgagccgggtggcccagcctgccagcaagaagatcgatcagaacaagctgaaacctgagatggacgagaagggcaacctgaccaccgccggctttgcctgctctcagtgtggccagcccctgttcgtgtacaagctggagcaggtgtctgagaagggcaaggcttacaccaactacttcggacggtgcaatgtggccgagcacgaaaagctgatcctgctggcccagctgaagcccgagaaggatagcgacgaagccgtgacatatagcctgggaaagtttgggcagagggccctggatttctacagcattcatgtgaccaaggagtccacccaccccgtgaagcccctggcccagatcgccggaaacagatacgcctccggacctgtgggaaaggccctgagcgacgcatgtatgggcacaatcgcctccttcctgtctaagtaccaggacatcatcatcgaacaccagaaggtggtgaagggcaaccagaagagactggagagcctgcgggagctggccggcaaggaaaacctggaataccctagcgtgaccctgccacctcagcctcacaccaaggagggcgttgatgcctacaacgaagtgatcgcccgggtgcgaatgtgggtgaacctgaacctgtggcagaagctgaagctaagcagagatgatgccaagcctctgctgagactgaagggattcccttcctttcctctggtcgagagacaggccaacgaagtggactggtgggacatggtgtgtaacgtgaagaagctgatcaacgagaaaaaggaggatggcaaggtgttttggcagaatctggctggctacaagagacaggaagccctgagaccatacctgagcagcgaggaagatcggaagaagggaaagaaattcgctcggtaccagctgggcgacctgctgctgcacctggaaaagaagcacggcgaggactggggaaaggtgtacgacgaggcctgggagcggattgacaagaaagtggaaggcctgagcaagcacatcaagctggaagaggaacggagaagcgaggacgcccagagcaaggccgccctgaccgactggctgcgggctaaggccagcttcgtgatcgagggcctgaaggaggccgacaaggacgagttctgcagatgcgagctgaagctgcagaagtggtacggggacctgcggggaaagcccttcgccatcgaagccgagaacagcatcctggacatcagcggcttcagcaagcagtacaactgtgccttcatctggcagaaggacggcgtgaagaagctgaacctgtacctgatcatcaactacttcaagggcggcaagctgcggttcaagaagatcaaacctgaagccttcgaagccaacagattctacaccgtgatcaacaaaaagagcggcgagatcgtgcccatggaggtgaacttcaacttcgacgaccccaacctgatcatcctgcctctggcctttggcaagagacagggcagagaattcatctggaacgacctgctgtccctggaaaccggcagcctgaagctggccaacggaagagtgatcgagaagacactgtacaacagaagaacccggcaggatgagcctgccctgttcgtggccctgaccttcgagcggcgggaggtcctggactcctccaatatcaaaccaatgaacctgatcggcgtggcaagaggcgaaaacatccccgccgtgatcgccctgaccgaccccgagggctgcccactgagccggtttaaggatagcctgggaaacccaacccacatcctgagaatcggcgagagctataaggagaagcagcggaccatccaggccaagaaggaggtggagcagcggagagccggcggctacagccggaagtacgccagcaaagccaagaatctggcagacgatatggtgagaaacaccgctagagatctgctgtactacgccgtgacccaggatgccatgctgatcttcgccaacctgagccggggcttcggccggcagggcaagcggaccttcatggccgagagacagtacacacggatggaggactggctgaccgccaagctggcctacgagggcctgagcaagacctacctgtccaagacactggcccagtacacctccaagacatgcagcaactgtgggtttaccatcaccagcgccgactacgacagggtgctggagaagctgaagaagacagcaacaggctggatgaccacaattaacggcaaggagctgaaggtggagggccagattacctactacaacagatacaagagacagaacgtagtcaaggacctgtccgtcgagctggatagactgagcgaagaatctgtgaacaacgacatctcctcctggacaaagggcagaagcggagaagctctgagcctcctgaagaaaagattctcccatagacccgtgcaggagaagttcgtgtgcctgaactgcggcttcgagacacacgcagccgagcaagccgccctgaacatcgccagatcctggctgttcctgcggagccaggagtacaagaaataccagacaaacaagacaaccggcaacaccgataagagagccttcgtcgagacctggcagtccttttaccggaagaagcttaaggaggtgtggaaacctgccgtgcggtctggcggatctggcggaggctccaccagccccaagaaaaagagaaaagtctaagctgccttctgcggggcttgccttctggccatgcccttcttctctcccttgcacctgtacctcttggtctttgaataaagcctgagtaggaaggctagcaaaaaaaaaaaaaaaaaaaaaaaaaaaaaaaaaaaaaaaaaaaaaaaaaaaaaaaaaaaaaaaaaaaaaaaaaaaaaaaa

SEQ ID NO: 10146 - RNA, 8787 nt, synthetic construct
  source 1..8787: mol_type = other RNA
aggaaataagagagaaaagaagagtaagaagaaatataagagccaccatggcccctaagaagaagcgtaaagtgagccggatgaaccacgaccaggagttcgacccccctaaggtgtaccctcccgtccccgccgagaagagaaagcccatccgggtcctgagcctgttcgatggcatcgccaccggtctgctggtgctgaaggacctgggcatccaggtggataggtacattgcctccgaggtgtgcgaggactccatcaccgtgggaatggtgcgtcatcagggcaagatcatgtacgtgggcgacgtgcggagcgtgacacagaagcatatccaggagtggggccctttcgacctggtgatcggcggcagcccttgcaatgacctgagcatcgtgaacccagcccggaagggcctgtacgagggaaccggcagactgttcttcgagttttacagactgctgcacgacgcccggcctaaggaaggcgacgaccggcccttcttttggctgttcgagaatgtggtggccatgggagtcagcgacaagcgggatattagccggttcctggagagcaaccccgtgatgatcgatgccaaggaagtgagcgccgcccaccgggccagatacttctggggcaatctgcctggcatgaacagacccctggccagcaccgtgaacgacaagctggagctgcaggagtgcctggagcacggccggatcgccaagttcagcaaggtgagaaccatcaccacccgaagcaacagcatcaaacaaggcaaggaccagcactttcctgtgttcatgaacgagaaggaggacatcctgtggtgtaccgagatggagagagtgttcgggttcccagtccactacacagatgtcagcaacatgtctagactggccagacagagactgctgggaagaagctggtccgtccctgtgatcagacacctgttcgcccctctgaaggagtacttcgcctgcgtgagcagcggcaacagcaacgccaacagccggggccccagcttctctagcggcctggtgccactgtccctgagagggagccacatgggccccatggagatctacaaaaccgtgagcgcctggaagcggcagcctgtgcgcgtgctgagcctgtttcggaatatcgataaagtcctgaaaagcctgggattcctggagagcggctctggctccggcggtggcaccctgaagtacgtggaggatgtgacaaacgtggtcagacgggatgtggagaagtggggccccttcgatctggtgtacggcagcacccaacccctgggcagctcttgtgaccggtgccctggctggtacatgtttcagttccaccggatcctgcagtacgccctgccgagacaggagtcccagcggccattcttttggattttcatggacaacttgctgctgaccgaggatgaccaggaaactaccactcggttcctgcagaccgaagccgtgaccctgcaggacgtgagaggccgggactaccagaacgccatgcgggtgtggtccaacatccctggactgaaaagcaagcacgcacctctgacccctaaagaagaggagtacctgcaggcccaggtgcggagcagaagcaagctggacgcccctaaggtggatctgctggtgaagaattgcctcctgcccctgagagagtacttcaagtatttcagccagaatagtctgcccctgggaggcagcggcggcggcagccaggagcccgtgagcttcctggacgtggccgtggacttcacccaggaggagtggcagcagctggaccccgtgcagaggaccacctacagggacgtgatgctggagaactacagccacctggtggccctgggctacgacagcgccaagcccaacgtgatcgtgaagctggagcagggcgaggagccctgggtggccgagggcgacctgccctgcaggagcaggcccgaggaggtgtggcagggcggcccaagcagcggcgcccctcctcccagcggcggcaggcggcccaagcagcggcgcccctcctcccagcggcggcagcccagccggctccccaacctctaccgaggagggcacctctgagtccgccacccccgagagcggccctggcacctccaccgagcccagcgagggcagcgcacccggcagccctgccggcagccccacctccacagaggagggaaccagcaccgagcccagcgaaggcagcgccccaggcaccagcaccgagcctagtgagcaggagattaaacggatcaacaagatcagaagaagacttgtgaaagacagcaacaccaagaaggccggcaagacaggccccatgaaaaccctgctggttagagtgatgacacccgatctgagagagcggctggaaaacctgagaaagaagcctgaaaatatcccccagcccatcagcaatacatctagagccaacctgaataagctgctgaccgattacaccgaaatgaagaaggcgatcctgcatgtgtactgggaagagttccagaaggaccctgtgggcctgatgagccgggtggcccagcctgccagcaagaagatcgatcagaacaagctgaaacctgagatggacgagaagggcaacctgaccaccgccggctttgcctgctctcagtgtggccagcccctgttcgtgtacaagctggagcaggtgtctgagaagggcaaggcttacaccaactacttcggacggtgcaatgtggccgagcacgaaaagctgatcctgctggcccagctgaagcccgagaaggatagcgacgaagccgtgacatatagcctgggaaagtttgggcagagggccctggatttctacagcattcatgtgaccaaggagtccacccaccccgtgaagcccctggcccagatcgccggaaacagatacgcctccggacctgtgggaaaggccctgagcgacgcatgtatgggcacaatcgcctccttcctgtctaagtaccaggacatcatcatcgaacaccagaaggtggtgaagggcaaccagaagagactggagagcctgcgggagctggccggcaaggaaaacctggaataccctagcgtgaccctgccacctcagcctcacaccaaggagggcgttgatgcctacaacgaagtgatcgcccgggtgcgaatgtgggtgaacctgaacctgtggcagaagctgaagctaagcagagatgatgccaagcctctgctgagactgaagggattcccttcctttcctctggtcgagagacaggccaacgaagtggactggtgggacatggtgtgtaacgtgaagaagctgatcaacgagaaaaaggaggatggcaaggtgttttggcagaatctggctggctacaagagacaggaagccctgagaccatacctgagcagcgaggaagatcggaagaagggaaagaaattcgctcggtaccagctgggcgacctgctgctgcacctggaaaagaagcacggcgaggactggggaaaggtgtacgacgaggcctgggagcggattgacaagaaagtggaaggcctgagcaagcacatcaagctggaagaggaacggagaagcgaggacgcccagagcaaggccgccctgaccgactggctgcgggctaaggccagcttcgtgatcgagggcctgaaggaggccgacaaggacgagttctgcagatgcgagctgaagctgcagaagtggtacggggacctgcggggaaagcccttcgccatcgaagccgagaacagcatcctggacatcagcggcttcagcaagcagtacaactgtgccttcatctggcagaaggacggcgtgaagaagctgaacctgtacctgatcatcaactacttcaagggcggcaagctgcggttcaagaagatcaaacctgaagccttcgaagccaacagattctacaccgtgatcaacaaaaagagcggcgagatcgtgcccatggaggtgaacttcaacttcgacgaccccaacctgatcatcctgcctctggcctttggcaagagacagggcagagaattcatctggaacgacctgctgtccctggaaaccggcagcctgaagctggccaacggaagagtgatcgagaagacactgtacaacagaagaacccggcaggatgagcctgccctgttcgtggccctgaccttcgagcggcgggaggtcctggactcctccaatatcaaaccaatgaacctgatcggcgtggcaagaggcgaaaacatccccgccgtgatcgccctgaccgaccccgagggctgcccactgagccggtttaaggatagcctgggaaacccaacccacatcctgagaatcggcgagagctataaggagaagcagcggaccatccaggccaagaaggaggtggagcagcggagagccggcggctacagccggaagtacgccagcaaagccaagaatctggcagacgatatggtgagaaacaccgctagagatctgctgtactacgccgtgacccaggatgccatgctgatcttcgccaacctgagccggggcttcggccggcagggcaagcggaccttcatggccgagagacagtacacacggatggaggactggctgaccgccaagctggcctacgagggcctgagcaagacctacctgtccaagacactggcccagtacacctccaagacatgcagcaactgtgggtttaccatcaccagcgccgactacgacagggtgctggagaagctgaagaagacagcaacaggctggatgaccacaattaacggcaaggagctgaaggtggagggccagattacctactacaacagatacaagagacagaacgtagtcaaggacctgtccgtcgagctggatagactgagcgaagaatctgtgaacaacgacatctcctcctggacaaagggcagaagcggagaagctctgagcctcctgaagaaaagattctcccatagacccgtgcaggagaagttcgtgtgcctgaactgcggcttcgagacacacgcagccgagcaagccgccctgaacatcgccagatcctggctgttcctgcggagccaggagtacaagaaataccagacaaacaagacaaccggcaacaccgataagagagccttcgtcgagacctggcagtccttttaccggaagaagcttaaggaggtgtggaaacctgccgtgcggtctggcggatctggcggaggctccaccagccccaagaaaaagagaaaagtctaagctgccttctgcggggcttgccttctggccatgcccttcttctctcccttgcacctgtacctcttggtctttgaataaagcctgagtaggaaggctagcaaaaaaaaaaaaaaaaaaaaaaaaaaaaaaaaaaaaaaaaaaaaaaaaaaaaaaaaaaaaaaaaaaaaaaaaaaaaaaaagcccagccggctccccaacctctaccgaggagggcacctctgagtccgccacccccgagagcggccctggcacctccaccgagcccagcgagggcagcgcacccggcagccctgccggcagccccacctccacagaggagggaaccagcaccgagcccagcgaaggcagcgccccaggcaccagcaccgagcctagtgagcaggagattaaacggatcaacaagatcagaagaagacttgtgaaagacagcaacaccaagaaggccggcaagacaggccccatgaaaaccctgctggttagagtgatgacacccgatctgagagagcggctggaaaacctgagaaagaagcctgaaaatatcccccagcccatcagcaatacatctagagccaacctgaataagctgctgaccgattacaccgaaatgaagaaggcgatcctgcatgtgtactgggaagagttccagaaggaccctgtgggcctgatgagccgggtggcccagcctgccagcaagaagatcgatcagaacaagctgaaacctgagatggacgagaagggcaacctgaccaccgccggctttgcctgctctcagtgtggccagcccctgttcgtgtacaagctggagcaggtgtctgagaagggcaaggcttacaccaactacttcggacggtgcaatgtggccgagcacgaaaagctgatcctgctggcccagctgaagcccgagaaggatagcgacgaagccgtgacatatagcctgggaaagtttgggcagagggccctggatttctacagcattcatgtgaccaaggagtccacccaccccgtgaagcccctggcccagatcgccggaaacagatacgcctccggacctgtgggaaaggccctgagcgacgcatgtatgggcacaatcgcctccttcctgtctaagtaccaggacatcatcatcgaacaccagaaggtggtgaagggcaaccagaagagactggagagcctgcgggagctggccggcaaggaaaacctggaataccctagcgtgaccctgccacctcagcctcacaccaaggagggcgttgatgcctacaacgaagtgatcgcccgggtgcgaatgtgggtgaacctgaacctgtggcagaagctgaagctaagcagagatgatgccaagcctctgctgagactgaagggattcccttcctttcctctggtcgagagacaggccaacgaagtggactggtgggacatggtgtgtaacgtgaagaagctgatcaacgagaaaaaggaggatggcaaggtgttttggcagaatctggctggctacaagagacaggaagccctgagaccatacctgagcagcgaggaagatcggaagaagggaaagaaattcgctcggtaccagctgggcgacctgctgctgcacctggaaaagaagcacggcgaggactggggaaaggtgtacgacgaggcctgggagcggattgacaagaaagtggaaggcctgagcaagcacatcaagctggaagaggaacggagaagcgaggacgcccagagcaaggccgccctgaccgactggctgcgggctaaggccagcttcgtgatcgagggcctgaaggaggccgacaaggacgagttctgcagatgcgagctgaagctgcagaagtggtacggggacctgcggggaaagcccttcgccatcgaagccgagaacagcatcctggacatcagcggcttcagcaagcagtacaactgtgccttcatctggcagaaggacggcgtgaagaagctgaacctgtacctgatcatcaactacttcaagggcggcaagctgcggttcaagaagatcaaacctgaagccttcgaagccaacagattctacaccgtgatcaacaaaaagagcggcgagatcgtgcccatggaggtgaacttcaacttcgacgaccccaacctgatcatcctgcctctggcctttggcaagagacagggcagagaattcatctggaacgacctgctgtccctggaaaccggcagcctgaagctggccaacggaagagtgatcgagaagacactgtacaacagaagaacccggcaggatgagcctgccctgttcgtggccctgaccttcgagcggcgggaggtcctggactcctccaatatcaaaccaatgaacctgatcggcgtggcaagaggcgaaaacatccccgccgtgatcgccctgaccgaccccgagggctgcccactgagccggtttaaggatagcctgggaaacccaacccacatcctgagaatcggcgagagctataaggagaagcagcggaccatccaggccaagaaggaggtggagcagcggagagccggcggctacagccggaagtacgccagcaaagccaagaatctggcagacgatatggtgagaaacaccgctagagatctgctgtactacgccgtgacccaggatgccatgctgatcttcgccaacctgagccggggcttcggccggcagggcaagcggaccttcatggccgagagacagtacacacggatggaggactggctgaccgccaagctggcctacgagggcctgagcaagacctacctgtccaagacactggcccagtacacctccaagacatgcagcaactgtgggtttaccatcaccagcgccgactacgacagggtgctggagaagctgaagaagacagcaacaggctggatgaccacaattaacggcaaggagctgaaggtggagggccagattacctactacaacagatacaagagacagaacgtagtcaaggacctgtccgtcgagctggatagactgagcgaagaatctgtgaacaacgacatctcctcctggacaaagggcagaagcggagaagctctgagcctcctgaagaaaagattctcccatagacccgtgcaggagaagttcgtgtgcctgaactgcggcttcgagacacacgcagccgagcaagccgccctgaacatcgccagatcctggctgttcctgcggagccaggagtacaagaaataccagacaaacaagacaaccggcaacaccgataagagagccttcgtcgagacctggcagtccttttaccggaagaagcttaaggaggtgtggaaacctgccgtgcggtctggcggatctggcggaggctccaccagccccaagaaaaagagaaaagtctaagctgccttctgcggggcttgccttctggccatgcccttcttctctcccttgcacctgtacctcttggtctttgaataaagcctgagtaggaaggctagcaaaaaaaaaaaaaaaaaaaaaaaaaaaaaaaaaaaaaaaaaaaaaaaaaaaaaaaaaaaaaaaaaaaaaaaaaaaaaaaa

SEQ ID NO: 10147 - RNA, 8787 nt, synthetic construct
  source 1..8787: mol_type = other RNA
aggaaataagagagaaaagaagagtaagaagaaatataagagccaccatggcccctaagaagaagcgtaaagtgagccggatgaaccacgaccaggagttcgacccccctaaggtgtaccctcccgtccccgccgagaagagaaagcccatccgggtcctgagcctgttcgatggcatcgccaccggtctgctggtgctgaaggacctgggcatccaggtggataggtacattgcctccgaggtgtgcgaggactccatcaccgtgggaatggtgcgtcatcagggcaagatcatgtacgtgggcgacgtgcggagcgtgacacagaagcatatccaggagtggggccctttcgacctggtgatcggcggcagcccttgcaatgacctgagcatcgtgaacccagcccggaagggcctgtacgagggaaccggcagactgttcttcgagttttacagactgctgcacgacgcccggcctaaggaaggcgacgaccggcccttcttttggctgttcgagaatgtggtggccatgggagtcagcgacaagcgggatattagccggttcctggagagcaaccccgtgatgatcgatgccaaggaagtgagcgccgcccaccgggccagatacttctggggcaatctgcctggcatgaacagacccctggccagcaccgtgaacgacaagctggagctgcaggagtgcctggagcacggccggatcgccaagttcagcaaggtgagaaccatcaccacccgaagcaacagcatcaaacaaggcaaggaccagcactttcctgtgttcatgaacgagaaggaggacatcctgtggtgtaccgagatggagagagtgttcgggttcccagtccactacacagatgtcagcaacatgtctagactggccagacagagactgctgggaagaagctggtccgtccctgtgatcagacacctgttcgcccctctgaaggagtacttcgcctgcgtgagcagcggcaacagcaacgccaacagccggggccccagcttctctagcggcctggtgccactgtccctgagagggagccacatgggccccatggagatctacaaaaccgtgagcgcctggaagcggcagcctgtgcgcgtgctgagcctgtttcggaatatcgataaagtcctgaaaagcctgggattcctggagagcggctctggctccggcggtggcaccctgaagtacgtggaggatgtgacaaacgtggtcagacgggatgtggagaagtggggccccttcgatctggtgtacggcagcacccaacccctgggcagctcttgtgaccggtgccctggctggtacatgtttcagttccaccggatcctgcagtacgccctgccgagacaggagtcccagcggccattcttttggattttcatggacaacttgctgctgaccgaggatgaccaggaaactaccactcggttcctgcagaccgaagccgtgaccctgcaggacgtgagaggccgggactaccagaacgccatgcgggtgtggtccaacatccctggactgaaaagcaagcacgcacctctgacccctaaagaagaggagtacctgcaggcccaggtgcggagcagaagcaagctggacgcccctaaggtggatctgctggtgaagaattgcctcctgcccctgagagagtacttcaagtatttcagccagaatagtctgcccctgggaggcagcggcggcggcagccagggcctggtgaccttcgaggacgtggccgtgtacttcagcctggaggagtgggagaggctggacgccgcccagagggacctgtacaaggaggtgatgcaggagaactacggcatcctggtgagcctgggctaccccatccccaagcccgacctgatcttcaggctggagcagggcgaggagccctgggtgcccgacagccccaggcccgaggagggcgacatcgtgaccggcgtgtacggcggcccaagcagcggcgcccctcctcccagcggcggcaggcggcccaagcagcggcgcccctcctcccagcggcggcagcccagccggctccccaacctctaccgaggagggcacctctgagtccgccacccccgagagcggccctggcacctccaccgagcccagcgagggcagcgcacccggcagccctgccggcagccccacctccacagaggagggaaccagcaccgagcccagcgaaggcagcgccccaggcaccagcaccgagcctagtgagcaggagattaaacggatcaacaagatcagaagaagacttgtgaaagacagcaacaccaagaaggccggcaagacaggccccatgaaaaccctgctggttagagtgatgacacccgatctgagagagcggctggaaaacctgagaaagaagcctgaaaatatcccccagcccatcagcaatacatctagagccaacctgaataagctgctgaccgattacaccgaaatgaagaaggcgatcctgcatgtgtactgggaagagttccagaaggaccctgtgggcctgatgagccgggtggcccagcctgccagcaagaagatcgatcagaacaagctgaaacctgagatggacgagaagggcaacctgaccaccgccggctttgcctgctctcagtgtggccagcccctgttcgtgtacaagctggagcaggtgtctgagaagggcaaggcttacaccaactacttcggacggtgcaatgtggccgagcacgaaaagctgatcctgctggcccagctgaagcccgagaaggatagcgacgaagccgtgacatatagcctgggaaagtttgggcagagggccctggatttctacagcattcatgtgaccaaggagtccacccaccccgtgaagcccctggcccagatcgccggaaacagatacgcctccggacctgtgggaaaggccctgagcgacgcatgtatgggcacaatcgcctccttcctgtctaagtaccaggacatcatcatcgaacaccagaaggtggtgaagggcaaccagaagagactggagagcctgcgggagctggccggcaaggaaaacctggaataccctagcgtgaccctgccacctcagcctcacaccaaggagggcgttgatgcctacaacgaagtgatcgcccgggtgcgaatgtgggtgaacctgaacctgtggcagaagctgaagctaagcagagatgatgccaagcctctgctgagactgaagggattcccttcctttcctctggtcgagagacaggccaacgaagtggactggtgggacatggtgtgtaacgtgaagaagctgatcaacgagaaaaaggaggatggcaaggtgttttggcagaatctggctggctacaagagacaggaagccctgagaccatacctgagcagcgaggaagatcggaagaagggaaagaaattcgctcggtaccagctgggcgacctgctgctgcacctggaaaagaagcacggcgaggactggggaaaggtgtacgacgaggcctgggagcggattgacaagaaagtggaaggcctgagcaagcacatcaagctggaagaggaacggagaagcgaggacgcccagagcaaggccgccctgaccgactggctgcgggctaaggccagcttcgtgatcgagggcctgaaggaggccgacaaggacgagttctgcagatgcgagctgaagctgcagaagtggtacggggacctgcggggaaagcccttcgccatcgaagccgagaacagcatcctggacatcagcggcttcagcaagcagtacaactgtgccttcatctggcagaaggacggcgtgaagaagctgaacctgtacctgatcatcaactacttcaagggcggcaagctgcggttcaagaagatcaaacctgaagccttcgaagccaacagattctacaccgtgatcaacaaaaagagcggcgagatcgtgcccatggaggtgaacttcaacttcgacgaccccaacctgatcatcctgcctctggcctttggcaagagacagggcagagaattcatctggaacgacctgctgtccctggaaaccggcagcctgaagctggccaacggaagagtgatcgagaagacactgtacaacagaagaacccggcaggatgagcctgccctgttcgtggccctgaccttcgagcggcgggaggtcctggactcctccaatatcaaaccaatgaacctgatcggcgtggcaagaggcgaaaacatccccgccgtgatcgccctgaccgaccccgagggctgcccactgagccggtttaaggatagcctgggaaacccaacccacatcctgagaatcggcgagagctataaggagaagcagcggaccatccaggccaagaaggaggtggagcagcggagagccggcggctacagccggaagtacgccagcaaagccaagaatctggcagacgatatggtgagaaacaccgctagagatctgctgtactacgccgtgacccaggatgccatgctgatcttcgccaacctgagccggggcttcggccggcagggcaagcggaccttcatggccgagagacagtacacacggatggaggactggctgaccgccaagctggcctacgagggcctgagcaagacctacctgtccaagacactggcccagtacacctccaagacatgcagcaactgtgggtttaccatcaccagcgccgactacgacagggtgctggagaagctgaagaagacagcaacaggctggatgaccacaattaacggcaaggagctgaaggtggagggccagattacctactacaacagatacaagagacagaacgtagtcaaggacctgtccgtcgagctggatagactgagcgaagaatctgtgaacaacgacatctcctcctggacaaagggcagaagcggagaagctctgagcctcctgaagaaaagattctcccatagacccgtgcaggagaagttcgtgtgcctgaactgcggcttcgagacacacgcagccgagcaagccgccctgaacatcgccagatcctggctgttcctgcggagccaggagtacaagaaataccagacaaacaagacaaccggcaacaccgataagagagccttcgtcgagacctggcagtccttttaccggaagaagcttaaggaggtgtggaaacctgccgtgcggtctggcggatctggcggaggctccaccagccccaagaaaaagagaaaagtctaagctgccttctgcggggcttgccttctggccatgcccttcttctctcccttgcacctgtacctcttggtctttgaataaagcctgagtaggaaggctagcaaaaaaaaaaaaaaaaaaaaaaaaaaaaaaaaaaaaaaaaaaaaaaaaaaaaaaaaaaaaaaaaaaaaaaaaaaaaaaaagcccagccggctccccaacctctaccgaggagggcacctctgagtccgccacccccgagagcggccctggcacctccaccgagcccagcgagggcagcgcacccggcagccctgccggcagccccacctccacagaggagggaaccagcaccgagcccagcgaaggcagcgccccaggcaccagcaccgagcctagtgagcaggagattaaacggatcaacaagatcagaagaagacttgtgaaagacagcaacaccaagaaggccggcaagacaggccccatgaaaaccctgctggttagagtgatgacacccgatctgagagagcggctggaaaacctgagaaagaagcctgaaaatatcccccagcccatcagcaatacatctagagccaacctgaataagctgctgaccgattacaccgaaatgaagaaggcgatcctgcatgtgtactgggaagagttccagaaggaccctgtgggcctgatgagccgggtggcccagcctgccagcaagaagatcgatcagaacaagctgaaacctgagatggacgagaagggcaacctgaccaccgccggctttgcctgctctcagtgtggccagcccctgttcgtgtacaagctggagcaggtgtctgagaagggcaaggcttacaccaactacttcggacggtgcaatgtggccgagcacgaaaagctgatcctgctggcccagctgaagcccgagaaggatagcgacgaagccgtgacatatagcctgggaaagtttgggcagagggccctggatttctacagcattcatgtgaccaaggagtccacccaccccgtgaagcccctggcccagatcgccggaaacagatacgcctccggacctgtgggaaaggccctgagcgacgcatgtatgggcacaatcgcctccttcctgtctaagtaccaggacatcatcatcgaacaccagaaggtggtgaagggcaaccagaagagactggagagcctgcgggagctggccggcaaggaaaacctggaataccctagcgtgaccctgccacctcagcctcacaccaaggagggcgttgatgcctacaacgaagtgatcgcccgggtgcgaatgtgggtgaacctgaacctgtggcagaagctgaagctaagcagagatgatgccaagcctctgctgagactgaagggattcccttcctttcctctggtcgagagacaggccaacgaagtggactggtgggacatggtgtgtaacgtgaagaagctgatcaacgagaaaaaggaggatggcaaggtgttttggcagaatctggctggctacaagagacaggaagccctgagaccatacctgagcagcgaggaagatcggaagaagggaaagaaattcgctcggtaccagctgggcgacctgctgctgcacctggaaaagaagcacggcgaggactggggaaaggtgtacgacgaggcctgggagcggattgacaagaaagtggaaggcctgagcaagcacatcaagctggaagaggaacggagaagcgaggacgcccagagcaaggccgccctgaccgactggctgcgggctaaggccagcttcgtgatcgagggcctgaaggaggccgacaaggacgagttctgcagatgcgagctgaagctgcagaagtggtacggggacctgcggggaaagcccttcgccatcgaagccgagaacagcatcctggacatcagcggcttcagcaagcagtacaactgtgccttcatctggcagaaggacggcgtgaagaagctgaacctgtacctgatcatcaactacttcaagggcggcaagctgcggttcaagaagatcaaacctgaagccttcgaagccaacagattctacaccgtgatcaacaaaaagagcggcgagatcgtgcccatggaggtgaacttcaacttcgacgaccccaacctgatcatcctgcctctggcctttggcaagagacagggcagagaattcatctggaacgacctgctgtccctggaaaccggcagcctgaagctggccaacggaagagtgatcgagaagacactgtacaacagaagaacccggcaggatgagcctgccctgttcgtggccctgaccttcgagcggcgggaggtcctggactcctccaatatcaaaccaatgaacctgatcggcgtggcaagaggcgaaaacatccccgccgtgatcgccctgaccgaccccgagggctgcccactgagccggtttaaggatagcctgggaaacccaacccacatcctgagaatcggcgagagctataaggagaagcagcggaccatccaggccaagaaggaggtggagcagcggagagccggcggctacagccggaagtacgccagcaaagccaagaatctggcagacgatatggtgagaaacaccgctagagatctgctgtactacgccgtgacccaggatgccatgctgatcttcgccaacctgagccggggcttcggccggcagggcaagcggaccttcatggccgagagacagtacacacggatggaggactggctgaccgccaagctggcctacgagggcctgagcaagacctacctgtccaagacactggcccagtacacctccaagacatgcagcaactgtgggtttaccatcaccagcgccgactacgacagggtgctggagaagctgaagaagacagcaacaggctggatgaccacaattaacggcaaggagctgaaggtggagggccagattacctactacaacagatacaagagacagaacgtagtcaaggacctgtccgtcgagctggatagactgagcgaagaatctgtgaacaacgacatctcctcctggacaaagggcagaagcggagaagctctgagcctcctgaagaaaagattctcccatagacccgtgcaggagaagttcgtgtgcctgaactgcggcttcgagacacacgcagccgagcaagccgccctgaacatcgccagatcctggctgttcctgcggagccaggagtacaagaaataccagacaaacaagacaaccggcaacaccgataagagagccttcgtcgagacctggcagtccttttaccggaagaagcttaaggaggtgtggaaacctgccgtgcggtctggcggatctggcggaggctccaccagccccaagaaaaagagaaaagtctaagctgccttctgcggggcttgccttctggccatgcccttcttctctcccttgcacctgtacctcttggtctttgaataaagcctgagtaggaaggctagcaaaaaaaaaaaaaaaaaaaaaaaaaaaaaaaaaaaaaaaaaaaaaaaaaaaaaaaaaaaaaaaaaaaaaaaaaaaaaaaa

SEQ ID NO: 10148 - RNA, 8787 nt, synthetic construct
  source 1..8787: mol_type = other RNA
aggaaataagagagaaaagaagagtaagaagaaatataagagccaccatggcccctaagaagaagcgtaaagtgagccggatgaaccacgaccaggagttcgacccccctaaggtgtaccctcccgtccccgccgagaagagaaagcccatccgggtcctgagcctgttcgatggcatcgccaccggtctgctggtgctgaaggacctgggcatccaggtggataggtacattgcctccgaggtgtgcgaggactccatcaccgtgggaatggtgcgtcatcagggcaagatcatgtacgtgggcgacgtgcggagcgtgacacagaagcatatccaggagtggggccctttcgacctggtgatcggcggcagcccttgcaatgacctgagcatcgtgaacccagcccggaagggcctgtacgagggaaccggcagactgttcttcgagttttacagactgctgcacgacgcccggcctaaggaaggcgacgaccggcccttcttttggctgttcgagaatgtggtggccatgggagtcagcgacaagcgggatattagccggttcctggagagcaaccccgtgatgatcgatgccaaggaagtgagcgccgcccaccgggccagatacttctggggcaatctgcctggcatgaacagacccctggccagcaccgtgaacgacaagctggagctgcaggagtgcctggagcacggccggatcgccaagttcagcaaggtgagaaccatcaccacccgaagcaacagcatcaaacaaggcaaggaccagcactttcctgtgttcatgaacgagaaggaggacatcctgtggtgtaccgagatggagagagtgttcgggttcccagtccactacacagatgtcagcaacatgtctagactggccagacagagactgctgggaagaagctggtccgtccctgtgatcagacacctgttcgcccctctgaaggagtacttcgcctgcgtgagcagcggcaacagcaacgccaacagccggggccccagcttctctagcggcctggtgccactgtccctgagagggagccacatgggccccatggagatctacaaaaccgtgagcgcctggaagcggcagcctgtgcgcgtgctgagcctgtttcggaatatcgataaagtcctgaaaagcctgggattcctggagagcggctctggctccggcggtggcaccctgaagtacgtggaggatgtgacaaacgtggtcagacgggatgtggagaagtggggccccttcgatctggtgtacggcagcacccaacccctgggcagctcttgtgaccggtgccctggctggtacatgtttcagttccaccggatcctgcagtacgccctgccgagacaggagtcccagcggccattcttttggattttcatggacaacttgctgctgaccgaggatgaccaggaaactaccactcggttcctgcagaccgaagccgtgaccctgcaggacgtgagaggccgggactaccagaacgccatgcgggtgtggtccaacatccctggactgaaaagcaagcacgcacctctgacccctaaagaagaggagtacctgcaggcccaggtgcggagcagaagcaagctggacgcccctaaggtggatctgctggtgaagaattgcctcctgcccctgagagagtacttcaagtatttcagccagaatagtctgcccctgggaggcagcggcggcggcagccaggagagcgtgagcttcgaggacgtggccgtgtacttcaccaggaaccagtgggccagcctggacagcgcccagaggaccctgtacagggaggtgatgctggagaactacgccaacgtgaccagcctggccgccttccccttccccaagcccgacctgatcttccagctggagaggggcaaggcccccggcggcctggacccctggacccccatcaggagggaggtgaggggcgtgtgcggcggcccaagcagcggcgcccctcctcccagcggcggcaggcggcccaagcagcggcgcccctcctcccagcggcggcagcccagccggctccccaacctctaccgaggagggcacctctgagtccgccacccccgagagcggccctggcacctccaccgagcccagcgagggcagcgcacccggcagccctgccggcagccccacctccacagaggagggaaccagcaccgagcccagcgaaggcagcgccccaggcaccagcaccgagcctagtgagcaggagattaaacggatcaacaagatcagaagaagacttgtgaaagacagcaacaccaagaaggccggcaagacaggccccatgaaaaccctgctggttagagtgatgacacccgatctgagagagcggctggaaaacctgagaaagaagcctgaaaatatcccccagcccatcagcaatacatctagagccaacctgaataagctgctgaccgattacaccgaaatgaagaaggcgatcctgcatgtgtactgggaagagttccagaaggaccctgtgggcctgatgagccgggtggcccagcctgccagcaagaagatcgatcagaacaagctgaaacctgagatggacgagaagggcaacctgaccaccgccggctttgcctgctctcagtgtggccagcccctgttcgtgtacaagctggagcaggtgtctgagaagggcaaggcttacaccaactacttcggacggtgcaatgtggccgagcacgaaaagctgatcctgctggcccagctgaagcccgagaaggatagcgacgaagccgtgacatatagcctgggaaagtttgggcagagggccctggatttctacagcattcatgtgaccaaggagtccacccaccccgtgaagcccctggcccagatcgccggaaacagatacgcctccggacctgtgggaaaggccctgagcgacgcatgtatgggcacaatcgcctccttcctgtctaagtaccaggacatcatcatcgaacaccagaaggtggtgaagggcaaccagaagagactggagagcctgcgggagctggccggcaaggaaaacctggaataccctagcgtgaccctgccacctcagcctcacaccaaggagggcgttgatgcctacaacgaagtgatcgcccgggtgcgaatgtgggtgaacctgaacctgtggcagaagctgaagctaagcagagatgatgccaagcctctgctgagactgaagggattcccttcctttcctctggtcgagagacaggccaacgaagtggactggtgggacatggtgtgtaacgtgaagaagctgatcaacgagaaaaaggaggatggcaaggtgttttggcagaatctggctggctacaagagacaggaagccctgagaccatacctgagcagcgaggaagatcggaagaagggaaagaaattcgctcggtaccagctgggcgacctgctgctgcacctggaaaagaagcacggcgaggactggggaaaggtgtacgacgaggcctgggagcggattgacaagaaagtggaaggcctgagcaagcacatcaagctggaagaggaacggagaagcgaggacgcccagagcaaggccgccctgaccgactggctgcgggctaaggccagcttcgtgatcgagggcctgaaggaggccgacaaggacgagttctgcagatgcgagctgaagctgcagaagtggtacggggacctgcggggaaagcccttcgccatcgaagccgagaacagcatcctggacatcagcggcttcagcaagcagtacaactgtgccttcatctggcagaaggacggcgtgaagaagctgaacctgtacctgatcatcaactacttcaagggcggcaagctgcggttcaagaagatcaaacctgaagccttcgaagccaacagattctacaccgtgatcaacaaaaagagcggcgagatcgtgcccatggaggtgaacttcaacttcgacgaccccaacctgatcatcctgcctctggcctttggcaagagacagggcagagaattcatctggaacgacctgctgtccctggaaaccggcagcctgaagctggccaacggaagagtgatcgagaagacactgtacaacagaagaacccggcaggatgagcctgccctgttcgtggccctgaccttcgagcggcgggaggtcctggactcctccaatatcaaaccaatgaacctgatcggcgtggcaagaggcgaaaacatccccgccgtgatcgccctgaccgaccccgagggctgcccactgagccggtttaaggatagcctgggaaacccaacccacatcctgagaatcggcgagagctataaggagaagcagcggaccatccaggccaagaaggaggtggagcagcggagagccggcggctacagccggaagtacgccagcaaagccaagaatctggcagacgatatggtgagaaacaccgctagagatctgctgtactacgccgtgacccaggatgccatgctgatcttcgccaacctgagccggggcttcggccggcagggcaagcggaccttcatggccgagagacagtacacacggatggaggactggctgaccgccaagctggcctacgagggcctgagcaagacctacctgtccaagacactggcccagtacacctccaagacatgcagcaactgtgggtttaccatcaccagcgccgactacgacagggtgctggagaagctgaagaagacagcaacaggctggatgaccacaattaacggcaaggagctgaaggtggagggccagattacctactacaacagatacaagagacagaacgtagtcaaggacctgtccgtcgagctggatagactgagcgaagaatctgtgaacaacgacatctcctcctggacaaagggcagaagcggagaagctctgagcctcctgaagaaaagattctcccatagacccgtgcaggagaagttcgtgtgcctgaactgcggcttcgagacacacgcagccgagcaagccgccctgaacatcgccagatcctggctgttcctgcggagccaggagtacaagaaataccagacaaacaagacaaccggcaacaccgataagagagccttcgtcgagacctggcagtccttttaccggaagaagcttaaggaggtgtggaaacctgccgtgcggtctggcggatctggcggaggctccaccagccccaagaaaaagagaaaagtctaagctgccttctgcggggcttgccttctggccatgcccttcttctctcccttgcacctgtacctcttggtctttgaataaagcctgagtaggaaggctagcaaaaaaaaaaaaaaaaaaaaaaaaaaaaaaaaaaaaaaaaaaaaaaaaaaaaaaaaaaaaaaaaaaaaaaaaaaaaaaaagcccagccggctccccaacctctaccgaggagggcacctctgagtccgccacccccgagagcggccctggcacctccaccgagcccagcgagggcagcgcacccggcagccctgccggcagccccacctccacagaggagggaaccagcaccgagcccagcgaaggcagcgccccaggcaccagcaccgagcctagtgagcaggagattaaacggatcaacaagatcagaagaagacttgtgaaagacagcaacaccaagaaggccggcaagacaggccccatgaaaaccctgctggttagagtgatgacacccgatctgagagagcggctggaaaacctgagaaagaagcctgaaaatatcccccagcccatcagcaatacatctagagccaacctgaataagctgctgaccgattacaccgaaatgaagaaggcgatcctgcatgtgtactgggaagagttccagaaggaccctgtgggcctgatgagccgggtggcccagcctgccagcaagaagatcgatcagaacaagctgaaacctgagatggacgagaagggcaacctgaccaccgccggctttgcctgctctcagtgtggccagcccctgttcgtgtacaagctggagcaggtgtctgagaagggcaaggcttacaccaactacttcggacggtgcaatgtggccgagcacgaaaagctgatcctgctggcccagctgaagcccgagaaggatagcgacgaagccgtgacatatagcctgggaaagtttgggcagagggccctggatttctacagcattcatgtgaccaaggagtccacccaccccgtgaagcccctggcccagatcgccggaaacagatacgcctccggacctgtgggaaaggccctgagcgacgcatgtatgggcacaatcgcctccttcctgtctaagtaccaggacatcatcatcgaacaccagaaggtggtgaagggcaaccagaagagactggagagcctgcgggagctggccggcaaggaaaacctggaataccctagcgtgaccctgccacctcagcctcacaccaaggagggcgttgatgcctacaacgaagtgatcgcccgggtgcgaatgtgggtgaacctgaacctgtggcagaagctgaagctaagcagagatgatgccaagcctctgctgagactgaagggattcccttcctttcctctggtcgagagacaggccaacgaagtggactggtgggacatggtgtgtaacgtgaagaagctgatcaacgagaaaaaggaggatggcaaggtgttttggcagaatctggctggctacaagagacaggaagccctgagaccatacctgagcagcgaggaagatcggaagaagggaaagaaattcgctcggtaccagctgggcgacctgctgctgcacctggaaaagaagcacggcgaggactggggaaaggtgtacgacgaggcctgggagcggattgacaagaaagtggaaggcctgagcaagcacatcaagctggaagaggaacggagaagcgaggacgcccagagcaaggccgccctgaccgactggctgcgggctaaggccagcttcgtgatcgagggcctgaaggaggccgacaaggacgagttctgcagatgcgagctgaagctgcagaagtggtacggggacctgcggggaaagcccttcgccatcgaagccgagaacagcatcctggacatcagcggcttcagcaagcagtacaactgtgccttcatctggcagaaggacggcgtgaagaagctgaacctgtacctgatcatcaactacttcaagggcggcaagctgcggttcaagaagatcaaacctgaagccttcgaagccaacagattctacaccgtgatcaacaaaaagagcggcgagatcgtgcccatggaggtgaacttcaacttcgacgaccccaacctgatcatcctgcctctggcctttggcaagagacagggcagagaattcatctggaacgacctgctgtccctggaaaccggcagcctgaagctggccaacggaagagtgatcgagaagacactgtacaacagaagaacccggcaggatgagcctgccctgttcgtggccctgaccttcgagcggcgggaggtcctggactcctccaatatcaaaccaatgaacctgatcggcgtggcaagaggcgaaaacatccccgccgtgatcgccctgaccgaccccgagggctgcccactgagccggtttaaggatagcctgggaaacccaacccacatcctgagaatcggcgagagctataaggagaagcagcggaccatccaggccaagaaggaggtggagcagcggagagccggcggctacagccggaagtacgccagcaaagccaagaatctggcagacgatatggtgagaaacaccgctagagatctgctgtactacgccgtgacccaggatgccatgctgatcttcgccaacctgagccggggcttcggccggcagggcaagcggaccttcatggccgagagacagtacacacggatggaggactggctgaccgccaagctggcctacgagggcctgagcaagacctacctgtccaagacactggcccagtacacctccaagacatgcagcaactgtgggtttaccatcaccagcgccgactacgacagggtgctggagaagctgaagaagacagcaacaggctggatgaccacaattaacggcaaggagctgaaggtggagggccagattacctactacaacagatacaagagacagaacgtagtcaaggacctgtccgtcgagctggatagactgagcgaagaatctgtgaacaacgacatctcctcctggacaaagggcagaagcggagaagctctgagcctcctgaagaaaagattctcccatagacccgtgcaggagaagttcgtgtgcctgaactgcggcttcgagacacacgcagccgagcaagccgccctgaacatcgccagatcctggctgttcctgcggagccaggagtacaagaaataccagacaaacaagacaaccggcaacaccgataagagagccttcgtcgagacctggcagtccttttaccggaagaagcttaaggaggtgtggaaacctgccgtgcggtctggcggatctggcggaggctccaccagccccaagaaaaagagaaaagtctaagctgccttctgcggggcttgccttctggccatgcccttcttctctcccttgcacctgtacctcttggtctttgaataaagcctgagtaggaaggctagcaaaaaaaaaaaaaaaaaaaaaaaaaaaaaaaaaaaaaaaaaaaaaaaaaaaaaaaaaaaaaaaaaaaaaaaaaaaaaaaa

SEQ ID NO: 10149 - RNA, 8787 nt, synthetic construct
  source 1..8787: mol_type = other RNA
aggaaataagagagaaaagaagagtaagaagaaatataagagccaccatggcccctaagaagaagcgtaaagtgagccggatgaaccacgaccaggagttcgacccccctaaggtgtaccctcccgtccccgccgagaagagaaagcccatccgggtcctgagcctgttcgatggcatcgccaccggtctgctggtgctgaaggacctgggcatccaggtggataggtacattgcctccgaggtgtgcgaggactccatcaccgtgggaatggtgcgtcatcagggcaagatcatgtacgtgggcgacgtgcggagcgtgacacagaagcatatccaggagtggggccctttcgacctggtgatcggcggcagcccttgcaatgacctgagcatcgtgaacccagcccggaagggcctgtacgagggaaccggcagactgttcttcgagttttacagactgctgcacgacgcccggcctaaggaaggcgacgaccggcccttcttttggctgttcgagaatgtggtggccatgggagtcagcgacaagcgggatattagccggttcctggagagcaaccccgtgatgatcgatgccaaggaagtgagcgccgcccaccgggccagatacttctggggcaatctgcctggcatgaacagacccctggccagcaccgtgaacgacaagctggagctgcaggagtgcctggagcacggccggatcgccaagttcagcaaggtgagaaccatcaccacccgaagcaacagcatcaaacaaggcaaggaccagcactttcctgtgttcatgaacgagaaggaggacatcctgtggtgtaccgagatggagagagtgttcgggttcccagtccactacacagatgtcagcaacatgtctagactggccagacagagactgctgggaagaagctggtccgtccctgtgatcagacacctgttcgcccctctgaaggagtacttcgcctgcgtgagcagcggcaacagcaacgccaacagccggggccccagcttctctagcggcctggtgccactgtccctgagagggagccacatgggccccatggagatctacaaaaccgtgagcgcctggaagcggcagcctgtgcgcgtgctgagcctgtttcggaatatcgataaagtcctgaaaagcctgggattcctggagagcggctctggctccggcggtggcaccctgaagtacgtggaggatgtgacaaacgtggtcagacgggatgtggagaagtggggccccttcgatctggtgtacggcagcacccaacccctgggcagctcttgtgaccggtgccctggctggtacatgtttcagttccaccggatcctgcagtacgccctgccgagacaggagtcccagcggccattcttttggattttcatggacaacttgctgctgaccgaggatgaccaggaaactaccactcggttcctgcagaccgaagccgtgaccctgcaggacgtgagaggccgggactaccagaacgccatgcgggtgtggtccaacatccctggactgaaaagcaagcacgcacctctgacccctaaagaagaggagtacctgcaggcccaggtgcggagcagaagcaagctggacgcccctaaggtggatctgctggtgaagaattgcctcctgcccctgagagagtacttcaagtatttcagccagaatagtctgcccctgggaggcagcggcggcggcggcatgagggtgaccttcgaggacatcgccgtgagcttcagccaggaggagtgggagtacctgggcgagggccagaaggagctgtacagggaggtgatgaaggagaactacgagaccctgatcagcctgggcaccgacagcagcgccctgacccccgagatcatcagcaggatcgagaggggcgaggagccctgcatcagggacaagcccggcagcgaggagagggagaccggcaagagcagcggcggcccaagcagcggcgcccctcctcccagcggcggcaggcggcccaagcagcggcgcccctcctcccagcggcggcagcccagccggctccccaacctctaccgaggagggcacctctgagtccgccacccccgagagcggccctggcacctccaccgagcccagcgagggcagcgcacccggcagccctgccggcagccccacctccacagaggagggaaccagcaccgagcccagcgaaggcagcgccccaggcaccagcaccgagcctagtgagcaggagattaaacggatcaacaagatcagaagaagacttgtgaaagacagcaacaccaagaaggccggcaagacaggccccatgaaaaccctgctggttagagtgatgacacccgatctgagagagcggctggaaaacctgagaaagaagcctgaaaatatcccccagcccatcagcaatacatctagagccaacctgaataagctgctgaccgattacaccgaaatgaagaaggcgatcctgcatgtgtactgggaagagttccagaaggaccctgtgggcctgatgagccgggtggcccagcctgccagcaagaagatcgatcagaacaagctgaaacctgagatggacgagaagggcaacctgaccaccgccggctttgcctgctctcagtgtggccagcccctgttcgtgtacaagctggagcaggtgtctgagaagggcaaggcttacaccaactacttcggacggtgcaatgtggccgagcacgaaaagctgatcctgctggcccagctgaagcccgagaaggatagcgacgaagccgtgacatatagcctgggaaagtttgggcagagggccctggatttctacagcattcatgtgaccaaggagtccacccaccccgtgaagcccctggcccagatcgccggaaacagatacgcctccggacctgtgggaaaggccctgagcgacgcatgtatgggcacaatcgcctccttcctgtctaagtaccaggacatcatcatcgaacaccagaaggtggtgaagggcaaccagaagagactggagagcctgcgggagctggccggcaaggaaaacctggaataccctagcgtgaccctgccacctcagcctcacaccaaggagggcgttgatgcctacaacgaagtgatcgcccgggtgcgaatgtgggtgaacctgaacctgtggcagaagctgaagctaagcagagatgatgccaagcctctgctgagactgaagggattcccttcctttcctctggtcgagagacaggccaacgaagtggactggtgggacatggtgtgtaacgtgaagaagctgatcaacgagaaaaaggaggatggcaaggtgttttggcagaatctggctggctacaagagacaggaagccctgagaccatacctgagcagcgaggaagatcggaagaagggaaagaaattcgctcggtaccagctgggcgacctgctgctgcacctggaaaagaagcacggcgaggactggggaaaggtgtacgacgaggcctgggagcggattgacaagaaagtggaaggcctgagcaagcacatcaagctggaagaggaacggagaagcgaggacgcccagagcaaggccgccctgaccgactggctgcgggctaaggccagcttcgtgatcgagggcctgaaggaggccgacaaggacgagttctgcagatgcgagctgaagctgcagaagtggtacggggacctgcggggaaagcccttcgccatcgaagccgagaacagcatcctggacatcagcggcttcagcaagcagtacaactgtgccttcatctggcagaaggacggcgtgaagaagctgaacctgtacctgatcatcaactacttcaagggcggcaagctgcggttcaagaagatcaaacctgaagccttcgaagccaacagattctacaccgtgatcaacaaaaagagcggcgagatcgtgcccatggaggtgaacttcaacttcgacgaccccaacctgatcatcctgcctctggcctttggcaagagacagggcagagaattcatctggaacgacctgctgtccctggaaaccggcagcctgaagctggccaacggaagagtgatcgagaagacactgtacaacagaagaacccggcaggatgagcctgccctgttcgtggccctgaccttcgagcggcgggaggtcctggactcctccaatatcaaaccaatgaacctgatcggcgtggcaagaggcgaaaacatccccgccgtgatcgccctgaccgaccccgagggctgcccactgagccggtttaaggatagcctgggaaacccaacccacatcctgagaatcggcgagagctataaggagaagcagcggaccatccaggccaagaaggaggtggagcagcggagagccggcggctacagccggaagtacgccagcaaagccaagaatctggcagacgatatggtgagaaacaccgctagagatctgctgtactacgccgtgacccaggatgccatgctgatcttcgccaacctgagccggggcttcggccggcagggcaagcggaccttcatggccgagagacagtacacacggatggaggactggctgaccgccaagctggcctacgagggcctgagcaagacctacctgtccaagacactggcccagtacacctccaagacatgcagcaactgtgggtttaccatcaccagcgccgactacgacagggtgctggagaagctgaagaagacagcaacaggctggatgaccacaattaacggcaaggagctgaaggtggagggccagattacctactacaacagatacaagagacagaacgtagtcaaggacctgtccgtcgagctggatagactgagcgaagaatctgtgaacaacgacatctcctcctggacaaagggcagaagcggagaagctctgagcctcctgaagaaaagattctcccatagacccgtgcaggagaagttcgtgtgcctgaactgcggcttcgagacacacgcagccgagcaagccgccctgaacatcgccagatcctggctgttcctgcggagccaggagtacaagaaataccagacaaacaagacaaccggcaacaccgataagagagccttcgtcgagacctggcagtccttttaccggaagaagcttaaggaggtgtggaaacctgccgtgcggtctggcggatctggcggaggctccaccagccccaagaaaaagagaaaagtctaagctgccttctgcggggcttgccttctggccatgcccttcttctctcccttgcacctgtacctcttggtctttgaataaagcctgagtaggaaggctagcaaaaaaaaaaaaaaaaaaaaaaaaaaaaaaaaaaaaaaaaaaaaaaaaaaaaaaaaaaaaaaaaaaaaaaaaaaaaaaaagcccagccggctccccaacctctaccgaggagggcacctctgagtccgccacccccgagagcggccctggcacctccaccgagcccagcgagggcagcgcacccggcagccctgccggcagccccacctccacagaggagggaaccagcaccgagcccagcgaaggcagcgccccaggcaccagcaccgagcctagtgagcaggagattaaacggatcaacaagatcagaagaagacttgtgaaagacagcaacaccaagaaggccggcaagacaggccccatgaaaaccctgctggttagagtgatgacacccgatctgagagagcggctggaaaacctgagaaagaagcctgaaaatatcccccagcccatcagcaatacatctagagccaacctgaataagctgctgaccgattacaccgaaatgaagaaggcgatcctgcatgtgtactgggaagagttccagaaggaccctgtgggcctgatgagccgggtggcccagcctgccagcaagaagatcgatcagaacaagctgaaacctgagatggacgagaagggcaacctgaccaccgccggctttgcctgctctcagtgtggccagcccctgttcgtgtacaagctggagcaggtgtctgagaagggcaaggcttacaccaactacttcggacggtgcaatgtggccgagcacgaaaagctgatcctgctggcccagctgaagcccgagaaggatagcgacgaagccgtgacatatagcctgggaaagtttgggcagagggccctggatttctacagcattcatgtgaccaaggagtccacccaccccgtgaagcccctggcccagatcgccggaaacagatacgcctccggacctgtgggaaaggccctgagcgacgcatgtatgggcacaatcgcctccttcctgtctaagtaccaggacatcatcatcgaacaccagaaggtggtgaagggcaaccagaagagactggagagcctgcgggagctggccggcaaggaaaacctggaataccctagcgtgaccctgccacctcagcctcacaccaaggagggcgttgatgcctacaacgaagtgatcgcccgggtgcgaatgtgggtgaacctgaacctgtggcagaagctgaagctaagcagagatgatgccaagcctctgctgagactgaagggattcccttcctttcctctggtcgagagacaggccaacgaagtggactggtgggacatggtgtgtaacgtgaagaagctgatcaacgagaaaaaggaggatggcaaggtgttttggcagaatctggctggctacaagagacaggaagccctgagaccatacctgagcagcgaggaagatcggaagaagggaaagaaattcgctcggtaccagctgggcgacctgctgctgcacctggaaaagaagcacggcgaggactggggaaaggtgtacgacgaggcctgggagcggattgacaagaaagtggaaggcctgagcaagcacatcaagctggaagaggaacggagaagcgaggacgcccagagcaaggccgccctgaccgactggctgcgggctaaggccagcttcgtgatcgagggcctgaaggaggccgacaaggacgagttctgcagatgcgagctgaagctgcagaagtggtacggggacctgcggggaaagcccttcgccatcgaagccgagaacagcatcctggacatcagcggcttcagcaagcagtacaactgtgccttcatctggcagaaggacggcgtgaagaagctgaacctgtacctgatcatcaactacttcaagggcggcaagctgcggttcaagaagatcaaacctgaagccttcgaagccaacagattctacaccgtgatcaacaaaaagagcggcgagatcgtgcccatggaggtgaacttcaacttcgacgaccccaacctgatcatcctgcctctggcctttggcaagagacagggcagagaattcatctggaacgacctgctgtccctggaaaccggcagcctgaagctggccaacggaagagtgatcgagaagacactgtacaacagaagaacccggcaggatgagcctgccctgttcgtggccctgaccttcgagcggcgggaggtcctggactcctccaatatcaaaccaatgaacctgatcggcgtggcaagaggcgaaaacatccccgccgtgatcgccctgaccgaccccgagggctgcccactgagccggtttaaggatagcctgggaaacccaacccacatcctgagaatcggcgagagctataaggagaagcagcggaccatccaggccaagaaggaggtggagcagcggagagccggcggctacagccggaagtacgccagcaaagccaagaatctggcagacgatatggtgagaaacaccgctagagatctgctgtactacgccgtgacccaggatgccatgctgatcttcgccaacctgagccggggcttcggccggcagggcaagcggaccttcatggccgagagacagtacacacggatggaggactggctgaccgccaagctggcctacgagggcctgagcaagacctacctgtccaagacactggcccagtacacctccaagacatgcagcaactgtgggtttaccatcaccagcgccgactacgacagggtgctggagaagctgaagaagacagcaacaggctggatgaccacaattaacggcaaggagctgaaggtggagggccagattacctactacaacagatacaagagacagaacgtagtcaaggacctgtccgtcgagctggatagactgagcgaagaatctgtgaacaacgacatctcctcctggacaaagggcagaagcggagaagctctgagcctcctgaagaaaagattctcccatagacccgtgcaggagaagttcgtgtgcctgaactgcggcttcgagacacacgcagccgagcaagccgccctgaacatcgccagatcctggctgttcctgcggagccaggagtacaagaaataccagacaaacaagacaaccggcaacaccgataagagagccttcgtcgagacctggcagtccttttaccggaagaagcttaaggaggtgtggaaacctgccgtgcggtctggcggatctggcggaggctccaccagccccaagaaaaagagaaaagtctaagctgccttctgcggggcttgccttctggccatgcccttcttctctcccttgcacctgtacctcttggtctttgaataaagcctgagtaggaaggctagcaaaaaaaaaaaaaaaaaaaaaaaaaaaaaaaaaaaaaaaaaaaaaaaaaaaaaaaaaaaaaaaaaaaaaaaaaaaaaaaa

SEQ ID NO: 10150 - RNA, 8787 nt, synthetic construct
  source 1..8787: mol_type = other RNA
aggaaataagagagaaaagaagagtaagaagaaatataagagccaccatggcccctaagaagaagcgtaaagtgagccggatgaaccacgaccaggagttcgacccccctaaggtgtaccctcccgtccccgccgagaagagaaagcccatccgggtcctgagcctgttcgatggcatcgccaccggtctgctggtgctgaaggacctgggcatccaggtggataggtacattgcctccgaggtgtgcgaggactccatcaccgtgggaatggtgcgtcatcagggcaagatcatgtacgtgggcgacgtgcggagcgtgacacagaagcatatccaggagtggggccctttcgacctggtgatcggcggcagcccttgcaatgacctgagcatcgtgaacccagcccggaagggcctgtacgagggaaccggcagactgttcttcgagttttacagactgctgcacgacgcccggcctaaggaaggcgacgaccggcccttcttttggctgttcgagaatgtggtggccatgggagtcagcgacaagcgggatattagccggttcctggagagcaaccccgtgatgatcgatgccaaggaagtgagcgccgcccaccgggccagatacttctggggcaatctgcctggcatgaacagacccctggccagcaccgtgaacgacaagctggagctgcaggagtgcctggagcacggccggatcgccaagttcagcaaggtgagaaccatcaccacccgaagcaacagcatcaaacaaggcaaggaccagcactttcctgtgttcatgaacgagaaggaggacatcctgtggtgtaccgagatggagagagtgttcgggttcccagtccactacacagatgtcagcaacatgtctagactggccagacagagactgctgggaagaagctggtccgtccctgtgatcagacacctgttcgcccctctgaaggagtacttcgcctgcgtgagcagcggcaacagcaacgccaacagccggggccccagcttctctagcggcctggtgccactgtccctgagagggagccacatgggccccatggagatctacaaaaccgtgagcgcctggaagcggcagcctgtgcgcgtgctgagcctgtttcggaatatcgataaagtcctgaaaagcctgggattcctggagagcggctctggctccggcggtggcaccctgaagtacgtggaggatgtgacaaacgtggtcagacgggatgtggagaagtggggccccttcgatctggtgtacggcagcacccaacccctgggcagctcttgtgaccggtgccctggctggtacatgtttcagttccaccggatcctgcagtacgccctgccgagacaggagtcccagcggccattcttttggattttcatggacaacttgctgctgaccgaggatgaccaggaaactaccactcggttcctgcagaccgaagccgtgaccctgcaggacgtgagaggccgggactaccagaacgccatgcgggtgtggtccaacatccctggactgaaaagcaagcacgcacctctgacccctaaagaagaggagtacctgcaggcccaggtgcggagcagaagcaagctggacgcccctaaggtggatctgctggtgaagaattgcctcctgcccctgagagagtacttcaagtatttcagccagaatagtctgcccctgggaggcagcggcggcggcagccccgtgctggtgagcttcgacgacgtgttcgtgagcttcaccagggaggagtggcaggtgctggacaacgcccagagggccctgtacggcgacgtgatgctggagacctacaggagcctggtgctgctgggccagtgcatcaccaagcccgaggtgatcttcaagctggagcagggcgtggagccctggaccggcggcgagccccacaaccagagcccccccgacgtgcaggaggtggacggcggcccaagcagcggcgcccctcctcccagcggcggcaggcggcccaagcagcggcgcccctcctcccagcggcggcagcccagccggctccccaacctctaccgaggagggcacctctgagtccgccacccccgagagcggccctggcacctccaccgagcccagcgagggcagcgcacccggcagccctgccggcagccccacctccacagaggagggaaccagcaccgagcccagcgaaggcagcgccccaggcaccagcaccgagcctagtgagcaggagattaaacggatcaacaagatcagaagaagacttgtgaaagacagcaacaccaagaaggccggcaagacaggccccatgaaaaccctgctggttagagtgatgacacccgatctgagagagcggctggaaaacctgagaaagaagcctgaaaatatcccccagcccatcagcaatacatctagagccaacctgaataagctgctgaccgattacaccgaaatgaagaaggcgatcctgcatgtgtactgggaagagttccagaaggaccctgtgggcctgatgagccgggtggcccagcctgccagcaagaagatcgatcagaacaagctgaaacctgagatggacgagaagggcaacctgaccaccgccggctttgcctgctctcagtgtggccagcccctgttcgtgtacaagctggagcaggtgtctgagaagggcaaggcttacaccaactacttcggacggtgcaatgtggccgagcacgaaaagctgatcctgctggcccagctgaagcccgagaaggatagcgacgaagccgtgacatatagcctgggaaagtttgggcagagggccctggatttctacagcattcatgtgaccaaggagtccacccaccccgtgaagcccctggcccagatcgccggaaacagatacgcctccggacctgtgggaaaggccctgagcgacgcatgtatgggcacaatcgcctccttcctgtctaagtaccaggacatcatcatcgaacaccagaaggtggtgaagggcaaccagaagagactggagagcctgcgggagctggccggcaaggaaaacctggaataccctagcgtgaccctgccacctcagcctcacaccaaggagggcgttgatgcctacaacgaagtgatcgcccgggtgcgaatgtgggtgaacctgaacctgtggcagaagctgaagctaagcagagatgatgccaagcctctgctgagactgaagggattcccttcctttcctctggtcgagagacaggccaacgaagtggactggtgggacatggtgtgtaacgtgaagaagctgatcaacgagaaaaaggaggatggcaaggtgttttggcagaatctggctggctacaagagacaggaagccctgagaccatacctgagcagcgaggaagatcggaagaagggaaagaaattcgctcggtaccagctgggcgacctgctgctgcacctggaaaagaagcacggcgaggactggggaaaggtgtacgacgaggcctgggagcggattgacaagaaagtggaaggcctgagcaagcacatcaagctggaagaggaacggagaagcgaggacgcccagagcaaggccgccctgaccgactggctgcgggctaaggccagcttcgtgatcgagggcctgaaggaggccgacaaggacgagttctgcagatgcgagctgaagctgcagaagtggtacggggacctgcggggaaagcccttcgccatcgaagccgagaacagcatcctggacatcagcggcttcagcaagcagtacaactgtgccttcatctggcagaaggacggcgtgaagaagctgaacctgtacctgatcatcaactacttcaagggcggcaagctgcggttcaagaagatcaaacctgaagccttcgaagccaacagattctacaccgtgatcaacaaaaagagcggcgagatcgtgcccatggaggtgaacttcaacttcgacgaccccaacctgatcatcctgcctctggcctttggcaagagacagggcagagaattcatctggaacgacctgctgtccctggaaaccggcagcctgaagctggccaacggaagagtgatcgagaagacactgtacaacagaagaacccggcaggatgagcctgccctgttcgtggccctgaccttcgagcggcgggaggtcctggactcctccaatatcaaaccaatgaacctgatcggcgtggcaagaggcgaaaacatccccgccgtgatcgccctgaccgaccccgagggctgcccactgagccggtttaaggatagcctgggaaacccaacccacatcctgagaatcggcgagagctataaggagaagcagcggaccatccaggccaagaaggaggtggagcagcggagagccggcggctacagccggaagtacgccagcaaagccaagaatctggcagacgatatggtgagaaacaccgctagagatctgctgtactacgccgtgacccaggatgccatgctgatcttcgccaacctgagccggggcttcggccggcagggcaagcggaccttcatggccgagagacagtacacacggatggaggactggctgaccgccaagctggcctacgagggcctgagcaagacctacctgtccaagacactggcccagtacacctccaagacatgcagcaactgtgggtttaccatcaccagcgccgactacgacagggtgctggagaagctgaagaagacagcaacaggctggatgaccacaattaacggcaaggagctgaaggtggagggccagattacctactacaacagatacaagagacagaacgtagtcaaggacctgtccgtcgagctggatagactgagcgaagaatctgtgaacaacgacatctcctcctggacaaagggcagaagcggagaagctctgagcctcctgaagaaaagattctcccatagacccgtgcaggagaagttcgtgtgcctgaactgcggcttcgagacacacgcagccgagcaagccgccctgaacatcgccagatcctggctgttcctgcggagccaggagtacaagaaataccagacaaacaagacaaccggcaacaccgataagagagccttcgtcgagacctggcagtccttttaccggaagaagcttaaggaggtgtggaaacctgccgtgcggtctggcggatctggcggaggctccaccagccccaagaaaaagagaaaagtctaagctgccttctgcggggcttgccttctggccatgcccttcttctctcccttgcacctgtacctcttggtctttgaataaagcctgagtaggaaggctagcaaaaaaaaaaaaaaaaaaaaaaaaaaaaaaaaaaaaaaaaaaaaaaaaaaaaaaaaaaaaaaaaaaaaaaaaaaaaaaaagcccagccggctccccaacctctaccgaggagggcacctctgagtccgccacccccgagagcggccctggcacctccaccgagcccagcgagggcagcgcacccggcagccctgccggcagccccacctccacagaggagggaaccagcaccgagcccagcgaaggcagcgccccaggcaccagcaccgagcctagtgagcaggagattaaacggatcaacaagatcagaagaagacttgtgaaagacagcaacaccaagaaggccggcaagacaggccccatgaaaaccctgctggttagagtgatgacacccgatctgagagagcggctggaaaacctgagaaagaagcctgaaaatatcccccagcccatcagcaatacatctagagccaacctgaataagctgctgaccgattacaccgaaatgaagaaggcgatcctgcatgtgtactgggaagagttccagaaggaccctgtgggcctgatgagccgggtggcccagcctgccagcaagaagatcgatcagaacaagctgaaacctgagatggacgagaagggcaacctgaccaccgccggctttgcctgctctcagtgtggccagcccctgttcgtgtacaagctggagcaggtgtctgagaagggcaaggcttacaccaactacttcggacggtgcaatgtggccgagcacgaaaagctgatcctgctggcccagctgaagcccgagaaggatagcgacgaagccgtgacatatagcctgggaaagtttgggcagagggccctggatttctacagcattcatgtgaccaaggagtccacccaccccgtgaagcccctggcccagatcgccggaaacagatacgcctccggacctgtgggaaaggccctgagcgacgcatgtatgggcacaatcgcctccttcctgtctaagtaccaggacatcatcatcgaacaccagaaggtggtgaagggcaaccagaagagactggagagcctgcgggagctggccggcaaggaaaacctggaataccctagcgtgaccctgccacctcagcctcacaccaaggagggcgttgatgcctacaacgaagtgatcgcccgggtgcgaatgtgggtgaacctgaacctgtggcagaagctgaagctaagcagagatgatgccaagcctctgctgagactgaagggattcccttcctttcctctggtcgagagacaggccaacgaagtggactggtgggacatggtgtgtaacgtgaagaagctgatcaacgagaaaaaggaggatggcaaggtgttttggcagaatctggctggctacaagagacaggaagccctgagaccatacctgagcagcgaggaagatcggaagaagggaaagaaattcgctcggtaccagctgggcgacctgctgctgcacctggaaaagaagcacggcgaggactggggaaaggtgtacgacgaggcctgggagcggattgacaagaaagtggaaggcctgagcaagcacatcaagctggaagaggaacggagaagcgaggacgcccagagcaaggccgccctgaccgactggctgcgggctaaggccagcttcgtgatcgagggcctgaaggaggccgacaaggacgagttctgcagatgcgagctgaagctgcagaagtggtacggggacctgcggggaaagcccttcgccatcgaagccgagaacagcatcctggacatcagcggcttcagcaagcagtacaactgtgccttcatctggcagaaggacggcgtgaagaagctgaacctgtacctgatcatcaactacttcaagggcggcaagctgcggttcaagaagatcaaacctgaagccttcgaagccaacagattctacaccgtgatcaacaaaaagagcggcgagatcgtgcccatggaggtgaacttcaacttcgacgaccccaacctgatcatcctgcctctggcctttggcaagagacagggcagagaattcatctggaacgacctgctgtccctggaaaccggcagcctgaagctggccaacggaagagtgatcgagaagacactgtacaacagaagaacccggcaggatgagcctgccctgttcgtggccctgaccttcgagcggcgggaggtcctggactcctccaatatcaaaccaatgaacctgatcggcgtggcaagaggcgaaaacatccccgccgtgatcgccctgaccgaccccgagggctgcccactgagccggtttaaggatagcctgggaaacccaacccacatcctgagaatcggcgagagctataaggagaagcagcggaccatccaggccaagaaggaggtggagcagcggagagccggcggctacagccggaagtacgccagcaaagccaagaatctggcagacgatatggtgagaaacaccgctagagatctgctgtactacgccgtgacccaggatgccatgctgatcttcgccaacctgagccggggcttcggccggcagggcaagcggaccttcatggccgagagacagtacacacggatggaggactggctgaccgccaagctggcctacgagggcctgagcaagacctacctgtccaagacactggcccagtacacctccaagacatgcagcaactgtgggtttaccatcaccagcgccgactacgacagggtgctggagaagctgaagaagacagcaacaggctggatgaccacaattaacggcaaggagctgaaggtggagggccagattacctactacaacagatacaagagacagaacgtagtcaaggacctgtccgtcgagctggatagactgagcgaagaatctgtgaacaacgacatctcctcctggacaaagggcagaagcggagaagctctgagcctcctgaagaaaagattctcccatagacccgtgcaggagaagttcgtgtgcctgaactgcggcttcgagacacacgcagccgagcaagccgccctgaacatcgccagatcctggctgttcctgcggagccaggagtacaagaaataccagacaaacaagacaaccggcaacaccgataagagagccttcgtcgagacctggcagtccttttaccggaagaagcttaaggaggtgtggaaacctgccgtgcggtctggcggatctggcggaggctccaccagccccaagaaaaagagaaaagtctaagctgccttctgcggggcttgccttctggccatgcccttcttctctcccttgcacctgtacctcttggtctttgaataaagcctgagtaggaaggctagcaaaaaaaaaaaaaaaaaaaaaaaaaaaaaaaaaaaaaaaaaaaaaaaaaaaaaaaaaaaaaaaaaaaaaaaaaaaaaaaa

SEQ ID NO: 10151 - RNA, 8787 nt, synthetic construct
  source 1..8787: mol_type = other RNA
aggaaataagagagaaaagaagagtaagaagaaatataagagccaccatggcccctaagaagaagcgtaaagtgagccggatgaaccacgaccaggagttcgacccccctaaggtgtaccctcccgtccccgccgagaagagaaagcccatccgggtcctgagcctgttcgatggcatcgccaccggtctgctggtgctgaaggacctgggcatccaggtggataggtacattgcctccgaggtgtgcgaggactccatcaccgtgggaatggtgcgtcatcagggcaagatcatgtacgtgggcgacgtgcggagcgtgacacagaagcatatccaggagtggggccctttcgacctggtgatcggcggcagcccttgcaatgacctgagcatcgtgaacccagcccggaagggcctgtacgagggaaccggcagactgttcttcgagttttacagactgctgcacgacgcccggcctaaggaaggcgacgaccggcccttcttttggctgttcgagaatgtggtggccatgggagtcagcgacaagcgggatattagccggttcctggagagcaaccccgtgatgatcgatgccaaggaagtgagcgccgcccaccgggccagatacttctggggcaatctgcctggcatgaacagacccctggccagcaccgtgaacgacaagctggagctgcaggagtgcctggagcacggccggatcgccaagttcagcaaggtgagaaccatcaccacccgaagcaacagcatcaaacaaggcaaggaccagcactttcctgtgttcatgaacgagaaggaggacatcctgtggtgtaccgagatggagagagtgttcgggttcccagtccactacacagatgtcagcaacatgtctagactggccagacagagactgctgggaagaagctggtccgtccctgtgatcagacacctgttcgcccctctgaaggagtacttcgcctgcgtgagcagcggcaacagcaacgccaacagccggggccccagcttctctagcggcctggtgccactgtccctgagagggagccacatgggccccatggagatctacaaaaccgtgagcgcctggaagcggcagcctgtgcgcgtgctgagcctgtttcggaatatcgataaagtcctgaaaagcctgggattcctggagagcggctctggctccggcggtggcaccctgaagtacgtggaggatgtgacaaacgtggtcagacgggatgtggagaagtggggccccttcgatctggtgtacggcagcacccaacccctgggcagctcttgtgaccggtgccctggctggtacatgtttcagttccaccggatcctgcagtacgccctgccgagacaggagtcccagcggccattcttttggattttcatggacaacttgctgctgaccgaggatgaccaggaaactaccactcggttcctgcagaccgaagccgtgaccctgcaggacgtgagaggccgggactaccagaacgccatgcgggtgtggtccaacatccctggactgaaaagcaagcacgcacctctgacccctaaagaagaggagtacctgcaggcccaggtgcggagcagaagcaagctggacgcccctaaggtggatctgctggtgaagaattgcctcctgcccctgagagagtacttcaagtatttcagccagaatagtctgcccctgggaggcagcggcggcggcttccaggagagcgtgaccttcaaggacgtggccgtggacttcacccaggaggagtggaagcagctggaccccgcccagagggacctgtacagggacgtgatgctggagaactacaggaacctggtgagcctgggcctgcccgtgttcaagcccgacgtgatcagccagctggagaggggcgaggccccctggatccccgaggtgcccaggagcatctgccagggcgaggtggtgaggaccaggggcggcccaagcagcggcgcccctcctcccagcggcggcaggcggcccaagcagcggcgcccctcctcccagcggcggcagcccagccggctccccaacctctaccgaggagggcacctctgagtccgccacccccgagagcggccctggcacctccaccgagcccagcgagggcagcgcacccggcagccctgccggcagccccacctccacagaggagggaaccagcaccgagcccagcgaaggcagcgccccaggcaccagcaccgagcctagtgagcaggagattaaacggatcaacaagatcagaagaagacttgtgaaagacagcaacaccaagaaggccggcaagacaggccccatgaaaaccctgctggttagagtgatgacacccgatctgagagagcggctggaaaacctgagaaagaagcctgaaaatatcccccagcccatcagcaatacatctagagccaacctgaataagctgctgaccgattacaccgaaatgaagaaggcgatcctgcatgtgtactgggaagagttccagaaggaccctgtgggcctgatgagccgggtggcccagcctgccagcaagaagatcgatcagaacaagctgaaacctgagatggacgagaagggcaacctgaccaccgccggctttgcctgctctcagtgtggccagcccctgttcgtgtacaagctggagcaggtgtctgagaagggcaaggcttacaccaactacttcggacggtgcaatgtggccgagcacgaaaagctgatcctgctggcccagctgaagcccgagaaggatagcgacgaagccgtgacatatagcctgggaaagtttgggcagagggccctggatttctacagcattcatgtgaccaaggagtccacccaccccgtgaagcccctggcccagatcgccggaaacagatacgcctccggacctgtgggaaaggccctgagcgacgcatgtatgggcacaatcgcctccttcctgtctaagtaccaggacatcatcatcgaacaccagaaggtggtgaagggcaaccagaagagactggagagcctgcgggagctggccggcaaggaaaacctggaataccctagcgtgaccctgccacctcagcctcacaccaaggagggcgttgatgcctacaacgaagtgatcgcccgggtgcgaatgtgggtgaacctgaacctgtggcagaagctgaagctaagcagagatgatgccaagcctctgctgagactgaagggattcccttcctttcctctggtcgagagacaggccaacgaagtggactggtgggacatggtgtgtaacgtgaagaagctgatcaacgagaaaaaggaggatggcaaggtgttttggcagaatctggctggctacaagagacaggaagccctgagaccatacctgagcagcgaggaagatcggaagaagggaaagaaattcgctcggtaccagctgggcgacctgctgctgcacctggaaaagaagcacggcgaggactggggaaaggtgtacgacgaggcctgggagcggattgacaagaaagtggaaggcctgagcaagcacatcaagctggaagaggaacggagaagcgaggacgcccagagcaaggccgccctgaccgactggctgcgggctaaggccagcttcgtgatcgagggcctgaaggaggccgacaaggacgagttctgcagatgcgagctgaagctgcagaagtggtacggggacctgcggggaaagcccttcgccatcgaagccgagaacagcatcctggacatcagcggcttcagcaagcagtacaactgtgccttcatctggcagaaggacggcgtgaagaagctgaacctgtacctgatcatcaactacttcaagggcggcaagctgcggttcaagaagatcaaacctgaagccttcgaagccaacagattctacaccgtgatcaacaaaaagagcggcgagatcgtgcccatggaggtgaacttcaacttcgacgaccccaacctgatcatcctgcctctggcctttggcaagagacagggcagagaattcatctggaacgacctgctgtccctggaaaccggcagcctgaagctggccaacggaagagtgatcgagaagacactgtacaacagaagaacccggcaggatgagcctgccctgttcgtggccctgaccttcgagcggcgggaggtcctggactcctccaatatcaaaccaatgaacctgatcggcgtggcaagaggcgaaaacatccccgccgtgatcgccctgaccgaccccgagggctgcccactgagccggtttaaggatagcctgggaaacccaacccacatcctgagaatcggcgagagctataaggagaagcagcggaccatccaggccaagaaggaggtggagcagcggagagccggcggctacagccggaagtacgccagcaaagccaagaatctggcagacgatatggtgagaaacaccgctagagatctgctgtactacgccgtgacccaggatgccatgctgatcttcgccaacctgagccggggcttcggccggcagggcaagcggaccttcatggccgagagacagtacacacggatggaggactggctgaccgccaagctggcctacgagggcctgagcaagacctacctgtccaagacactggcccagtacacctccaagacatgcagcaactgtgggtttaccatcaccagcgccgactacgacagggtgctggagaagctgaagaagacagcaacaggctggatgaccacaattaacggcaaggagctgaaggtggagggccagattacctactacaacagatacaagagacagaacgtagtcaaggacctgtccgtcgagctggatagactgagcgaagaatctgtgaacaacgacatctcctcctggacaaagggcagaagcggagaagctctgagcctcctgaagaaaagattctcccatagacccgtgcaggagaagttcgtgtgcctgaactgcggcttcgagacacacgcagccgagcaagccgccctgaacatcgccagatcctggctgttcctgcggagccaggagtacaagaaataccagacaaacaagacaaccggcaacaccgataagagagccttcgtcgagacctggcagtccttttaccggaagaagcttaaggaggtgtggaaacctgccgtgcggtctggcggatctggcggaggctccaccagccccaagaaaaagagaaaagtctaagctgccttctgcggggcttgccttctggccatgcccttcttctctcccttgcacctgtacctcttggtctttgaataaagcctgagtaggaaggctagcaaaaaaaaaaaaaaaaaaaaaaaaaaaaaaaaaaaaaaaaaaaaaaaaaaaaaaaaaaaaaaaaaaaaaaaaaaaaaaaagcccagccggctccccaacctctaccgaggagggcacctctgagtccgccacccccgagagcggccctggcacctccaccgagcccagcgagggcagcgcacccggcagccctgccggcagccccacctccacagaggagggaaccagcaccgagcccagcgaaggcagcgccccaggcaccagcaccgagcctagtgagcaggagattaaacggatcaacaagatcagaagaagacttgtgaaagacagcaacaccaagaaggccggcaagacaggccccatgaaaaccctgctggttagagtgatgacacccgatctgagagagcggctggaaaacctgagaaagaagcctgaaaatatcccccagcccatcagcaatacatctagagccaacctgaataagctgctgaccgattacaccgaaatgaagaaggcgatcctgcatgtgtactgggaagagttccagaaggaccctgtgggcctgatgagccgggtggcccagcctgccagcaagaagatcgatcagaacaagctgaaacctgagatggacgagaagggcaacctgaccaccgccggctttgcctgctctcagtgtggccagcccctgttcgtgtacaagctggagcaggtgtctgagaagggcaaggcttacaccaactacttcggacggtgcaatgtggccgagcacgaaaagctgatcctgctggcccagctgaagcccgagaaggatagcgacgaagccgtgacatatagcctgggaaagtttgggcagagggccctggatttctacagcattcatgtgaccaaggagtccacccaccccgtgaagcccctggcccagatcgccggaaacagatacgcctccggacctgtgggaaaggccctgagcgacgcatgtatgggcacaatcgcctccttcctgtctaagtaccaggacatcatcatcgaacaccagaaggtggtgaagggcaaccagaagagactggagagcctgcgggagctggccggcaaggaaaacctggaataccctagcgtgaccctgccacctcagcctcacaccaaggagggcgttgatgcctacaacgaagtgatcgcccgggtgcgaatgtgggtgaacctgaacctgtggcagaagctgaagctaagcagagatgatgccaagcctctgctgagactgaagggattcccttcctttcctctggtcgagagacaggccaacgaagtggactggtgggacatggtgtgtaacgtgaagaagctgatcaacgagaaaaaggaggatggcaaggtgttttggcagaatctggctggctacaagagacaggaagccctgagaccatacctgagcagcgaggaagatcggaagaagggaaagaaattcgctcggtaccagctgggcgacctgctgctgcacctggaaaagaagcacggcgaggactggggaaaggtgtacgacgaggcctgggagcggattgacaagaaagtggaaggcctgagcaagcacatcaagctggaagaggaacggagaagcgaggacgcccagagcaaggccgccctgaccgactggctgcgggctaaggccagcttcgtgatcgagggcctgaaggaggccgacaaggacgagttctgcagatgcgagctgaagctgcagaagtggtacggggacctgcggggaaagcccttcgccatcgaagccgagaacagcatcctggacatcagcggcttcagcaagcagtacaactgtgccttcatctggcagaaggacggcgtgaagaagctgaacctgtacctgatcatcaactacttcaagggcggcaagctgcggttcaagaagatcaaacctgaagccttcgaagccaacagattctacaccgtgatcaacaaaaagagcggcgagatcgtgcccatggaggtgaacttcaacttcgacgaccccaacctgatcatcctgcctctggcctttggcaagagacagggcagagaattcatctggaacgacctgctgtccctggaaaccggcagcctgaagctggccaacggaagagtgatcgagaagacactgtacaacagaagaacccggcaggatgagcctgccctgttcgtggccctgaccttcgagcggcgggaggtcctggactcctccaatatcaaaccaatgaacctgatcggcgtggcaagaggcgaaaacatccccgccgtgatcgccctgaccgaccccgagggctgcccactgagccggtttaaggatagcctgggaaacccaacccacatcctgagaatcggcgagagctataaggagaagcagcggaccatccaggccaagaaggaggtggagcagcggagagccggcggctacagccggaagtacgccagcaaagccaagaatctggcagacgatatggtgagaaacaccgctagagatctgctgtactacgccgtgacccaggatgccatgctgatcttcgccaacctgagccggggcttcggccggcagggcaagcggaccttcatggccgagagacagtacacacggatggaggactggctgaccgccaagctggcctacgagggcctgagcaagacctacctgtccaagacactggcccagtacacctccaagacatgcagcaactgtgggtttaccatcaccagcgccgactacgacagggtgctggagaagctgaagaagacagcaacaggctggatgaccacaattaacggcaaggagctgaaggtggagggccagattacctactacaacagatacaagagacagaacgtagtcaaggacctgtccgtcgagctggatagactgagcgaagaatctgtgaacaacgacatctcctcctggacaaagggcagaagcggagaagctctgagcctcctgaagaaaagattctcccatagacccgtgcaggagaagttcgtgtgcctgaactgcggcttcgagacacacgcagccgagcaagccgccctgaacatcgccagatcctggctgttcctgcggagccaggagtacaagaaataccagacaaacaagacaaccggcaacaccgataagagagccttcgtcgagacctggcagtccttttaccggaagaagcttaaggaggtgtggaaacctgccgtgcggtctggcggatctggcggaggctccaccagccccaagaaaaagagaaaagtctaagctgccttctgcggggcttgccttctggccatgcccttcttctctcccttgcacctgtacctcttggtctttgaataaagcctgagtaggaaggctagcaaaaaaaaaaaaaaaaaaaaaaaaaaaaaaaaaaaaaaaaaaaaaaaaaaaaaaaaaaaaaaaaaaaaaaaaaaaaaaaa

SEQ ID NO: 10152 - RNA, 8787 nt, synthetic construct
  source 1..8787: mol_type = other RNA
aggaaataagagagaaaagaagagtaagaagaaatataagagccaccatggcccctaagaagaagcgtaaagtgagccggatgaaccacgaccaggagttcgacccccctaaggtgtaccctcccgtccccgccgagaagagaaagcccatccgggtcctgagcctgttcgatggcatcgccaccggtctgctggtgctgaaggacctgggcatccaggtggataggtacattgcctccgaggtgtgcgaggactccatcaccgtgggaatggtgcgtcatcagggcaagatcatgtacgtgggcgacgtgcggagcgtgacacagaagcatatccaggagtggggccctttcgacctggtgatcggcggcagcccttgcaatgacctgagcatcgtgaacccagcccggaagggcctgtacgagggaaccggcagactgttcttcgagttttacagactgctgcacgacgcccggcctaaggaaggcgacgaccggcccttcttttggctgttcgagaatgtggtggccatgggagtcagcgacaagcgggatattagccggttcctggagagcaaccccgtgatgatcgatgccaaggaagtgagcgccgcccaccgggccagatacttctggggcaatctgcctggcatgaacagacccctggccagcaccgtgaacgacaagctggagctgcaggagtgcctggagcacggccggatcgccaagttcagcaaggtgagaaccatcaccacccgaagcaacagcatcaaacaaggcaaggaccagcactttcctgtgttcatgaacgagaaggaggacatcctgtggtgtaccgagatggagagagtgttcgggttcccagtccactacacagatgtcagcaacatgtctagactggccagacagagactgctgggaagaagctggtccgtccctgtgatcagacacctgttcgcccctctgaaggagtacttcgcctgcgtgagcagcggcaacagcaacgccaacagccggggccccagcttctctagcggcctggtgccactgtccctgagagggagccacatgggccccatggagatctacaaaaccgtgagcgcctggaagcggcagcctgtgcgcgtgctgagcctgtttcggaatatcgataaagtcctgaaaagcctgggattcctggagagcggctctggctccggcggtggcaccctgaagtacgtggaggatgtgacaaacgtggtcagacgggatgtggagaagtggggccccttcgatctggtgtacggcagcacccaacccctgggcagctcttgtgaccggtgccctggctggtacatgtttcagttccaccggatcctgcagtacgccctgccgagacaggagtcccagcggccattcttttggattttcatggacaacttgctgctgaccgaggatgaccaggaaactaccactcggttcctgcagaccgaagccgtgaccctgcaggacgtgagaggccgggactaccagaacgccatgcgggtgtggtccaacatccctggactgaaaagcaagcacgcacctctgacccctaaagaagaggagtacctgcaggcccaggtgcggagcagaagcaagctggacgcccctaaggtggatctgctggtgaagaattgcctcctgcccctgagagagtacttcaagtatttcagccagaatagtctgcccctgggaggcagcggcggcggcgcccaggtgcccgtgaccttcgaggacatcgccgtgtacttcagccaggaggagtgggaggacctggaggagcagcagagggagctgtacaaggacgtgatgaaggagaactacgagaccctgagcagcctgggcccccccgccgtgacccccgacatcatcagccacatcgagaggggcgaggagccctacatcaggttcgagagcggccccgaggagagggagatcggcaagagcagctgcggcggcccaagcagcggcgcccctcctcccagcggcggcaggcggcccaagcagcggcgcccctcctcccagcggcggcagcccagccggctccccaacctctaccgaggagggcacctctgagtccgccacccccgagagcggccctggcacctccaccgagcccagcgagggcagcgcacccggcagccctgccggcagccccacctccacagaggagggaaccagcaccgagcccagcgaaggcagcgccccaggcaccagcaccgagcctagtgagcaggagattaaacggatcaacaagatcagaagaagacttgtgaaagacagcaacaccaagaaggccggcaagacaggccccatgaaaaccctgctggttagagtgatgacacccgatctgagagagcggctggaaaacctgagaaagaagcctgaaaatatcccccagcccatcagcaatacatctagagccaacctgaataagctgctgaccgattacaccgaaatgaagaaggcgatcctgcatgtgtactgggaagagttccagaaggaccctgtgggcctgatgagccgggtggcccagcctgccagcaagaagatcgatcagaacaagctgaaacctgagatggacgagaagggcaacctgaccaccgccggctttgcctgctctcagtgtggccagcccctgttcgtgtacaagctggagcaggtgtctgagaagggcaaggcttacaccaactacttcggacggtgcaatgtggccgagcacgaaaagctgatcctgctggcccagctgaagcccgagaaggatagcgacgaagccgtgacatatagcctgggaaagtttgggcagagggccctggatttctacagcattcatgtgaccaaggagtccacccaccccgtgaagcccctggcccagatcgccggaaacagatacgcctccggacctgtgggaaaggccctgagcgacgcatgtatgggcacaatcgcctccttcctgtctaagtaccaggacatcatcatcgaacaccagaaggtggtgaagggcaaccagaagagactggagagcctgcgggagctggccggcaaggaaaacctggaataccctagcgtgaccctgccacctcagcctcacaccaaggagggcgttgatgcctacaacgaagtgatcgcccgggtgcgaatgtgggtgaacctgaacctgtggcagaagctgaagctaagcagagatgatgccaagcctctgctgagactgaagggattcccttcctttcctctggtcgagagacaggccaacgaagtggactggtgggacatggtgtgtaacgtgaagaagctgatcaacgagaaaaaggaggatggcaaggtgttttggcagaatctggctggctacaagagacaggaagccctgagaccatacctgagcagcgaggaagatcggaagaagggaaagaaattcgctcggtaccagctgggcgacctgctgctgcacctggaaaagaagcacggcgaggactggggaaaggtgtacgacgaggcctgggagcggattgacaagaaagtggaaggcctgagcaagcacatcaagctggaagaggaacggagaagcgaggacgcccagagcaaggccgccctgaccgactggctgcgggctaaggccagcttcgtgatcgagggcctgaaggaggccgacaaggacgagttctgcagatgcgagctgaagctgcagaagtggtacggggacctgcggggaaagcccttcgccatcgaagccgagaacagcatcctggacatcagcggcttcagcaagcagtacaactgtgccttcatctggcagaaggacggcgtgaagaagctgaacctgtacctgatcatcaactacttcaagggcggcaagctgcggttcaagaagatcaaacctgaagccttcgaagccaacagattctacaccgtgatcaacaaaaagagcggcgagatcgtgcccatggaggtgaacttcaacttcgacgaccccaacctgatcatcctgcctctggcctttggcaagagacagggcagagaattcatctggaacgacctgctgtccctggaaaccggcagcctgaagctggccaacggaagagtgatcgagaagacactgtacaacagaagaacccggcaggatgagcctgccctgttcgtggccctgaccttcgagcggcgggaggtcctggactcctccaatatcaaaccaatgaacctgatcggcgtggcaagaggcgaaaacatccccgccgtgatcgccctgaccgaccccgagggctgcccactgagccggtttaaggatagcctgggaaacccaacccacatcctgagaatcggcgagagctataaggagaagcagcggaccatccaggccaagaaggaggtggagcagcggagagccggcggctacagccggaagtacgccagcaaagccaagaatctggcagacgatatggtgagaaacaccgctagagatctgctgtactacgccgtgacccaggatgccatgctgatcttcgccaacctgagccggggcttcggccggcagggcaagcggaccttcatggccgagagacagtacacacggatggaggactggctgaccgccaagctggcctacgagggcctgagcaagacctacctgtccaagacactggcccagtacacctccaagacatgcagcaactgtgggtttaccatcaccagcgccgactacgacagggtgctggagaagctgaagaagacagcaacaggctggatgaccacaattaacggcaaggagctgaaggtggagggccagattacctactacaacagatacaagagacagaacgtagtcaaggacctgtccgtcgagctggatagactgagcgaagaatctgtgaacaacgacatctcctcctggacaaagggcagaagcggagaagctctgagcctcctgaagaaaagattctcccatagacccgtgcaggagaagttcgtgtgcctgaactgcggcttcgagacacacgcagccgagcaagccgccctgaacatcgccagatcctggctgttcctgcggagccaggagtacaagaaataccagacaaacaagacaaccggcaacaccgataagagagccttcgtcgagacctggcagtccttttaccggaagaagcttaaggaggtgtggaaacctgccgtgcggtctggcggatctggcggaggctccaccagccccaagaaaaagagaaaagtctaagctgccttctgcggggcttgccttctggccatgcccttcttctctcccttgcacctgtacctcttggtctttgaataaagcctgagtaggaaggctagcaaaaaaaaaaaaaaaaaaaaaaaaaaaaaaaaaaaaaaaaaaaaaaaaaaaaaaaaaaaaaaaaaaaaaaaaaaaaaaaagcccagccggctccccaacctctaccgaggagggcacctctgagtccgccacccccgagagcggccctggcacctccaccgagcccagcgagggcagcgcacccggcagccctgccggcagccccacctccacagaggagggaaccagcaccgagcccagcgaaggcagcgccccaggcaccagcaccgagcctagtgagcaggagattaaacggatcaacaagatcagaagaagacttgtgaaagacagcaacaccaagaaggccggcaagacaggccccatgaaaaccctgctggttagagtgatgacacccgatctgagagagcggctggaaaacctgagaaagaagcctgaaaatatcccccagcccatcagcaatacatctagagccaacctgaataagctgctgaccgattacaccgaaatgaagaaggcgatcctgcatgtgtactgggaagagttccagaaggaccctgtgggcctgatgagccgggtggcccagcctgccagcaagaagatcgatcagaacaagctgaaacctgagatggacgagaagggcaacctgaccaccgccggctttgcctgctctcagtgtggccagcccctgttcgtgtacaagctggagcaggtgtctgagaagggcaaggcttacaccaactacttcggacggtgcaatgtggccgagcacgaaaagctgatcctgctggcccagctgaagcccgagaaggatagcgacgaagccgtgacatatagcctgggaaagtttgggcagagggccctggatttctacagcattcatgtgaccaaggagtccacccaccccgtgaagcccctggcccagatcgccggaaacagatacgcctccggacctgtgggaaaggccctgagcgacgcatgtatgggcacaatcgcctccttcctgtctaagtaccaggacatcatcatcgaacaccagaaggtggtgaagggcaaccagaagagactggagagcctgcgggagctggccggcaaggaaaacctggaataccctagcgtgaccctgccacctcagcctcacaccaaggagggcgttgatgcctacaacgaagtgatcgcccgggtgcgaatgtgggtgaacctgaacctgtggcagaagctgaagctaagcagagatgatgccaagcctctgctgagactgaagggattcccttcctttcctctggtcgagagacaggccaacgaagtggactggtgggacatggtgtgtaacgtgaagaagctgatcaacgagaaaaaggaggatggcaaggtgttttggcagaatctggctggctacaagagacaggaagccctgagaccatacctgagcagcgaggaagatcggaagaagggaaagaaattcgctcggtaccagctgggcgacctgctgctgcacctggaaaagaagcacggcgaggactggggaaaggtgtacgacgaggcctgggagcggattgacaagaaagtggaaggcctgagcaagcacatcaagctggaagaggaacggagaagcgaggacgcccagagcaaggccgccctgaccgactggctgcgggctaaggccagcttcgtgatcgagggcctgaaggaggccgacaaggacgagttctgcagatgcgagctgaagctgcagaagtggtacggggacctgcggggaaagcccttcgccatcgaagccgagaacagcatcctggacatcagcggcttcagcaagcagtacaactgtgccttcatctggcagaaggacggcgtgaagaagctgaacctgtacctgatcatcaactacttcaagggcggcaagctgcggttcaagaagatcaaacctgaagccttcgaagccaacagattctacaccgtgatcaacaaaaagagcggcgagatcgtgcccatggaggtgaacttcaacttcgacgaccccaacctgatcatcctgcctctggcctttggcaagagacagggcagagaattcatctggaacgacctgctgtccctggaaaccggcagcctgaagctggccaacggaagagtgatcgagaagacactgtacaacagaagaacccggcaggatgagcctgccctgttcgtggccctgaccttcgagcggcgggaggtcctggactcctccaatatcaaaccaatgaacctgatcggcgtggcaagaggcgaaaacatccccgccgtgatcgccctgaccgaccccgagggctgcccactgagccggtttaaggatagcctgggaaacccaacccacatcctgagaatcggcgagagctataaggagaagcagcggaccatccaggccaagaaggaggtggagcagcggagagccggcggctacagccggaagtacgccagcaaagccaagaatctggcagacgatatggtgagaaacaccgctagagatctgctgtactacgccgtgacccaggatgccatgctgatcttcgccaacctgagccggggcttcggccggcagggcaagcggaccttcatggccgagagacagtacacacggatggaggactggctgaccgccaagctggcctacgagggcctgagcaagacctacctgtccaagacactggcccagtacacctccaagacatgcagcaactgtgggtttaccatcaccagcgccgactacgacagggtgctggagaagctgaagaagacagcaacaggctggatgaccacaattaacggcaaggagctgaaggtggagggccagattacctactacaacagatacaagagacagaacgtagtcaaggacctgtccgtcgagctggatagactgagcgaagaatctgtgaacaacgacatctcctcctggacaaagggcagaagcggagaagctctgagcctcctgaagaaaagattctcccatagacccgtgcaggagaagttcgtgtgcctgaactgcggcttcgagacacacgcagccgagcaagccgccctgaacatcgccagatcctggctgttcctgcggagccaggagtacaagaaataccagacaaacaagacaaccggcaacaccgataagagagccttcgtcgagacctggcagtccttttaccggaagaagcttaaggaggtgtggaaacctgccgtgcggtctggcggatctggcggaggctccaccagccccaagaaaaagagaaaagtctaagctgccttctgcggggcttgccttctggccatgcccttcttctctcccttgcacctgtacctcttggtctttgaataaagcctgagtaggaaggctagcaaaaaaaaaaaaaaaaaaaaaaaaaaaaaaaaaaaaaaaaaaaaaaaaaaaaaaaaaaaaaaaaaaaaaaaaaaaaaaaa

SEQ ID NO: 10153 - RNA, 8787 nt, synthetic construct
  source 1..8787: mol_type = other RNA
aggaaataagagagaaaagaagagtaagaagaaatataagagccaccatggcccctaagaagaagcgtaaagtgagccggatgaaccacgaccaggagttcgacccccctaaggtgtaccctcccgtccccgccgagaagagaaagcccatccgggtcctgagcctgttcgatggcatcgccaccggtctgctggtgctgaaggacctgggcatccaggtggataggtacattgcctccgaggtgtgcgaggactccatcaccgtgggaatggtgcgtcatcagggcaagatcatgtacgtgggcgacgtgcggagcgtgacacagaagcatatccaggagtggggccctttcgacctggtgatcggcggcagcccttgcaatgacctgagcatcgtgaacccagcccggaagggcctgtacgagggaaccggcagactgttcttcgagttttacagactgctgcacgacgcccggcctaaggaaggcgacgaccggcccttcttttggctgttcgagaatgtggtggccatgggagtcagcgacaagcgggatattagccggttcctggagagcaaccccgtgatgatcgatgccaaggaagtgagcgccgcccaccgggccagatacttctggggcaatctgcctggcatgaacagacccctggccagcaccgtgaacgacaagctggagctgcaggagtgcctggagcacggccggatcgccaagttcagcaaggtgagaaccatcaccacccgaagcaacagcatcaaacaaggcaaggaccagcactttcctgtgttcatgaacgagaaggaggacatcctgtggtgtaccgagatggagagagtgttcgggttcccagtccactacacagatgtcagcaacatgtctagactggccagacagagactgctgggaagaagctggtccgtccctgtgatcagacacctgttcgcccctctgaaggagtacttcgcctgcgtgagcagcggcaacagcaacgccaacagccggggccccagcttctctagcggcctggtgccactgtccctgagagggagccacatgggccccatggagatctacaaaaccgtgagcgcctggaagcggcagcctgtgcgcgtgctgagcctgtttcggaatatcgataaagtcctgaaaagcctgggattcctggagagcggctctggctccggcggtggcaccctgaagtacgtggaggatgtgacaaacgtggtcagacgggatgtggagaagtggggccccttcgatctggtgtacggcagcacccaacccctgggcagctcttgtgaccggtgccctggctggtacatgtttcagttccaccggatcctgcagtacgccctgccgagacaggagtcccagcggccattcttttggattttcatggacaacttgctgctgaccgaggatgaccaggaaactaccactcggttcctgcagaccgaagccgtgaccctgcaggacgtgagaggccgggactaccagaacgccatgcgggtgtggtccaacatccctggactgaaaagcaagcacgcacctctgacccctaaagaagaggagtacctgcaggcccaggtgcggagcagaagcaagctggacgcccctaaggtggatctgctggtgaagaattgcctcctgcccctgagagagtacttcaagtatttcagccagaatagtctgcccctgggaggcagcggcggcggcagctacgagggcagcgtgagcttcagggacgtggccatcgacttcagcagggaggagtggaggcacctggacctgagccagaggaacctgtacagggacgtgatgctggagacctacagccacctgctgagcgtgggctaccaggtgcccgaggccgaggtggtgatgctggagcagggcaacgagccctgggccctgcagggcgagaggccccaccagagctgccccggcgagaagctgtggggcggcccaagcagcggcgcccctcctcccagcggcggcaggcggcccaagcagcggcgcccctcctcccagcggcggcagcccagccggctccccaacctctaccgaggagggcacctctgagtccgccacccccgagagcggccctggcacctccaccgagcccagcgagggcagcgcacccggcagccctgccggcagccccacctccacagaggagggaaccagcaccgagcccagcgaaggcagcgccccaggcaccagcaccgagcctagtgagcaggagattaaacggatcaacaagatcagaagaagacttgtgaaagacagcaacaccaagaaggccggcaagacaggccccatgaaaaccctgctggttagagtgatgacacccgatctgagagagcggctggaaaacctgagaaagaagcctgaaaatatcccccagcccatcagcaatacatctagagccaacctgaataagctgctgaccgattacaccgaaatgaagaaggcgatcctgcatgtgtactgggaagagttccagaaggaccctgtgggcctgatgagccgggtggcccagcctgccagcaagaagatcgatcagaacaagctgaaacctgagatggacgagaagggcaacctgaccaccgccggctttgcctgctctcagtgtggccagcccctgttcgtgtacaagctggagcaggtgtctgagaagggcaaggcttacaccaactacttcggacggtgcaatgtggccgagcacgaaaagctgatcctgctggcccagctgaagcccgagaaggatagcgacgaagccgtgacatatagcctgggaaagtttgggcagagggccctggatttctacagcattcatgtgaccaaggagtccacccaccccgtgaagcccctggcccagatcgccggaaacagatacgcctccggacctgtgggaaaggccctgagcgacgcatgtatgggcacaatcgcctccttcctgtctaagtaccaggacatcatcatcgaacaccagaaggtggtgaagggcaaccagaagagactggagagcctgcgggagctggccggcaaggaaaacctggaataccctagcgtgaccctgccacctcagcctcacaccaaggagggcgttgatgcctacaacgaagtgatcgcccgggtgcgaatgtgggtgaacctgaacctgtggcagaagctgaagctaagcagagatgatgccaagcctctgctgagactgaagggattcccttcctttcctctggtcgagagacaggccaacgaagtggactggtgggacatggtgtgtaacgtgaagaagctgatcaacgagaaaaaggaggatggcaaggtgttttggcagaatctggctggctacaagagacaggaagccctgagaccatacctgagcagcgaggaagatcggaagaagggaaagaaattcgctcggtaccagctgggcgacctgctgctgcacctggaaaagaagcacggcgaggactggggaaaggtgtacgacgaggcctgggagcggattgacaagaaagtggaaggcctgagcaagcacatcaagctggaagaggaacggagaagcgaggacgcccagagcaaggccgccctgaccgactggctgcgggctaaggccagcttcgtgatcgagggcctgaaggaggccgacaaggacgagttctgcagatgcgagctgaagctgcagaagtggtacggggacctgcggggaaagcccttcgccatcgaagccgagaacagcatcctggacatcagcggcttcagcaagcagtacaactgtgccttcatctggcagaaggacggcgtgaagaagctgaacctgtacctgatcatcaactacttcaagggcggcaagctgcggttcaagaagatcaaacctgaagccttcgaagccaacagattctacaccgtgatcaacaaaaagagcggcgagatcgtgcccatggaggtgaacttcaacttcgacgaccccaacctgatcatcctgcctctggcctttggcaagagacagggcagagaattcatctggaacgacctgctgtccctggaaaccggcagcctgaagctggccaacggaagagtgatcgagaagacactgtacaacagaagaacccggcaggatgagcctgccctgttcgtggccctgaccttcgagcggcgggaggtcctggactcctccaatatcaaaccaatgaacctgatcggcgtggcaagaggcgaaaacatccccgccgtgatcgccctgaccgaccccgagggctgcccactgagccggtttaaggatagcctgggaaacccaacccacatcctgagaatcggcgagagctataaggagaagcagcggaccatccaggccaagaaggaggtggagcagcggagagccggcggctacagccggaagtacgccagcaaagccaagaatctggcagacgatatggtgagaaacaccgctagagatctgctgtactacgccgtgacccaggatgccatgctgatcttcgccaacctgagccggggcttcggccggcagggcaagcggaccttcatggccgagagacagtacacacggatggaggactggctgaccgccaagctggcctacgagggcctgagcaagacctacctgtccaagacactggcccagtacacctccaagacatgcagcaactgtgggtttaccatcaccagcgccgactacgacagggtgctggagaagctgaagaagacagcaacaggctggatgaccacaattaacggcaaggagctgaaggtggagggccagattacctactacaacagatacaagagacagaacgtagtcaaggacctgtccgtcgagctggatagactgagcgaagaatctgtgaacaacgacatctcctcctggacaaagggcagaagcggagaagctctgagcctcctgaagaaaagattctcccatagacccgtgcaggagaagttcgtgtgcctgaactgcggcttcgagacacacgcagccgagcaagccgccctgaacatcgccagatcctggctgttcctgcggagccaggagtacaagaaataccagacaaacaagacaaccggcaacaccgataagagagccttcgtcgagacctggcagtccttttaccggaagaagcttaaggaggtgtggaaacctgccgtgcggtctggcggatctggcggaggctccaccagccccaagaaaaagagaaaagtctaagctgccttctgcggggcttgccttctggccatgcccttcttctctcccttgcacctgtacctcttggtctttgaataaagcctgagtaggaaggctagcaaaaaaaaaaaaaaaaaaaaaaaaaaaaaaaaaaaaaaaaaaaaaaaaaaaaaaaaaaaaaaaaaaaaaaaaaaaaaaaagcccagccggctccccaacctctaccgaggagggcacctctgagtccgccacccccgagagcggccctggcacctccaccgagcccagcgagggcagcgcacccggcagccctgccggcagccccacctccacagaggagggaaccagcaccgagcccagcgaaggcagcgccccaggcaccagcaccgagcctagtgagcaggagattaaacggatcaacaagatcagaagaagacttgtgaaagacagcaacaccaagaaggccggcaagacaggccccatgaaaaccctgctggttagagtgatgacacccgatctgagagagcggctggaaaacctgagaaagaagcctgaaaatatcccccagcccatcagcaatacatctagagccaacctgaataagctgctgaccgattacaccgaaatgaagaaggcgatcctgcatgtgtactgggaagagttccagaaggaccctgtgggcctgatgagccgggtggcccagcctgccagcaagaagatcgatcagaacaagctgaaacctgagatggacgagaagggcaacctgaccaccgccggctttgcctgctctcagtgtggccagcccctgttcgtgtacaagctggagcaggtgtctgagaagggcaaggcttacaccaactacttcggacggtgcaatgtggccgagcacgaaaagctgatcctgctggcccagctgaagcccgagaaggatagcgacgaagccgtgacatatagcctgggaaagtttgggcagagggccctggatttctacagcattcatgtgaccaaggagtccacccaccccgtgaagcccctggcccagatcgccggaaacagatacgcctccggacctgtgggaaaggccctgagcgacgcatgtatgggcacaatcgcctccttcctgtctaagtaccaggacatcatcatcgaacaccagaaggtggtgaagggcaaccagaagagactggagagcctgcgggagctggccggcaaggaaaacctggaataccctagcgtgaccctgccacctcagcctcacaccaaggagggcgttgatgcctacaacgaagtgatcgcccgggtgcgaatgtgggtgaacctgaacctgtggcagaagctgaagctaagcagagatgatgccaagcctctgctgagactgaagggattcccttcctttcctctggtcgagagacaggccaacgaagtggactggtgggacatggtgtgtaacgtgaagaagctgatcaacgagaaaaaggaggatggcaaggtgttttggcagaatctggctggctacaagagacaggaagccctgagaccatacctgagcagcgaggaagatcggaagaagggaaagaaattcgctcggtaccagctgggcgacctgctgctgcacctggaaaagaagcacggcgaggactggggaaaggtgtacgacgaggcctgggagcggattgacaagaaagtggaaggcctgagcaagcacatcaagctggaagaggaacggagaagcgaggacgcccagagcaaggccgccctgaccgactggctgcgggctaaggccagcttcgtgatcgagggcctgaaggaggccgacaaggacgagttctgcagatgcgagctgaagctgcagaagtggtacggggacctgcggggaaagcccttcgccatcgaagccgagaacagcatcctggacatcagcggcttcagcaagcagtacaactgtgccttcatctggcagaaggacggcgtgaagaagctgaacctgtacctgatcatcaactacttcaagggcggcaagctgcggttcaagaagatcaaacctgaagccttcgaagccaacagattctacaccgtgatcaacaaaaagagcggcgagatcgtgcccatggaggtgaacttcaacttcgacgaccccaacctgatcatcctgcctctggcctttggcaagagacagggcagagaattcatctggaacgacctgctgtccctggaaaccggcagcctgaagctggccaacggaagagtgatcgagaagacactgtacaacagaagaacccggcaggatgagcctgccctgttcgtggccctgaccttcgagcggcgggaggtcctggactcctccaatatcaaaccaatgaacctgatcggcgtggcaagaggcgaaaacatccccgccgtgatcgccctgaccgaccccgagggctgcccactgagccggtttaaggatagcctgggaaacccaacccacatcctgagaatcggcgagagctataaggagaagcagcggaccatccaggccaagaaggaggtggagcagcggagagccggcggctacagccggaagtacgccagcaaagccaagaatctggcagacgatatggtgagaaacaccgctagagatctgctgtactacgccgtgacccaggatgccatgctgatcttcgccaacctgagccggggcttcggccggcagggcaagcggaccttcatggccgagagacagtacacacggatggaggactggctgaccgccaagctggcctacgagggcctgagcaagacctacctgtccaagacactggcccagtacacctccaagacatgcagcaactgtgggtttaccatcaccagcgccgactacgacagggtgctggagaagctgaagaagacagcaacaggctggatgaccacaattaacggcaaggagctgaaggtggagggccagattacctactacaacagatacaagagacagaacgtagtcaaggacctgtccgtcgagctggatagactgagcgaagaatctgtgaacaacgacatctcctcctggacaaagggcagaagcggagaagctctgagcctcctgaagaaaagattctcccatagacccgtgcaggagaagttcgtgtgcctgaactgcggcttcgagacacacgcagccgagcaagccgccctgaacatcgccagatcctggctgttcctgcggagccaggagtacaagaaataccagacaaacaagacaaccggcaacaccgataagagagccttcgtcgagacctggcagtccttttaccggaagaagcttaaggaggtgtggaaacctgccgtgcggtctggcggatctggcggaggctccaccagccccaagaaaaagagaaaagtctaagctgccttctgcggggcttgccttctggccatgcccttcttctctcccttgcacctgtacctcttggtctttgaataaagcctgagtaggaaggctagcaaaaaaaaaaaaaaaaaaaaaaaaaaaaaaaaaaaaaaaaaaaaaaaaaaaaaaaaaaaaaaaaaaaaaaaaaaaaaaaa

SEQ ID NO: 10154 - RNA, 8787 nt, synthetic construct
  source 1..8787: mol_type = other RNA
aggaaataagagagaaaagaagagtaagaagaaatataagagccaccatggcccctaagaagaagcgtaaagtgagccggatgaaccacgaccaggagttcgacccccctaaggtgtaccctcccgtccccgccgagaagagaaagcccatccgggtcctgagcctgttcgatggcatcgccaccggtctgctggtgctgaaggacctgggcatccaggtggataggtacattgcctccgaggtgtgcgaggactccatcaccgtgggaatggtgcgtcatcagggcaagatcatgtacgtgggcgacgtgcggagcgtgacacagaagcatatccaggagtggggccctttcgacctggtgatcggcggcagcccttgcaatgacctgagcatcgtgaacccagcccggaagggcctgtacgagggaaccggcagactgttcttcgagttttacagactgctgcacgacgcccggcctaaggaaggcgacgaccggcccttcttttggctgttcgagaatgtggtggccatgggagtcagcgacaagcgggatattagccggttcctggagagcaaccccgtgatgatcgatgccaaggaagtgagcgccgcccaccgggccagatacttctggggcaatctgcctggcatgaacagacccctggccagcaccgtgaacgacaagctggagctgcaggagtgcctggagcacggccggatcgccaagttcagcaaggtgagaaccatcaccacccgaagcaacagcatcaaacaaggcaaggaccagcactttcctgtgttcatgaacgagaaggaggacatcctgtggtgtaccgagatggagagagtgttcgggttcccagtccactacacagatgtcagcaacatgtctagactggccagacagagactgctgggaagaagctggtccgtccctgtgatcagacacctgttcgcccctctgaaggagtacttcgcctgcgtgagcagcggcaacagcaacgccaacagccggggccccagcttctctagcggcctggtgccactgtccctgagagggagccacatgggccccatggagatctacaaaaccgtgagcgcctggaagcggcagcctgtgcgcgtgctgagcctgtttcggaatatcgataaagtcctgaaaagcctgggattcctggagagcggctctggctccggcggtggcaccctgaagtacgtggaggatgtgacaaacgtggtcagacgggatgtggagaagtggggccccttcgatctggtgtacggcagcacccaacccctgggcagctcttgtgaccggtgccctggctggtacatgtttcagttccaccggatcctgcagtacgccctgccgagacaggagtcccagcggccattcttttggattttcatggacaacttgctgctgaccgaggatgaccaggaaactaccactcggttcctgcagaccgaagccgtgaccctgcaggacgtgagaggccgggactaccagaacgccatgcgggtgtggtccaacatccctggactgaaaagcaagcacgcacctctgacccctaaagaagaggagtacctgcaggcccaggtgcggagcagaagcaagctggacgcccctaaggtggatctgctggtgaagaattgcctcctgcccctgagagagtacttcaagtatttcagccagaatagtctgcccctgggaggcagcggcggcggcatggcccaggagagcgtgatgttcagcgacgtgagcatcgacttcagccaggaggagtgggagtgcctgaacgacgaccagagggacctgtacagggacgtgatgctggagaactacagcaacctggtgagcatggccggccacagcatcagcaagcccaacgtgatcagctacctggagcagggcaaggagccctggctggtggacagggagctgaccaggggccagtggcccgccctggagggcggcccaagcagcggcgcccctcctcccagcggcggcaggcggcccaagcagcggcgcccctcctcccagcggcggcagcccagccggctccccaacctctaccgaggagggcacctctgagtccgccacccccgagagcggccctggcacctccaccgagcccagcgagggcagcgcacccggcagccctgccggcagccccacctccacagaggagggaaccagcaccgagcccagcgaaggcagcgccccaggcaccagcaccgagcctagtgagcaggagattaaacggatcaacaagatcagaagaagacttgtgaaagacagcaacaccaagaaggccggcaagacaggccccatgaaaaccctgctggttagagtgatgacacccgatctgagagagcggctggaaaacctgagaaagaagcctgaaaatatcccccagcccatcagcaatacatctagagccaacctgaataagctgctgaccgattacaccgaaatgaagaaggcgatcctgcatgtgtactgggaagagttccagaaggaccctgtgggcctgatgagccgggtggcccagcctgccagcaagaagatcgatcagaacaagctgaaacctgagatggacgagaagggcaacctgaccaccgccggctttgcctgctctcagtgtggccagcccctgttcgtgtacaagctggagcaggtgtctgagaagggcaaggcttacaccaactacttcggacggtgcaatgtggccgagcacgaaaagctgatcctgctggcccagctgaagcccgagaaggatagcgacgaagccgtgacatatagcctgggaaagtttgggcagagggccctggatttctacagcattcatgtgaccaaggagtccacccaccccgtgaagcccctggcccagatcgccggaaacagatacgcctccggacctgtgggaaaggccctgagcgacgcatgtatgggcacaatcgcctccttcctgtctaagtaccaggacatcatcatcgaacaccagaaggtggtgaagggcaaccagaagagactggagagcctgcgggagctggccggcaaggaaaacctggaataccctagcgtgaccctgccacctcagcctcacaccaaggagggcgttgatgcctacaacgaagtgatcgcccgggtgcgaatgtgggtgaacctgaacctgtggcagaagctgaagctaagcagagatgatgccaagcctctgctgagactgaagggattcccttcctttcctctggtcgagagacaggccaacgaagtggactggtgggacatggtgtgtaacgtgaagaagctgatcaacgagaaaaaggaggatggcaaggtgttttggcagaatctggctggctacaagagacaggaagccctgagaccatacctgagcagcgaggaagatcggaagaagggaaagaaattcgctcggtaccagctgggcgacctgctgctgcacctggaaaagaagcacggcgaggactggggaaaggtgtacgacgaggcctgggagcggattgacaagaaagtggaaggcctgagcaagcacatcaagctggaagaggaacggagaagcgaggacgcccagagcaaggccgccctgaccgactggctgcgggctaaggccagcttcgtgatcgagggcctgaaggaggccgacaaggacgagttctgcagatgcgagctgaagctgcagaagtggtacggggacctgcggggaaagcccttcgccatcgaagccgagaacagcatcctggacatcagcggcttcagcaagcagtacaactgtgccttcatctggcagaaggacggcgtgaagaagctgaacctgtacctgatcatcaactacttcaagggcggcaagctgcggttcaagaagatcaaacctgaagccttcgaagccaacagattctacaccgtgatcaacaaaaagagcggcgagatcgtgcccatggaggtgaacttcaacttcgacgaccccaacctgatcatcctgcctctggcctttggcaagagacagggcagagaattcatctggaacgacctgctgtccctggaaaccggcagcctgaagctggccaacggaagagtgatcgagaagacactgtacaacagaagaacccggcaggatgagcctgccctgttcgtggccctgaccttcgagcggcgggaggtcctggactcctccaatatcaaaccaatgaacctgatcggcgtggcaagaggcgaaaacatccccgccgtgatcgccctgaccgaccccgagggctgcccactgagccggtttaaggatagcctgggaaacccaacccacatcctgagaatcggcgagagctataaggagaagcagcggaccatccaggccaagaaggaggtggagcagcggagagccggcggctacagccggaagtacgccagcaaagccaagaatctggcagacgatatggtgagaaacaccgctagagatctgctgtactacgccgtgacccaggatgccatgctgatcttcgccaacctgagccggggcttcggccggcagggcaagcggaccttcatggccgagagacagtacacacggatggaggactggctgaccgccaagctggcctacgagggcctgagcaagacctacctgtccaagacactggcccagtacacctccaagacatgcagcaactgtgggtttaccatcaccagcgccgactacgacagggtgctggagaagctgaagaagacagcaacaggctggatgaccacaattaacggcaaggagctgaaggtggagggccagattacctactacaacagatacaagagacagaacgtagtcaaggacctgtccgtcgagctggatagactgagcgaagaatctgtgaacaacgacatctcctcctggacaaagggcagaagcggagaagctctgagcctcctgaagaaaagattctcccatagacccgtgcaggagaagttcgtgtgcctgaactgcggcttcgagacacacgcagccgagcaagccgccctgaacatcgccagatcctggctgttcctgcggagccaggagtacaagaaataccagacaaacaagacaaccggcaacaccgataagagagccttcgtcgagacctggcagtccttttaccggaagaagcttaaggaggtgtggaaacctgccgtgcggtctggcggatctggcggaggctccaccagccccaagaaaaagagaaaagtctaagctgccttctgcggggcttgccttctggccatgcccttcttctctcccttgcacctgtacctcttggtctttgaataaagcctgagtaggaaggctagcaaaaaaaaaaaaaaaaaaaaaaaaaaaaaaaaaaaaaaaaaaaaaaaaaaaaaaaaaaaaaaaaaaaaaaaaaaaaaaaagcccagccggctccccaacctctaccgaggagggcacctctgagtccgccacccccgagagcggccctggcacctccaccgagcccagcgagggcagcgcacccggcagccctgccggcagccccacctccacagaggagggaaccagcaccgagcccagcgaaggcagcgccccaggcaccagcaccgagcctagtgagcaggagattaaacggatcaacaagatcagaagaagacttgtgaaagacagcaacaccaagaaggccggcaagacaggccccatgaaaaccctgctggttagagtgatgacacccgatctgagagagcggctggaaaacctgagaaagaagcctgaaaatatcccccagcccatcagcaatacatctagagccaacctgaataagctgctgaccgattacaccgaaatgaagaaggcgatcctgcatgtgtactgggaagagttccagaaggaccctgtgggcctgatgagccgggtggcccagcctgccagcaagaagatcgatcagaacaagctgaaacctgagatggacgagaagggcaacctgaccaccgccggctttgcctgctctcagtgtggccagcccctgttcgtgtacaagctggagcaggtgtctgagaagggcaaggcttacaccaactacttcggacggtgcaatgtggccgagcacgaaaagctgatcctgctggcccagctgaagcccgagaaggatagcgacgaagccgtgacatatagcctgggaaagtttgggcagagggccctggatttctacagcattcatgtgaccaaggagtccacccaccccgtgaagcccctggcccagatcgccggaaacagatacgcctccggacctgtgggaaaggccctgagcgacgcatgtatgggcacaatcgcctccttcctgtctaagtaccaggacatcatcatcgaacaccagaaggtggtgaagggcaaccagaagagactggagagcctgcgggagctggccggcaaggaaaacctggaataccctagcgtgaccctgccacctcagcctcacaccaaggagggcgttgatgcctacaacgaagtgatcgcccgggtgcgaatgtgggtgaacctgaacctgtggcagaagctgaagctaagcagagatgatgccaagcctctgctgagactgaagggattcccttcctttcctctggtcgagagacaggccaacgaagtggactggtgggacatggtgtgtaacgtgaagaagctgatcaacgagaaaaaggaggatggcaaggtgttttggcagaatctggctggctacaagagacaggaagccctgagaccatacctgagcagcgaggaagatcggaagaagggaaagaaattcgctcggtaccagctgggcgacctgctgctgcacctggaaaagaagcacggcgaggactggggaaaggtgtacgacgaggcctgggagcggattgacaagaaagtggaaggcctgagcaagcacatcaagctggaagaggaacggagaagcgaggacgcccagagcaaggccgccctgaccgactggctgcgggctaaggccagcttcgtgatcgagggcctgaaggaggccgacaaggacgagttctgcagatgcgagctgaagctgcagaagtggtacggggacctgcggggaaagcccttcgccatcgaagccgagaacagcatcctggacatcagcggcttcagcaagcagtacaactgtgccttcatctggcagaaggacggcgtgaagaagctgaacctgtacctgatcatcaactacttcaagggcggcaagctgcggttcaagaagatcaaacctgaagccttcgaagccaacagattctacaccgtgatcaacaaaaagagcggcgagatcgtgcccatggaggtgaacttcaacttcgacgaccccaacctgatcatcctgcctctggcctttggcaagagacagggcagagaattcatctggaacgacctgctgtccctggaaaccggcagcctgaagctggccaacggaagagtgatcgagaagacactgtacaacagaagaacccggcaggatgagcctgccctgttcgtggccctgaccttcgagcggcgggaggtcctggactcctccaatatcaaaccaatgaacctgatcggcgtggcaagaggcgaaaacatccccgccgtgatcgccctgaccgaccccgagggctgcccactgagccggtttaaggatagcctgggaaacccaacccacatcctgagaatcggcgagagctataaggagaagcagcggaccatccaggccaagaaggaggtggagcagcggagagccggcggctacagccggaagtacgccagcaaagccaagaatctggcagacgatatggtgagaaacaccgctagagatctgctgtactacgccgtgacccaggatgccatgctgatcttcgccaacctgagccggggcttcggccggcagggcaagcggaccttcatggccgagagacagtacacacggatggaggactggctgaccgccaagctggcctacgagggcctgagcaagacctacctgtccaagacactggcccagtacacctccaagacatgcagcaactgtgggtttaccatcaccagcgccgactacgacagggtgctggagaagctgaagaagacagcaacaggctggatgaccacaattaacggcaaggagctgaaggtggagggccagattacctactacaacagatacaagagacagaacgtagtcaaggacctgtccgtcgagctggatagactgagcgaagaatctgtgaacaacgacatctcctcctggacaaagggcagaagcggagaagctctgagcctcctgaagaaaagattctcccatagacccgtgcaggagaagttcgtgtgcctgaactgcggcttcgagacacacgcagccgagcaagccgccctgaacatcgccagatcctggctgttcctgcggagccaggagtacaagaaataccagacaaacaagacaaccggcaacaccgataagagagccttcgtcgagacctggcagtccttttaccggaagaagcttaaggaggtgtggaaacctgccgtgcggtctggcggatctggcggaggctccaccagccccaagaaaaagagaaaagtctaagctgccttctgcggggcttgccttctggccatgcccttcttctctcccttgcacctgtacctcttggtctttgaataaagcctgagtaggaaggctagcaaaaaaaaaaaaaaaaaaaaaaaaaaaaaaaaaaaaaaaaaaaaaaaaaaaaaaaaaaaaaaaaaaaaaaaaaaaaaaaa

SEQ ID NO: 10155 - RNA, 8787 nt, synthetic construct
  source 1..8787: mol_type = other RNA
aggaaataagagagaaaagaagagtaagaagaaatataagagccaccatggcccctaagaagaagcgtaaagtgagccggatgaaccacgaccaggagttcgacccccctaaggtgtaccctcccgtccccgccgagaagagaaagcccatccgggtcctgagcctgttcgatggcatcgccaccggtctgctggtgctgaaggacctgggcatccaggtggataggtacattgcctccgaggtgtgcgaggactccatcaccgtgggaatggtgcgtcatcagggcaagatcatgtacgtgggcgacgtgcggagcgtgacacagaagcatatccaggagtggggccctttcgacctggtgatcggcggcagcccttgcaatgacctgagcatcgtgaacccagcccggaagggcctgtacgagggaaccggcagactgttcttcgagttttacagactgctgcacgacgcccggcctaaggaaggcgacgaccggcccttcttttggctgttcgagaatgtggtggccatgggagtcagcgacaagcgggatattagccggttcctggagagcaaccccgtgatgatcgatgccaaggaagtgagcgccgcccaccgggccagatacttctggggcaatctgcctggcatgaacagacccctggccagcaccgtgaacgacaagctggagctgcaggagtgcctggagcacggccggatcgccaagttcagcaaggtgagaaccatcaccacccgaagcaacagcatcaaacaaggcaaggaccagcactttcctgtgttcatgaacgagaaggaggacatcctgtggtgtaccgagatggagagagtgttcgggttcccagtccactacacagatgtcagcaacatgtctagactggccagacagagactgctgggaagaagctggtccgtccctgtgatcagacacctgttcgcccctctgaaggagtacttcgcctgcgtgagcagcggcaacagcaacgccaacagccggggccccagcttctctagcggcctggtgccactgtccctgagagggagccacatgggccccatggagatctacaaaaccgtgagcgcctggaagcggcagcctgtgcgcgtgctgagcctgtttcggaatatcgataaagtcctgaaaagcctgggattcctggagagcggctctggctccggcggtggcaccctgaagtacgtggaggatgtgacaaacgtggtcagacgggatgtggagaagtggggccccttcgatctggtgtacggcagcacccaacccctgggcagctcttgtgaccggtgccctggctggtacatgtttcagttccaccggatcctgcagtacgccctgccgagacaggagtcccagcggccattcttttggattttcatggacaacttgctgctgaccgaggatgaccaggaaactaccactcggttcctgcagaccgaagccgtgaccctgcaggacgtgagaggccgggactaccagaacgccatgcgggtgtggtccaacatccctggactgaaaagcaagcacgcacctctgacccctaaagaagaggagtacctgcaggcccaggtgcggagcagaagcaagctggacgcccctaaggtggatctgctggtgaagaattgcctcctgcccctgagagagtacttcaagtatttcagccagaatagtctgcccctgggaggcagcggcggcggcccccaggagagcgtggccttcgaggacgtggccgtgtacttcaccgccaaggagtgggacatcatggtgcccgccgagagggccctgtacagggacgtgatgctggagaactacgaggccgtggccttcgtggtgccccccaccagcaagcccgccctggtgagccacctggagcagggcaaggagagctgcttcaccaggccccagggcgtgctgtgcaggaacgactggagggccggcctgggcggcccaagcagcggcgcccctcctcccagcggcggcaggcggcccaagcagcggcgcccctcctcccagcggcggcagcccagccggctccccaacctctaccgaggagggcacctctgagtccgccacccccgagagcggccctggcacctccaccgagcccagcgagggcagcgcacccggcagccctgccggcagccccacctccacagaggagggaaccagcaccgagcccagcgaaggcagcgccccaggcaccagcaccgagcctagtgagcaggagattaaacggatcaacaagatcagaagaagacttgtgaaagacagcaacaccaagaaggccggcaagacaggccccatgaaaaccctgctggttagagtgatgacacccgatctgagagagcggctggaaaacctgagaaagaagcctgaaaatatcccccagcccatcagcaatacatctagagccaacctgaataagctgctgaccgattacaccgaaatgaagaaggcgatcctgcatgtgtactgggaagagttccagaaggaccctgtgggcctgatgagccgggtggcccagcctgccagcaagaagatcgatcagaacaagctgaaacctgagatggacgagaagggcaacctgaccaccgccggctttgcctgctctcagtgtggccagcccctgttcgtgtacaagctggagcaggtgtctgagaagggcaaggcttacaccaactacttcggacggtgcaatgtggccgagcacgaaaagctgatcctgctggcccagctgaagcccgagaaggatagcgacgaagccgtgacatatagcctgggaaagtttgggcagagggccctggatttctacagcattcatgtgaccaaggagtccacccaccccgtgaagcccctggcccagatcgccggaaacagatacgcctccggacctgtgggaaaggccctgagcgacgcatgtatgggcacaatcgcctccttcctgtctaagtaccaggacatcatcatcgaacaccagaaggtggtgaagggcaaccagaagagactggagagcctgcgggagctggccggcaaggaaaacctggaataccctagcgtgaccctgccacctcagcctcacaccaaggagggcgttgatgcctacaacgaagtgatcgcccgggtgcgaatgtgggtgaacctgaacctgtggcagaagctgaagctaagcagagatgatgccaagcctctgctgagactgaagggattcccttcctttcctctggtcgagagacaggccaacgaagtggactggtgggacatggtgtgtaacgtgaagaagctgatcaacgagaaaaaggaggatggcaaggtgttttggcagaatctggctggctacaagagacaggaagccctgagaccatacctgagcagcgaggaagatcggaagaagggaaagaaattcgctcggtaccagctgggcgacctgctgctgcacctggaaaagaagcacggcgaggactggggaaaggtgtacgacgaggcctgggagcggattgacaagaaagtggaaggcctgagcaagcacatcaagctggaagaggaacggagaagcgaggacgcccagagcaaggccgccctgaccgactggctgcgggctaaggccagcttcgtgatcgagggcctgaaggaggccgacaaggacgagttctgcagatgcgagctgaagctgcagaagtggtacggggacctgcggggaaagcccttcgccatcgaagccgagaacagcatcctggacatcagcggcttcagcaagcagtacaactgtgccttcatctggcagaaggacggcgtgaagaagctgaacctgtacctgatcatcaactacttcaagggcggcaagctgcggttcaagaagatcaaacctgaagccttcgaagccaacagattctacaccgtgatcaacaaaaagagcggcgagatcgtgcccatggaggtgaacttcaacttcgacgaccccaacctgatcatcctgcctctggcctttggcaagagacagggcagagaattcatctggaacgacctgctgtccctggaaaccggcagcctgaagctggccaacggaagagtgatcgagaagacactgtacaacagaagaacccggcaggatgagcctgccctgttcgtggccctgaccttcgagcggcgggaggtcctggactcctccaatatcaaaccaatgaacctgatcggcgtggcaagaggcgaaaacatccccgccgtgatcgccctgaccgaccccgagggctgcccactgagccggtttaaggatagcctgggaaacccaacccacatcctgagaatcggcgagagctataaggagaagcagcggaccatccaggccaagaaggaggtggagcagcggagagccggcggctacagccggaagtacgccagcaaagccaagaatctggcagacgatatggtgagaaacaccgctagagatctgctgtactacgccgtgacccaggatgccatgctgatcttcgccaacctgagccggggcttcggccggcagggcaagcggaccttcatggccgagagacagtacacacggatggaggactggctgaccgccaagctggcctacgagggcctgagcaagacctacctgtccaagacactggcccagtacacctccaagacatgcagcaactgtgggtttaccatcaccagcgccgactacgacagggtgctggagaagctgaagaagacagcaacaggctggatgaccacaattaacggcaaggagctgaaggtggagggccagattacctactacaacagatacaagagacagaacgtagtcaaggacctgtccgtcgagctggatagactgagcgaagaatctgtgaacaacgacatctcctcctggacaaagggcagaagcggagaagctctgagcctcctgaagaaaagattctcccatagacccgtgcaggagaagttcgtgtgcctgaactgcggcttcgagacacacgcagccgagcaagccgccctgaacatcgccagatcctggctgttcctgcggagccaggagtacaagaaataccagacaaacaagacaaccggcaacaccgataagagagccttcgtcgagacctggcagtccttttaccggaagaagcttaaggaggtgtggaaacctgccgtgcggtctggcggatctggcggaggctccaccagccccaagaaaaagagaaaagtctaagctgccttctgcggggcttgccttctggccatgcccttcttctctcccttgcacctgtacctcttggtctttgaataaagcctgagtaggaaggctagcaaaaaaaaaaaaaaaaaaaaaaaaaaaaaaaaaaaaaaaaaaaaaaaaaaaaaaaaaaaaaaaaaaaaaaaaaaaaaaaagcccagccggctccccaacctctaccgaggagggcacctctgagtccgccacccccgagagcggccctggcacctccaccgagcccagcgagggcagcgcacccggcagccctgccggcagccccacctccacagaggagggaaccagcaccgagcccagcgaaggcagcgccccaggcaccagcaccgagcctagtgagcaggagattaaacggatcaacaagatcagaagaagacttgtgaaagacagcaacaccaagaaggccggcaagacaggccccatgaaaaccctgctggttagagtgatgacacccgatctgagagagcggctggaaaacctgagaaagaagcctgaaaatatcccccagcccatcagcaatacatctagagccaacctgaataagctgctgaccgattacaccgaaatgaagaaggcgatcctgcatgtgtactgggaagagttccagaaggaccctgtgggcctgatgagccgggtggcccagcctgccagcaagaagatcgatcagaacaagctgaaacctgagatggacgagaagggcaacctgaccaccgccggctttgcctgctctcagtgtggccagcccctgttcgtgtacaagctggagcaggtgtctgagaagggcaaggcttacaccaactacttcggacggtgcaatgtggccgagcacgaaaagctgatcctgctggcccagctgaagcccgagaaggatagcgacgaagccgtgacatatagcctgggaaagtttgggcagagggccctggatttctacagcattcatgtgaccaaggagtccacccaccccgtgaagcccctggcccagatcgccggaaacagatacgcctccggacctgtgggaaaggccctgagcgacgcatgtatgggcacaatcgcctccttcctgtctaagtaccaggacatcatcatcgaacaccagaaggtggtgaagggcaaccagaagagactggagagcctgcgggagctggccggcaaggaaaacctggaataccctagcgtgaccctgccacctcagcctcacaccaaggagggcgttgatgcctacaacgaagtgatcgcccgggtgcgaatgtgggtgaacctgaacctgtggcagaagctgaagctaagcagagatgatgccaagcctctgctgagactgaagggattcccttcctttcctctggtcgagagacaggccaacgaagtggactggtgggacatggtgtgtaacgtgaagaagctgatcaacgagaaaaaggaggatggcaaggtgttttggcagaatctggctggctacaagagacaggaagccctgagaccatacctgagcagcgaggaagatcggaagaagggaaagaaattcgctcggtaccagctgggcgacctgctgctgcacctggaaaagaagcacggcgaggactggggaaaggtgtacgacgaggcctgggagcggattgacaagaaagtggaaggcctgagcaagcacatcaagctggaagaggaacggagaagcgaggacgcccagagcaaggccgccctgaccgactggctgcgggctaaggccagcttcgtgatcgagggcctgaaggaggccgacaaggacgagttctgcagatgcgagctgaagctgcagaagtggtacggggacctgcggggaaagcccttcgccatcgaagccgagaacagcatcctggacatcagcggcttcagcaagcagtacaactgtgccttcatctggcagaaggacggcgtgaagaagctgaacctgtacctgatcatcaactacttcaagggcggcaagctgcggttcaagaagatcaaacctgaagccttcgaagccaacagattctacaccgtgatcaacaaaaagagcggcgagatcgtgcccatggaggtgaacttcaacttcgacgaccccaacctgatcatcctgcctctggcctttggcaagagacagggcagagaattcatctggaacgacctgctgtccctggaaaccggcagcctgaagctggccaacggaagagtgatcgagaagacactgtacaacagaagaacccggcaggatgagcctgccctgttcgtggccctgaccttcgagcggcgggaggtcctggactcctccaatatcaaaccaatgaacctgatcggcgtggcaagaggcgaaaacatccccgccgtgatcgccctgaccgaccccgagggctgcccactgagccggtttaaggatagcctgggaaacccaacccacatcctgagaatcggcgagagctataaggagaagcagcggaccatccaggccaagaaggaggtggagcagcggagagccggcggctacagccggaagtacgccagcaaagccaagaatctggcagacgatatggtgagaaacaccgctagagatctgctgtactacgccgtgacccaggatgccatgctgatcttcgccaacctgagccggggcttcggccggcagggcaagcggaccttcatggccgagagacagtacacacggatggaggactggctgaccgccaagctggcctacgagggcctgagcaagacctacctgtccaagacactggcccagtacacctccaagacatgcagcaactgtgggtttaccatcaccagcgccgactacgacagggtgctggagaagctgaagaagacagcaacaggctggatgaccacaattaacggcaaggagctgaaggtggagggccagattacctactacaacagatacaagagacagaacgtagtcaaggacctgtccgtcgagctggatagactgagcgaagaatctgtgaacaacgacatctcctcctggacaaagggcagaagcggagaagctctgagcctcctgaagaaaagattctcccatagacccgtgcaggagaagttcgtgtgcctgaactgcggcttcgagacacacgcagccgagcaagccgccctgaacatcgccagatcctggctgttcctgcggagccaggagtacaagaaataccagacaaacaagacaaccggcaacaccgataagagagccttcgtcgagacctggcagtccttttaccggaagaagcttaaggaggtgtggaaacctgccgtgcggtctggcggatctggcggaggctccaccagccccaagaaaaagagaaaagtctaagctgccttctgcggggcttgccttctggccatgcccttcttctctcccttgcacctgtacctcttggtctttgaataaagcctgagtaggaaggctagcaaaaaaaaaaaaaaaaaaaaaaaaaaaaaaaaaaaaaaaaaaaaaaaaaaaaaaaaaaaaaaaaaaaaaaaaaaaaaaaa

SEQ ID NO: 10156 - RNA, 8787 nt, synthetic construct
  source 1..8787: mol_type = other RNA
aggaaataagagagaaaagaagagtaagaagaaatataagagccaccatggcccctaagaagaagcgtaaagtgagccggatgaaccacgaccaggagttcgacccccctaaggtgtaccctcccgtccccgccgagaagagaaagcccatccgggtcctgagcctgttcgatggcatcgccaccggtctgctggtgctgaaggacctgggcatccaggtggataggtacattgcctccgaggtgtgcgaggactccatcaccgtgggaatggtgcgtcatcagggcaagatcatgtacgtgggcgacgtgcggagcgtgacacagaagcatatccaggagtggggccctttcgacctggtgatcggcggcagcccttgcaatgacctgagcatcgtgaacccagcccggaagggcctgtacgagggaaccggcagactgttcttcgagttttacagactgctgcacgacgcccggcctaaggaaggcgacgaccggcccttcttttggctgttcgagaatgtggtggccatgggagtcagcgacaagcgggatattagccggttcctggagagcaaccccgtgatgatcgatgccaaggaagtgagcgccgcccaccgggccagatacttctggggcaatctgcctggcatgaacagacccctggccagcaccgtgaacgacaagctggagctgcaggagtgcctggagcacggccggatcgccaagttcagcaaggtgagaaccatcaccacccgaagcaacagcatcaaacaaggcaaggaccagcactttcctgtgttcatgaacgagaaggaggacatcctgtggtgtaccgagatggagagagtgttcgggttcccagtccactacacagatgtcagcaacatgtctagactggccagacagagactgctgggaagaagctggtccgtccctgtgatcagacacctgttcgcccctctgaaggagtacttcgcctgcgtgagcagcggcaacagcaacgccaacagccggggccccagcttctctagcggcctggtgccactgtccctgagagggagccacatgggccccatggagatctacaaaaccgtgagcgcctggaagcggcagcctgtgcgcgtgctgagcctgtttcggaatatcgataaagtcctgaaaagcctgggattcctggagagcggctctggctccggcggtggcaccctgaagtacgtggaggatgtgacaaacgtggtcagacgggatgtggagaagtggggccccttcgatctggtgtacggcagcacccaacccctgggcagctcttgtgaccggtgccctggctggtacatgtttcagttccaccggatcctgcagtacgccctgccgagacaggagtcccagcggccattcttttggattttcatggacaacttgctgctgaccgaggatgaccaggaaactaccactcggttcctgcagaccgaagccgtgaccctgcaggacgtgagaggccgggactaccagaacgccatgcgggtgtggtccaacatccctggactgaaaagcaagcacgcacctctgacccctaaagaagaggagtacctgcaggcccaggtgcggagcagaagcaagctggacgcccctaaggtggatctgctggtgaagaattgcctcctgcccctgagagagtacttcaagtatttcagccagaatagtctgcccctgggaggcagcggcggcggcgaggagctggtgggccagaaccacggcatggagggcgaggcctgcaccggcggcgacgtgaccttcagcgacgtggccatcgacttcagccacgaggagtgggcctgcctggacaccgcccagagggacctgtacaaggacgtgatggtgcagaactacgagaacctggtgagcgtgggcctgagcgtgaccaagccctacgtgatcatgctgctggaggacggcaaggagccctggatgatgggcggcccaagcagcggcgcccctcctcccagcggcggcaggcggcccaagcagcggcgcccctcctcccagcggcggcagcccagccggctccccaacctctaccgaggagggcacctctgagtccgccacccccgagagcggccctggcacctccaccgagcccagcgagggcagcgcacccggcagccctgccggcagccccacctccacagaggagggaaccagcaccgagcccagcgaaggcagcgccccaggcaccagcaccgagcctagtgagcaggagattaaacggatcaacaagatcagaagaagacttgtgaaagacagcaacaccaagaaggccggcaagacaggccccatgaaaaccctgctggttagagtgatgacacccgatctgagagagcggctggaaaacctgagaaagaagcctgaaaatatcccccagcccatcagcaatacatctagagccaacctgaataagctgctgaccgattacaccgaaatgaagaaggcgatcctgcatgtgtactgggaagagttccagaaggaccctgtgggcctgatgagccgggtggcccagcctgccagcaagaagatcgatcagaacaagctgaaacctgagatggacgagaagggcaacctgaccaccgccggctttgcctgctctcagtgtggccagcccctgttcgtgtacaagctggagcaggtgtctgagaagggcaaggcttacaccaactacttcggacggtgcaatgtggccgagcacgaaaagctgatcctgctggcccagctgaagcccgagaaggatagcgacgaagccgtgacatatagcctgggaaagtttgggcagagggccctggatttctacagcattcatgtgaccaaggagtccacccaccccgtgaagcccctggcccagatcgccggaaacagatacgcctccggacctgtgggaaaggccctgagcgacgcatgtatgggcacaatcgcctccttcctgtctaagtaccaggacatcatcatcgaacaccagaaggtggtgaagggcaaccagaagagactggagagcctgcgggagctggccggcaaggaaaacctggaataccctagcgtgaccctgccacctcagcctcacaccaaggagggcgttgatgcctacaacgaagtgatcgcccgggtgcgaatgtgggtgaacctgaacctgtggcagaagctgaagctaagcagagatgatgccaagcctctgctgagactgaagggattcccttcctttcctctggtcgagagacaggccaacgaagtggactggtgggacatggtgtgtaacgtgaagaagctgatcaacgagaaaaaggaggatggcaaggtgttttggcagaatctggctggctacaagagacaggaagccctgagaccatacctgagcagcgaggaagatcggaagaagggaaagaaattcgctcggtaccagctgggcgacctgctgctgcacctggaaaagaagcacggcgaggactggggaaaggtgtacgacgaggcctgggagcggattgacaagaaagtggaaggcctgagcaagcacatcaagctggaagaggaacggagaagcgaggacgcccagagcaaggccgccctgaccgactggctgcgggctaaggccagcttcgtgatcgagggcctgaaggaggccgacaaggacgagttctgcagatgcgagctgaagctgcagaagtggtacggggacctgcggggaaagcccttcgccatcgaagccgagaacagcatcctggacatcagcggcttcagcaagcagtacaactgtgccttcatctggcagaaggacggcgtgaagaagctgaacctgtacctgatcatcaactacttcaagggcggcaagctgcggttcaagaagatcaaacctgaagccttcgaagccaacagattctacaccgtgatcaacaaaaagagcggcgagatcgtgcccatggaggtgaacttcaacttcgacgaccccaacctgatcatcctgcctctggcctttggcaagagacagggcagagaattcatctggaacgacctgctgtccctggaaaccggcagcctgaagctggccaacggaagagtgatcgagaagacactgtacaacagaagaacccggcaggatgagcctgccctgttcgtggccctgaccttcgagcggcgggaggtcctggactcctccaatatcaaaccaatgaacctgatcggcgtggcaagaggcgaaaacatccccgccgtgatcgccctgaccgaccccgagggctgcccactgagccggtttaaggatagcctgggaaacccaacccacatcctgagaatcggcgagagctataaggagaagcagcggaccatccaggccaagaaggaggtggagcagcggagagccggcggctacagccggaagtacgccagcaaagccaagaatctggcagacgatatggtgagaaacaccgctagagatctgctgtactacgccgtgacccaggatgccatgctgatcttcgccaacctgagccggggcttcggccggcagggcaagcggaccttcatggccgagagacagtacacacggatggaggactggctgaccgccaagctggcctacgagggcctgagcaagacctacctgtccaagacactggcccagtacacctccaagacatgcagcaactgtgggtttaccatcaccagcgccgactacgacagggtgctggagaagctgaagaagacagcaacaggctggatgaccacaattaacggcaaggagctgaaggtggagggccagattacctactacaacagatacaagagacagaacgtagtcaaggacctgtccgtcgagctggatagactgagcgaagaatctgtgaacaacgacatctcctcctggacaaagggcagaagcggagaagctctgagcctcctgaagaaaagattctcccatagacccgtgcaggagaagttcgtgtgcctgaactgcggcttcgagacacacgcagccgagcaagccgccctgaacatcgccagatcctggctgttcctgcggagccaggagtacaagaaataccagacaaacaagacaaccggcaacaccgataagagagccttcgtcgagacctggcagtccttttaccggaagaagcttaaggaggtgtggaaacctgccgtgcggtctggcggatctggcggaggctccaccagccccaagaaaaagagaaaagtctaagctgccttctgcggggcttgccttctggccatgcccttcttctctcccttgcacctgtacctcttggtctttgaataaagcctgagtaggaaggctagcaaaaaaaaaaaaaaaaaaaaaaaaaaaaaaaaaaaaaaaaaaaaaaaaaaaaaaaaaaaaaaaaaaaaaaaaaaaaaaaagcccagccggctccccaacctctaccgaggagggcacctctgagtccgccacccccgagagcggccctggcacctccaccgagcccagcgagggcagcgcacccggcagccctgccggcagccccacctccacagaggagggaaccagcaccgagcccagcgaaggcagcgccccaggcaccagcaccgagcctagtgagcaggagattaaacggatcaacaagatcagaagaagacttgtgaaagacagcaacaccaagaaggccggcaagacaggccccatgaaaaccctgctggttagagtgatgacacccgatctgagagagcggctggaaaacctgagaaagaagcctgaaaatatcccccagcccatcagcaatacatctagagccaacctgaataagctgctgaccgattacaccgaaatgaagaaggcgatcctgcatgtgtactgggaagagttccagaaggaccctgtgggcctgatgagccgggtggcccagcctgccagcaagaagatcgatcagaacaagctgaaacctgagatggacgagaagggcaacctgaccaccgccggctttgcctgctctcagtgtggccagcccctgttcgtgtacaagctggagcaggtgtctgagaagggcaaggcttacaccaactacttcggacggtgcaatgtggccgagcacgaaaagctgatcctgctggcccagctgaagcccgagaaggatagcgacgaagccgtgacatatagcctgggaaagtttgggcagagggccctggatttctacagcattcatgtgaccaaggagtccacccaccccgtgaagcccctggcccagatcgccggaaacagatacgcctccggacctgtgggaaaggccctgagcgacgcatgtatgggcacaatcgcctccttcctgtctaagtaccaggacatcatcatcgaacaccagaaggtggtgaagggcaaccagaagagactggagagcctgcgggagctggccggcaaggaaaacctggaataccctagcgtgaccctgccacctcagcctcacaccaaggagggcgttgatgcctacaacgaagtgatcgcccgggtgcgaatgtgggtgaacctgaacctgtggcagaagctgaagctaagcagagatgatgccaagcctctgctgagactgaagggattcccttcctttcctctggtcgagagacaggccaacgaagtggactggtgggacatggtgtgtaacgtgaagaagctgatcaacgagaaaaaggaggatggcaaggtgttttggcagaatctggctggctacaagagacaggaagccctgagaccatacctgagcagcgaggaagatcggaagaagggaaagaaattcgctcggtaccagctgggcgacctgctgctgcacctggaaaagaagcacggcgaggactggggaaaggtgtacgacgaggcctgggagcggattgacaagaaagtggaaggcctgagcaagcacatcaagctggaagaggaacggagaagcgaggacgcccagagcaaggccgccctgaccgactggctgcgggctaaggccagcttcgtgatcgagggcctgaaggaggccgacaaggacgagttctgcagatgcgagctgaagctgcagaagtggtacggggacctgcggggaaagcccttcgccatcgaagccgagaacagcatcctggacatcagcggcttcagcaagcagtacaactgtgccttcatctggcagaaggacggcgtgaagaagctgaacctgtacctgatcatcaactacttcaagggcggcaagctgcggttcaagaagatcaaacctgaagccttcgaagccaacagattctacaccgtgatcaacaaaaagagcggcgagatcgtgcccatggaggtgaacttcaacttcgacgaccccaacctgatcatcctgcctctggcctttggcaagagacagggcagagaattcatctggaacgacctgctgtccctggaaaccggcagcctgaagctggccaacggaagagtgatcgagaagacactgtacaacagaagaacccggcaggatgagcctgccctgttcgtggccctgaccttcgagcggcgggaggtcctggactcctccaatatcaaaccaatgaacctgatcggcgtggcaagaggcgaaaacatccccgccgtgatcgccctgaccgaccccgagggctgcccactgagccggtttaaggatagcctgggaaacccaacccacatcctgagaatcggcgagagctataaggagaagcagcggaccatccaggccaagaaggaggtggagcagcggagagccggcggctacagccggaagtacgccagcaaagccaagaatctggcagacgatatggtgagaaacaccgctagagatctgctgtactacgccgtgacccaggatgccatgctgatcttcgccaacctgagccggggcttcggccggcagggcaagcggaccttcatggccgagagacagtacacacggatggaggactggctgaccgccaagctggcctacgagggcctgagcaagacctacctgtccaagacactggcccagtacacctccaagacatgcagcaactgtgggtttaccatcaccagcgccgactacgacagggtgctggagaagctgaagaagacagcaacaggctggatgaccacaattaacggcaaggagctgaaggtggagggccagattacctactacaacagatacaagagacagaacgtagtcaaggacctgtccgtcgagctggatagactgagcgaagaatctgtgaacaacgacatctcctcctggacaaagggcagaagcggagaagctctgagcctcctgaagaaaagattctcccatagacccgtgcaggagaagttcgtgtgcctgaactgcggcttcgagacacacgcagccgagcaagccgccctgaacatcgccagatcctggctgttcctgcggagccaggagtacaagaaataccagacaaacaagacaaccggcaacaccgataagagagccttcgtcgagacctggcagtccttttaccggaagaagcttaaggaggtgtggaaacctgccgtgcggtctggcggatctggcggaggctccaccagccccaagaaaaagagaaaagtctaagctgccttctgcggggcttgccttctggccatgcccttcttctctcccttgcacctgtacctcttggtctttgaataaagcctgagtaggaaggctagcaaaaaaaaaaaaaaaaaaaaaaaaaaaaaaaaaaaaaaaaaaaaaaaaaaaaaaaaaaaaaaaaaaaaaaaaaaaaaaaa

SEQ ID NO: 10157 - RNA, 8787 nt, synthetic construct
  source 1..8787: mol_type = other RNA
aggaaataagagagaaaagaagagtaagaagaaatataagagccaccatggcccctaagaagaagcgtaaagtgagccggatgaaccacgaccaggagttcgacccccctaaggtgtaccctcccgtccccgccgagaagagaaagcccatccgggtcctgagcctgttcgatggcatcgccaccggtctgctggtgctgaaggacctgggcatccaggtggataggtacattgcctccgaggtgtgcgaggactccatcaccgtgggaatggtgcgtcatcagggcaagatcatgtacgtgggcgacgtgcggagcgtgacacagaagcatatccaggagtggggccctttcgacctggtgatcggcggcagcccttgcaatgacctgagcatcgtgaacccagcccggaagggcctgtacgagggaaccggcagactgttcttcgagttttacagactgctgcacgacgcccggcctaaggaaggcgacgaccggcccttcttttggctgttcgagaatgtggtggccatgggagtcagcgacaagcgggatattagccggttcctggagagcaaccccgtgatgatcgatgccaaggaagtgagcgccgcccaccgggccagatacttctggggcaatctgcctggcatgaacagacccctggccagcaccgtgaacgacaagctggagctgcaggagtgcctggagcacggccggatcgccaagttcagcaaggtgagaaccatcaccacccgaagcaacagcatcaaacaaggcaaggaccagcactttcctgtgttcatgaacgagaaggaggacatcctgtggtgtaccgagatggagagagtgttcgggttcccagtccactacacagatgtcagcaacatgtctagactggccagacagagactgctgggaagaagctggtccgtccctgtgatcagacacctgttcgcccctctgaaggagtacttcgcctgcgtgagcagcggcaacagcaacgccaacagccggggccccagcttctctagcggcctggtgccactgtccctgagagggagccacatgggccccatggagatctacaaaaccgtgagcgcctggaagcggcagcctgtgcgcgtgctgagcctgtttcggaatatcgataaagtcctgaaaagcctgggattcctggagagcggctctggctccggcggtggcaccctgaagtacgtggaggatgtgacaaacgtggtcagacgggatgtggagaagtggggccccttcgatctggtgtacggcagcacccaacccctgggcagctcttgtgaccggtgccctggctggtacatgtttcagttccaccggatcctgcagtacgccctgccgagacaggagtcccagcggccattcttttggattttcatggacaacttgctgctgaccgaggatgaccaggaaactaccactcggttcctgcagaccgaagccgtgaccctgcaggacgtgagaggccgggactaccagaacgccatgcgggtgtggtccaacatccctggactgaaaagcaagcacgcacctctgacccctaaagaagaggagtacctgcaggcccaggtgcggagcagaagcaagctggacgcccctaaggtggatctgctggtgaagaattgcctcctgcccctgagagagtacttcaagtatttcagccagaatagtctgcccctgggaggcagcggcggcggcgcctgcgagagcatcaccttcggcgacgtggccatcgacttcagccaccaggagtgggagtacctgaacctggtgcagaagaccctgtaccaggaggtgatgatggagaactacgacaacctggtgagcctgggccacttcatcagcaagcccgacctgatcaccctgctggagcagggcaaggagccctggatgatcgtgggcgaggagaccaggggcgagtgcaccgacctggacagcaggggcggcccaagcagcggcgcccctcctcccagcggcggcaggcggcccaagcagcggcgcccctcctcccagcggcggcagcccagccggctccccaacctctaccgaggagggcacctctgagtccgccacccccgagagcggccctggcacctccaccgagcccagcgagggcagcgcacccggcagccctgccggcagccccacctccacagaggagggaaccagcaccgagcccagcgaaggcagcgccccaggcaccagcaccgagcctagtgagcaggagattaaacggatcaacaagatcagaagaagacttgtgaaagacagcaacaccaagaaggccggcaagacaggccccatgaaaaccctgctggttagagtgatgacacccgatctgagagagcggctggaaaacctgagaaagaagcctgaaaatatcccccagcccatcagcaatacatctagagccaacctgaataagctgctgaccgattacaccgaaatgaagaaggcgatcctgcatgtgtactgggaagagttccagaaggaccctgtgggcctgatgagccgggtggcccagcctgccagcaagaagatcgatcagaacaagctgaaacctgagatggacgagaagggcaacctgaccaccgccggctttgcctgctctcagtgtggccagcccctgttcgtgtacaagctggagcaggtgtctgagaagggcaaggcttacaccaactacttcggacggtgcaatgtggccgagcacgaaaagctgatcctgctggcccagctgaagcccgagaaggatagcgacgaagccgtgacatatagcctgggaaagtttgggcagagggccctggatttctacagcattcatgtgaccaaggagtccacccaccccgtgaagcccctggcccagatcgccggaaacagatacgcctccggacctgtgggaaaggccctgagcgacgcatgtatgggcacaatcgcctccttcctgtctaagtaccaggacatcatcatcgaacaccagaaggtggtgaagggcaaccagaagagactggagagcctgcgggagctggccggcaaggaaaacctggaataccctagcgtgaccctgccacctcagcctcacaccaaggagggcgttgatgcctacaacgaagtgatcgcccgggtgcgaatgtgggtgaacctgaacctgtggcagaagctgaagctaagcagagatgatgccaagcctctgctgagactgaagggattcccttcctttcctctggtcgagagacaggccaacgaagtggactggtgggacatggtgtgtaacgtgaagaagctgatcaacgagaaaaaggaggatggcaaggtgttttggcagaatctggctggctacaagagacaggaagccctgagaccatacctgagcagcgaggaagatcggaagaagggaaagaaattcgctcggtaccagctgggcgacctgctgctgcacctggaaaagaagcacggcgaggactggggaaaggtgtacgacgaggcctgggagcggattgacaagaaagtggaaggcctgagcaagcacatcaagctggaagaggaacggagaagcgaggacgcccagagcaaggccgccctgaccgactggctgcgggctaaggccagcttcgtgatcgagggcctgaaggaggccgacaaggacgagttctgcagatgcgagctgaagctgcagaagtggtacggggacctgcggggaaagcccttcgccatcgaagccgagaacagcatcctggacatcagcggcttcagcaagcagtacaactgtgccttcatctggcagaaggacggcgtgaagaagctgaacctgtacctgatcatcaactacttcaagggcggcaagctgcggttcaagaagatcaaacctgaagccttcgaagccaacagattctacaccgtgatcaacaaaaagagcggcgagatcgtgcccatggaggtgaacttcaacttcgacgaccccaacctgatcatcctgcctctggcctttggcaagagacagggcagagaattcatctggaacgacctgctgtccctggaaaccggcagcctgaagctggccaacggaagagtgatcgagaagacactgtacaacagaagaacccggcaggatgagcctgccctgttcgtggccctgaccttcgagcggcgggaggtcctggactcctccaatatcaaaccaatgaacctgatcggcgtggcaagaggcgaaaacatccccgccgtgatcgccctgaccgaccccgagggctgcccactgagccggtttaaggatagcctgggaaacccaacccacatcctgagaatcggcgagagctataaggagaagcagcggaccatccaggccaagaaggaggtggagcagcggagagccggcggctacagccggaagtacgccagcaaagccaagaatctggcagacgatatggtgagaaacaccgctagagatctgctgtactacgccgtgacccaggatgccatgctgatcttcgccaacctgagccggggcttcggccggcagggcaagcggaccttcatggccgagagacagtacacacggatggaggactggctgaccgccaagctggcctacgagggcctgagcaagacctacctgtccaagacactggcccagtacacctccaagacatgcagcaactgtgggtttaccatcaccagcgccgactacgacagggtgctggagaagctgaagaagacagcaacaggctggatgaccacaattaacggcaaggagctgaaggtggagggccagattacctactacaacagatacaagagacagaacgtagtcaaggacctgtccgtcgagctggatagactgagcgaagaatctgtgaacaacgacatctcctcctggacaaagggcagaagcggagaagctctgagcctcctgaagaaaagattctcccatagacccgtgcaggagaagttcgtgtgcctgaactgcggcttcgagacacacgcagccgagcaagccgccctgaacatcgccagatcctggctgttcctgcggagccaggagtacaagaaataccagacaaacaagacaaccggcaacaccgataagagagccttcgtcgagacctggcagtccttttaccggaagaagcttaaggaggtgtggaaacctgccgtgcggtctggcggatctggcggaggctccaccagccccaagaaaaagagaaaagtctaagctgccttctgcggggcttgccttctggccatgcccttcttctctcccttgcacctgtacctcttggtctttgaataaagcctgagtaggaaggctagcaaaaaaaaaaaaaaaaaaaaaaaaaaaaaaaaaaaaaaaaaaaaaaaaaaaaaaaaaaaaaaaaaaaaaaaaaaaaaaaagcccagccggctccccaacctctaccgaggagggcacctctgagtccgccacccccgagagcggccctggcacctccaccgagcccagcgagggcagcgcacccggcagccctgccggcagccccacctccacagaggagggaaccagcaccgagcccagcgaaggcagcgccccaggcaccagcaccgagcctagtgagcaggagattaaacggatcaacaagatcagaagaagacttgtgaaagacagcaacaccaagaaggccggcaagacaggccccatgaaaaccctgctggttagagtgatgacacccgatctgagagagcggctggaaaacctgagaaagaagcctgaaaatatcccccagcccatcagcaatacatctagagccaacctgaataagctgctgaccgattacaccgaaatgaagaaggcgatcctgcatgtgtactgggaagagttccagaaggaccctgtgggcctgatgagccgggtggcccagcctgccagcaagaagatcgatcagaacaagctgaaacctgagatggacgagaagggcaacctgaccaccgccggctttgcctgctctcagtgtggccagcccctgttcgtgtacaagctggagcaggtgtctgagaagggcaaggcttacaccaactacttcggacggtgcaatgtggccgagcacgaaaagctgatcctgctggcccagctgaagcccgagaaggatagcgacgaagccgtgacatatagcctgggaaagtttgggcagagggccctggatttctacagcattcatgtgaccaaggagtccacccaccccgtgaagcccctggcccagatcgccggaaacagatacgcctccggacctgtgggaaaggccctgagcgacgcatgtatgggcacaatcgcctccttcctgtctaagtaccaggacatcatcatcgaacaccagaaggtggtgaagggcaaccagaagagactggagagcctgcgggagctggccggcaaggaaaacctggaataccctagcgtgaccctgccacctcagcctcacaccaaggagggcgttgatgcctacaacgaagtgatcgcccgggtgcgaatgtgggtgaacctgaacctgtggcagaagctgaagctaagcagagatgatgccaagcctctgctgagactgaagggattcccttcctttcctctggtcgagagacaggccaacgaagtggactggtgggacatggtgtgtaacgtgaagaagctgatcaacgagaaaaaggaggatggcaaggtgttttggcagaatctggctggctacaagagacaggaagccctgagaccatacctgagcagcgaggaagatcggaagaagggaaagaaattcgctcggtaccagctgggcgacctgctgctgcacctggaaaagaagcacggcgaggactggggaaaggtgtacgacgaggcctgggagcggattgacaagaaagtggaaggcctgagcaagcacatcaagctggaagaggaacggagaagcgaggacgcccagagcaaggccgccctgaccgactggctgcgggctaaggccagcttcgtgatcgagggcctgaaggaggccgacaaggacgagttctgcagatgcgagctgaagctgcagaagtggtacggggacctgcggggaaagcccttcgccatcgaagccgagaacagcatcctggacatcagcggcttcagcaagcagtacaactgtgccttcatctggcagaaggacggcgtgaagaagctgaacctgtacctgatcatcaactacttcaagggcggcaagctgcggttcaagaagatcaaacctgaagccttcgaagccaacagattctacaccgtgatcaacaaaaagagcggcgagatcgtgcccatggaggtgaacttcaacttcgacgaccccaacctgatcatcctgcctctggcctttggcaagagacagggcagagaattcatctggaacgacctgctgtccctggaaaccggcagcctgaagctggccaacggaagagtgatcgagaagacactgtacaacagaagaacccggcaggatgagcctgccctgttcgtggccctgaccttcgagcggcgggaggtcctggactcctccaatatcaaaccaatgaacctgatcggcgtggcaagaggcgaaaacatccccgccgtgatcgccctgaccgaccccgagggctgcccactgagccggtttaaggatagcctgggaaacccaacccacatcctgagaatcggcgagagctataaggagaagcagcggaccatccaggccaagaaggaggtggagcagcggagagccggcggctacagccggaagtacgccagcaaagccaagaatctggcagacgatatggtgagaaacaccgctagagatctgctgtactacgccgtgacccaggatgccatgctgatcttcgccaacctgagccggggcttcggccggcagggcaagcggaccttcatggccgagagacagtacacacggatggaggactggctgaccgccaagctggcctacgagggcctgagcaagacctacctgtccaagacactggcccagtacacctccaagacatgcagcaactgtgggtttaccatcaccagcgccgactacgacagggtgctggagaagctgaagaagacagcaacaggctggatgaccacaattaacggcaaggagctgaaggtggagggccagattacctactacaacagatacaagagacagaacgtagtcaaggacctgtccgtcgagctggatagactgagcgaagaatctgtgaacaacgacatctcctcctggacaaagggcagaagcggagaagctctgagcctcctgaagaaaagattctcccatagacccgtgcaggagaagttcgtgtgcctgaactgcggcttcgagacacacgcagccgagcaagccgccctgaacatcgccagatcctggctgttcctgcggagccaggagtacaagaaataccagacaaacaagacaaccggcaacaccgataagagagccttcgtcgagacctggcagtccttttaccggaagaagcttaaggaggtgtggaaacctgccgtgcggtctggcggatctggcggaggctccaccagccccaagaaaaagagaaaagtctaagctgccttctgcggggcttgccttctggccatgcccttcttctctcccttgcacctgtacctcttggtctttgaataaagcctgagtaggaaggctagcaaaaaaaaaaaaaaaaaaaaaaaaaaaaaaaaaaaaaaaaaaaaaaaaaaaaaaaaaaaaaaaaaaaaaaaaaaaaaaaa

SEQ ID NO: 10158 - RNA, 8787 nt, synthetic construct
  source 1..8787: mol_type = other RNA
aggaaataagagagaaaagaagagtaagaagaaatataagagccaccatggcccctaagaagaagcgtaaagtgagccggatgaaccacgaccaggagttcgacccccctaaggtgtaccctcccgtccccgccgagaagagaaagcccatccgggtcctgagcctgttcgatggcatcgccaccggtctgctggtgctgaaggacctgggcatccaggtggataggtacattgcctccgaggtgtgcgaggactccatcaccgtgggaatggtgcgtcatcagggcaagatcatgtacgtgggcgacgtgcggagcgtgacacagaagcatatccaggagtggggccctttcgacctggtgatcggcggcagcccttgcaatgacctgagcatcgtgaacccagcccggaagggcctgtacgagggaaccggcagactgttcttcgagttttacagactgctgcacgacgcccggcctaaggaaggcgacgaccggcccttcttttggctgttcgagaatgtggtggccatgggagtcagcgacaagcgggatattagccggttcctggagagcaaccccgtgatgatcgatgccaaggaagtgagcgccgcccaccgggccagatacttctggggcaatctgcctggcatgaacagacccctggccagcaccgtgaacgacaagctggagctgcaggagtgcctggagcacggccggatcgccaagttcagcaaggtgagaaccatcaccacccgaagcaacagcatcaaacaaggcaaggaccagcactttcctgtgttcatgaacgagaaggaggacatcctgtggtgtaccgagatggagagagtgttcgggttcccagtccactacacagatgtcagcaacatgtctagactggccagacagagactgctgggaagaagctggtccgtccctgtgatcagacacctgttcgcccctctgaaggagtacttcgcctgcgtgagcagcggcaacagcaacgccaacagccggggccccagcttctctagcggcctggtgccactgtccctgagagggagccacatgggccccatggagatctacaaaaccgtgagcgcctggaagcggcagcctgtgcgcgtgctgagcctgtttcggaatatcgataaagtcctgaaaagcctgggattcctggagagcggctctggctccggcggtggcaccctgaagtacgtggaggatgtgacaaacgtggtcagacgggatgtggagaagtggggccccttcgatctggtgtacggcagcacccaacccctgggcagctcttgtgaccggtgccctggctggtacatgtttcagttccaccggatcctgcagtacgccctgccgagacaggagtcccagcggccattcttttggattttcatggacaacttgctgctgaccgaggatgaccaggaaactaccactcggttcctgcagaccgaagccgtgaccctgcaggacgtgagaggccgggactaccagaacgccatgcgggtgtggtccaacatccctggactgaaaagcaagcacgcacctctgacccctaaagaagaggagtacctgcaggcccaggtgcggagcagaagcaagctggacgcccctaaggtggatctgctggtgaagaattgcctcctgcccctgagagagtacttcaagtatttcagccagaatagtctgcccctgggaggcagcggcggcggcagccaggtgagcctgaccttcagggacgtggccgtggacttcagccaggaggagtggggcctgctggagcccgcccagaaggacatgtacagggacgtgatgctggagaactacgagaacttcctgagcctgggcctgcccatcagcaagcccaacatgatcagccagctgaagaggagggaggcccccagctggatcgccgagggcaaggtgagcctgagcacctacctgggcaccctgaggggcggcccaagcagcggcgcccctcctcccagcggcggcaggcggcccaagcagcggcgcccctcctcccagcggcggcagcccagccggctccccaacctctaccgaggagggcacctctgagtccgccacccccgagagcggccctggcacctccaccgagcccagcgagggcagcgcacccggcagccctgccggcagccccacctccacagaggagggaaccagcaccgagcccagcgaaggcagcgccccaggcaccagcaccgagcctagtgagcaggagattaaacggatcaacaagatcagaagaagacttgtgaaagacagcaacaccaagaaggccggcaagacaggccccatgaaaaccctgctggttagagtgatgacacccgatctgagagagcggctggaaaacctgagaaagaagcctgaaaatatcccccagcccatcagcaatacatctagagccaacctgaataagctgctgaccgattacaccgaaatgaagaaggcgatcctgcatgtgtactgggaagagttccagaaggaccctgtgggcctgatgagccgggtggcccagcctgccagcaagaagatcgatcagaacaagctgaaacctgagatggacgagaagggcaacctgaccaccgccggctttgcctgctctcagtgtggccagcccctgttcgtgtacaagctggagcaggtgtctgagaagggcaaggcttacaccaactacttcggacggtgcaatgtggccgagcacgaaaagctgatcctgctggcccagctgaagcccgagaaggatagcgacgaagccgtgacatatagcctgggaaagtttgggcagagggccctggatttctacagcattcatgtgaccaaggagtccacccaccccgtgaagcccctggcccagatcgccggaaacagatacgcctccggacctgtgggaaaggccctgagcgacgcatgtatgggcacaatcgcctccttcctgtctaagtaccaggacatcatcatcgaacaccagaaggtggtgaagggcaaccagaagagactggagagcctgcgggagctggccggcaaggaaaacctggaataccctagcgtgaccctgccacctcagcctcacaccaaggagggcgttgatgcctacaacgaagtgatcgcccgggtgcgaatgtgggtgaacctgaacctgtggcagaagctgaagctaagcagagatgatgccaagcctctgctgagactgaagggattcccttcctttcctctggtcgagagacaggccaacgaagtggactggtgggacatggtgtgtaacgtgaagaagctgatcaacgagaaaaaggaggatggcaaggtgttttggcagaatctggctggctacaagagacaggaagccctgagaccatacctgagcagcgaggaagatcggaagaagggaaagaaattcgctcggtaccagctgggcgacctgctgctgcacctggaaaagaagcacggcgaggactggggaaaggtgtacgacgaggcctgggagcggattgacaagaaagtggaaggcctgagcaagcacatcaagctggaagaggaacggagaagcgaggacgcccagagcaaggccgccctgaccgactggctgcgggctaaggccagcttcgtgatcgagggcctgaaggaggccgacaaggacgagttctgcagatgcgagctgaagctgcagaagtggtacggggacctgcggggaaagcccttcgccatcgaagccgagaacagcatcctggacatcagcggcttcagcaagcagtacaactgtgccttcatctggcagaaggacggcgtgaagaagctgaacctgtacctgatcatcaactacttcaagggcggcaagctgcggttcaagaagatcaaacctgaagccttcgaagccaacagattctacaccgtgatcaacaaaaagagcggcgagatcgtgcccatggaggtgaacttcaacttcgacgaccccaacctgatcatcctgcctctggcctttggcaagagacagggcagagaattcatctggaacgacctgctgtccctggaaaccggcagcctgaagctggccaacggaagagtgatcgagaagacactgtacaacagaagaacccggcaggatgagcctgccctgttcgtggccctgaccttcgagcggcgggaggtcctggactcctccaatatcaaaccaatgaacctgatcggcgtggcaagaggcgaaaacatccccgccgtgatcgccctgaccgaccccgagggctgcccactgagccggtttaaggatagcctgggaaacccaacccacatcctgagaatcggcgagagctataaggagaagcagcggaccatccaggccaagaaggaggtggagcagcggagagccggcggctacagccggaagtacgccagcaaagccaagaatctggcagacgatatggtgagaaacaccgctagagatctgctgtactacgccgtgacccaggatgccatgctgatcttcgccaacctgagccggggcttcggccggcagggcaagcggaccttcatggccgagagacagtacacacggatggaggactggctgaccgccaagctggcctacgagggcctgagcaagacctacctgtccaagacactggcccagtacacctccaagacatgcagcaactgtgggtttaccatcaccagcgccgactacgacagggtgctggagaagctgaagaagacagcaacaggctggatgaccacaattaacggcaaggagctgaaggtggagggccagattacctactacaacagatacaagagacagaacgtagtcaaggacctgtccgtcgagctggatagactgagcgaagaatctgtgaacaacgacatctcctcctggacaaagggcagaagcggagaagctctgagcctcctgaagaaaagattctcccatagacccgtgcaggagaagttcgtgtgcctgaactgcggcttcgagacacacgcagccgagcaagccgccctgaacatcgccagatcctggctgttcctgcggagccaggagtacaagaaataccagacaaacaagacaaccggcaacaccgataagagagccttcgtcgagacctggcagtccttttaccggaagaagcttaaggaggtgtggaaacctgccgtgcggtctggcggatctggcggaggctccaccagccccaagaaaaagagaaaagtctaagctgccttctgcggggcttgccttctggccatgcccttcttctctcccttgcacctgtacctcttggtctttgaataaagcctgagtaggaaggctagcaaaaaaaaaaaaaaaaaaaaaaaaaaaaaaaaaaaaaaaaaaaaaaaaaaaaaaaaaaaaaaaaaaaaaaaaaaaaaaaagcccagccggctccccaacctctaccgaggagggcacctctgagtccgccacccccgagagcggccctggcacctccaccgagcccagcgagggcagcgcacccggcagccctgccggcagccccacctccacagaggagggaaccagcaccgagcccagcgaaggcagcgccccaggcaccagcaccgagcctagtgagcaggagattaaacggatcaacaagatcagaagaagacttgtgaaagacagcaacaccaagaaggccggcaagacaggccccatgaaaaccctgctggttagagtgatgacacccgatctgagagagcggctggaaaacctgagaaagaagcctgaaaatatcccccagcccatcagcaatacatctagagccaacctgaataagctgctgaccgattacaccgaaatgaagaaggcgatcctgcatgtgtactgggaagagttccagaaggaccctgtgggcctgatgagccgggtggcccagcctgccagcaagaagatcgatcagaacaagctgaaacctgagatggacgagaagggcaacctgaccaccgccggctttgcctgctctcagtgtggccagcccctgttcgtgtacaagctggagcaggtgtctgagaagggcaaggcttacaccaactacttcggacggtgcaatgtggccgagcacgaaaagctgatcctgctggcccagctgaagcccgagaaggatagcgacgaagccgtgacatatagcctgggaaagtttgggcagagggccctggatttctacagcattcatgtgaccaaggagtccacccaccccgtgaagcccctggcccagatcgccggaaacagatacgcctccggacctgtgggaaaggccctgagcgacgcatgtatgggcacaatcgcctccttcctgtctaagtaccaggacatcatcatcgaacaccagaaggtggtgaagggcaaccagaagagactggagagcctgcgggagctggccggcaaggaaaacctggaataccctagcgtgaccctgccacctcagcctcacaccaaggagggcgttgatgcctacaacgaagtgatcgcccgggtgcgaatgtgggtgaacctgaacctgtggcagaagctgaagctaagcagagatgatgccaagcctctgctgagactgaagggattcccttcctttcctctggtcgagagacaggccaacgaagtggactggtgggacatggtgtgtaacgtgaagaagctgatcaacgagaaaaaggaggatggcaaggtgttttggcagaatctggctggctacaagagacaggaagccctgagaccatacctgagcagcgaggaagatcggaagaagggaaagaaattcgctcggtaccagctgggcgacctgctgctgcacctggaaaagaagcacggcgaggactggggaaaggtgtacgacgaggcctgggagcggattgacaagaaagtggaaggcctgagcaagcacatcaagctggaagaggaacggagaagcgaggacgcccagagcaaggccgccctgaccgactggctgcgggctaaggccagcttcgtgatcgagggcctgaaggaggccgacaaggacgagttctgcagatgcgagctgaagctgcagaagtggtacggggacctgcggggaaagcccttcgccatcgaagccgagaacagcatcctggacatcagcggcttcagcaagcagtacaactgtgccttcatctggcagaaggacggcgtgaagaagctgaacctgtacctgatcatcaactacttcaagggcggcaagctgcggttcaagaagatcaaacctgaagccttcgaagccaacagattctacaccgtgatcaacaaaaagagcggcgagatcgtgcccatggaggtgaacttcaacttcgacgaccccaacctgatcatcctgcctctggcctttggcaagagacagggcagagaattcatctggaacgacctgctgtccctggaaaccggcagcctgaagctggccaacggaagagtgatcgagaagacactgtacaacagaagaacccggcaggatgagcctgccctgttcgtggccctgaccttcgagcggcgggaggtcctggactcctccaatatcaaaccaatgaacctgatcggcgtggcaagaggcgaaaacatccccgccgtgatcgccctgaccgaccccgagggctgcccactgagccggtttaaggatagcctgggaaacccaacccacatcctgagaatcggcgagagctataaggagaagcagcggaccatccaggccaagaaggaggtggagcagcggagagccggcggctacagccggaagtacgccagcaaagccaagaatctggcagacgatatggtgagaaacaccgctagagatctgctgtactacgccgtgacccaggatgccatgctgatcttcgccaacctgagccggggcttcggccggcagggcaagcggaccttcatggccgagagacagtacacacggatggaggactggctgaccgccaagctggcctacgagggcctgagcaagacctacctgtccaagacactggcccagtacacctccaagacatgcagcaactgtgggtttaccatcaccagcgccgactacgacagggtgctggagaagctgaagaagacagcaacaggctggatgaccacaattaacggcaaggagctgaaggtggagggccagattacctactacaacagatacaagagacagaacgtagtcaaggacctgtccgtcgagctggatagactgagcgaagaatctgtgaacaacgacatctcctcctggacaaagggcagaagcggagaagctctgagcctcctgaagaaaagattctcccatagacccgtgcaggagaagttcgtgtgcctgaactgcggcttcgagacacacgcagccgagcaagccgccctgaacatcgccagatcctggctgttcctgcggagccaggagtacaagaaataccagacaaacaagacaaccggcaacaccgataagagagccttcgtcgagacctggcagtccttttaccggaagaagcttaaggaggtgtggaaacctgccgtgcggtctggcggatctggcggaggctccaccagccccaagaaaaagagaaaagtctaagctgccttctgcggggcttgccttctggccatgcccttcttctctcccttgcacctgtacctcttggtctttgaataaagcctgagtaggaaggctagcaaaaaaaaaaaaaaaaaaaaaaaaaaaaaaaaaaaaaaaaaaaaaaaaaaaaaaaaaaaaaaaaaaaaaaaaaaaaaaaa

SEQ ID NO: 10159 - RNA, 8787 nt, synthetic construct
  source 1..8787: mol_type = other RNA
aggaaataagagagaaaagaagagtaagaagaaatataagagccaccatggcccctaagaagaagcgtaaagtgagccggatgaaccacgaccaggagttcgacccccctaaggtgtaccctcccgtccccgccgagaagagaaagcccatccgggtcctgagcctgttcgatggcatcgccaccggtctgctggtgctgaaggacctgggcatccaggtggataggtacattgcctccgaggtgtgcgaggactccatcaccgtgggaatggtgcgtcatcagggcaagatcatgtacgtgggcgacgtgcggagcgtgacacagaagcatatccaggagtggggccctttcgacctggtgatcggcggcagcccttgcaatgacctgagcatcgtgaacccagcccggaagggcctgtacgagggaaccggcagactgttcttcgagttttacagactgctgcacgacgcccggcctaaggaaggcgacgaccggcccttcttttggctgttcgagaatgtggtggccatgggagtcagcgacaagcgggatattagccggttcctggagagcaaccccgtgatgatcgatgccaaggaagtgagcgccgcccaccgggccagatacttctggggcaatctgcctggcatgaacagacccctggccagcaccgtgaacgacaagctggagctgcaggagtgcctggagcacggccggatcgccaagttcagcaaggtgagaaccatcaccacccgaagcaacagcatcaaacaaggcaaggaccagcactttcctgtgttcatgaacgagaaggaggacatcctgtggtgtaccgagatggagagagtgttcgggttcccagtccactacacagatgtcagcaacatgtctagactggccagacagagactgctgggaagaagctggtccgtccctgtgatcagacacctgttcgcccctctgaaggagtacttcgcctgcgtgagcagcggcaacagcaacgccaacagccggggccccagcttctctagcggcctggtgccactgtccctgagagggagccacatgggccccatggagatctacaaaaccgtgagcgcctggaagcggcagcctgtgcgcgtgctgagcctgtttcggaatatcgataaagtcctgaaaagcctgggattcctggagagcggctctggctccggcggtggcaccctgaagtacgtggaggatgtgacaaacgtggtcagacgggatgtggagaagtggggccccttcgatctggtgtacggcagcacccaacccctgggcagctcttgtgaccggtgccctggctggtacatgtttcagttccaccggatcctgcagtacgccctgccgagacaggagtcccagcggccattcttttggattttcatggacaacttgctgctgaccgaggatgaccaggaaactaccactcggttcctgcagaccgaagccgtgaccctgcaggacgtgagaggccgggactaccagaacgccatgcgggtgtggtccaacatccctggactgaaaagcaagcacgcacctctgacccctaaagaagaggagtacctgcaggcccaggtgcggagcagaagcaagctggacgcccctaaggtggatctgctggtgaagaattgcctcctgcccctgagagagtacttcaagtatttcagccagaatagtctgcccctgggaggcagcggcggcggctacaaggagagcgtgatgttcagggacgtggccgtggacttcagccaggaggagtgggagtgcctggaccccgcccagagggacctgtacagggacgtgatgctggagaactacagcaacctgctgagcatgggcctgtacatccccaagccccaggtgatcagcctgctggagcagggcaaggagccctggatggtgggcagggagctgaccaggggcctgtgcagcgacctggagagcatgggcggcccaagcagcggcgcccctcctcccagcggcggcaggcggcccaagcagcggcgcccctcctcccagcggcggcagcccagccggctccccaacctctaccgaggagggcacctctgagtccgccacccccgagagcggccctggcacctccaccgagcccagcgagggcagcgcacccggcagccctgccggcagccccacctccacagaggagggaaccagcaccgagcccagcgaaggcagcgccccaggcaccagcaccgagcctagtgagcaggagattaaacggatcaacaagatcagaagaagacttgtgaaagacagcaacaccaagaaggccggcaagacaggccccatgaaaaccctgctggttagagtgatgacacccgatctgagagagcggctggaaaacctgagaaagaagcctgaaaatatcccccagcccatcagcaatacatctagagccaacctgaataagctgctgaccgattacaccgaaatgaagaaggcgatcctgcatgtgtactgggaagagttccagaaggaccctgtgggcctgatgagccgggtggcccagcctgccagcaagaagatcgatcagaacaagctgaaacctgagatggacgagaagggcaacctgaccaccgccggctttgcctgctctcagtgtggccagcccctgttcgtgtacaagctggagcaggtgtctgagaagggcaaggcttacaccaactacttcggacggtgcaatgtggccgagcacgaaaagctgatcctgctggcccagctgaagcccgagaaggatagcgacgaagccgtgacatatagcctgggaaagtttgggcagagggccctggatttctacagcattcatgtgaccaaggagtccacccaccccgtgaagcccctggcccagatcgccggaaacagatacgcctccggacctgtgggaaaggccctgagcgacgcatgtatgggcacaatcgcctccttcctgtctaagtaccaggacatcatcatcgaacaccagaaggtggtgaagggcaaccagaagagactggagagcctgcgggagctggccggcaaggaaaacctggaataccctagcgtgaccctgccacctcagcctcacaccaaggagggcgttgatgcctacaacgaagtgatcgcccgggtgcgaatgtgggtgaacctgaacctgtggcagaagctgaagctaagcagagatgatgccaagcctctgctgagactgaagggattcccttcctttcctctggtcgagagacaggccaacgaagtggactggtgggacatggtgtgtaacgtgaagaagctgatcaacgagaaaaaggaggatggcaaggtgttttggcagaatctggctggctacaagagacaggaagccctgagaccatacctgagcagcgaggaagatcggaagaagggaaagaaattcgctcggtaccagctgggcgacctgctgctgcacctggaaaagaagcacggcgaggactggggaaaggtgtacgacgaggcctgggagcggattgacaagaaagtggaaggcctgagcaagcacatcaagctggaagaggaacggagaagcgaggacgcccagagcaaggccgccctgaccgactggctgcgggctaaggccagcttcgtgatcgagggcctgaaggaggccgacaaggacgagttctgcagatgcgagctgaagctgcagaagtggtacggggacctgcggggaaagcccttcgccatcgaagccgagaacagcatcctggacatcagcggcttcagcaagcagtacaactgtgccttcatctggcagaaggacggcgtgaagaagctgaacctgtacctgatcatcaactacttcaagggcggcaagctgcggttcaagaagatcaaacctgaagccttcgaagccaacagattctacaccgtgatcaacaaaaagagcggcgagatcgtgcccatggaggtgaacttcaacttcgacgaccccaacctgatcatcctgcctctggcctttggcaagagacagggcagagaattcatctggaacgacctgctgtccctggaaaccggcagcctgaagctggccaacggaagagtgatcgagaagacactgtacaacagaagaacccggcaggatgagcctgccctgttcgtggccctgaccttcgagcggcgggaggtcctggactcctccaatatcaaaccaatgaacctgatcggcgtggcaagaggcgaaaacatccccgccgtgatcgccctgaccgaccccgagggctgcccactgagccggtttaaggatagcctgggaaacccaacccacatcctgagaatcggcgagagctataaggagaagcagcggaccatccaggccaagaaggaggtggagcagcggagagccggcggctacagccggaagtacgccagcaaagccaagaatctggcagacgatatggtgagaaacaccgctagagatctgctgtactacgccgtgacccaggatgccatgctgatcttcgccaacctgagccggggcttcggccggcagggcaagcggaccttcatggccgagagacagtacacacggatggaggactggctgaccgccaagctggcctacgagggcctgagcaagacctacctgtccaagacactggcccagtacacctccaagacatgcagcaactgtgggtttaccatcaccagcgccgactacgacagggtgctggagaagctgaagaagacagcaacaggctggatgaccacaattaacggcaaggagctgaaggtggagggccagattacctactacaacagatacaagagacagaacgtagtcaaggacctgtccgtcgagctggatagactgagcgaagaatctgtgaacaacgacatctcctcctggacaaagggcagaagcggagaagctctgagcctcctgaagaaaagattctcccatagacccgtgcaggagaagttcgtgtgcctgaactgcggcttcgagacacacgcagccgagcaagccgccctgaacatcgccagatcctggctgttcctgcggagccaggagtacaagaaataccagacaaacaagacaaccggcaacaccgataagagagccttcgtcgagacctggcagtccttttaccggaagaagcttaaggaggtgtggaaacctgccgtgcggtctggcggatctggcggaggctccaccagccccaagaaaaagagaaaagtctaagctgccttctgcggggcttgccttctggccatgcccttcttctctcccttgcacctgtacctcttggtctttgaataaagcctgagtaggaaggctagcaaaaaaaaaaaaaaaaaaaaaaaaaaaaaaaaaaaaaaaaaaaaaaaaaaaaaaaaaaaaaaaaaaaaaaaaaaaaaaaagcccagccggctccccaacctctaccgaggagggcacctctgagtccgccacccccgagagcggccctggcacctccaccgagcccagcgagggcagcgcacccggcagccctgccggcagccccacctccacagaggagggaaccagcaccgagcccagcgaaggcagcgccccaggcaccagcaccgagcctagtgagcaggagattaaacggatcaacaagatcagaagaagacttgtgaaagacagcaacaccaagaaggccggcaagacaggccccatgaaaaccctgctggttagagtgatgacacccgatctgagagagcggctggaaaacctgagaaagaagcctgaaaatatcccccagcccatcagcaatacatctagagccaacctgaataagctgctgaccgattacaccgaaatgaagaaggcgatcctgcatgtgtactgggaagagttccagaaggaccctgtgggcctgatgagccgggtggcccagcctgccagcaagaagatcgatcagaacaagctgaaacctgagatggacgagaagggcaacctgaccaccgccggctttgcctgctctcagtgtggccagcccctgttcgtgtacaagctggagcaggtgtctgagaagggcaaggcttacaccaactacttcggacggtgcaatgtggccgagcacgaaaagctgatcctgctggcccagctgaagcccgagaaggatagcgacgaagccgtgacatatagcctgggaaagtttgggcagagggccctggatttctacagcattcatgtgaccaaggagtccacccaccccgtgaagcccctggcccagatcgccggaaacagatacgcctccggacctgtgggaaaggccctgagcgacgcatgtatgggcacaatcgcctccttcctgtctaagtaccaggacatcatcatcgaacaccagaaggtggtgaagggcaaccagaagagactggagagcctgcgggagctggccggcaaggaaaacctggaataccctagcgtgaccctgccacctcagcctcacaccaaggagggcgttgatgcctacaacgaagtgatcgcccgggtgcgaatgtgggtgaacctgaacctgtggcagaagctgaagctaagcagagatgatgccaagcctctgctgagactgaagggattcccttcctttcctctggtcgagagacaggccaacgaagtggactggtgggacatggtgtgtaacgtgaagaagctgatcaacgagaaaaaggaggatggcaaggtgttttggcagaatctggctggctacaagagacaggaagccctgagaccatacctgagcagcgaggaagatcggaagaagggaaagaaattcgctcggtaccagctgggcgacctgctgctgcacctggaaaagaagcacggcgaggactggggaaaggtgtacgacgaggcctgggagcggattgacaagaaagtggaaggcctgagcaagcacatcaagctggaagaggaacggagaagcgaggacgcccagagcaaggccgccctgaccgactggctgcgggctaaggccagcttcgtgatcgagggcctgaaggaggccgacaaggacgagttctgcagatgcgagctgaagctgcagaagtggtacggggacctgcggggaaagcccttcgccatcgaagccgagaacagcatcctggacatcagcggcttcagcaagcagtacaactgtgccttcatctggcagaaggacggcgtgaagaagctgaacctgtacctgatcatcaactacttcaagggcggcaagctgcggttcaagaagatcaaacctgaagccttcgaagccaacagattctacaccgtgatcaacaaaaagagcggcgagatcgtgcccatggaggtgaacttcaacttcgacgaccccaacctgatcatcctgcctctggcctttggcaagagacagggcagagaattcatctggaacgacctgctgtccctggaaaccggcagcctgaagctggccaacggaagagtgatcgagaagacactgtacaacagaagaacccggcaggatgagcctgccctgttcgtggccctgaccttcgagcggcgggaggtcctggactcctccaatatcaaaccaatgaacctgatcggcgtggcaagaggcgaaaacatccccgccgtgatcgccctgaccgaccccgagggctgcccactgagccggtttaaggatagcctgggaaacccaacccacatcctgagaatcggcgagagctataaggagaagcagcggaccatccaggccaagaaggaggtggagcagcggagagccggcggctacagccggaagtacgccagcaaagccaagaatctggcagacgatatggtgagaaacaccgctagagatctgctgtactacgccgtgacccaggatgccatgctgatcttcgccaacctgagccggggcttcggccggcagggcaagcggaccttcatggccgagagacagtacacacggatggaggactggctgaccgccaagctggcctacgagggcctgagcaagacctacctgtccaagacactggcccagtacacctccaagacatgcagcaactgtgggtttaccatcaccagcgccgactacgacagggtgctggagaagctgaagaagacagcaacaggctggatgaccacaattaacggcaaggagctgaaggtggagggccagattacctactacaacagatacaagagacagaacgtagtcaaggacctgtccgtcgagctggatagactgagcgaagaatctgtgaacaacgacatctcctcctggacaaagggcagaagcggagaagctctgagcctcctgaagaaaagattctcccatagacccgtgcaggagaagttcgtgtgcctgaactgcggcttcgagacacacgcagccgagcaagccgccctgaacatcgccagatcctggctgttcctgcggagccaggagtacaagaaataccagacaaacaagacaaccggcaacaccgataagagagccttcgtcgagacctggcagtccttttaccggaagaagcttaaggaggtgtggaaacctgccgtgcggtctggcggatctggcggaggctccaccagccccaagaaaaagagaaaagtctaagctgccttctgcggggcttgccttctggccatgcccttcttctctcccttgcacctgtacctcttggtctttgaataaagcctgagtaggaaggctagcaaaaaaaaaaaaaaaaaaaaaaaaaaaaaaaaaaaaaaaaaaaaaaaaaaaaaaaaaaaaaaaaaaaaaaaaaaaaaaaa

SEQ ID NO: 10160 - RNA, 8787 nt, synthetic construct
  source 1..8787: mol_type = other RNA
aggaaataagagagaaaagaagagtaagaagaaatataagagccaccatggcccctaagaagaagcgtaaagtgagccggatgaaccacgaccaggagttcgacccccctaaggtgtaccctcccgtccccgccgagaagagaaagcccatccgggtcctgagcctgttcgatggcatcgccaccggtctgctggtgctgaaggacctgggcatccaggtggataggtacattgcctccgaggtgtgcgaggactccatcaccgtgggaatggtgcgtcatcagggcaagatcatgtacgtgggcgacgtgcggagcgtgacacagaagcatatccaggagtggggccctttcgacctggtgatcggcggcagcccttgcaatgacctgagcatcgtgaacccagcccggaagggcctgtacgagggaaccggcagactgttcttcgagttttacagactgctgcacgacgcccggcctaaggaaggcgacgaccggcccttcttttggctgttcgagaatgtggtggccatgggagtcagcgacaagcgggatattagccggttcctggagagcaaccccgtgatgatcgatgccaaggaagtgagcgccgcccaccgggccagatacttctggggcaatctgcctggcatgaacagacccctggccagcaccgtgaacgacaagctggagctgcaggagtgcctggagcacggccggatcgccaagttcagcaaggtgagaaccatcaccacccgaagcaacagcatcaaacaaggcaaggaccagcactttcctgtgttcatgaacgagaaggaggacatcctgtggtgtaccgagatggagagagtgttcgggttcccagtccactacacagatgtcagcaacatgtctagactggccagacagagactgctgggaagaagctggtccgtccctgtgatcagacacctgttcgcccctctgaaggagtacttcgcctgcgtgagcagcggcaacagcaacgccaacagccggggccccagcttctctagcggcctggtgccactgtccctgagagggagccacatgggccccatggagatctacaaaaccgtgagcgcctggaagcggcagcctgtgcgcgtgctgagcctgtttcggaatatcgataaagtcctgaaaagcctgggattcctggagagcggctctggctccggcggtggcaccctgaagtacgtggaggatgtgacaaacgtggtcagacgggatgtggagaagtggggccccttcgatctggtgtacggcagcacccaacccctgggcagctcttgtgaccggtgccctggctggtacatgtttcagttccaccggatcctgcagtacgccctgccgagacaggagtcccagcggccattcttttggattttcatggacaacttgctgctgaccgaggatgaccaggaaactaccactcggttcctgcagaccgaagccgtgaccctgcaggacgtgagaggccgggactaccagaacgccatgcgggtgtggtccaacatccctggactgaaaagcaagcacgcacctctgacccctaaagaagaggagtacctgcaggcccaggtgcggagcagaagcaagctggacgcccctaaggtggatctgctggtgaagaattgcctcctgcccctgagagagtacttcaagtatttcagccagaatagtctgcccctgggaggcagcggcggcggcgcccagatgcaggtgaccttcgaggacatcgccgtgttcttctgccacgaggagtggaagtacctggacgacggccagaaggagctgtacaaggaggtgatgaaggagaactacgagaccctgatcagcctgggcttcctgtgcgagaagcccagcctgatcagcaagatcgagagggaggaggacccctgcgtgagggaccagcaggacttcagggagaggaggaggaggctgaagagcttcggcggcccaagcagcggcgcccctcctcccagcggcggcaggcggcccaagcagcggcgcccctcctcccagcggcggcagcccagccggctccccaacctctaccgaggagggcacctctgagtccgccacccccgagagcggccctggcacctccaccgagcccagcgagggcagcgcacccggcagccctgccggcagccccacctccacagaggagggaaccagcaccgagcccagcgaaggcagcgccccaggcaccagcaccgagcctagtgagcaggagattaaacggatcaacaagatcagaagaagacttgtgaaagacagcaacaccaagaaggccggcaagacaggccccatgaaaaccctgctggttagagtgatgacacccgatctgagagagcggctggaaaacctgagaaagaagcctgaaaatatcccccagcccatcagcaatacatctagagccaacctgaataagctgctgaccgattacaccgaaatgaagaaggcgatcctgcatgtgtactgggaagagttccagaaggaccctgtgggcctgatgagccgggtggcccagcctgccagcaagaagatcgatcagaacaagctgaaacctgagatggacgagaagggcaacctgaccaccgccggctttgcctgctctcagtgtggccagcccctgttcgtgtacaagctggagcaggtgtctgagaagggcaaggcttacaccaactacttcggacggtgcaatgtggccgagcacgaaaagctgatcctgctggcccagctgaagcccgagaaggatagcgacgaagccgtgacatatagcctgggaaagtttgggcagagggccctggatttctacagcattcatgtgaccaaggagtccacccaccccgtgaagcccctggcccagatcgccggaaacagatacgcctccggacctgtgggaaaggccctgagcgacgcatgtatgggcacaatcgcctccttcctgtctaagtaccaggacatcatcatcgaacaccagaaggtggtgaagggcaaccagaagagactggagagcctgcgggagctggccggcaaggaaaacctggaataccctagcgtgaccctgccacctcagcctcacaccaaggagggcgttgatgcctacaacgaagtgatcgcccgggtgcgaatgtgggtgaacctgaacctgtggcagaagctgaagctaagcagagatgatgccaagcctctgctgagactgaagggattcccttcctttcctctggtcgagagacaggccaacgaagtggactggtgggacatggtgtgtaacgtgaagaagctgatcaacgagaaaaaggaggatggcaaggtgttttggcagaatctggctggctacaagagacaggaagccctgagaccatacctgagcagcgaggaagatcggaagaagggaaagaaattcgctcggtaccagctgggcgacctgctgctgcacctggaaaagaagcacggcgaggactggggaaaggtgtacgacgaggcctgggagcggattgacaagaaagtggaaggcctgagcaagcacatcaagctggaagaggaacggagaagcgaggacgcccagagcaaggccgccctgaccgactggctgcgggctaaggccagcttcgtgatcgagggcctgaaggaggccgacaaggacgagttctgcagatgcgagctgaagctgcagaagtggtacggggacctgcggggaaagcccttcgccatcgaagccgagaacagcatcctggacatcagcggcttcagcaagcagtacaactgtgccttcatctggcagaaggacggcgtgaagaagctgaacctgtacctgatcatcaactacttcaagggcggcaagctgcggttcaagaagatcaaacctgaagccttcgaagccaacagattctacaccgtgatcaacaaaaagagcggcgagatcgtgcccatggaggtgaacttcaacttcgacgaccccaacctgatcatcctgcctctggcctttggcaagagacagggcagagaattcatctggaacgacctgctgtccctggaaaccggcagcctgaagctggccaacggaagagtgatcgagaagacactgtacaacagaagaacccggcaggatgagcctgccctgttcgtggccctgaccttcgagcggcgggaggtcctggactcctccaatatcaaaccaatgaacctgatcggcgtggcaagaggcgaaaacatccccgccgtgatcgccctgaccgaccccgagggctgcccactgagccggtttaaggatagcctgggaaacccaacccacatcctgagaatcggcgagagctataaggagaagcagcggaccatccaggccaagaaggaggtggagcagcggagagccggcggctacagccggaagtacgccagcaaagccaagaatctggcagacgatatggtgagaaacaccgctagagatctgctgtactacgccgtgacccaggatgccatgctgatcttcgccaacctgagccggggcttcggccggcagggcaagcggaccttcatggccgagagacagtacacacggatggaggactggctgaccgccaagctggcctacgagggcctgagcaagacctacctgtccaagacactggcccagtacacctccaagacatgcagcaactgtgggtttaccatcaccagcgccgactacgacagggtgctggagaagctgaagaagacagcaacaggctggatgaccacaattaacggcaaggagctgaaggtggagggccagattacctactacaacagatacaagagacagaacgtagtcaaggacctgtccgtcgagctggatagactgagcgaagaatctgtgaacaacgacatctcctcctggacaaagggcagaagcggagaagctctgagcctcctgaagaaaagattctcccatagacccgtgcaggagaagttcgtgtgcctgaactgcggcttcgagacacacgcagccgagcaagccgccctgaacatcgccagatcctggctgttcctgcggagccaggagtacaagaaataccagacaaacaagacaaccggcaacaccgataagagagccttcgtcgagacctggcagtccttttaccggaagaagcttaaggaggtgtggaaacctgccgtgcggtctggcggatctggcggaggctccaccagccccaagaaaaagagaaaagtctaagctgccttctgcggggcttgccttctggccatgcccttcttctctcccttgcacctgtacctcttggtctttgaataaagcctgagtaggaaggctagcaaaaaaaaaaaaaaaaaaaaaaaaaaaaaaaaaaaaaaaaaaaaaaaaaaaaaaaaaaaaaaaaaaaaaaaaaaaaaaaagcccagccggctccccaacctctaccgaggagggcacctctgagtccgccacccccgagagcggccctggcacctccaccgagcccagcgagggcagcgcacccggcagccctgccggcagccccacctccacagaggagggaaccagcaccgagcccagcgaaggcagcgccccaggcaccagcaccgagcctagtgagcaggagattaaacggatcaacaagatcagaagaagacttgtgaaagacagcaacaccaagaaggccggcaagacaggccccatgaaaaccctgctggttagagtgatgacacccgatctgagagagcggctggaaaacctgagaaagaagcctgaaaatatcccccagcccatcagcaatacatctagagccaacctgaataagctgctgaccgattacaccgaaatgaagaaggcgatcctgcatgtgtactgggaagagttccagaaggaccctgtgggcctgatgagccgggtggcccagcctgccagcaagaagatcgatcagaacaagctgaaacctgagatggacgagaagggcaacctgaccaccgccggctttgcctgctctcagtgtggccagcccctgttcgtgtacaagctggagcaggtgtctgagaagggcaaggcttacaccaactacttcggacggtgcaatgtggccgagcacgaaaagctgatcctgctggcccagctgaagcccgagaaggatagcgacgaagccgtgacatatagcctgggaaagtttgggcagagggccctggatttctacagcattcatgtgaccaaggagtccacccaccccgtgaagcccctggcccagatcgccggaaacagatacgcctccggacctgtgggaaaggccctgagcgacgcatgtatgggcacaatcgcctccttcctgtctaagtaccaggacatcatcatcgaacaccagaaggtggtgaagggcaaccagaagagactggagagcctgcgggagctggccggcaaggaaaacctggaataccctagcgtgaccctgccacctcagcctcacaccaaggagggcgttgatgcctacaacgaagtgatcgcccgggtgcgaatgtgggtgaacctgaacctgtggcagaagctgaagctaagcagagatgatgccaagcctctgctgagactgaagggattcccttcctttcctctggtcgagagacaggccaacgaagtggactggtgggacatggtgtgtaacgtgaagaagctgatcaacgagaaaaaggaggatggcaaggtgttttggcagaatctggctggctacaagagacaggaagccctgagaccatacctgagcagcgaggaagatcggaagaagggaaagaaattcgctcggtaccagctgggcgacctgctgctgcacctggaaaagaagcacggcgaggactggggaaaggtgtacgacgaggcctgggagcggattgacaagaaagtggaaggcctgagcaagcacatcaagctggaagaggaacggagaagcgaggacgcccagagcaaggccgccctgaccgactggctgcgggctaaggccagcttcgtgatcgagggcctgaaggaggccgacaaggacgagttctgcagatgcgagctgaagctgcagaagtggtacggggacctgcggggaaagcccttcgccatcgaagccgagaacagcatcctggacatcagcggcttcagcaagcagtacaactgtgccttcatctggcagaaggacggcgtgaagaagctgaacctgtacctgatcatcaactacttcaagggcggcaagctgcggttcaagaagatcaaacctgaagccttcgaagccaacagattctacaccgtgatcaacaaaaagagcggcgagatcgtgcccatggaggtgaacttcaacttcgacgaccccaacctgatcatcctgcctctggcctttggcaagagacagggcagagaattcatctggaacgacctgctgtccctggaaaccggcagcctgaagctggccaacggaagagtgatcgagaagacactgtacaacagaagaacccggcaggatgagcctgccctgttcgtggccctgaccttcgagcggcgggaggtcctggactcctccaatatcaaaccaatgaacctgatcggcgtggcaagaggcgaaaacatccccgccgtgatcgccctgaccgaccccgagggctgcccactgagccggtttaaggatagcctgggaaacccaacccacatcctgagaatcggcgagagctataaggagaagcagcggaccatccaggccaagaaggaggtggagcagcggagagccggcggctacagccggaagtacgccagcaaagccaagaatctggcagacgatatggtgagaaacaccgctagagatctgctgtactacgccgtgacccaggatgccatgctgatcttcgccaacctgagccggggcttcggccggcagggcaagcggaccttcatggccgagagacagtacacacggatggaggactggctgaccgccaagctggcctacgagggcctgagcaagacctacctgtccaagacactggcccagtacacctccaagacatgcagcaactgtgggtttaccatcaccagcgccgactacgacagggtgctggagaagctgaagaagacagcaacaggctggatgaccacaattaacggcaaggagctgaaggtggagggccagattacctactacaacagatacaagagacagaacgtagtcaaggacctgtccgtcgagctggatagactgagcgaagaatctgtgaacaacgacatctcctcctggacaaagggcagaagcggagaagctctgagcctcctgaagaaaagattctcccatagacccgtgcaggagaagttcgtgtgcctgaactgcggcttcgagacacacgcagccgagcaagccgccctgaacatcgccagatcctggctgttcctgcggagccaggagtacaagaaataccagacaaacaagacaaccggcaacaccgataagagagccttcgtcgagacctggcagtccttttaccggaagaagcttaaggaggtgtggaaacctgccgtgcggtctggcggatctggcggaggctccaccagccccaagaaaaagagaaaagtctaagctgccttctgcggggcttgccttctggccatgcccttcttctctcccttgcacctgtacctcttggtctttgaataaagcctgagtaggaaggctagcaaaaaaaaaaaaaaaaaaaaaaaaaaaaaaaaaaaaaaaaaaaaaaaaaaaaaaaaaaaaaaaaaaaaaaaaaaaaaaaa

SEQ ID NO: 10161 - RNA, 8787 nt, synthetic construct
  source 1..8787: mol_type = other RNA
aggaaataagagagaaaagaagagtaagaagaaatataagagccaccatggcccctaagaagaagcgtaaagtgagccggatgaaccacgaccaggagttcgacccccctaaggtgtaccctcccgtccccgccgagaagagaaagcccatccgggtcctgagcctgttcgatggcatcgccaccggtctgctggtgctgaaggacctgggcatccaggtggataggtacattgcctccgaggtgtgcgaggactccatcaccgtgggaatggtgcgtcatcagggcaagatcatgtacgtgggcgacgtgcggagcgtgacacagaagcatatccaggagtggggccctttcgacctggtgatcggcggcagcccttgcaatgacctgagcatcgtgaacccagcccggaagggcctgtacgagggaaccggcagactgttcttcgagttttacagactgctgcacgacgcccggcctaaggaaggcgacgaccggcccttcttttggctgttcgagaatgtggtggccatgggagtcagcgacaagcgggatattagccggttcctggagagcaaccccgtgatgatcgatgccaaggaagtgagcgccgcccaccgggccagatacttctggggcaatctgcctggcatgaacagacccctggccagcaccgtgaacgacaagctggagctgcaggagtgcctggagcacggccggatcgccaagttcagcaaggtgagaaccatcaccacccgaagcaacagcatcaaacaaggcaaggaccagcactttcctgtgttcatgaacgagaaggaggacatcctgtggtgtaccgagatggagagagtgttcgggttcccagtccactacacagatgtcagcaacatgtctagactggccagacagagactgctgggaagaagctggtccgtccctgtgatcagacacctgttcgcccctctgaaggagtacttcgcctgcgtgagcagcggcaacagcaacgccaacagccggggccccagcttctctagcggcctggtgccactgtccctgagagggagccacatgggccccatggagatctacaaaaccgtgagcgcctggaagcggcagcctgtgcgcgtgctgagcctgtttcggaatatcgataaagtcctgaaaagcctgggattcctggagagcggctctggctccggcggtggcaccctgaagtacgtggaggatgtgacaaacgtggtcagacgggatgtggagaagtggggccccttcgatctggtgtacggcagcacccaacccctgggcagctcttgtgaccggtgccctggctggtacatgtttcagttccaccggatcctgcagtacgccctgccgagacaggagtcccagcggccattcttttggattttcatggacaacttgctgctgaccgaggatgaccaggaaactaccactcggttcctgcagaccgaagccgtgaccctgcaggacgtgagaggccgggactaccagaacgccatgcgggtgtggtccaacatccctggactgaaaagcaagcacgcacctctgacccctaaagaagaggagtacctgcaggcccaggtgcggagcagaagcaagctggacgcccctaaggtggatctgctggtgaagaattgcctcctgcccctgagagagtacttcaagtatttcagccagaatagtctgcccctgggaggcagcggcggcggcaaggagaacgccgtgacctacgacgacatccacatcgacttcaccagggaggagtggaccctgctggaccccagccagaagaacctgtacaaggacgtgatgctggagacctacaggcacctgaccaccatcggctacagctgggaggaccacaacatcgagaagtactgcgagagcagcaggaggcacaagagcaccgtgcagaggcacaagaggaccaacaccaacgagaacccctacgagggcggcccaagcagcggcgcccctcctcccagcggcggcaggcggcccaagcagcggcgcccctcctcccagcggcggcagcccagccggctccccaacctctaccgaggagggcacctctgagtccgccacccccgagagcggccctggcacctccaccgagcccagcgagggcagcgcacccggcagccctgccggcagccccacctccacagaggagggaaccagcaccgagcccagcgaaggcagcgccccaggcaccagcaccgagcctagtgagcaggagattaaacggatcaacaagatcagaagaagacttgtgaaagacagcaacaccaagaaggccggcaagacaggccccatgaaaaccctgctggttagagtgatgacacccgatctgagagagcggctggaaaacctgagaaagaagcctgaaaatatcccccagcccatcagcaatacatctagagccaacctgaataagctgctgaccgattacaccgaaatgaagaaggcgatcctgcatgtgtactgggaagagttccagaaggaccctgtgggcctgatgagccgggtggcccagcctgccagcaagaagatcgatcagaacaagctgaaacctgagatggacgagaagggcaacctgaccaccgccggctttgcctgctctcagtgtggccagcccctgttcgtgtacaagctggagcaggtgtctgagaagggcaaggcttacaccaactacttcggacggtgcaatgtggccgagcacgaaaagctgatcctgctggcccagctgaagcccgagaaggatagcgacgaagccgtgacatatagcctgggaaagtttgggcagagggccctggatttctacagcattcatgtgaccaaggagtccacccaccccgtgaagcccctggcccagatcgccggaaacagatacgcctccggacctgtgggaaaggccctgagcgacgcatgtatgggcacaatcgcctccttcctgtctaagtaccaggacatcatcatcgaacaccagaaggtggtgaagggcaaccagaagagactggagagcctgcgggagctggccggcaaggaaaacctggaataccctagcgtgaccctgccacctcagcctcacaccaaggagggcgttgatgcctacaacgaagtgatcgcccgggtgcgaatgtgggtgaacctgaacctgtggcagaagctgaagctaagcagagatgatgccaagcctctgctgagactgaagggattcccttcctttcctctggtcgagagacaggccaacgaagtggactggtgggacatggtgtgtaacgtgaagaagctgatcaacgagaaaaaggaggatggcaaggtgttttggcagaatctggctggctacaagagacaggaagccctgagaccatacctgagcagcgaggaagatcggaagaagggaaagaaattcgctcggtaccagctgggcgacctgctgctgcacctggaaaagaagcacggcgaggactggggaaaggtgtacgacgaggcctgggagcggattgacaagaaagtggaaggcctgagcaagcacatcaagctggaagaggaacggagaagcgaggacgcccagagcaaggccgccctgaccgactggctgcgggctaaggccagcttcgtgatcgagggcctgaaggaggccgacaaggacgagttctgcagatgcgagctgaagctgcagaagtggtacggggacctgcggggaaagcccttcgccatcgaagccgagaacagcatcctggacatcagcggcttcagcaagcagtacaactgtgccttcatctggcagaaggacggcgtgaagaagctgaacctgtacctgatcatcaactacttcaagggcggcaagctgcggttcaagaagatcaaacctgaagccttcgaagccaacagattctacaccgtgatcaacaaaaagagcggcgagatcgtgcccatggaggtgaacttcaacttcgacgaccccaacctgatcatcctgcctctggcctttggcaagagacagggcagagaattcatctggaacgacctgctgtccctggaaaccggcagcctgaagctggccaacggaagagtgatcgagaagacactgtacaacagaagaacccggcaggatgagcctgccctgttcgtggccctgaccttcgagcggcgggaggtcctggactcctccaatatcaaaccaatgaacctgatcggcgtggcaagaggcgaaaacatccccgccgtgatcgccctgaccgaccccgagggctgcccactgagccggtttaaggatagcctgggaaacccaacccacatcctgagaatcggcgagagctataaggagaagcagcggaccatccaggccaagaaggaggtggagcagcggagagccggcggctacagccggaagtacgccagcaaagccaagaatctggcagacgatatggtgagaaacaccgctagagatctgctgtactacgccgtgacccaggatgccatgctgatcttcgccaacctgagccggggcttcggccggcagggcaagcggaccttcatggccgagagacagtacacacggatggaggactggctgaccgccaagctggcctacgagggcctgagcaagacctacctgtccaagacactggcccagtacacctccaagacatgcagcaactgtgggtttaccatcaccagcgccgactacgacagggtgctggagaagctgaagaagacagcaacaggctggatgaccacaattaacggcaaggagctgaaggtggagggccagattacctactacaacagatacaagagacagaacgtagtcaaggacctgtccgtcgagctggatagactgagcgaagaatctgtgaacaacgacatctcctcctggacaaagggcagaagcggagaagctctgagcctcctgaagaaaagattctcccatagacccgtgcaggagaagttcgtgtgcctgaactgcggcttcgagacacacgcagccgagcaagccgccctgaacatcgccagatcctggctgttcctgcggagccaggagtacaagaaataccagacaaacaagacaaccggcaacaccgataagagagccttcgtcgagacctggcagtccttttaccggaagaagcttaaggaggtgtggaaacctgccgtgcggtctggcggatctggcggaggctccaccagccccaagaaaaagagaaaagtctaagctgccttctgcggggcttgccttctggccatgcccttcttctctcccttgcacctgtacctcttggtctttgaataaagcctgagtaggaaggctagcaaaaaaaaaaaaaaaaaaaaaaaaaaaaaaaaaaaaaaaaaaaaaaaaaaaaaaaaaaaaaaaaaaaaaaaaaaaaaaaagcccagccggctccccaacctctaccgaggagggcacctctgagtccgccacccccgagagcggccctggcacctccaccgagcccagcgagggcagcgcacccggcagccctgccggcagccccacctccacagaggagggaaccagcaccgagcccagcgaaggcagcgccccaggcaccagcaccgagcctagtgagcaggagattaaacggatcaacaagatcagaagaagacttgtgaaagacagcaacaccaagaaggccggcaagacaggccccatgaaaaccctgctggttagagtgatgacacccgatctgagagagcggctggaaaacctgagaaagaagcctgaaaatatcccccagcccatcagcaatacatctagagccaacctgaataagctgctgaccgattacaccgaaatgaagaaggcgatcctgcatgtgtactgggaagagttccagaaggaccctgtgggcctgatgagccgggtggcccagcctgccagcaagaagatcgatcagaacaagctgaaacctgagatggacgagaagggcaacctgaccaccgccggctttgcctgctctcagtgtggccagcccctgttcgtgtacaagctggagcaggtgtctgagaagggcaaggcttacaccaactacttcggacggtgcaatgtggccgagcacgaaaagctgatcctgctggcccagctgaagcccgagaaggatagcgacgaagccgtgacatatagcctgggaaagtttgggcagagggccctggatttctacagcattcatgtgaccaaggagtccacccaccccgtgaagcccctggcccagatcgccggaaacagatacgcctccggacctgtgggaaaggccctgagcgacgcatgtatgggcacaatcgcctccttcctgtctaagtaccaggacatcatcatcgaacaccagaaggtggtgaagggcaaccagaagagactggagagcctgcgggagctggccggcaaggaaaacctggaataccctagcgtgaccctgccacctcagcctcacaccaaggagggcgttgatgcctacaacgaagtgatcgcccgggtgcgaatgtgggtgaacctgaacctgtggcagaagctgaagctaagcagagatgatgccaagcctctgctgagactgaagggattcccttcctttcctctggtcgagagacaggccaacgaagtggactggtgggacatggtgtgtaacgtgaagaagctgatcaacgagaaaaaggaggatggcaaggtgttttggcagaatctggctggctacaagagacaggaagccctgagaccatacctgagcagcgaggaagatcggaagaagggaaagaaattcgctcggtaccagctgggcgacctgctgctgcacctggaaaagaagcacggcgaggactggggaaaggtgtacgacgaggcctgggagcggattgacaagaaagtggaaggcctgagcaagcacatcaagctggaagaggaacggagaagcgaggacgcccagagcaaggccgccctgaccgactggctgcgggctaaggccagcttcgtgatcgagggcctgaaggaggccgacaaggacgagttctgcagatgcgagctgaagctgcagaagtggtacggggacctgcggggaaagcccttcgccatcgaagccgagaacagcatcctggacatcagcggcttcagcaagcagtacaactgtgccttcatctggcagaaggacggcgtgaagaagctgaacctgtacctgatcatcaactacttcaagggcggcaagctgcggttcaagaagatcaaacctgaagccttcgaagccaacagattctacaccgtgatcaacaaaaagagcggcgagatcgtgcccatggaggtgaacttcaacttcgacgaccccaacctgatcatcctgcctctggcctttggcaagagacagggcagagaattcatctggaacgacctgctgtccctggaaaccggcagcctgaagctggccaacggaagagtgatcgagaagacactgtacaacagaagaacccggcaggatgagcctgccctgttcgtggccctgaccttcgagcggcgggaggtcctggactcctccaatatcaaaccaatgaacctgatcggcgtggcaagaggcgaaaacatccccgccgtgatcgccctgaccgaccccgagggctgcccactgagccggtttaaggatagcctgggaaacccaacccacatcctgagaatcggcgagagctataaggagaagcagcggaccatccaggccaagaaggaggtggagcagcggagagccggcggctacagccggaagtacgccagcaaagccaagaatctggcagacgatatggtgagaaacaccgctagagatctgctgtactacgccgtgacccaggatgccatgctgatcttcgccaacctgagccggggcttcggccggcagggcaagcggaccttcatggccgagagacagtacacacggatggaggactggctgaccgccaagctggcctacgagggcctgagcaagacctacctgtccaagacactggcccagtacacctccaagacatgcagcaactgtgggtttaccatcaccagcgccgactacgacagggtgctggagaagctgaagaagacagcaacaggctggatgaccacaattaacggcaaggagctgaaggtggagggccagattacctactacaacagatacaagagacagaacgtagtcaaggacctgtccgtcgagctggatagactgagcgaagaatctgtgaacaacgacatctcctcctggacaaagggcagaagcggagaagctctgagcctcctgaagaaaagattctcccatagacccgtgcaggagaagttcgtgtgcctgaactgcggcttcgagacacacgcagccgagcaagccgccctgaacatcgccagatcctggctgttcctgcggagccaggagtacaagaaataccagacaaacaagacaaccggcaacaccgataagagagccttcgtcgagacctggcagtccttttaccggaagaagcttaaggaggtgtggaaacctgccgtgcggtctggcggatctggcggaggctccaccagccccaagaaaaagagaaaagtctaagctgccttctgcggggcttgccttctggccatgcccttcttctctcccttgcacctgtacctcttggtctttgaataaagcctgagtaggaaggctagcaaaaaaaaaaaaaaaaaaaaaaaaaaaaaaaaaaaaaaaaaaaaaaaaaaaaaaaaaaaaaaaaaaaaaaaaaaaaaaaa

SEQ ID NO: 10162 - RNA, 8787 nt, synthetic construct
  source 1..8787: mol_type = other RNA
aggaaataagagagaaaagaagagtaagaagaaatataagagccaccatggcccctaagaagaagcgtaaagtgagccggatgaaccacgaccaggagttcgacccccctaaggtgtaccctcccgtccccgccgagaagagaaagcccatccgggtcctgagcctgttcgatggcatcgccaccggtctgctggtgctgaaggacctgggcatccaggtggataggtacattgcctccgaggtgtgcgaggactccatcaccgtgggaatggtgcgtcatcagggcaagatcatgtacgtgggcgacgtgcggagcgtgacacagaagcatatccaggagtggggccctttcgacctggtgatcggcggcagcccttgcaatgacctgagcatcgtgaacccagcccggaagggcctgtacgagggaaccggcagactgttcttcgagttttacagactgctgcacgacgcccggcctaaggaaggcgacgaccggcccttcttttggctgttcgagaatgtggtggccatgggagtcagcgacaagcgggatattagccggttcctggagagcaaccccgtgatgatcgatgccaaggaagtgagcgccgcccaccgggccagatacttctggggcaatctgcctggcatgaacagacccctggccagcaccgtgaacgacaagctggagctgcaggagtgcctggagcacggccggatcgccaagttcagcaaggtgagaaccatcaccacccgaagcaacagcatcaaacaaggcaaggaccagcactttcctgtgttcatgaacgagaaggaggacatcctgtggtgtaccgagatggagagagtgttcgggttcccagtccactacacagatgtcagcaacatgtctagactggccagacagagactgctgggaagaagctggtccgtccctgtgatcagacacctgttcgcccctctgaaggagtacttcgcctgcgtgagcagcggcaacagcaacgccaacagccggggccccagcttctctagcggcctggtgccactgtccctgagagggagccacatgggccccatggagatctacaaaaccgtgagcgcctggaagcggcagcctgtgcgcgtgctgagcctgtttcggaatatcgataaagtcctgaaaagcctgggattcctggagagcggctctggctccggcggtggcaccctgaagtacgtggaggatgtgacaaacgtggtcagacgggatgtggagaagtggggccccttcgatctggtgtacggcagcacccaacccctgggcagctcttgtgaccggtgccctggctggtacatgtttcagttccaccggatcctgcagtacgccctgccgagacaggagtcccagcggccattcttttggattttcatggacaacttgctgctgaccgaggatgaccaggaaactaccactcggttcctgcagaccgaagccgtgaccctgcaggacgtgagaggccgggactaccagaacgccatgcgggtgtggtccaacatccctggactgaaaagcaagcacgcacctctgacccctaaagaagaggagtacctgcaggcccaggtgcggagcagaagcaagctggacgcccctaaggtggatctgctggtgaagaattgcctcctgcccctgagagagtacttcaagtatttcagccagaatagtctgcccctgggaggcagcggcggcggcccccaggtgagcctgaccttcgaggacgtggccgtgctgttcaccagggacgagtggaggaagctggcccccagccagaggaacctgtacagggacgtgatgctggagaactacaggaacctggtgagcctgggcctgcccttcaccaagcccaaggtgatcagcctgctgcagcagggcgaggacccctggaaggtggagaaggacagcagcggcggctgcagccccggctgcaagagcaacggcggcccaagcagcggcgcccctcctcccagcggcggcaggcggcccaagcagcggcgcccctcctcccagcggcggcagcccagccggctccccaacctctaccgaggagggcacctctgagtccgccacccccgagagcggccctggcacctccaccgagcccagcgagggcagcgcacccggcagccctgccggcagccccacctccacagaggagggaaccagcaccgagcccagcgaaggcagcgccccaggcaccagcaccgagcctagtgagcaggagattaaacggatcaacaagatcagaagaagacttgtgaaagacagcaacaccaagaaggccggcaagacaggccccatgaaaaccctgctggttagagtgatgacacccgatctgagagagcggctggaaaacctgagaaagaagcctgaaaatatcccccagcccatcagcaatacatctagagccaacctgaataagctgctgaccgattacaccgaaatgaagaaggcgatcctgcatgtgtactgggaagagttccagaaggaccctgtgggcctgatgagccgggtggcccagcctgccagcaagaagatcgatcagaacaagctgaaacctgagatggacgagaagggcaacctgaccaccgccggctttgcctgctctcagtgtggccagcccctgttcgtgtacaagctggagcaggtgtctgagaagggcaaggcttacaccaactacttcggacggtgcaatgtggccgagcacgaaaagctgatcctgctggcccagctgaagcccgagaaggatagcgacgaagccgtgacatatagcctgggaaagtttgggcagagggccctggatttctacagcattcatgtgaccaaggagtccacccaccccgtgaagcccctggcccagatcgccggaaacagatacgcctccggacctgtgggaaaggccctgagcgacgcatgtatgggcacaatcgcctccttcctgtctaagtaccaggacatcatcatcgaacaccagaaggtggtgaagggcaaccagaagagactggagagcctgcgggagctggccggcaaggaaaacctggaataccctagcgtgaccctgccacctcagcctcacaccaaggagggcgttgatgcctacaacgaagtgatcgcccgggtgcgaatgtgggtgaacctgaacctgtggcagaagctgaagctaagcagagatgatgccaagcctctgctgagactgaagggattcccttcctttcctctggtcgagagacaggccaacgaagtggactggtgggacatggtgtgtaacgtgaagaagctgatcaacgagaaaaaggaggatggcaaggtgttttggcagaatctggctggctacaagagacaggaagccctgagaccatacctgagcagcgaggaagatcggaagaagggaaagaaattcgctcggtaccagctgggcgacctgctgctgcacctggaaaagaagcacggcgaggactggggaaaggtgtacgacgaggcctgggagcggattgacaagaaagtggaaggcctgagcaagcacatcaagctggaagaggaacggagaagcgaggacgcccagagcaaggccgccctgaccgactggctgcgggctaaggccagcttcgtgatcgagggcctgaaggaggccgacaaggacgagttctgcagatgcgagctgaagctgcagaagtggtacggggacctgcggggaaagcccttcgccatcgaagccgagaacagcatcctggacatcagcggcttcagcaagcagtacaactgtgccttcatctggcagaaggacggcgtgaagaagctgaacctgtacctgatcatcaactacttcaagggcggcaagctgcggttcaagaagatcaaacctgaagccttcgaagccaacagattctacaccgtgatcaacaaaaagagcggcgagatcgtgcccatggaggtgaacttcaacttcgacgaccccaacctgatcatcctgcctctggcctttggcaagagacagggcagagaattcatctggaacgacctgctgtccctggaaaccggcagcctgaagctggccaacggaagagtgatcgagaagacactgtacaacagaagaacccggcaggatgagcctgccctgttcgtggccctgaccttcgagcggcgggaggtcctggactcctccaatatcaaaccaatgaacctgatcggcgtggcaagaggcgaaaacatccccgccgtgatcgccctgaccgaccccgagggctgcccactgagccggtttaaggatagcctgggaaacccaacccacatcctgagaatcggcgagagctataaggagaagcagcggaccatccaggccaagaaggaggtggagcagcggagagccggcggctacagccggaagtacgccagcaaagccaagaatctggcagacgatatggtgagaaacaccgctagagatctgctgtactacgccgtgacccaggatgccatgctgatcttcgccaacctgagccggggcttcggccggcagggcaagcggaccttcatggccgagagacagtacacacggatggaggactggctgaccgccaagctggcctacgagggcctgagcaagacctacctgtccaagacactggcccagtacacctccaagacatgcagcaactgtgggtttaccatcaccagcgccgactacgacagggtgctggagaagctgaagaagacagcaacaggctggatgaccacaattaacggcaaggagctgaaggtggagggccagattacctactacaacagatacaagagacagaacgtagtcaaggacctgtccgtcgagctggatagactgagcgaagaatctgtgaacaacgacatctcctcctggacaaagggcagaagcggagaagctctgagcctcctgaagaaaagattctcccatagacccgtgcaggagaagttcgtgtgcctgaactgcggcttcgagacacacgcagccgagcaagccgccctgaacatcgccagatcctggctgttcctgcggagccaggagtacaagaaataccagacaaacaagacaaccggcaacaccgataagagagccttcgtcgagacctggcagtccttttaccggaagaagcttaaggaggtgtggaaacctgccgtgcggtctggcggatctggcggaggctccaccagccccaagaaaaagagaaaagtctaagctgccttctgcggggcttgccttctggccatgcccttcttctctcccttgcacctgtacctcttggtctttgaataaagcctgagtaggaaggctagcaaaaaaaaaaaaaaaaaaaaaaaaaaaaaaaaaaaaaaaaaaaaaaaaaaaaaaaaaaaaaaaaaaaaaaaaaaaaaaaagcccagccggctccccaacctctaccgaggagggcacctctgagtccgccacccccgagagcggccctggcacctccaccgagcccagcgagggcagcgcacccggcagccctgccggcagccccacctccacagaggagggaaccagcaccgagcccagcgaaggcagcgccccaggcaccagcaccgagcctagtgagcaggagattaaacggatcaacaagatcagaagaagacttgtgaaagacagcaacaccaagaaggccggcaagacaggccccatgaaaaccctgctggttagagtgatgacacccgatctgagagagcggctggaaaacctgagaaagaagcctgaaaatatcccccagcccatcagcaatacatctagagccaacctgaataagctgctgaccgattacaccgaaatgaagaaggcgatcctgcatgtgtactgggaagagttccagaaggaccctgtgggcctgatgagccgggtggcccagcctgccagcaagaagatcgatcagaacaagctgaaacctgagatggacgagaagggcaacctgaccaccgccggctttgcctgctctcagtgtggccagcccctgttcgtgtacaagctggagcaggtgtctgagaagggcaaggcttacaccaactacttcggacggtgcaatgtggccgagcacgaaaagctgatcctgctggcccagctgaagcccgagaaggatagcgacgaagccgtgacatatagcctgggaaagtttgggcagagggccctggatttctacagcattcatgtgaccaaggagtccacccaccccgtgaagcccctggcccagatcgccggaaacagatacgcctccggacctgtgggaaaggccctgagcgacgcatgtatgggcacaatcgcctccttcctgtctaagtaccaggacatcatcatcgaacaccagaaggtggtgaagggcaaccagaagagactggagagcctgcgggagctggccggcaaggaaaacctggaataccctagcgtgaccctgccacctcagcctcacaccaaggagggcgttgatgcctacaacgaagtgatcgcccgggtgcgaatgtgggtgaacctgaacctgtggcagaagctgaagctaagcagagatgatgccaagcctctgctgagactgaagggattcccttcctttcctctggtcgagagacaggccaacgaagtggactggtgggacatggtgtgtaacgtgaagaagctgatcaacgagaaaaaggaggatggcaaggtgttttggcagaatctggctggctacaagagacaggaagccctgagaccatacctgagcagcgaggaagatcggaagaagggaaagaaattcgctcggtaccagctgggcgacctgctgctgcacctggaaaagaagcacggcgaggactggggaaaggtgtacgacgaggcctgggagcggattgacaagaaagtggaaggcctgagcaagcacatcaagctggaagaggaacggagaagcgaggacgcccagagcaaggccgccctgaccgactggctgcgggctaaggccagcttcgtgatcgagggcctgaaggaggccgacaaggacgagttctgcagatgcgagctgaagctgcagaagtggtacggggacctgcggggaaagcccttcgccatcgaagccgagaacagcatcctggacatcagcggcttcagcaagcagtacaactgtgccttcatctggcagaaggacggcgtgaagaagctgaacctgtacctgatcatcaactacttcaagggcggcaagctgcggttcaagaagatcaaacctgaagccttcgaagccaacagattctacaccgtgatcaacaaaaagagcggcgagatcgtgcccatggaggtgaacttcaacttcgacgaccccaacctgatcatcctgcctctggcctttggcaagagacagggcagagaattcatctggaacgacctgctgtccctggaaaccggcagcctgaagctggccaacggaagagtgatcgagaagacactgtacaacagaagaacccggcaggatgagcctgccctgttcgtggccctgaccttcgagcggcgggaggtcctggactcctccaatatcaaaccaatgaacctgatcggcgtggcaagaggcgaaaacatccccgccgtgatcgccctgaccgaccccgagggctgcccactgagccggtttaaggatagcctgggaaacccaacccacatcctgagaatcggcgagagctataaggagaagcagcggaccatccaggccaagaaggaggtggagcagcggagagccggcggctacagccggaagtacgccagcaaagccaagaatctggcagacgatatggtgagaaacaccgctagagatctgctgtactacgccgtgacccaggatgccatgctgatcttcgccaacctgagccggggcttcggccggcagggcaagcggaccttcatggccgagagacagtacacacggatggaggactggctgaccgccaagctggcctacgagggcctgagcaagacctacctgtccaagacactggcccagtacacctccaagacatgcagcaactgtgggtttaccatcaccagcgccgactacgacagggtgctggagaagctgaagaagacagcaacaggctggatgaccacaattaacggcaaggagctgaaggtggagggccagattacctactacaacagatacaagagacagaacgtagtcaaggacctgtccgtcgagctggatagactgagcgaagaatctgtgaacaacgacatctcctcctggacaaagggcagaagcggagaagctctgagcctcctgaagaaaagattctcccatagacccgtgcaggagaagttcgtgtgcctgaactgcggcttcgagacacacgcagccgagcaagccgccctgaacatcgccagatcctggctgttcctgcggagccaggagtacaagaaataccagacaaacaagacaaccggcaacaccgataagagagccttcgtcgagacctggcagtccttttaccggaagaagcttaaggaggtgtggaaacctgccgtgcggtctggcggatctggcggaggctccaccagccccaagaaaaagagaaaagtctaagctgccttctgcggggcttgccttctggccatgcccttcttctctcccttgcacctgtacctcttggtctttgaataaagcctgagtaggaaggctagcaaaaaaaaaaaaaaaaaaaaaaaaaaaaaaaaaaaaaaaaaaaaaaaaaaaaaaaaaaaaaaaaaaaaaaaaaaaaaaaa

SEQ ID NO: 10163 - RNA, 8787 nt, synthetic construct
  source 1..8787: mol_type = other RNA
aggaaataagagagaaaagaagagtaagaagaaatataagagccaccatggcccctaagaagaagcgtaaagtgagccggatgaaccacgaccaggagttcgacccccctaaggtgtaccctcccgtccccgccgagaagagaaagcccatccgggtcctgagcctgttcgatggcatcgccaccggtctgctggtgctgaaggacctgggcatccaggtggataggtacattgcctccgaggtgtgcgaggactccatcaccgtgggaatggtgcgtcatcagggcaagatcatgtacgtgggcgacgtgcggagcgtgacacagaagcatatccaggagtggggccctttcgacctggtgatcggcggcagcccttgcaatgacctgagcatcgtgaacccagcccggaagggcctgtacgagggaaccggcagactgttcttcgagttttacagactgctgcacgacgcccggcctaaggaaggcgacgaccggcccttcttttggctgttcgagaatgtggtggccatgggagtcagcgacaagcgggatattagccggttcctggagagcaaccccgtgatgatcgatgccaaggaagtgagcgccgcccaccgggccagatacttctggggcaatctgcctggcatgaacagacccctggccagcaccgtgaacgacaagctggagctgcaggagtgcctggagcacggccggatcgccaagttcagcaaggtgagaaccatcaccacccgaagcaacagcatcaaacaaggcaaggaccagcactttcctgtgttcatgaacgagaaggaggacatcctgtggtgtaccgagatggagagagtgttcgggttcccagtccactacacagatgtcagcaacatgtctagactggccagacagagactgctgggaagaagctggtccgtccctgtgatcagacacctgttcgcccctctgaaggagtacttcgcctgcgtgagcagcggcaacagcaacgccaacagccggggccccagcttctctagcggcctggtgccactgtccctgagagggagccacatgggccccatggagatctacaaaaccgtgagcgcctggaagcggcagcctgtgcgcgtgctgagcctgtttcggaatatcgataaagtcctgaaaagcctgggattcctggagagcggctctggctccggcggtggcaccctgaagtacgtggaggatgtgacaaacgtggtcagacgggatgtggagaagtggggccccttcgatctggtgtacggcagcacccaacccctgggcagctcttgtgaccggtgccctggctggtacatgtttcagttccaccggatcctgcagtacgccctgccgagacaggagtcccagcggccattcttttggattttcatggacaacttgctgctgaccgaggatgaccaggaaactaccactcggttcctgcagaccgaagccgtgaccctgcaggacgtgagaggccgggactaccagaacgccatgcgggtgtggtccaacatccctggactgaaaagcaagcacgcacctctgacccctaaagaagaggagtacctgcaggcccaggtgcggagcagaagcaagctggacgcccctaaggtggatctgctggtgaagaattgcctcctgcccctgagagagtacttcaagtatttcagccagaatagtctgcccctgggaggcagcggcggcggcgcccacagcatggtgatgttcagggacgtgaccgtggacttcagccaggaggagtgggagtgcctgagcagctacgagagggacctgtacagggacgtgatgctggagaactacagccacctggtgagcctggccggctgcagcatcagcaagcccgacgtgatcaccctgctggagcagggcaaggagccctggatgatcgtgagggccgagaagaggaggtggagcagggacctggagagcggcggcccaagcagcggcgcccctcctcccagcggcggcaggcggcccaagcagcggcgcccctcctcccagcggcggcagcccagccggctccccaacctctaccgaggagggcacctctgagtccgccacccccgagagcggccctggcacctccaccgagcccagcgagggcagcgcacccggcagccctgccggcagccccacctccacagaggagggaaccagcaccgagcccagcgaaggcagcgccccaggcaccagcaccgagcctagtgagcaggagattaaacggatcaacaagatcagaagaagacttgtgaaagacagcaacaccaagaaggccggcaagacaggccccatgaaaaccctgctggttagagtgatgacacccgatctgagagagcggctggaaaacctgagaaagaagcctgaaaatatcccccagcccatcagcaatacatctagagccaacctgaataagctgctgaccgattacaccgaaatgaagaaggcgatcctgcatgtgtactgggaagagttccagaaggaccctgtgggcctgatgagccgggtggcccagcctgccagcaagaagatcgatcagaacaagctgaaacctgagatggacgagaagggcaacctgaccaccgccggctttgcctgctctcagtgtggccagcccctgttcgtgtacaagctggagcaggtgtctgagaagggcaaggcttacaccaactacttcggacggtgcaatgtggccgagcacgaaaagctgatcctgctggcccagctgaagcccgagaaggatagcgacgaagccgtgacatatagcctgggaaagtttgggcagagggccctggatttctacagcattcatgtgaccaaggagtccacccaccccgtgaagcccctggcccagatcgccggaaacagatacgcctccggacctgtgggaaaggccctgagcgacgcatgtatgggcacaatcgcctccttcctgtctaagtaccaggacatcatcatcgaacaccagaaggtggtgaagggcaaccagaagagactggagagcctgcgggagctggccggcaaggaaaacctggaataccctagcgtgaccctgccacctcagcctcacaccaaggagggcgttgatgcctacaacgaagtgatcgcccgggtgcgaatgtgggtgaacctgaacctgtggcagaagctgaagctaagcagagatgatgccaagcctctgctgagactgaagggattcccttcctttcctctggtcgagagacaggccaacgaagtggactggtgggacatggtgtgtaacgtgaagaagctgatcaacgagaaaaaggaggatggcaaggtgttttggcagaatctggctggctacaagagacaggaagccctgagaccatacctgagcagcgaggaagatcggaagaagggaaagaaattcgctcggtaccagctgggcgacctgctgctgcacctggaaaagaagcacggcgaggactggggaaaggtgtacgacgaggcctgggagcggattgacaagaaagtggaaggcctgagcaagcacatcaagctggaagaggaacggagaagcgaggacgcccagagcaaggccgccctgaccgactggctgcgggctaaggccagcttcgtgatcgagggcctgaaggaggccgacaaggacgagttctgcagatgcgagctgaagctgcagaagtggtacggggacctgcggggaaagcccttcgccatcgaagccgagaacagcatcctggacatcagcggcttcagcaagcagtacaactgtgccttcatctggcagaaggacggcgtgaagaagctgaacctgtacctgatcatcaactacttcaagggcggcaagctgcggttcaagaagatcaaacctgaagccttcgaagccaacagattctacaccgtgatcaacaaaaagagcggcgagatcgtgcccatggaggtgaacttcaacttcgacgaccccaacctgatcatcctgcctctggcctttggcaagagacagggcagagaattcatctggaacgacctgctgtccctggaaaccggcagcctgaagctggccaacggaagagtgatcgagaagacactgtacaacagaagaacccggcaggatgagcctgccctgttcgtggccctgaccttcgagcggcgggaggtcctggactcctccaatatcaaaccaatgaacctgatcggcgtggcaagaggcgaaaacatccccgccgtgatcgccctgaccgaccccgagggctgcccactgagccggtttaaggatagcctgggaaacccaacccacatcctgagaatcggcgagagctataaggagaagcagcggaccatccaggccaagaaggaggtggagcagcggagagccggcggctacagccggaagtacgccagcaaagccaagaatctggcagacgatatggtgagaaacaccgctagagatctgctgtactacgccgtgacccaggatgccatgctgatcttcgccaacctgagccggggcttcggccggcagggcaagcggaccttcatggccgagagacagtacacacggatggaggactggctgaccgccaagctggcctacgagggcctgagcaagacctacctgtccaagacactggcccagtacacctccaagacatgcagcaactgtgggtttaccatcaccagcgccgactacgacagggtgctggagaagctgaagaagacagcaacaggctggatgaccacaattaacggcaaggagctgaaggtggagggccagattacctactacaacagatacaagagacagaacgtagtcaaggacctgtccgtcgagctggatagactgagcgaagaatctgtgaacaacgacatctcctcctggacaaagggcagaagcggagaagctctgagcctcctgaagaaaagattctcccatagacccgtgcaggagaagttcgtgtgcctgaactgcggcttcgagacacacgcagccgagcaagccgccctgaacatcgccagatcctggctgttcctgcggagccaggagtacaagaaataccagacaaacaagacaaccggcaacaccgataagagagccttcgtcgagacctggcagtccttttaccggaagaagcttaaggaggtgtggaaacctgccgtgcggtctggcggatctggcggaggctccaccagccccaagaaaaagagaaaagtctaagctgccttctgcggggcttgccttctggccatgcccttcttctctcccttgcacctgtacctcttggtctttgaataaagcctgagtaggaaggctagcaaaaaaaaaaaaaaaaaaaaaaaaaaaaaaaaaaaaaaaaaaaaaaaaaaaaaaaaaaaaaaaaaaaaaaaaaaaaaaaagcccagccggctccccaacctctaccgaggagggcacctctgagtccgccacccccgagagcggccctggcacctccaccgagcccagcgagggcagcgcacccggcagccctgccggcagccccacctccacagaggagggaaccagcaccgagcccagcgaaggcagcgccccaggcaccagcaccgagcctagtgagcaggagattaaacggatcaacaagatcagaagaagacttgtgaaagacagcaacaccaagaaggccggcaagacaggccccatgaaaaccctgctggttagagtgatgacacccgatctgagagagcggctggaaaacctgagaaagaagcctgaaaatatcccccagcccatcagcaatacatctagagccaacctgaataagctgctgaccgattacaccgaaatgaagaaggcgatcctgcatgtgtactgggaagagttccagaaggaccctgtgggcctgatgagccgggtggcccagcctgccagcaagaagatcgatcagaacaagctgaaacctgagatggacgagaagggcaacctgaccaccgccggctttgcctgctctcagtgtggccagcccctgttcgtgtacaagctggagcaggtgtctgagaagggcaaggcttacaccaactacttcggacggtgcaatgtggccgagcacgaaaagctgatcctgctggcccagctgaagcccgagaaggatagcgacgaagccgtgacatatagcctgggaaagtttgggcagagggccctggatttctacagcattcatgtgaccaaggagtccacccaccccgtgaagcccctggcccagatcgccggaaacagatacgcctccggacctgtgggaaaggccctgagcgacgcatgtatgggcacaatcgcctccttcctgtctaagtaccaggacatcatcatcgaacaccagaaggtggtgaagggcaaccagaagagactggagagcctgcgggagctggccggcaaggaaaacctggaataccctagcgtgaccctgccacctcagcctcacaccaaggagggcgttgatgcctacaacgaagtgatcgcccgggtgcgaatgtgggtgaacctgaacctgtggcagaagctgaagctaagcagagatgatgccaagcctctgctgagactgaagggattcccttcctttcctctggtcgagagacaggccaacgaagtggactggtgggacatggtgtgtaacgtgaagaagctgatcaacgagaaaaaggaggatggcaaggtgttttggcagaatctggctggctacaagagacaggaagccctgagaccatacctgagcagcgaggaagatcggaagaagggaaagaaattcgctcggtaccagctgggcgacctgctgctgcacctggaaaagaagcacggcgaggactggggaaaggtgtacgacgaggcctgggagcggattgacaagaaagtggaaggcctgagcaagcacatcaagctggaagaggaacggagaagcgaggacgcccagagcaaggccgccctgaccgactggctgcgggctaaggccagcttcgtgatcgagggcctgaaggaggccgacaaggacgagttctgcagatgcgagctgaagctgcagaagtggtacggggacctgcggggaaagcccttcgccatcgaagccgagaacagcatcctggacatcagcggcttcagcaagcagtacaactgtgccttcatctggcagaaggacggcgtgaagaagctgaacctgtacctgatcatcaactacttcaagggcggcaagctgcggttcaagaagatcaaacctgaagccttcgaagccaacagattctacaccgtgatcaacaaaaagagcggcgagatcgtgcccatggaggtgaacttcaacttcgacgaccccaacctgatcatcctgcctctggcctttggcaagagacagggcagagaattcatctggaacgacctgctgtccctggaaaccggcagcctgaagctggccaacggaagagtgatcgagaagacactgtacaacagaagaacccggcaggatgagcctgccctgttcgtggccctgaccttcgagcggcgggaggtcctggactcctccaatatcaaaccaatgaacctgatcggcgtggcaagaggcgaaaacatccccgccgtgatcgccctgaccgaccccgagggctgcccactgagccggtttaaggatagcctgggaaacccaacccacatcctgagaatcggcgagagctataaggagaagcagcggaccatccaggccaagaaggaggtggagcagcggagagccggcggctacagccggaagtacgccagcaaagccaagaatctggcagacgatatggtgagaaacaccgctagagatctgctgtactacgccgtgacccaggatgccatgctgatcttcgccaacctgagccggggcttcggccggcagggcaagcggaccttcatggccgagagacagtacacacggatggaggactggctgaccgccaagctggcctacgagggcctgagcaagacctacctgtccaagacactggcccagtacacctccaagacatgcagcaactgtgggtttaccatcaccagcgccgactacgacagggtgctggagaagctgaagaagacagcaacaggctggatgaccacaattaacggcaaggagctgaaggtggagggccagattacctactacaacagatacaagagacagaacgtagtcaaggacctgtccgtcgagctggatagactgagcgaagaatctgtgaacaacgacatctcctcctggacaaagggcagaagcggagaagctctgagcctcctgaagaaaagattctcccatagacccgtgcaggagaagttcgtgtgcctgaactgcggcttcgagacacacgcagccgagcaagccgccctgaacatcgccagatcctggctgttcctgcggagccaggagtacaagaaataccagacaaacaagacaaccggcaacaccgataagagagccttcgtcgagacctggcagtccttttaccggaagaagcttaaggaggtgtggaaacctgccgtgcggtctggcggatctggcggaggctccaccagccccaagaaaaagagaaaagtctaagctgccttctgcggggcttgccttctggccatgcccttcttctctcccttgcacctgtacctcttggtctttgaataaagcctgagtaggaaggctagcaaaaaaaaaaaaaaaaaaaaaaaaaaaaaaaaaaaaaaaaaaaaaaaaaaaaaaaaaaaaaaaaaaaaaaaaaaaaaaaa

SEQ ID NO: 10164 - RNA, 8787 nt, synthetic construct
  source 1..8787: mol_type = other RNA
aggaaataagagagaaaagaagagtaagaagaaatataagagccaccatggcccctaagaagaagcgtaaagtgagccggatgaaccacgaccaggagttcgacccccctaaggtgtaccctcccgtccccgccgagaagagaaagcccatccgggtcctgagcctgttcgatggcatcgccaccggtctgctggtgctgaaggacctgggcatccaggtggataggtacattgcctccgaggtgtgcgaggactccatcaccgtgggaatggtgcgtcatcagggcaagatcatgtacgtgggcgacgtgcggagcgtgacacagaagcatatccaggagtggggccctttcgacctggtgatcggcggcagcccttgcaatgacctgagcatcgtgaacccagcccggaagggcctgtacgagggaaccggcagactgttcttcgagttttacagactgctgcacgacgcccggcctaaggaaggcgacgaccggcccttcttttggctgttcgagaatgtggtggccatgggagtcagcgacaagcgggatattagccggttcctggagagcaaccccgtgatgatcgatgccaaggaagtgagcgccgcccaccgggccagatacttctggggcaatctgcctggcatgaacagacccctggccagcaccgtgaacgacaagctggagctgcaggagtgcctggagcacggccggatcgccaagttcagcaaggtgagaaccatcaccacccgaagcaacagcatcaaacaaggcaaggaccagcactttcctgtgttcatgaacgagaaggaggacatcctgtggtgtaccgagatggagagagtgttcgggttcccagtccactacacagatgtcagcaacatgtctagactggccagacagagactgctgggaagaagctggtccgtccctgtgatcagacacctgttcgcccctctgaaggagtacttcgcctgcgtgagcagcggcaacagcaacgccaacagccggggccccagcttctctagcggcctggtgccactgtccctgagagggagccacatgggccccatggagatctacaaaaccgtgagcgcctggaagcggcagcctgtgcgcgtgctgagcctgtttcggaatatcgataaagtcctgaaaagcctgggattcctggagagcggctctggctccggcggtggcaccctgaagtacgtggaggatgtgacaaacgtggtcagacgggatgtggagaagtggggccccttcgatctggtgtacggcagcacccaacccctgggcagctcttgtgaccggtgccctggctggtacatgtttcagttccaccggatcctgcagtacgccctgccgagacaggagtcccagcggccattcttttggattttcatggacaacttgctgctgaccgaggatgaccaggaaactaccactcggttcctgcagaccgaagccgtgaccctgcaggacgtgagaggccgggactaccagaacgccatgcgggtgtggtccaacatccctggactgaaaagcaagcacgcacctctgacccctaaagaagaggagtacctgcaggcccaggtgcggagcagaagcaagctggacgcccctaaggtggatctgctggtgaagaattgcctcctgcccctgagagagtacttcaagtatttcagccagaatagtctgcccctgggaggcagcggcggcggccaggtgcccgtgaccttcgaggacatcgccgtgagcttcagccaggaggagtggaagtacctggacgagggccagaagaacctgtactgggaggtgatgaaggagaactacgagaccctgatcagcctggccgacagcgaggtggagcaggaggacaagagggccaagaacagggaggagtgccccatgctgtggggcctgatccccaggcagagcaggaagaacagcgagaaggtgagctggggcggcccaagcagcggcgcccctcctcccagcggcggcaggcggcccaagcagcggcgcccctcctcccagcggcggcagcccagccggctccccaacctctaccgaggagggcacctctgagtccgccacccccgagagcggccctggcacctccaccgagcccagcgagggcagcgcacccggcagccctgccggcagccccacctccacagaggagggaaccagcaccgagcccagcgaaggcagcgccccaggcaccagcaccgagcctagtgagcaggagattaaacggatcaacaagatcagaagaagacttgtgaaagacagcaacaccaagaaggccggcaagacaggccccatgaaaaccctgctggttagagtgatgacacccgatctgagagagcggctggaaaacctgagaaagaagcctgaaaatatcccccagcccatcagcaatacatctagagccaacctgaataagctgctgaccgattacaccgaaatgaagaaggcgatcctgcatgtgtactgggaagagttccagaaggaccctgtgggcctgatgagccgggtggcccagcctgccagcaagaagatcgatcagaacaagctgaaacctgagatggacgagaagggcaacctgaccaccgccggctttgcctgctctcagtgtggccagcccctgttcgtgtacaagctggagcaggtgtctgagaagggcaaggcttacaccaactacttcggacggtgcaatgtggccgagcacgaaaagctgatcctgctggcccagctgaagcccgagaaggatagcgacgaagccgtgacatatagcctgggaaagtttgggcagagggccctggatttctacagcattcatgtgaccaaggagtccacccaccccgtgaagcccctggcccagatcgccggaaacagatacgcctccggacctgtgggaaaggccctgagcgacgcatgtatgggcacaatcgcctccttcctgtctaagtaccaggacatcatcatcgaacaccagaaggtggtgaagggcaaccagaagagactggagagcctgcgggagctggccggcaaggaaaacctggaataccctagcgtgaccctgccacctcagcctcacaccaaggagggcgttgatgcctacaacgaagtgatcgcccgggtgcgaatgtgggtgaacctgaacctgtggcagaagctgaagctaagcagagatgatgccaagcctctgctgagactgaagggattcccttcctttcctctggtcgagagacaggccaacgaagtggactggtgggacatggtgtgtaacgtgaagaagctgatcaacgagaaaaaggaggatggcaaggtgttttggcagaatctggctggctacaagagacaggaagccctgagaccatacctgagcagcgaggaagatcggaagaagggaaagaaattcgctcggtaccagctgggcgacctgctgctgcacctggaaaagaagcacggcgaggactggggaaaggtgtacgacgaggcctgggagcggattgacaagaaagtggaaggcctgagcaagcacatcaagctggaagaggaacggagaagcgaggacgcccagagcaaggccgccctgaccgactggctgcgggctaaggccagcttcgtgatcgagggcctgaaggaggccgacaaggacgagttctgcagatgcgagctgaagctgcagaagtggtacggggacctgcggggaaagcccttcgccatcgaagccgagaacagcatcctggacatcagcggcttcagcaagcagtacaactgtgccttcatctggcagaaggacggcgtgaagaagctgaacctgtacctgatcatcaactacttcaagggcggcaagctgcggttcaagaagatcaaacctgaagccttcgaagccaacagattctacaccgtgatcaacaaaaagagcggcgagatcgtgcccatggaggtgaacttcaacttcgacgaccccaacctgatcatcctgcctctggcctttggcaagagacagggcagagaattcatctggaacgacctgctgtccctggaaaccggcagcctgaagctggccaacggaagagtgatcgagaagacactgtacaacagaagaacccggcaggatgagcctgccctgttcgtggccctgaccttcgagcggcgggaggtcctggactcctccaatatcaaaccaatgaacctgatcggcgtggcaagaggcgaaaacatccccgccgtgatcgccctgaccgaccccgagggctgcccactgagccggtttaaggatagcctgggaaacccaacccacatcctgagaatcggcgagagctataaggagaagcagcggaccatccaggccaagaaggaggtggagcagcggagagccggcggctacagccggaagtacgccagcaaagccaagaatctggcagacgatatggtgagaaacaccgctagagatctgctgtactacgccgtgacccaggatgccatgctgatcttcgccaacctgagccggggcttcggccggcagggcaagcggaccttcatggccgagagacagtacacacggatggaggactggctgaccgccaagctggcctacgagggcctgagcaagacctacctgtccaagacactggcccagtacacctccaagacatgcagcaactgtgggtttaccatcaccagcgccgactacgacagggtgctggagaagctgaagaagacagcaacaggctggatgaccacaattaacggcaaggagctgaaggtggagggccagattacctactacaacagatacaagagacagaacgtagtcaaggacctgtccgtcgagctggatagactgagcgaagaatctgtgaacaacgacatctcctcctggacaaagggcagaagcggagaagctctgagcctcctgaagaaaagattctcccatagacccgtgcaggagaagttcgtgtgcctgaactgcggcttcgagacacacgcagccgagcaagccgccctgaacatcgccagatcctggctgttcctgcggagccaggagtacaagaaataccagacaaacaagacaaccggcaacaccgataagagagccttcgtcgagacctggcagtccttttaccggaagaagcttaaggaggtgtggaaacctgccgtgcggtctggcggatctggcggaggctccaccagccccaagaaaaagagaaaagtctaagctgccttctgcggggcttgccttctggccatgcccttcttctctcccttgcacctgtacctcttggtctttgaataaagcctgagtaggaaggctagcaaaaaaaaaaaaaaaaaaaaaaaaaaaaaaaaaaaaaaaaaaaaaaaaaaaaaaaaaaaaaaaaaaaaaaaaaaaaaaaagcccagccggctccccaacctctaccgaggagggcacctctgagtccgccacccccgagagcggccctggcacctccaccgagcccagcgagggcagcgcacccggcagccctgccggcagccccacctccacagaggagggaaccagcaccgagcccagcgaaggcagcgccccaggcaccagcaccgagcctagtgagcaggagattaaacggatcaacaagatcagaagaagacttgtgaaagacagcaacaccaagaaggccggcaagacaggccccatgaaaaccctgctggttagagtgatgacacccgatctgagagagcggctggaaaacctgagaaagaagcctgaaaatatcccccagcccatcagcaatacatctagagccaacctgaataagctgctgaccgattacaccgaaatgaagaaggcgatcctgcatgtgtactgggaagagttccagaaggaccctgtgggcctgatgagccgggtggcccagcctgccagcaagaagatcgatcagaacaagctgaaacctgagatggacgagaagggcaacctgaccaccgccggctttgcctgctctcagtgtggccagcccctgttcgtgtacaagctggagcaggtgtctgagaagggcaaggcttacaccaactacttcggacggtgcaatgtggccgagcacgaaaagctgatcctgctggcccagctgaagcccgagaaggatagcgacgaagccgtgacatatagcctgggaaagtttgggcagagggccctggatttctacagcattcatgtgaccaaggagtccacccaccccgtgaagcccctggcccagatcgccggaaacagatacgcctccggacctgtgggaaaggccctgagcgacgcatgtatgggcacaatcgcctccttcctgtctaagtaccaggacatcatcatcgaacaccagaaggtggtgaagggcaaccagaagagactggagagcctgcgggagctggccggcaaggaaaacctggaataccctagcgtgaccctgccacctcagcctcacaccaaggagggcgttgatgcctacaacgaagtgatcgcccgggtgcgaatgtgggtgaacctgaacctgtggcagaagctgaagctaagcagagatgatgccaagcctctgctgagactgaagggattcccttcctttcctctggtcgagagacaggccaacgaagtggactggtgggacatggtgtgtaacgtgaagaagctgatcaacgagaaaaaggaggatggcaaggtgttttggcagaatctggctggctacaagagacaggaagccctgagaccatacctgagcagcgaggaagatcggaagaagggaaagaaattcgctcggtaccagctgggcgacctgctgctgcacctggaaaagaagcacggcgaggactggggaaaggtgtacgacgaggcctgggagcggattgacaagaaagtggaaggcctgagcaagcacatcaagctggaagaggaacggagaagcgaggacgcccagagcaaggccgccctgaccgactggctgcgggctaaggccagcttcgtgatcgagggcctgaaggaggccgacaaggacgagttctgcagatgcgagctgaagctgcagaagtggtacggggacctgcggggaaagcccttcgccatcgaagccgagaacagcatcctggacatcagcggcttcagcaagcagtacaactgtgccttcatctggcagaaggacggcgtgaagaagctgaacctgtacctgatcatcaactacttcaagggcggcaagctgcggttcaagaagatcaaacctgaagccttcgaagccaacagattctacaccgtgatcaacaaaaagagcggcgagatcgtgcccatggaggtgaacttcaacttcgacgaccccaacctgatcatcctgcctctggcctttggcaagagacagggcagagaattcatctggaacgacctgctgtccctggaaaccggcagcctgaagctggccaacggaagagtgatcgagaagacactgtacaacagaagaacccggcaggatgagcctgccctgttcgtggccctgaccttcgagcggcgggaggtcctggactcctccaatatcaaaccaatgaacctgatcggcgtggcaagaggcgaaaacatccccgccgtgatcgccctgaccgaccccgagggctgcccactgagccggtttaaggatagcctgggaaacccaacccacatcctgagaatcggcgagagctataaggagaagcagcggaccatccaggccaagaaggaggtggagcagcggagagccggcggctacagccggaagtacgccagcaaagccaagaatctggcagacgatatggtgagaaacaccgctagagatctgctgtactacgccgtgacccaggatgccatgctgatcttcgccaacctgagccggggcttcggccggcagggcaagcggaccttcatggccgagagacagtacacacggatggaggactggctgaccgccaagctggcctacgagggcctgagcaagacctacctgtccaagacactggcccagtacacctccaagacatgcagcaactgtgggtttaccatcaccagcgccgactacgacagggtgctggagaagctgaagaagacagcaacaggctggatgaccacaattaacggcaaggagctgaaggtggagggccagattacctactacaacagatacaagagacagaacgtagtcaaggacctgtccgtcgagctggatagactgagcgaagaatctgtgaacaacgacatctcctcctggacaaagggcagaagcggagaagctctgagcctcctgaagaaaagattctcccatagacccgtgcaggagaagttcgtgtgcctgaactgcggcttcgagacacacgcagccgagcaagccgccctgaacatcgccagatcctggctgttcctgcggagccaggagtacaagaaataccagacaaacaagacaaccggcaacaccgataagagagccttcgtcgagacctggcagtccttttaccggaagaagcttaaggaggtgtggaaacctgccgtgcggtctggcggatctggcggaggctccaccagccccaagaaaaagagaaaagtctaagctgccttctgcggggcttgccttctggccatgcccttcttctctcccttgcacctgtacctcttggtctttgaataaagcctgagtaggaaggctagcaaaaaaaaaaaaaaaaaaaaaaaaaaaaaaaaaaaaaaaaaaaaaaaaaaaaaaaaaaaaaaaaaaaaaaaaaaaaaaaa

SEQ ID NO: 10165 - RNA, 8787 nt, synthetic construct
  source 1..8787: mol_type = other RNA
aggaaataagagagaaaagaagagtaagaagaaatataagagccaccatggcccctaagaagaagcgtaaagtgagccggatgaaccacgaccaggagttcgacccccctaaggtgtaccctcccgtccccgccgagaagagaaagcccatccgggtcctgagcctgttcgatggcatcgccaccggtctgctggtgctgaaggacctgggcatccaggtggataggtacattgcctccgaggtgtgcgaggactccatcaccgtgggaatggtgcgtcatcagggcaagatcatgtacgtgggcgacgtgcggagcgtgacacagaagcatatccaggagtggggccctttcgacctggtgatcggcggcagcccttgcaatgacctgagcatcgtgaacccagcccggaagggcctgtacgagggaaccggcagactgttcttcgagttttacagactgctgcacgacgcccggcctaaggaaggcgacgaccggcccttcttttggctgttcgagaatgtggtggccatgggagtcagcgacaagcgggatattagccggttcctggagagcaaccccgtgatgatcgatgccaaggaagtgagcgccgcccaccgggccagatacttctggggcaatctgcctggcatgaacagacccctggccagcaccgtgaacgacaagctggagctgcaggagtgcctggagcacggccggatcgccaagttcagcaaggtgagaaccatcaccacccgaagcaacagcatcaaacaaggcaaggaccagcactttcctgtgttcatgaacgagaaggaggacatcctgtggtgtaccgagatggagagagtgttcgggttcccagtccactacacagatgtcagcaacatgtctagactggccagacagagactgctgggaagaagctggtccgtccctgtgatcagacacctgttcgcccctctgaaggagtacttcgcctgcgtgagcagcggcaacagcaacgccaacagccggggccccagcttctctagcggcctggtgccactgtccctgagagggagccacatgggccccatggagatctacaaaaccgtgagcgcctggaagcggcagcctgtgcgcgtgctgagcctgtttcggaatatcgataaagtcctgaaaagcctgggattcctggagagcggctctggctccggcggtggcaccctgaagtacgtggaggatgtgacaaacgtggtcagacgggatgtggagaagtggggccccttcgatctggtgtacggcagcacccaacccctgggcagctcttgtgaccggtgccctggctggtacatgtttcagttccaccggatcctgcagtacgccctgccgagacaggagtcccagcggccattcttttggattttcatggacaacttgctgctgaccgaggatgaccaggaaactaccactcggttcctgcagaccgaagccgtgaccctgcaggacgtgagaggccgggactaccagaacgccatgcgggtgtggtccaacatccctggactgaaaagcaagcacgcacctctgacccctaaagaagaggagtacctgcaggcccaggtgcggagcagaagcaagctggacgcccctaaggtggatctgctggtgaagaattgcctcctgcccctgagagagtacttcaagtatttcagccagaatagtctgcccctgggaggcagcggcggcggcatggaggagctgctgagcttccccgacgtggccatcgacttcagcgccgaggagtgcgagtgcctggacctggcccagtggaacctgtacaaggaggtgatgctggagaactacagcaacctggtgttcctgggcctgagcttcagcaagccctacctggtgaccttcctggagcagagcagcgagccctggagcgtgaagaggaagagcgccgccgccagccaccccggcagcaagccccacggcggcccaagcagcggcgcccctcctcccagcggcggcaggcggcccaagcagcggcgcccctcctcccagcggcggcagcccagccggctccccaacctctaccgaggagggcacctctgagtccgccacccccgagagcggccctggcacctccaccgagcccagcgagggcagcgcacccggcagccctgccggcagccccacctccacagaggagggaaccagcaccgagcccagcgaaggcagcgccccaggcaccagcaccgagcctagtgagcaggagattaaacggatcaacaagatcagaagaagacttgtgaaagacagcaacaccaagaaggccggcaagacaggccccatgaaaaccctgctggttagagtgatgacacccgatctgagagagcggctggaaaacctgagaaagaagcctgaaaatatcccccagcccatcagcaatacatctagagccaacctgaataagctgctgaccgattacaccgaaatgaagaaggcgatcctgcatgtgtactgggaagagttccagaaggaccctgtgggcctgatgagccgggtggcccagcctgccagcaagaagatcgatcagaacaagctgaaacctgagatggacgagaagggcaacctgaccaccgccggctttgcctgctctcagtgtggccagcccctgttcgtgtacaagctggagcaggtgtctgagaagggcaaggcttacaccaactacttcggacggtgcaatgtggccgagcacgaaaagctgatcctgctggcccagctgaagcccgagaaggatagcgacgaagccgtgacatatagcctgggaaagtttgggcagagggccctggatttctacagcattcatgtgaccaaggagtccacccaccccgtgaagcccctggcccagatcgccggaaacagatacgcctccggacctgtgggaaaggccctgagcgacgcatgtatgggcacaatcgcctccttcctgtctaagtaccaggacatcatcatcgaacaccagaaggtggtgaagggcaaccagaagagactggagagcctgcgggagctggccggcaaggaaaacctggaataccctagcgtgaccctgccacctcagcctcacaccaaggagggcgttgatgcctacaacgaagtgatcgcccgggtgcgaatgtgggtgaacctgaacctgtggcagaagctgaagctaagcagagatgatgccaagcctctgctgagactgaagggattcccttcctttcctctggtcgagagacaggccaacgaagtggactggtgggacatggtgtgtaacgtgaagaagctgatcaacgagaaaaaggaggatggcaaggtgttttggcagaatctggctggctacaagagacaggaagccctgagaccatacctgagcagcgaggaagatcggaagaagggaaagaaattcgctcggtaccagctgggcgacctgctgctgcacctggaaaagaagcacggcgaggactggggaaaggtgtacgacgaggcctgggagcggattgacaagaaagtggaaggcctgagcaagcacatcaagctggaagaggaacggagaagcgaggacgcccagagcaaggccgccctgaccgactggctgcgggctaaggccagcttcgtgatcgagggcctgaaggaggccgacaaggacgagttctgcagatgcgagctgaagctgcagaagtggtacggggacctgcggggaaagcccttcgccatcgaagccgagaacagcatcctggacatcagcggcttcagcaagcagtacaactgtgccttcatctggcagaaggacggcgtgaagaagctgaacctgtacctgatcatcaactacttcaagggcggcaagctgcggttcaagaagatcaaacctgaagccttcgaagccaacagattctacaccgtgatcaacaaaaagagcggcgagatcgtgcccatggaggtgaacttcaacttcgacgaccccaacctgatcatcctgcctctggcctttggcaagagacagggcagagaattcatctggaacgacctgctgtccctggaaaccggcagcctgaagctggccaacggaagagtgatcgagaagacactgtacaacagaagaacccggcaggatgagcctgccctgttcgtggccctgaccttcgagcggcgggaggtcctggactcctccaatatcaaaccaatgaacctgatcggcgtggcaagaggcgaaaacatccccgccgtgatcgccctgaccgaccccgagggctgcccactgagccggtttaaggatagcctgggaaacccaacccacatcctgagaatcggcgagagctataaggagaagcagcggaccatccaggccaagaaggaggtggagcagcggagagccggcggctacagccggaagtacgccagcaaagccaagaatctggcagacgatatggtgagaaacaccgctagagatctgctgtactacgccgtgacccaggatgccatgctgatcttcgccaacctgagccggggcttcggccggcagggcaagcggaccttcatggccgagagacagtacacacggatggaggactggctgaccgccaagctggcctacgagggcctgagcaagacctacctgtccaagacactggcccagtacacctccaagacatgcagcaactgtgggtttaccatcaccagcgccgactacgacagggtgctggagaagctgaagaagacagcaacaggctggatgaccacaattaacggcaaggagctgaaggtggagggccagattacctactacaacagatacaagagacagaacgtagtcaaggacctgtccgtcgagctggatagactgagcgaagaatctgtgaacaacgacatctcctcctggacaaagggcagaagcggagaagctctgagcctcctgaagaaaagattctcccatagacccgtgcaggagaagttcgtgtgcctgaactgcggcttcgagacacacgcagccgagcaagccgccctgaacatcgccagatcctggctgttcctgcggagccaggagtacaagaaataccagacaaacaagacaaccggcaacaccgataagagagccttcgtcgagacctggcagtccttttaccggaagaagcttaaggaggtgtggaaacctgccgtgcggtctggcggatctggcggaggctccaccagccccaagaaaaagagaaaagtctaagctgccttctgcggggcttgccttctggccatgcccttcttctctcccttgcacctgtacctcttggtctttgaataaagcctgagtaggaaggctagcaaaaaaaaaaaaaaaaaaaaaaaaaaaaaaaaaaaaaaaaaaaaaaaaaaaaaaaaaaaaaaaaaaaaaaaaaaaaaaaagcccagccggctccccaacctctaccgaggagggcacctctgagtccgccacccccgagagcggccctggcacctccaccgagcccagcgagggcagcgcacccggcagccctgccggcagccccacctccacagaggagggaaccagcaccgagcccagcgaaggcagcgccccaggcaccagcaccgagcctagtgagcaggagattaaacggatcaacaagatcagaagaagacttgtgaaagacagcaacaccaagaaggccggcaagacaggccccatgaaaaccctgctggttagagtgatgacacccgatctgagagagcggctggaaaacctgagaaagaagcctgaaaatatcccccagcccatcagcaatacatctagagccaacctgaataagctgctgaccgattacaccgaaatgaagaaggcgatcctgcatgtgtactgggaagagttccagaaggaccctgtgggcctgatgagccgggtggcccagcctgccagcaagaagatcgatcagaacaagctgaaacctgagatggacgagaagggcaacctgaccaccgccggctttgcctgctctcagtgtggccagcccctgttcgtgtacaagctggagcaggtgtctgagaagggcaaggcttacaccaactacttcggacggtgcaatgtggccgagcacgaaaagctgatcctgctggcccagctgaagcccgagaaggatagcgacgaagccgtgacatatagcctgggaaagtttgggcagagggccctggatttctacagcattcatgtgaccaaggagtccacccaccccgtgaagcccctggcccagatcgccggaaacagatacgcctccggacctgtgggaaaggccctgagcgacgcatgtatgggcacaatcgcctccttcctgtctaagtaccaggacatcatcatcgaacaccagaaggtggtgaagggcaaccagaagagactggagagcctgcgggagctggccggcaaggaaaacctggaataccctagcgtgaccctgccacctcagcctcacaccaaggagggcgttgatgcctacaacgaagtgatcgcccgggtgcgaatgtgggtgaacctgaacctgtggcagaagctgaagctaagcagagatgatgccaagcctctgctgagactgaagggattcccttcctttcctctggtcgagagacaggccaacgaagtggactggtgggacatggtgtgtaacgtgaagaagctgatcaacgagaaaaaggaggatggcaaggtgttttggcagaatctggctggctacaagagacaggaagccctgagaccatacctgagcagcgaggaagatcggaagaagggaaagaaattcgctcggtaccagctgggcgacctgctgctgcacctggaaaagaagcacggcgaggactggggaaaggtgtacgacgaggcctgggagcggattgacaagaaagtggaaggcctgagcaagcacatcaagctggaagaggaacggagaagcgaggacgcccagagcaaggccgccctgaccgactggctgcgggctaaggccagcttcgtgatcgagggcctgaaggaggccgacaaggacgagttctgcagatgcgagctgaagctgcagaagtggtacggggacctgcggggaaagcccttcgccatcgaagccgagaacagcatcctggacatcagcggcttcagcaagcagtacaactgtgccttcatctggcagaaggacggcgtgaagaagctgaacctgtacctgatcatcaactacttcaagggcggcaagctgcggttcaagaagatcaaacctgaagccttcgaagccaacagattctacaccgtgatcaacaaaaagagcggcgagatcgtgcccatggaggtgaacttcaacttcgacgaccccaacctgatcatcctgcctctggcctttggcaagagacagggcagagaattcatctggaacgacctgctgtccctggaaaccggcagcctgaagctggccaacggaagagtgatcgagaagacactgtacaacagaagaacccggcaggatgagcctgccctgttcgtggccctgaccttcgagcggcgggaggtcctggactcctccaatatcaaaccaatgaacctgatcggcgtggcaagaggcgaaaacatccccgccgtgatcgccctgaccgaccccgagggctgcccactgagccggtttaaggatagcctgggaaacccaacccacatcctgagaatcggcgagagctataaggagaagcagcggaccatccaggccaagaaggaggtggagcagcggagagccggcggctacagccggaagtacgccagcaaagccaagaatctggcagacgatatggtgagaaacaccgctagagatctgctgtactacgccgtgacccaggatgccatgctgatcttcgccaacctgagccggggcttcggccggcagggcaagcggaccttcatggccgagagacagtacacacggatggaggactggctgaccgccaagctggcctacgagggcctgagcaagacctacctgtccaagacactggcccagtacacctccaagacatgcagcaactgtgggtttaccatcaccagcgccgactacgacagggtgctggagaagctgaagaagacagcaacaggctggatgaccacaattaacggcaaggagctgaaggtggagggccagattacctactacaacagatacaagagacagaacgtagtcaaggacctgtccgtcgagctggatagactgagcgaagaatctgtgaacaacgacatctcctcctggacaaagggcagaagcggagaagctctgagcctcctgaagaaaagattctcccatagacccgtgcaggagaagttcgtgtgcctgaactgcggcttcgagacacacgcagccgagcaagccgccctgaacatcgccagatcctggctgttcctgcggagccaggagtacaagaaataccagacaaacaagacaaccggcaacaccgataagagagccttcgtcgagacctggcagtccttttaccggaagaagcttaaggaggtgtggaaacctgccgtgcggtctggcggatctggcggaggctccaccagccccaagaaaaagagaaaagtctaagctgccttctgcggggcttgccttctggccatgcccttcttctctcccttgcacctgtacctcttggtctttgaataaagcctgagtaggaaggctagcaaaaaaaaaaaaaaaaaaaaaaaaaaaaaaaaaaaaaaaaaaaaaaaaaaaaaaaaaaaaaaaaaaaaaaaaaaaaaaaa

SEQ ID NO: 10166 - RNA, 8787 nt, synthetic construct
  source 1..8787: mol_type = other RNA
aggaaataagagagaaaagaagagtaagaagaaatataagagccaccatggcccctaagaagaagcgtaaagtgagccggatgaaccacgaccaggagttcgacccccctaaggtgtaccctcccgtccccgccgagaagagaaagcccatccgggtcctgagcctgttcgatggcatcgccaccggtctgctggtgctgaaggacctgggcatccaggtggataggtacattgcctccgaggtgtgcgaggactccatcaccgtgggaatggtgcgtcatcagggcaagatcatgtacgtgggcgacgtgcggagcgtgacacagaagcatatccaggagtggggccctttcgacctggtgatcggcggcagcccttgcaatgacctgagcatcgtgaacccagcccggaagggcctgtacgagggaaccggcagactgttcttcgagttttacagactgctgcacgacgcccggcctaaggaaggcgacgaccggcccttcttttggctgttcgagaatgtggtggccatgggagtcagcgacaagcgggatattagccggttcctggagagcaaccccgtgatgatcgatgccaaggaagtgagcgccgcccaccgggccagatacttctggggcaatctgcctggcatgaacagacccctggccagcaccgtgaacgacaagctggagctgcaggagtgcctggagcacggccggatcgccaagttcagcaaggtgagaaccatcaccacccgaagcaacagcatcaaacaaggcaaggaccagcactttcctgtgttcatgaacgagaaggaggacatcctgtggtgtaccgagatggagagagtgttcgggttcccagtccactacacagatgtcagcaacatgtctagactggccagacagagactgctgggaagaagctggtccgtccctgtgatcagacacctgttcgcccctctgaaggagtacttcgcctgcgtgagcagcggcaacagcaacgccaacagccggggccccagcttctctagcggcctggtgccactgtccctgagagggagccacatgggccccatggagatctacaaaaccgtgagcgcctggaagcggcagcctgtgcgcgtgctgagcctgtttcggaatatcgataaagtcctgaaaagcctgggattcctggagagcggctctggctccggcggtggcaccctgaagtacgtggaggatgtgacaaacgtggtcagacgggatgtggagaagtggggccccttcgatctggtgtacggcagcacccaacccctgggcagctcttgtgaccggtgccctggctggtacatgtttcagttccaccggatcctgcagtacgccctgccgagacaggagtcccagcggccattcttttggattttcatggacaacttgctgctgaccgaggatgaccaggaaactaccactcggttcctgcagaccgaagccgtgaccctgcaggacgtgagaggccgggactaccagaacgccatgcgggtgtggtccaacatccctggactgaaaagcaagcacgcacctctgacccctaaagaagaggagtacctgcaggcccaggtgcggagcagaagcaagctggacgcccctaaggtggatctgctggtgaagaattgcctcctgcccctgagagagtacttcaagtatttcagccagaatagtctgcccctgggaggcagcggcggcggcctgcccgacagcctgaccttcaccgacgtggccatcgacttcagccaggacgagtgggagtggctgagcctggcccagaggagcctgtacaggaaggtgatgctggagaactacatgaacctggtgagcgtgggcctgtgcatcagcaagcccgacgtgatcagcctgctggagcaggagaaggagccctggatggtgaccgagcagatcaccaggggcctgtgcgccgacctggagtacatgggcggcccaagcagcggcgcccctcctcccagcggcggcaggcggcccaagcagcggcgcccctcctcccagcggcggcagcccagccggctccccaacctctaccgaggagggcacctctgagtccgccacccccgagagcggccctggcacctccaccgagcccagcgagggcagcgcacccggcagccctgccggcagccccacctccacagaggagggaaccagcaccgagcccagcgaaggcagcgccccaggcaccagcaccgagcctagtgagcaggagattaaacggatcaacaagatcagaagaagacttgtgaaagacagcaacaccaagaaggccggcaagacaggccccatgaaaaccctgctggttagagtgatgacacccgatctgagagagcggctggaaaacctgagaaagaagcctgaaaatatcccccagcccatcagcaatacatctagagccaacctgaataagctgctgaccgattacaccgaaatgaagaaggcgatcctgcatgtgtactgggaagagttccagaaggaccctgtgggcctgatgagccgggtggcccagcctgccagcaagaagatcgatcagaacaagctgaaacctgagatggacgagaagggcaacctgaccaccgccggctttgcctgctctcagtgtggccagcccctgttcgtgtacaagctggagcaggtgtctgagaagggcaaggcttacaccaactacttcggacggtgcaatgtggccgagcacgaaaagctgatcctgctggcccagctgaagcccgagaaggatagcgacgaagccgtgacatatagcctgggaaagtttgggcagagggccctggatttctacagcattcatgtgaccaaggagtccacccaccccgtgaagcccctggcccagatcgccggaaacagatacgcctccggacctgtgggaaaggccctgagcgacgcatgtatgggcacaatcgcctccttcctgtctaagtaccaggacatcatcatcgaacaccagaaggtggtgaagggcaaccagaagagactggagagcctgcgggagctggccggcaaggaaaacctggaataccctagcgtgaccctgccacctcagcctcacaccaaggagggcgttgatgcctacaacgaagtgatcgcccgggtgcgaatgtgggtgaacctgaacctgtggcagaagctgaagctaagcagagatgatgccaagcctctgctgagactgaagggattcccttcctttcctctggtcgagagacaggccaacgaagtggactggtgggacatggtgtgtaacgtgaagaagctgatcaacgagaaaaaggaggatggcaaggtgttttggcagaatctggctggctacaagagacaggaagccctgagaccatacctgagcagcgaggaagatcggaagaagggaaagaaattcgctcggtaccagctgggcgacctgctgctgcacctggaaaagaagcacggcgaggactggggaaaggtgtacgacgaggcctgggagcggattgacaagaaagtggaaggcctgagcaagcacatcaagctggaagaggaacggagaagcgaggacgcccagagcaaggccgccctgaccgactggctgcgggctaaggccagcttcgtgatcgagggcctgaaggaggccgacaaggacgagttctgcagatgcgagctgaagctgcagaagtggtacggggacctgcggggaaagcccttcgccatcgaagccgagaacagcatcctggacatcagcggcttcagcaagcagtacaactgtgccttcatctggcagaaggacggcgtgaagaagctgaacctgtacctgatcatcaactacttcaagggcggcaagctgcggttcaagaagatcaaacctgaagccttcgaagccaacagattctacaccgtgatcaacaaaaagagcggcgagatcgtgcccatggaggtgaacttcaacttcgacgaccccaacctgatcatcctgcctctggcctttggcaagagacagggcagagaattcatctggaacgacctgctgtccctggaaaccggcagcctgaagctggccaacggaagagtgatcgagaagacactgtacaacagaagaacccggcaggatgagcctgccctgttcgtggccctgaccttcgagcggcgggaggtcctggactcctccaatatcaaaccaatgaacctgatcggcgtggcaagaggcgaaaacatccccgccgtgatcgccctgaccgaccccgagggctgcccactgagccggtttaaggatagcctgggaaacccaacccacatcctgagaatcggcgagagctataaggagaagcagcggaccatccaggccaagaaggaggtggagcagcggagagccggcggctacagccggaagtacgccagcaaagccaagaatctggcagacgatatggtgagaaacaccgctagagatctgctgtactacgccgtgacccaggatgccatgctgatcttcgccaacctgagccggggcttcggccggcagggcaagcggaccttcatggccgagagacagtacacacggatggaggactggctgaccgccaagctggcctacgagggcctgagcaagacctacctgtccaagacactggcccagtacacctccaagacatgcagcaactgtgggtttaccatcaccagcgccgactacgacagggtgctggagaagctgaagaagacagcaacaggctggatgaccacaattaacggcaaggagctgaaggtggagggccagattacctactacaacagatacaagagacagaacgtagtcaaggacctgtccgtcgagctggatagactgagcgaagaatctgtgaacaacgacatctcctcctggacaaagggcagaagcggagaagctctgagcctcctgaagaaaagattctcccatagacccgtgcaggagaagttcgtgtgcctgaactgcggcttcgagacacacgcagccgagcaagccgccctgaacatcgccagatcctggctgttcctgcggagccaggagtacaagaaataccagacaaacaagacaaccggcaacaccgataagagagccttcgtcgagacctggcagtccttttaccggaagaagcttaaggaggtgtggaaacctgccgtgcggtctggcggatctggcggaggctccaccagccccaagaaaaagagaaaagtctaagctgccttctgcggggcttgccttctggccatgcccttcttctctcccttgcacctgtacctcttggtctttgaataaagcctgagtaggaaggctagcaaaaaaaaaaaaaaaaaaaaaaaaaaaaaaaaaaaaaaaaaaaaaaaaaaaaaaaaaaaaaaaaaaaaaaaaaaaaaaaagcccagccggctccccaacctctaccgaggagggcacctctgagtccgccacccccgagagcggccctggcacctccaccgagcccagcgagggcagcgcacccggcagccctgccggcagccccacctccacagaggagggaaccagcaccgagcccagcgaaggcagcgccccaggcaccagcaccgagcctagtgagcaggagattaaacggatcaacaagatcagaagaagacttgtgaaagacagcaacaccaagaaggccggcaagacaggccccatgaaaaccctgctggttagagtgatgacacccgatctgagagagcggctggaaaacctgagaaagaagcctgaaaatatcccccagcccatcagcaatacatctagagccaacctgaataagctgctgaccgattacaccgaaatgaagaaggcgatcctgcatgtgtactgggaagagttccagaaggaccctgtgggcctgatgagccgggtggcccagcctgccagcaagaagatcgatcagaacaagctgaaacctgagatggacgagaagggcaacctgaccaccgccggctttgcctgctctcagtgtggccagcccctgttcgtgtacaagctggagcaggtgtctgagaagggcaaggcttacaccaactacttcggacggtgcaatgtggccgagcacgaaaagctgatcctgctggcccagctgaagcccgagaaggatagcgacgaagccgtgacatatagcctgggaaagtttgggcagagggccctggatttctacagcattcatgtgaccaaggagtccacccaccccgtgaagcccctggcccagatcgccggaaacagatacgcctccggacctgtgggaaaggccctgagcgacgcatgtatgggcacaatcgcctccttcctgtctaagtaccaggacatcatcatcgaacaccagaaggtggtgaagggcaaccagaagagactggagagcctgcgggagctggccggcaaggaaaacctggaataccctagcgtgaccctgccacctcagcctcacaccaaggagggcgttgatgcctacaacgaagtgatcgcccgggtgcgaatgtgggtgaacctgaacctgtggcagaagctgaagctaagcagagatgatgccaagcctctgctgagactgaagggattcccttcctttcctctggtcgagagacaggccaacgaagtggactggtgggacatggtgtgtaacgtgaagaagctgatcaacgagaaaaaggaggatggcaaggtgttttggcagaatctggctggctacaagagacaggaagccctgagaccatacctgagcagcgaggaagatcggaagaagggaaagaaattcgctcggtaccagctgggcgacctgctgctgcacctggaaaagaagcacggcgaggactggggaaaggtgtacgacgaggcctgggagcggattgacaagaaagtggaaggcctgagcaagcacatcaagctggaagaggaacggagaagcgaggacgcccagagcaaggccgccctgaccgactggctgcgggctaaggccagcttcgtgatcgagggcctgaaggaggccgacaaggacgagttctgcagatgcgagctgaagctgcagaagtggtacggggacctgcggggaaagcccttcgccatcgaagccgagaacagcatcctggacatcagcggcttcagcaagcagtacaactgtgccttcatctggcagaaggacggcgtgaagaagctgaacctgtacctgatcatcaactacttcaagggcggcaagctgcggttcaagaagatcaaacctgaagccttcgaagccaacagattctacaccgtgatcaacaaaaagagcggcgagatcgtgcccatggaggtgaacttcaacttcgacgaccccaacctgatcatcctgcctctggcctttggcaagagacagggcagagaattcatctggaacgacctgctgtccctggaaaccggcagcctgaagctggccaacggaagagtgatcgagaagacactgtacaacagaagaacccggcaggatgagcctgccctgttcgtggccctgaccttcgagcggcgggaggtcctggactcctccaatatcaaaccaatgaacctgatcggcgtggcaagaggcgaaaacatccccgccgtgatcgccctgaccgaccccgagggctgcccactgagccggtttaaggatagcctgggaaacccaacccacatcctgagaatcggcgagagctataaggagaagcagcggaccatccaggccaagaaggaggtggagcagcggagagccggcggctacagccggaagtacgccagcaaagccaagaatctggcagacgatatggtgagaaacaccgctagagatctgctgtactacgccgtgacccaggatgccatgctgatcttcgccaacctgagccggggcttcggccggcagggcaagcggaccttcatggccgagagacagtacacacggatggaggactggctgaccgccaagctggcctacgagggcctgagcaagacctacctgtccaagacactggcccagtacacctccaagacatgcagcaactgtgggtttaccatcaccagcgccgactacgacagggtgctggagaagctgaagaagacagcaacaggctggatgaccacaattaacggcaaggagctgaaggtggagggccagattacctactacaacagatacaagagacagaacgtagtcaaggacctgtccgtcgagctggatagactgagcgaagaatctgtgaacaacgacatctcctcctggacaaagggcagaagcggagaagctctgagcctcctgaagaaaagattctcccatagacccgtgcaggagaagttcgtgtgcctgaactgcggcttcgagacacacgcagccgagcaagccgccctgaacatcgccagatcctggctgttcctgcggagccaggagtacaagaaataccagacaaacaagacaaccggcaacaccgataagagagccttcgtcgagacctggcagtccttttaccggaagaagcttaaggaggtgtggaaacctgccgtgcggtctggcggatctggcggaggctccaccagccccaagaaaaagagaaaagtctaagctgccttctgcggggcttgccttctggccatgcccttcttctctcccttgcacctgtacctcttggtctttgaataaagcctgagtaggaaggctagcaaaaaaaaaaaaaaaaaaaaaaaaaaaaaaaaaaaaaaaaaaaaaaaaaaaaaaaaaaaaaaaaaaaaaaaaaaaaaaaa

SEQ ID NO: 10167 - RNA, 8787 nt, synthetic construct
  source 1..8787: mol_type = other RNA
aggaaataagagagaaaagaagagtaagaagaaatataagagccaccatggcccctaagaagaagcgtaaagtgagccggatgaaccacgaccaggagttcgacccccctaaggtgtaccctcccgtccccgccgagaagagaaagcccatccgggtcctgagcctgttcgatggcatcgccaccggtctgctggtgctgaaggacctgggcatccaggtggataggtacattgcctccgaggtgtgcgaggactccatcaccgtgggaatggtgcgtcatcagggcaagatcatgtacgtgggcgacgtgcggagcgtgacacagaagcatatccaggagtggggccctttcgacctggtgatcggcggcagcccttgcaatgacctgagcatcgtgaacccagcccggaagggcctgtacgagggaaccggcagactgttcttcgagttttacagactgctgcacgacgcccggcctaaggaaggcgacgaccggcccttcttttggctgttcgagaatgtggtggccatgggagtcagcgacaagcgggatattagccggttcctggagagcaaccccgtgatgatcgatgccaaggaagtgagcgccgcccaccgggccagatacttctggggcaatctgcctggcatgaacagacccctggccagcaccgtgaacgacaagctggagctgcaggagtgcctggagcacggccggatcgccaagttcagcaaggtgagaaccatcaccacccgaagcaacagcatcaaacaaggcaaggaccagcactttcctgtgttcatgaacgagaaggaggacatcctgtggtgtaccgagatggagagagtgttcgggttcccagtccactacacagatgtcagcaacatgtctagactggccagacagagactgctgggaagaagctggtccgtccctgtgatcagacacctgttcgcccctctgaaggagtacttcgcctgcgtgagcagcggcaacagcaacgccaacagccggggccccagcttctctagcggcctggtgccactgtccctgagagggagccacatgggccccatggagatctacaaaaccgtgagcgcctggaagcggcagcctgtgcgcgtgctgagcctgtttcggaatatcgataaagtcctgaaaagcctgggattcctggagagcggctctggctccggcggtggcaccctgaagtacgtggaggatgtgacaaacgtggtcagacgggatgtggagaagtggggccccttcgatctggtgtacggcagcacccaacccctgggcagctcttgtgaccggtgccctggctggtacatgtttcagttccaccggatcctgcagtacgccctgccgagacaggagtcccagcggccattcttttggattttcatggacaacttgctgctgaccgaggatgaccaggaaactaccactcggttcctgcagaccgaagccgtgaccctgcaggacgtgagaggccgggactaccagaacgccatgcgggtgtggtccaacatccctggactgaaaagcaagcacgcacctctgacccctaaagaagaggagtacctgcaggcccaggtgcggagcagaagcaagctggacgcccctaaggtggatctgctggtgaagaattgcctcctgcccctgagagagtacttcaagtatttcagccagaatagtctgcccctgggaggcagcggcggcggcgaggagacccagggcgagctgaccagcagctgcggcagcaagaccatggccaacgtgagcctggccttcagggacgtgagcatcgacctgagccaggaggagtgggagtgcctggaccccgtgcagagggacctgtacaaggacgtgatgctggagaactacagcaacctggtgagcctgggctacaccatccccaagcccgacgtgatcaccctgctggagcaggagaaggagccctggatcggcggcccaagcagcggcgcccctcctcccagcggcggcaggcggcccaagcagcggcgcccctcctcccagcggcggcagcccagccggctccccaacctctaccgaggagggcacctctgagtccgccacccccgagagcggccctggcacctccaccgagcccagcgagggcagcgcacccggcagccctgccggcagccccacctccacagaggagggaaccagcaccgagcccagcgaaggcagcgccccaggcaccagcaccgagcctagtgagcaggagattaaacggatcaacaagatcagaagaagacttgtgaaagacagcaacaccaagaaggccggcaagacaggccccatgaaaaccctgctggttagagtgatgacacccgatctgagagagcggctggaaaacctgagaaagaagcctgaaaatatcccccagcccatcagcaatacatctagagccaacctgaataagctgctgaccgattacaccgaaatgaagaaggcgatcctgcatgtgtactgggaagagttccagaaggaccctgtgggcctgatgagccgggtggcccagcctgccagcaagaagatcgatcagaacaagctgaaacctgagatggacgagaagggcaacctgaccaccgccggctttgcctgctctcagtgtggccagcccctgttcgtgtacaagctggagcaggtgtctgagaagggcaaggcttacaccaactacttcggacggtgcaatgtggccgagcacgaaaagctgatcctgctggcccagctgaagcccgagaaggatagcgacgaagccgtgacatatagcctgggaaagtttgggcagagggccctggatttctacagcattcatgtgaccaaggagtccacccaccccgtgaagcccctggcccagatcgccggaaacagatacgcctccggacctgtgggaaaggccctgagcgacgcatgtatgggcacaatcgcctccttcctgtctaagtaccaggacatcatcatcgaacaccagaaggtggtgaagggcaaccagaagagactggagagcctgcgggagctggccggcaaggaaaacctggaataccctagcgtgaccctgccacctcagcctcacaccaaggagggcgttgatgcctacaacgaagtgatcgcccgggtgcgaatgtgggtgaacctgaacctgtggcagaagctgaagctaagcagagatgatgccaagcctctgctgagactgaagggattcccttcctttcctctggtcgagagacaggccaacgaagtggactggtgggacatggtgtgtaacgtgaagaagctgatcaacgagaaaaaggaggatggcaaggtgttttggcagaatctggctggctacaagagacaggaagccctgagaccatacctgagcagcgaggaagatcggaagaagggaaagaaattcgctcggtaccagctgggcgacctgctgctgcacctggaaaagaagcacggcgaggactggggaaaggtgtacgacgaggcctgggagcggattgacaagaaagtggaaggcctgagcaagcacatcaagctggaagaggaacggagaagcgaggacgcccagagcaaggccgccctgaccgactggctgcgggctaaggccagcttcgtgatcgagggcctgaaggaggccgacaaggacgagttctgcagatgcgagctgaagctgcagaagtggtacggggacctgcggggaaagcccttcgccatcgaagccgagaacagcatcctggacatcagcggcttcagcaagcagtacaactgtgccttcatctggcagaaggacggcgtgaagaagctgaacctgtacctgatcatcaactacttcaagggcggcaagctgcggttcaagaagatcaaacctgaagccttcgaagccaacagattctacaccgtgatcaacaaaaagagcggcgagatcgtgcccatggaggtgaacttcaacttcgacgaccccaacctgatcatcctgcctctggcctttggcaagagacagggcagagaattcatctggaacgacctgctgtccctggaaaccggcagcctgaagctggccaacggaagagtgatcgagaagacactgtacaacagaagaacccggcaggatgagcctgccctgttcgtggccctgaccttcgagcggcgggaggtcctggactcctccaatatcaaaccaatgaacctgatcggcgtggcaagaggcgaaaacatccccgccgtgatcgccctgaccgaccccgagggctgcccactgagccggtttaaggatagcctgggaaacccaacccacatcctgagaatcggcgagagctataaggagaagcagcggaccatccaggccaagaaggaggtggagcagcggagagccggcggctacagccggaagtacgccagcaaagccaagaatctggcagacgatatggtgagaaacaccgctagagatctgctgtactacgccgtgacccaggatgccatgctgatcttcgccaacctgagccggggcttcggccggcagggcaagcggaccttcatggccgagagacagtacacacggatggaggactggctgaccgccaagctggcctacgagggcctgagcaagacctacctgtccaagacactggcccagtacacctccaagacatgcagcaactgtgggtttaccatcaccagcgccgactacgacagggtgctggagaagctgaagaagacagcaacaggctggatgaccacaattaacggcaaggagctgaaggtggagggccagattacctactacaacagatacaagagacagaacgtagtcaaggacctgtccgtcgagctggatagactgagcgaagaatctgtgaacaacgacatctcctcctggacaaagggcagaagcggagaagctctgagcctcctgaagaaaagattctcccatagacccgtgcaggagaagttcgtgtgcctgaactgcggcttcgagacacacgcagccgagcaagccgccctgaacatcgccagatcctggctgttcctgcggagccaggagtacaagaaataccagacaaacaagacaaccggcaacaccgataagagagccttcgtcgagacctggcagtccttttaccggaagaagcttaaggaggtgtggaaacctgccgtgcggtctggcggatctggcggaggctccaccagccccaagaaaaagagaaaagtctaagctgccttctgcggggcttgccttctggccatgcccttcttctctcccttgcacctgtacctcttggtctttgaataaagcctgagtaggaaggctagcaaaaaaaaaaaaaaaaaaaaaaaaaaaaaaaaaaaaaaaaaaaaaaaaaaaaaaaaaaaaaaaaaaaaaaaaaaaaaaaagcccagccggctccccaacctctaccgaggagggcacctctgagtccgccacccccgagagcggccctggcacctccaccgagcccagcgagggcagcgcacccggcagccctgccggcagccccacctccacagaggagggaaccagcaccgagcccagcgaaggcagcgccccaggcaccagcaccgagcctagtgagcaggagattaaacggatcaacaagatcagaagaagacttgtgaaagacagcaacaccaagaaggccggcaagacaggccccatgaaaaccctgctggttagagtgatgacacccgatctgagagagcggctggaaaacctgagaaagaagcctgaaaatatcccccagcccatcagcaatacatctagagccaacctgaataagctgctgaccgattacaccgaaatgaagaaggcgatcctgcatgtgtactgggaagagttccagaaggaccctgtgggcctgatgagccgggtggcccagcctgccagcaagaagatcgatcagaacaagctgaaacctgagatggacgagaagggcaacctgaccaccgccggctttgcctgctctcagtgtggccagcccctgttcgtgtacaagctggagcaggtgtctgagaagggcaaggcttacaccaactacttcggacggtgcaatgtggccgagcacgaaaagctgatcctgctggcccagctgaagcccgagaaggatagcgacgaagccgtgacatatagcctgggaaagtttgggcagagggccctggatttctacagcattcatgtgaccaaggagtccacccaccccgtgaagcccctggcccagatcgccggaaacagatacgcctccggacctgtgggaaaggccctgagcgacgcatgtatgggcacaatcgcctccttcctgtctaagtaccaggacatcatcatcgaacaccagaaggtggtgaagggcaaccagaagagactggagagcctgcgggagctggccggcaaggaaaacctggaataccctagcgtgaccctgccacctcagcctcacaccaaggagggcgttgatgcctacaacgaagtgatcgcccgggtgcgaatgtgggtgaacctgaacctgtggcagaagctgaagctaagcagagatgatgccaagcctctgctgagactgaagggattcccttcctttcctctggtcgagagacaggccaacgaagtggactggtgggacatggtgtgtaacgtgaagaagctgatcaacgagaaaaaggaggatggcaaggtgttttggcagaatctggctggctacaagagacaggaagccctgagaccatacctgagcagcgaggaagatcggaagaagggaaagaaattcgctcggtaccagctgggcgacctgctgctgcacctggaaaagaagcacggcgaggactggggaaaggtgtacgacgaggcctgggagcggattgacaagaaagtggaaggcctgagcaagcacatcaagctggaagaggaacggagaagcgaggacgcccagagcaaggccgccctgaccgactggctgcgggctaaggccagcttcgtgatcgagggcctgaaggaggccgacaaggacgagttctgcagatgcgagctgaagctgcagaagtggtacggggacctgcggggaaagcccttcgccatcgaagccgagaacagcatcctggacatcagcggcttcagcaagcagtacaactgtgccttcatctggcagaaggacggcgtgaagaagctgaacctgtacctgatcatcaactacttcaagggcggcaagctgcggttcaagaagatcaaacctgaagccttcgaagccaacagattctacaccgtgatcaacaaaaagagcggcgagatcgtgcccatggaggtgaacttcaacttcgacgaccccaacctgatcatcctgcctctggcctttggcaagagacagggcagagaattcatctggaacgacctgctgtccctggaaaccggcagcctgaagctggccaacggaagagtgatcgagaagacactgtacaacagaagaacccggcaggatgagcctgccctgttcgtggccctgaccttcgagcggcgggaggtcctggactcctccaatatcaaaccaatgaacctgatcggcgtggcaagaggcgaaaacatccccgccgtgatcgccctgaccgaccccgagggctgcccactgagccggtttaaggatagcctgggaaacccaacccacatcctgagaatcggcgagagctataaggagaagcagcggaccatccaggccaagaaggaggtggagcagcggagagccggcggctacagccggaagtacgccagcaaagccaagaatctggcagacgatatggtgagaaacaccgctagagatctgctgtactacgccgtgacccaggatgccatgctgatcttcgccaacctgagccggggcttcggccggcagggcaagcggaccttcatggccgagagacagtacacacggatggaggactggctgaccgccaagctggcctacgagggcctgagcaagacctacctgtccaagacactggcccagtacacctccaagacatgcagcaactgtgggtttaccatcaccagcgccgactacgacagggtgctggagaagctgaagaagacagcaacaggctggatgaccacaattaacggcaaggagctgaaggtggagggccagattacctactacaacagatacaagagacagaacgtagtcaaggacctgtccgtcgagctggatagactgagcgaagaatctgtgaacaacgacatctcctcctggacaaagggcagaagcggagaagctctgagcctcctgaagaaaagattctcccatagacccgtgcaggagaagttcgtgtgcctgaactgcggcttcgagacacacgcagccgagcaagccgccctgaacatcgccagatcctggctgttcctgcggagccaggagtacaagaaataccagacaaacaagacaaccggcaacaccgataagagagccttcgtcgagacctggcagtccttttaccggaagaagcttaaggaggtgtggaaacctgccgtgcggtctggcggatctggcggaggctccaccagccccaagaaaaagagaaaagtctaagctgccttctgcggggcttgccttctggccatgcccttcttctctcccttgcacctgtacctcttggtctttgaataaagcctgagtaggaaggctagcaaaaaaaaaaaaaaaaaaaaaaaaaaaaaaaaaaaaaaaaaaaaaaaaaaaaaaaaaaaaaaaaaaaaaaaaaaaaaaaa

SEQ ID NO: 10168 - RNA, 8787 nt, synthetic construct
  source 1..8787: mol_type = other RNA
aggaaataagagagaaaagaagagtaagaagaaatataagagccaccatggcccctaagaagaagcgtaaagtgagccggatgaaccacgaccaggagttcgacccccctaaggtgtaccctcccgtccccgccgagaagagaaagcccatccgggtcctgagcctgttcgatggcatcgccaccggtctgctggtgctgaaggacctgggcatccaggtggataggtacattgcctccgaggtgtgcgaggactccatcaccgtgggaatggtgcgtcatcagggcaagatcatgtacgtgggcgacgtgcggagcgtgacacagaagcatatccaggagtggggccctttcgacctggtgatcggcggcagcccttgcaatgacctgagcatcgtgaacccagcccggaagggcctgtacgagggaaccggcagactgttcttcgagttttacagactgctgcacgacgcccggcctaaggaaggcgacgaccggcccttcttttggctgttcgagaatgtggtggccatgggagtcagcgacaagcgggatattagccggttcctggagagcaaccccgtgatgatcgatgccaaggaagtgagcgccgcccaccgggccagatacttctggggcaatctgcctggcatgaacagacccctggccagcaccgtgaacgacaagctggagctgcaggagtgcctggagcacggccggatcgccaagttcagcaaggtgagaaccatcaccacccgaagcaacagcatcaaacaaggcaaggaccagcactttcctgtgttcatgaacgagaaggaggacatcctgtggtgtaccgagatggagagagtgttcgggttcccagtccactacacagatgtcagcaacatgtctagactggccagacagagactgctgggaagaagctggtccgtccctgtgatcagacacctgttcgcccctctgaaggagtacttcgcctgcgtgagcagcggcaacagcaacgccaacagccggggccccagcttctctagcggcctggtgccactgtccctgagagggagccacatgggccccatggagatctacaaaaccgtgagcgcctggaagcggcagcctgtgcgcgtgctgagcctgtttcggaatatcgataaagtcctgaaaagcctgggattcctggagagcggctctggctccggcggtggcaccctgaagtacgtggaggatgtgacaaacgtggtcagacgggatgtggagaagtggggccccttcgatctggtgtacggcagcacccaacccctgggcagctcttgtgaccggtgccctggctggtacatgtttcagttccaccggatcctgcagtacgccctgccgagacaggagtcccagcggccattcttttggattttcatggacaacttgctgctgaccgaggatgaccaggaaactaccactcggttcctgcagaccgaagccgtgaccctgcaggacgtgagaggccgggactaccagaacgccatgcgggtgtggtccaacatccctggactgaaaagcaagcacgcacctctgacccctaaagaagaggagtacctgcaggcccaggtgcggagcagaagcaagctggacgcccctaaggtggatctgctggtgaagaattgcctcctgcccctgagagagtacttcaagtatttcagccagaatagtctgcccctgggaggcagcggcggcggctgctggggcctgctgagcttcaaggacatcagcatggagttcacctgggaggagtggcagctgctggacagcgcccagaagtacctgtacagggacgtgatcctggagaactacagccacctggtgagcctgggctaccacggcaccaagcccgacctgatcttcaagctggagcagggcgaggagccctggatgatcaacgccagggtgagcaggcagagctaccccgagggctggaaggagggcggcccaagcagcggcgcccctcctcccagcggcggcaggcggcccaagcagcggcgcccctcctcccagcggcggcagcccagccggctccccaacctctaccgaggagggcacctctgagtccgccacccccgagagcggccctggcacctccaccgagcccagcgagggcagcgcacccggcagccctgccggcagccccacctccacagaggagggaaccagcaccgagcccagcgaaggcagcgccccaggcaccagcaccgagcctagtgagcaggagattaaacggatcaacaagatcagaagaagacttgtgaaagacagcaacaccaagaaggccggcaagacaggccccatgaaaaccctgctggttagagtgatgacacccgatctgagagagcggctggaaaacctgagaaagaagcctgaaaatatcccccagcccatcagcaatacatctagagccaacctgaataagctgctgaccgattacaccgaaatgaagaaggcgatcctgcatgtgtactgggaagagttccagaaggaccctgtgggcctgatgagccgggtggcccagcctgccagcaagaagatcgatcagaacaagctgaaacctgagatggacgagaagggcaacctgaccaccgccggctttgcctgctctcagtgtggccagcccctgttcgtgtacaagctggagcaggtgtctgagaagggcaaggcttacaccaactacttcggacggtgcaatgtggccgagcacgaaaagctgatcctgctggcccagctgaagcccgagaaggatagcgacgaagccgtgacatatagcctgggaaagtttgggcagagggccctggatttctacagcattcatgtgaccaaggagtccacccaccccgtgaagcccctggcccagatcgccggaaacagatacgcctccggacctgtgggaaaggccctgagcgacgcatgtatgggcacaatcgcctccttcctgtctaagtaccaggacatcatcatcgaacaccagaaggtggtgaagggcaaccagaagagactggagagcctgcgggagctggccggcaaggaaaacctggaataccctagcgtgaccctgccacctcagcctcacaccaaggagggcgttgatgcctacaacgaagtgatcgcccgggtgcgaatgtgggtgaacctgaacctgtggcagaagctgaagctaagcagagatgatgccaagcctctgctgagactgaagggattcccttcctttcctctggtcgagagacaggccaacgaagtggactggtgggacatggtgtgtaacgtgaagaagctgatcaacgagaaaaaggaggatggcaaggtgttttggcagaatctggctggctacaagagacaggaagccctgagaccatacctgagcagcgaggaagatcggaagaagggaaagaaattcgctcggtaccagctgggcgacctgctgctgcacctggaaaagaagcacggcgaggactggggaaaggtgtacgacgaggcctgggagcggattgacaagaaagtggaaggcctgagcaagcacatcaagctggaagaggaacggagaagcgaggacgcccagagcaaggccgccctgaccgactggctgcgggctaaggccagcttcgtgatcgagggcctgaaggaggccgacaaggacgagttctgcagatgcgagctgaagctgcagaagtggtacggggacctgcggggaaagcccttcgccatcgaagccgagaacagcatcctggacatcagcggcttcagcaagcagtacaactgtgccttcatctggcagaaggacggcgtgaagaagctgaacctgtacctgatcatcaactacttcaagggcggcaagctgcggttcaagaagatcaaacctgaagccttcgaagccaacagattctacaccgtgatcaacaaaaagagcggcgagatcgtgcccatggaggtgaacttcaacttcgacgaccccaacctgatcatcctgcctctggcctttggcaagagacagggcagagaattcatctggaacgacctgctgtccctggaaaccggcagcctgaagctggccaacggaagagtgatcgagaagacactgtacaacagaagaacccggcaggatgagcctgccctgttcgtggccctgaccttcgagcggcgggaggtcctggactcctccaatatcaaaccaatgaacctgatcggcgtggcaagaggcgaaaacatccccgccgtgatcgccctgaccgaccccgagggctgcccactgagccggtttaaggatagcctgggaaacccaacccacatcctgagaatcggcgagagctataaggagaagcagcggaccatccaggccaagaaggaggtggagcagcggagagccggcggctacagccggaagtacgccagcaaagccaagaatctggcagacgatatggtgagaaacaccgctagagatctgctgtactacgccgtgacccaggatgccatgctgatcttcgccaacctgagccggggcttcggccggcagggcaagcggaccttcatggccgagagacagtacacacggatggaggactggctgaccgccaagctggcctacgagggcctgagcaagacctacctgtccaagacactggcccagtacacctccaagacatgcagcaactgtgggtttaccatcaccagcgccgactacgacagggtgctggagaagctgaagaagacagcaacaggctggatgaccacaattaacggcaaggagctgaaggtggagggccagattacctactacaacagatacaagagacagaacgtagtcaaggacctgtccgtcgagctggatagactgagcgaagaatctgtgaacaacgacatctcctcctggacaaagggcagaagcggagaagctctgagcctcctgaagaaaagattctcccatagacccgtgcaggagaagttcgtgtgcctgaactgcggcttcgagacacacgcagccgagcaagccgccctgaacatcgccagatcctggctgttcctgcggagccaggagtacaagaaataccagacaaacaagacaaccggcaacaccgataagagagccttcgtcgagacctggcagtccttttaccggaagaagcttaaggaggtgtggaaacctgccgtgcggtctggcggatctggcggaggctccaccagccccaagaaaaagagaaaagtctaagctgccttctgcggggcttgccttctggccatgcccttcttctctcccttgcacctgtacctcttggtctttgaataaagcctgagtaggaaggctagcaaaaaaaaaaaaaaaaaaaaaaaaaaaaaaaaaaaaaaaaaaaaaaaaaaaaaaaaaaaaaaaaaaaaaaaaaaaaaaaagcccagccggctccccaacctctaccgaggagggcacctctgagtccgccacccccgagagcggccctggcacctccaccgagcccagcgagggcagcgcacccggcagccctgccggcagccccacctccacagaggagggaaccagcaccgagcccagcgaaggcagcgccccaggcaccagcaccgagcctagtgagcaggagattaaacggatcaacaagatcagaagaagacttgtgaaagacagcaacaccaagaaggccggcaagacaggccccatgaaaaccctgctggttagagtgatgacacccgatctgagagagcggctggaaaacctgagaaagaagcctgaaaatatcccccagcccatcagcaatacatctagagccaacctgaataagctgctgaccgattacaccgaaatgaagaaggcgatcctgcatgtgtactgggaagagttccagaaggaccctgtgggcctgatgagccgggtggcccagcctgccagcaagaagatcgatcagaacaagctgaaacctgagatggacgagaagggcaacctgaccaccgccggctttgcctgctctcagtgtggccagcccctgttcgtgtacaagctggagcaggtgtctgagaagggcaaggcttacaccaactacttcggacggtgcaatgtggccgagcacgaaaagctgatcctgctggcccagctgaagcccgagaaggatagcgacgaagccgtgacatatagcctgggaaagtttgggcagagggccctggatttctacagcattcatgtgaccaaggagtccacccaccccgtgaagcccctggcccagatcgccggaaacagatacgcctccggacctgtgggaaaggccctgagcgacgcatgtatgggcacaatcgcctccttcctgtctaagtaccaggacatcatcatcgaacaccagaaggtggtgaagggcaaccagaagagactggagagcctgcgggagctggccggcaaggaaaacctggaataccctagcgtgaccctgccacctcagcctcacaccaaggagggcgttgatgcctacaacgaagtgatcgcccgggtgcgaatgtgggtgaacctgaacctgtggcagaagctgaagctaagcagagatgatgccaagcctctgctgagactgaagggattcccttcctttcctctggtcgagagacaggccaacgaagtggactggtgggacatggtgtgtaacgtgaagaagctgatcaacgagaaaaaggaggatggcaaggtgttttggcagaatctggctggctacaagagacaggaagccctgagaccatacctgagcagcgaggaagatcggaagaagggaaagaaattcgctcggtaccagctgggcgacctgctgctgcacctggaaaagaagcacggcgaggactggggaaaggtgtacgacgaggcctgggagcggattgacaagaaagtggaaggcctgagcaagcacatcaagctggaagaggaacggagaagcgaggacgcccagagcaaggccgccctgaccgactggctgcgggctaaggccagcttcgtgatcgagggcctgaaggaggccgacaaggacgagttctgcagatgcgagctgaagctgcagaagtggtacggggacctgcggggaaagcccttcgccatcgaagccgagaacagcatcctggacatcagcggcttcagcaagcagtacaactgtgccttcatctggcagaaggacggcgtgaagaagctgaacctgtacctgatcatcaactacttcaagggcggcaagctgcggttcaagaagatcaaacctgaagccttcgaagccaacagattctacaccgtgatcaacaaaaagagcggcgagatcgtgcccatggaggtgaacttcaacttcgacgaccccaacctgatcatcctgcctctggcctttggcaagagacagggcagagaattcatctggaacgacctgctgtccctggaaaccggcagcctgaagctggccaacggaagagtgatcgagaagacactgtacaacagaagaacccggcaggatgagcctgccctgttcgtggccctgaccttcgagcggcgggaggtcctggactcctccaatatcaaaccaatgaacctgatcggcgtggcaagaggcgaaaacatccccgccgtgatcgccctgaccgaccccgagggctgcccactgagccggtttaaggatagcctgggaaacccaacccacatcctgagaatcggcgagagctataaggagaagcagcggaccatccaggccaagaaggaggtggagcagcggagagccggcggctacagccggaagtacgccagcaaagccaagaatctggcagacgatatggtgagaaacaccgctagagatctgctgtactacgccgtgacccaggatgccatgctgatcttcgccaacctgagccggggcttcggccggcagggcaagcggaccttcatggccgagagacagtacacacggatggaggactggctgaccgccaagctggcctacgagggcctgagcaagacctacctgtccaagacactggcccagtacacctccaagacatgcagcaactgtgggtttaccatcaccagcgccgactacgacagggtgctggagaagctgaagaagacagcaacaggctggatgaccacaattaacggcaaggagctgaaggtggagggccagattacctactacaacagatacaagagacagaacgtagtcaaggacctgtccgtcgagctggatagactgagcgaagaatctgtgaacaacgacatctcctcctggacaaagggcagaagcggagaagctctgagcctcctgaagaaaagattctcccatagacccgtgcaggagaagttcgtgtgcctgaactgcggcttcgagacacacgcagccgagcaagccgccctgaacatcgccagatcctggctgttcctgcggagccaggagtacaagaaataccagacaaacaagacaaccggcaacaccgataagagagccttcgtcgagacctggcagtccttttaccggaagaagcttaaggaggtgtggaaacctgccgtgcggtctggcggatctggcggaggctccaccagccccaagaaaaagagaaaagtctaagctgccttctgcggggcttgccttctggccatgcccttcttctctcccttgcacctgtacctcttggtctttgaataaagcctgagtaggaaggctagcaaaaaaaaaaaaaaaaaaaaaaaaaaaaaaaaaaaaaaaaaaaaaaaaaaaaaaaaaaaaaaaaaaaaaaaaaaaaaaaa

SEQ ID NO: 10169 - RNA, 8787 nt, synthetic construct
  source 1..8787: mol_type = other RNA
aggaaataagagagaaaagaagagtaagaagaaatataagagccaccatggcccctaagaagaagcgtaaagtgagccggatgaaccacgaccaggagttcgacccccctaaggtgtaccctcccgtccccgccgagaagagaaagcccatccgggtcctgagcctgttcgatggcatcgccaccggtctgctggtgctgaaggacctgggcatccaggtggataggtacattgcctccgaggtgtgcgaggactccatcaccgtgggaatggtgcgtcatcagggcaagatcatgtacgtgggcgacgtgcggagcgtgacacagaagcatatccaggagtggggccctttcgacctggtgatcggcggcagcccttgcaatgacctgagcatcgtgaacccagcccggaagggcctgtacgagggaaccggcagactgttcttcgagttttacagactgctgcacgacgcccggcctaaggaaggcgacgaccggcccttcttttggctgttcgagaatgtggtggccatgggagtcagcgacaagcgggatattagccggttcctggagagcaaccccgtgatgatcgatgccaaggaagtgagcgccgcccaccgggccagatacttctggggcaatctgcctggcatgaacagacccctggccagcaccgtgaacgacaagctggagctgcaggagtgcctggagcacggccggatcgccaagttcagcaaggtgagaaccatcaccacccgaagcaacagcatcaaacaaggcaaggaccagcactttcctgtgttcatgaacgagaaggaggacatcctgtggtgtaccgagatggagagagtgttcgggttcccagtccactacacagatgtcagcaacatgtctagactggccagacagagactgctgggaagaagctggtccgtccctgtgatcagacacctgttcgcccctctgaaggagtacttcgcctgcgtgagcagcggcaacagcaacgccaacagccggggccccagcttctctagcggcctggtgccactgtccctgagagggagccacatgggccccatggagatctacaaaaccgtgagcgcctggaagcggcagcctgtgcgcgtgctgagcctgtttcggaatatcgataaagtcctgaaaagcctgggattcctggagagcggctctggctccggcggtggcaccctgaagtacgtggaggatgtgacaaacgtggtcagacgggatgtggagaagtggggccccttcgatctggtgtacggcagcacccaacccctgggcagctcttgtgaccggtgccctggctggtacatgtttcagttccaccggatcctgcagtacgccctgccgagacaggagtcccagcggccattcttttggattttcatggacaacttgctgctgaccgaggatgaccaggaaactaccactcggttcctgcagaccgaagccgtgaccctgcaggacgtgagaggccgggactaccagaacgccatgcgggtgtggtccaacatccctggactgaaaagcaagcacgcacctctgacccctaaagaagaggagtacctgcaggcccaggtgcggagcagaagcaagctggacgcccctaaggtggatctgctggtgaagaattgcctcctgcccctgagagagtacttcaagtatttcagccagaatagtctgcccctgggaggcagcggcggcggcagccacgagagcgtgaccttcaaggacgtggccgtggacttcacctgggaggagtggggctacctggacaccagccagaaggagctgtactgggaggtgatgctggagaactacaggaacctggtgagcctgggcctggccgacagcaacgtggacatgatcagccagctggagagcggcgaggcccacggcatccccgtggacagcgtgctgaggagctgctggcccgacggcgacaccaggggcggcccaagcagcggcgcccctcctcccagcggcggcaggcggcccaagcagcggcgcccctcctcccagcggcggcagcccagccggctccccaacctctaccgaggagggcacctctgagtccgccacccccgagagcggccctggcacctccaccgagcccagcgagggcagcgcacccggcagccctgccggcagccccacctccacagaggagggaaccagcaccgagcccagcgaaggcagcgccccaggcaccagcaccgagcctagtgagcaggagattaaacggatcaacaagatcagaagaagacttgtgaaagacagcaacaccaagaaggccggcaagacaggccccatgaaaaccctgctggttagagtgatgacacccgatctgagagagcggctggaaaacctgagaaagaagcctgaaaatatcccccagcccatcagcaatacatctagagccaacctgaataagctgctgaccgattacaccgaaatgaagaaggcgatcctgcatgtgtactgggaagagttccagaaggaccctgtgggcctgatgagccgggtggcccagcctgccagcaagaagatcgatcagaacaagctgaaacctgagatggacgagaagggcaacctgaccaccgccggctttgcctgctctcagtgtggccagcccctgttcgtgtacaagctggagcaggtgtctgagaagggcaaggcttacaccaactacttcggacggtgcaatgtggccgagcacgaaaagctgatcctgctggcccagctgaagcccgagaaggatagcgacgaagccgtgacatatagcctgggaaagtttgggcagagggccctggatttctacagcattcatgtgaccaaggagtccacccaccccgtgaagcccctggcccagatcgccggaaacagatacgcctccggacctgtgggaaaggccctgagcgacgcatgtatgggcacaatcgcctccttcctgtctaagtaccaggacatcatcatcgaacaccagaaggtggtgaagggcaaccagaagagactggagagcctgcgggagctggccggcaaggaaaacctggaataccctagcgtgaccctgccacctcagcctcacaccaaggagggcgttgatgcctacaacgaagtgatcgcccgggtgcgaatgtgggtgaacctgaacctgtggcagaagctgaagctaagcagagatgatgccaagcctctgctgagactgaagggattcccttcctttcctctggtcgagagacaggccaacgaagtggactggtgggacatggtgtgtaacgtgaagaagctgatcaacgagaaaaaggaggatggcaaggtgttttggcagaatctggctggctacaagagacaggaagccctgagaccatacctgagcagcgaggaagatcggaagaagggaaagaaattcgctcggtaccagctgggcgacctgctgctgcacctggaaaagaagcacggcgaggactggggaaaggtgtacgacgaggcctgggagcggattgacaagaaagtggaaggcctgagcaagcacatcaagctggaagaggaacggagaagcgaggacgcccagagcaaggccgccctgaccgactggctgcgggctaaggccagcttcgtgatcgagggcctgaaggaggccgacaaggacgagttctgcagatgcgagctgaagctgcagaagtggtacggggacctgcggggaaagcccttcgccatcgaagccgagaacagcatcctggacatcagcggcttcagcaagcagtacaactgtgccttcatctggcagaaggacggcgtgaagaagctgaacctgtacctgatcatcaactacttcaagggcggcaagctgcggttcaagaagatcaaacctgaagccttcgaagccaacagattctacaccgtgatcaacaaaaagagcggcgagatcgtgcccatggaggtgaacttcaacttcgacgaccccaacctgatcatcctgcctctggcctttggcaagagacagggcagagaattcatctggaacgacctgctgtccctggaaaccggcagcctgaagctggccaacggaagagtgatcgagaagacactgtacaacagaagaacccggcaggatgagcctgccctgttcgtggccctgaccttcgagcggcgggaggtcctggactcctccaatatcaaaccaatgaacctgatcggcgtggcaagaggcgaaaacatccccgccgtgatcgccctgaccgaccccgagggctgcccactgagccggtttaaggatagcctgggaaacccaacccacatcctgagaatcggcgagagctataaggagaagcagcggaccatccaggccaagaaggaggtggagcagcggagagccggcggctacagccggaagtacgccagcaaagccaagaatctggcagacgatatggtgagaaacaccgctagagatctgctgtactacgccgtgacccaggatgccatgctgatcttcgccaacctgagccggggcttcggccggcagggcaagcggaccttcatggccgagagacagtacacacggatggaggactggctgaccgccaagctggcctacgagggcctgagcaagacctacctgtccaagacactggcccagtacacctccaagacatgcagcaactgtgggtttaccatcaccagcgccgactacgacagggtgctggagaagctgaagaagacagcaacaggctggatgaccacaattaacggcaaggagctgaaggtggagggccagattacctactacaacagatacaagagacagaacgtagtcaaggacctgtccgtcgagctggatagactgagcgaagaatctgtgaacaacgacatctcctcctggacaaagggcagaagcggagaagctctgagcctcctgaagaaaagattctcccatagacccgtgcaggagaagttcgtgtgcctgaactgcggcttcgagacacacgcagccgagcaagccgccctgaacatcgccagatcctggctgttcctgcggagccaggagtacaagaaataccagacaaacaagacaaccggcaacaccgataagagagccttcgtcgagacctggcagtccttttaccggaagaagcttaaggaggtgtggaaacctgccgtgcggtctggcggatctggcggaggctccaccagccccaagaaaaagagaaaagtctaagctgccttctgcggggcttgccttctggccatgcccttcttctctcccttgcacctgtacctcttggtctttgaataaagcctgagtaggaaggctagcaaaaaaaaaaaaaaaaaaaaaaaaaaaaaaaaaaaaaaaaaaaaaaaaaaaaaaaaaaaaaaaaaaaaaaaaaaaaaaaagcccagccggctccccaacctctaccgaggagggcacctctgagtccgccacccccgagagcggccctggcacctccaccgagcccagcgagggcagcgcacccggcagccctgccggcagccccacctccacagaggagggaaccagcaccgagcccagcgaaggcagcgccccaggcaccagcaccgagcctagtgagcaggagattaaacggatcaacaagatcagaagaagacttgtgaaagacagcaacaccaagaaggccggcaagacaggccccatgaaaaccctgctggttagagtgatgacacccgatctgagagagcggctggaaaacctgagaaagaagcctgaaaatatcccccagcccatcagcaatacatctagagccaacctgaataagctgctgaccgattacaccgaaatgaagaaggcgatcctgcatgtgtactgggaagagttccagaaggaccctgtgggcctgatgagccgggtggcccagcctgccagcaagaagatcgatcagaacaagctgaaacctgagatggacgagaagggcaacctgaccaccgccggctttgcctgctctcagtgtggccagcccctgttcgtgtacaagctggagcaggtgtctgagaagggcaaggcttacaccaactacttcggacggtgcaatgtggccgagcacgaaaagctgatcctgctggcccagctgaagcccgagaaggatagcgacgaagccgtgacatatagcctgggaaagtttgggcagagggccctggatttctacagcattcatgtgaccaaggagtccacccaccccgtgaagcccctggcccagatcgccggaaacagatacgcctccggacctgtgggaaaggccctgagcgacgcatgtatgggcacaatcgcctccttcctgtctaagtaccaggacatcatcatcgaacaccagaaggtggtgaagggcaaccagaagagactggagagcctgcgggagctggccggcaaggaaaacctggaataccctagcgtgaccctgccacctcagcctcacaccaaggagggcgttgatgcctacaacgaagtgatcgcccgggtgcgaatgtgggtgaacctgaacctgtggcagaagctgaagctaagcagagatgatgccaagcctctgctgagactgaagggattcccttcctttcctctggtcgagagacaggccaacgaagtggactggtgggacatggtgtgtaacgtgaagaagctgatcaacgagaaaaaggaggatggcaaggtgttttggcagaatctggctggctacaagagacaggaagccctgagaccatacctgagcagcgaggaagatcggaagaagggaaagaaattcgctcggtaccagctgggcgacctgctgctgcacctggaaaagaagcacggcgaggactggggaaaggtgtacgacgaggcctgggagcggattgacaagaaagtggaaggcctgagcaagcacatcaagctggaagaggaacggagaagcgaggacgcccagagcaaggccgccctgaccgactggctgcgggctaaggccagcttcgtgatcgagggcctgaaggaggccgacaaggacgagttctgcagatgcgagctgaagctgcagaagtggtacggggacctgcggggaaagcccttcgccatcgaagccgagaacagcatcctggacatcagcggcttcagcaagcagtacaactgtgccttcatctggcagaaggacggcgtgaagaagctgaacctgtacctgatcatcaactacttcaagggcggcaagctgcggttcaagaagatcaaacctgaagccttcgaagccaacagattctacaccgtgatcaacaaaaagagcggcgagatcgtgcccatggaggtgaacttcaacttcgacgaccccaacctgatcatcctgcctctggcctttggcaagagacagggcagagaattcatctggaacgacctgctgtccctggaaaccggcagcctgaagctggccaacggaagagtgatcgagaagacactgtacaacagaagaacccggcaggatgagcctgccctgttcgtggccctgaccttcgagcggcgggaggtcctggactcctccaatatcaaaccaatgaacctgatcggcgtggcaagaggcgaaaacatccccgccgtgatcgccctgaccgaccccgagggctgcccactgagccggtttaaggatagcctgggaaacccaacccacatcctgagaatcggcgagagctataaggagaagcagcggaccatccaggccaagaaggaggtggagcagcggagagccggcggctacagccggaagtacgccagcaaagccaagaatctggcagacgatatggtgagaaacaccgctagagatctgctgtactacgccgtgacccaggatgccatgctgatcttcgccaacctgagccggggcttcggccggcagggcaagcggaccttcatggccgagagacagtacacacggatggaggactggctgaccgccaagctggcctacgagggcctgagcaagacctacctgtccaagacactggcccagtacacctccaagacatgcagcaactgtgggtttaccatcaccagcgccgactacgacagggtgctggagaagctgaagaagacagcaacaggctggatgaccacaattaacggcaaggagctgaaggtggagggccagattacctactacaacagatacaagagacagaacgtagtcaaggacctgtccgtcgagctggatagactgagcgaagaatctgtgaacaacgacatctcctcctggacaaagggcagaagcggagaagctctgagcctcctgaagaaaagattctcccatagacccgtgcaggagaagttcgtgtgcctgaactgcggcttcgagacacacgcagccgagcaagccgccctgaacatcgccagatcctggctgttcctgcggagccaggagtacaagaaataccagacaaacaagacaaccggcaacaccgataagagagccttcgtcgagacctggcagtccttttaccggaagaagcttaaggaggtgtggaaacctgccgtgcggtctggcggatctggcggaggctccaccagccccaagaaaaagagaaaagtctaagctgccttctgcggggcttgccttctggccatgcccttcttctctcccttgcacctgtacctcttggtctttgaataaagcctgagtaggaaggctagcaaaaaaaaaaaaaaaaaaaaaaaaaaaaaaaaaaaaaaaaaaaaaaaaaaaaaaaaaaaaaaaaaaaaaaaaaaaaaaaa

SEQ ID NO: 10170 - RNA, 8787 nt, synthetic construct
  source 1..8787: mol_type = other RNA
aggaaataagagagaaaagaagagtaagaagaaatataagagccaccatggcccctaagaagaagcgtaaagtgagccggatgaaccacgaccaggagttcgacccccctaaggtgtaccctcccgtccccgccgagaagagaaagcccatccgggtcctgagcctgttcgatggcatcgccaccggtctgctggtgctgaaggacctgggcatccaggtggataggtacattgcctccgaggtgtgcgaggactccatcaccgtgggaatggtgcgtcatcagggcaagatcatgtacgtgggcgacgtgcggagcgtgacacagaagcatatccaggagtggggccctttcgacctggtgatcggcggcagcccttgcaatgacctgagcatcgtgaacccagcccggaagggcctgtacgagggaaccggcagactgttcttcgagttttacagactgctgcacgacgcccggcctaaggaaggcgacgaccggcccttcttttggctgttcgagaatgtggtggccatgggagtcagcgacaagcgggatattagccggttcctggagagcaaccccgtgatgatcgatgccaaggaagtgagcgccgcccaccgggccagatacttctggggcaatctgcctggcatgaacagacccctggccagcaccgtgaacgacaagctggagctgcaggagtgcctggagcacggccggatcgccaagttcagcaaggtgagaaccatcaccacccgaagcaacagcatcaaacaaggcaaggaccagcactttcctgtgttcatgaacgagaaggaggacatcctgtggtgtaccgagatggagagagtgttcgggttcccagtccactacacagatgtcagcaacatgtctagactggccagacagagactgctgggaagaagctggtccgtccctgtgatcagacacctgttcgcccctctgaaggagtacttcgcctgcgtgagcagcggcaacagcaacgccaacagccggggccccagcttctctagcggcctggtgccactgtccctgagagggagccacatgggccccatggagatctacaaaaccgtgagcgcctggaagcggcagcctgtgcgcgtgctgagcctgtttcggaatatcgataaagtcctgaaaagcctgggattcctggagagcggctctggctccggcggtggcaccctgaagtacgtggaggatgtgacaaacgtggtcagacgggatgtggagaagtggggccccttcgatctggtgtacggcagcacccaacccctgggcagctcttgtgaccggtgccctggctggtacatgtttcagttccaccggatcctgcagtacgccctgccgagacaggagtcccagcggccattcttttggattttcatggacaacttgctgctgaccgaggatgaccaggaaactaccactcggttcctgcagaccgaagccgtgaccctgcaggacgtgagaggccgggactaccagaacgccatgcgggtgtggtccaacatccctggactgaaaagcaagcacgcacctctgacccctaaagaagaggagtacctgcaggcccaggtgcggagcagaagcaagctggacgcccctaaggtggatctgctggtgaagaattgcctcctgcccctgagagagtacttcaagtatttcagccagaatagtctgcccctgggaggcagcggcggcggcaggctggagagcgtgaccttcgaggacgtggccgtgtacttcacccagaaccagtgggccagcctgaaccccgcccagagggccctgtacggcgaggtgatgctggagaactacgccaacgtggccagcctggtggccttccccttccccaagcccgccctgatcagccacctggagaggggcgaggccccctggggccccgacccctgggacaccaagatccccaggggcatcggccagggcggcggcccaagcagcggcgcccctcctcccagcggcggcaggcggcccaagcagcggcgcccctcctcccagcggcggcagcccagccggctccccaacctctaccgaggagggcacctctgagtccgccacccccgagagcggccctggcacctccaccgagcccagcgagggcagcgcacccggcagccctgccggcagccccacctccacagaggagggaaccagcaccgagcccagcgaaggcagcgccccaggcaccagcaccgagcctagtgagcaggagattaaacggatcaacaagatcagaagaagacttgtgaaagacagcaacaccaagaaggccggcaagacaggccccatgaaaaccctgctggttagagtgatgacacccgatctgagagagcggctggaaaacctgagaaagaagcctgaaaatatcccccagcccatcagcaatacatctagagccaacctgaataagctgctgaccgattacaccgaaatgaagaaggcgatcctgcatgtgtactgggaagagttccagaaggaccctgtgggcctgatgagccgggtggcccagcctgccagcaagaagatcgatcagaacaagctgaaacctgagatggacgagaagggcaacctgaccaccgccggctttgcctgctctcagtgtggccagcccctgttcgtgtacaagctggagcaggtgtctgagaagggcaaggcttacaccaactacttcggacggtgcaatgtggccgagcacgaaaagctgatcctgctggcccagctgaagcccgagaaggatagcgacgaagccgtgacatatagcctgggaaagtttgggcagagggccctggatttctacagcattcatgtgaccaaggagtccacccaccccgtgaagcccctggcccagatcgccggaaacagatacgcctccggacctgtgggaaaggccctgagcgacgcatgtatgggcacaatcgcctccttcctgtctaagtaccaggacatcatcatcgaacaccagaaggtggtgaagggcaaccagaagagactggagagcctgcgggagctggccggcaaggaaaacctggaataccctagcgtgaccctgccacctcagcctcacaccaaggagggcgttgatgcctacaacgaagtgatcgcccgggtgcgaatgtgggtgaacctgaacctgtggcagaagctgaagctaagcagagatgatgccaagcctctgctgagactgaagggattcccttcctttcctctggtcgagagacaggccaacgaagtggactggtgggacatggtgtgtaacgtgaagaagctgatcaacgagaaaaaggaggatggcaaggtgttttggcagaatctggctggctacaagagacaggaagccctgagaccatacctgagcagcgaggaagatcggaagaagggaaagaaattcgctcggtaccagctgggcgacctgctgctgcacctggaaaagaagcacggcgaggactggggaaaggtgtacgacgaggcctgggagcggattgacaagaaagtggaaggcctgagcaagcacatcaagctggaagaggaacggagaagcgaggacgcccagagcaaggccgccctgaccgactggctgcgggctaaggccagcttcgtgatcgagggcctgaaggaggccgacaaggacgagttctgcagatgcgagctgaagctgcagaagtggtacggggacctgcggggaaagcccttcgccatcgaagccgagaacagcatcctggacatcagcggcttcagcaagcagtacaactgtgccttcatctggcagaaggacggcgtgaagaagctgaacctgtacctgatcatcaactacttcaagggcggcaagctgcggttcaagaagatcaaacctgaagccttcgaagccaacagattctacaccgtgatcaacaaaaagagcggcgagatcgtgcccatggaggtgaacttcaacttcgacgaccccaacctgatcatcctgcctctggcctttggcaagagacagggcagagaattcatctggaacgacctgctgtccctggaaaccggcagcctgaagctggccaacggaagagtgatcgagaagacactgtacaacagaagaacccggcaggatgagcctgccctgttcgtggccctgaccttcgagcggcgggaggtcctggactcctccaatatcaaaccaatgaacctgatcggcgtggcaagaggcgaaaacatccccgccgtgatcgccctgaccgaccccgagggctgcccactgagccggtttaaggatagcctgggaaacccaacccacatcctgagaatcggcgagagctataaggagaagcagcggaccatccaggccaagaaggaggtggagcagcggagagccggcggctacagccggaagtacgccagcaaagccaagaatctggcagacgatatggtgagaaacaccgctagagatctgctgtactacgccgtgacccaggatgccatgctgatcttcgccaacctgagccggggcttcggccggcagggcaagcggaccttcatggccgagagacagtacacacggatggaggactggctgaccgccaagctggcctacgagggcctgagcaagacctacctgtccaagacactggcccagtacacctccaagacatgcagcaactgtgggtttaccatcaccagcgccgactacgacagggtgctggagaagctgaagaagacagcaacaggctggatgaccacaattaacggcaaggagctgaaggtggagggccagattacctactacaacagatacaagagacagaacgtagtcaaggacctgtccgtcgagctggatagactgagcgaagaatctgtgaacaacgacatctcctcctggacaaagggcagaagcggagaagctctgagcctcctgaagaaaagattctcccatagacccgtgcaggagaagttcgtgtgcctgaactgcggcttcgagacacacgcagccgagcaagccgccctgaacatcgccagatcctggctgttcctgcggagccaggagtacaagaaataccagacaaacaagacaaccggcaacaccgataagagagccttcgtcgagacctggcagtccttttaccggaagaagcttaaggaggtgtggaaacctgccgtgcggtctggcggatctggcggaggctccaccagccccaagaaaaagagaaaagtctaagctgccttctgcggggcttgccttctggccatgcccttcttctctcccttgcacctgtacctcttggtctttgaataaagcctgagtaggaaggctagcaaaaaaaaaaaaaaaaaaaaaaaaaaaaaaaaaaaaaaaaaaaaaaaaaaaaaaaaaaaaaaaaaaaaaaaaaaaaaaaagcccagccggctccccaacctctaccgaggagggcacctctgagtccgccacccccgagagcggccctggcacctccaccgagcccagcgagggcagcgcacccggcagccctgccggcagccccacctccacagaggagggaaccagcaccgagcccagcgaaggcagcgccccaggcaccagcaccgagcctagtgagcaggagattaaacggatcaacaagatcagaagaagacttgtgaaagacagcaacaccaagaaggccggcaagacaggccccatgaaaaccctgctggttagagtgatgacacccgatctgagagagcggctggaaaacctgagaaagaagcctgaaaatatcccccagcccatcagcaatacatctagagccaacctgaataagctgctgaccgattacaccgaaatgaagaaggcgatcctgcatgtgtactgggaagagttccagaaggaccctgtgggcctgatgagccgggtggcccagcctgccagcaagaagatcgatcagaacaagctgaaacctgagatggacgagaagggcaacctgaccaccgccggctttgcctgctctcagtgtggccagcccctgttcgtgtacaagctggagcaggtgtctgagaagggcaaggcttacaccaactacttcggacggtgcaatgtggccgagcacgaaaagctgatcctgctggcccagctgaagcccgagaaggatagcgacgaagccgtgacatatagcctgggaaagtttgggcagagggccctggatttctacagcattcatgtgaccaaggagtccacccaccccgtgaagcccctggcccagatcgccggaaacagatacgcctccggacctgtgggaaaggccctgagcgacgcatgtatgggcacaatcgcctccttcctgtctaagtaccaggacatcatcatcgaacaccagaaggtggtgaagggcaaccagaagagactggagagcctgcgggagctggccggcaaggaaaacctggaataccctagcgtgaccctgccacctcagcctcacaccaaggagggcgttgatgcctacaacgaagtgatcgcccgggtgcgaatgtgggtgaacctgaacctgtggcagaagctgaagctaagcagagatgatgccaagcctctgctgagactgaagggattcccttcctttcctctggtcgagagacaggccaacgaagtggactggtgggacatggtgtgtaacgtgaagaagctgatcaacgagaaaaaggaggatggcaaggtgttttggcagaatctggctggctacaagagacaggaagccctgagaccatacctgagcagcgaggaagatcggaagaagggaaagaaattcgctcggtaccagctgggcgacctgctgctgcacctggaaaagaagcacggcgaggactggggaaaggtgtacgacgaggcctgggagcggattgacaagaaagtggaaggcctgagcaagcacatcaagctggaagaggaacggagaagcgaggacgcccagagcaaggccgccctgaccgactggctgcgggctaaggccagcttcgtgatcgagggcctgaaggaggccgacaaggacgagttctgcagatgcgagctgaagctgcagaagtggtacggggacctgcggggaaagcccttcgccatcgaagccgagaacagcatcctggacatcagcggcttcagcaagcagtacaactgtgccttcatctggcagaaggacggcgtgaagaagctgaacctgtacctgatcatcaactacttcaagggcggcaagctgcggttcaagaagatcaaacctgaagccttcgaagccaacagattctacaccgtgatcaacaaaaagagcggcgagatcgtgcccatggaggtgaacttcaacttcgacgaccccaacctgatcatcctgcctctggcctttggcaagagacagggcagagaattcatctggaacgacctgctgtccctggaaaccggcagcctgaagctggccaacggaagagtgatcgagaagacactgtacaacagaagaacccggcaggatgagcctgccctgttcgtggccctgaccttcgagcggcgggaggtcctggactcctccaatatcaaaccaatgaacctgatcggcgtggcaagaggcgaaaacatccccgccgtgatcgccctgaccgaccccgagggctgcccactgagccggtttaaggatagcctgggaaacccaacccacatcctgagaatcggcgagagctataaggagaagcagcggaccatccaggccaagaaggaggtggagcagcggagagccggcggctacagccggaagtacgccagcaaagccaagaatctggcagacgatatggtgagaaacaccgctagagatctgctgtactacgccgtgacccaggatgccatgctgatcttcgccaacctgagccggggcttcggccggcagggcaagcggaccttcatggccgagagacagtacacacggatggaggactggctgaccgccaagctggcctacgagggcctgagcaagacctacctgtccaagacactggcccagtacacctccaagacatgcagcaactgtgggtttaccatcaccagcgccgactacgacagggtgctggagaagctgaagaagacagcaacaggctggatgaccacaattaacggcaaggagctgaaggtggagggccagattacctactacaacagatacaagagacagaacgtagtcaaggacctgtccgtcgagctggatagactgagcgaagaatctgtgaacaacgacatctcctcctggacaaagggcagaagcggagaagctctgagcctcctgaagaaaagattctcccatagacccgtgcaggagaagttcgtgtgcctgaactgcggcttcgagacacacgcagccgagcaagccgccctgaacatcgccagatcctggctgttcctgcggagccaggagtacaagaaataccagacaaacaagacaaccggcaacaccgataagagagccttcgtcgagacctggcagtccttttaccggaagaagcttaaggaggtgtggaaacctgccgtgcggtctggcggatctggcggaggctccaccagccccaagaaaaagagaaaagtctaagctgccttctgcggggcttgccttctggccatgcccttcttctctcccttgcacctgtacctcttggtctttgaataaagcctgagtaggaaggctagcaaaaaaaaaaaaaaaaaaaaaaaaaaaaaaaaaaaaaaaaaaaaaaaaaaaaaaaaaaaaaaaaaaaaaaaaaaaaaaaa

SEQ ID NO: 10171 - RNA, 8787 nt, synthetic construct
  source 1..8787: mol_type = other RNA
aggaaataagagagaaaagaagagtaagaagaaatataagagccaccatggcccctaagaagaagcgtaaagtgagccggatgaaccacgaccaggagttcgacccccctaaggtgtaccctcccgtccccgccgagaagagaaagcccatccgggtcctgagcctgttcgatggcatcgccaccggtctgctggtgctgaaggacctgggcatccaggtggataggtacattgcctccgaggtgtgcgaggactccatcaccgtgggaatggtgcgtcatcagggcaagatcatgtacgtgggcgacgtgcggagcgtgacacagaagcatatccaggagtggggccctttcgacctggtgatcggcggcagcccttgcaatgacctgagcatcgtgaacccagcccggaagggcctgtacgagggaaccggcagactgttcttcgagttttacagactgctgcacgacgcccggcctaaggaaggcgacgaccggcccttcttttggctgttcgagaatgtggtggccatgggagtcagcgacaagcgggatattagccggttcctggagagcaaccccgtgatgatcgatgccaaggaagtgagcgccgcccaccgggccagatacttctggggcaatctgcctggcatgaacagacccctggccagcaccgtgaacgacaagctggagctgcaggagtgcctggagcacggccggatcgccaagttcagcaaggtgagaaccatcaccacccgaagcaacagcatcaaacaaggcaaggaccagcactttcctgtgttcatgaacgagaaggaggacatcctgtggtgtaccgagatggagagagtgttcgggttcccagtccactacacagatgtcagcaacatgtctagactggccagacagagactgctgggaagaagctggtccgtccctgtgatcagacacctgttcgcccctctgaaggagtacttcgcctgcgtgagcagcggcaacagcaacgccaacagccggggccccagcttctctagcggcctggtgccactgtccctgagagggagccacatgggccccatggagatctacaaaaccgtgagcgcctggaagcggcagcctgtgcgcgtgctgagcctgtttcggaatatcgataaagtcctgaaaagcctgggattcctggagagcggctctggctccggcggtggcaccctgaagtacgtggaggatgtgacaaacgtggtcagacgggatgtggagaagtggggccccttcgatctggtgtacggcagcacccaacccctgggcagctcttgtgaccggtgccctggctggtacatgtttcagttccaccggatcctgcagtacgccctgccgagacaggagtcccagcggccattcttttggattttcatggacaacttgctgctgaccgaggatgaccaggaaactaccactcggttcctgcagaccgaagccgtgaccctgcaggacgtgagaggccgggactaccagaacgccatgcgggtgtggtccaacatccctggactgaaaagcaagcacgcacctctgacccctaaagaagaggagtacctgcaggcccaggtgcggagcagaagcaagctggacgcccctaaggtggatctgctggtgaagaattgcctcctgcccctgagagagtacttcaagtatttcagccagaatagtctgcccctgggaggcagcggcggcggcttccaggccagcgtgagcttcaaggacgtgaccgtggagctgacccaggaggagtggcagcagatgggccccctgcagaggaccctgtacagggacgtgatgctggagaactacaacaacctggtgagcgtgggcagctgcatctacaagcccgagctgatcttcaagctggagcagggcgaggagccctggctgctggaggaggagttcagcaaccagagctaccaggtgctggagcactacggcggcccaagcagcggcgcccctcctcccagcggcggcaggcggcccaagcagcggcgcccctcctcccagcggcggcagcccagccggctccccaacctctaccgaggagggcacctctgagtccgccacccccgagagcggccctggcacctccaccgagcccagcgagggcagcgcacccggcagccctgccggcagccccacctccacagaggagggaaccagcaccgagcccagcgaaggcagcgccccaggcaccagcaccgagcctagtgagcaggagattaaacggatcaacaagatcagaagaagacttgtgaaagacagcaacaccaagaaggccggcaagacaggccccatgaaaaccctgctggttagagtgatgacacccgatctgagagagcggctggaaaacctgagaaagaagcctgaaaatatcccccagcccatcagcaatacatctagagccaacctgaataagctgctgaccgattacaccgaaatgaagaaggcgatcctgcatgtgtactgggaagagttccagaaggaccctgtgggcctgatgagccgggtggcccagcctgccagcaagaagatcgatcagaacaagctgaaacctgagatggacgagaagggcaacctgaccaccgccggctttgcctgctctcagtgtggccagcccctgttcgtgtacaagctggagcaggtgtctgagaagggcaaggcttacaccaactacttcggacggtgcaatgtggccgagcacgaaaagctgatcctgctggcccagctgaagcccgagaaggatagcgacgaagccgtgacatatagcctgggaaagtttgggcagagggccctggatttctacagcattcatgtgaccaaggagtccacccaccccgtgaagcccctggcccagatcgccggaaacagatacgcctccggacctgtgggaaaggccctgagcgacgcatgtatgggcacaatcgcctccttcctgtctaagtaccaggacatcatcatcgaacaccagaaggtggtgaagggcaaccagaagagactggagagcctgcgggagctggccggcaaggaaaacctggaataccctagcgtgaccctgccacctcagcctcacaccaaggagggcgttgatgcctacaacgaagtgatcgcccgggtgcgaatgtgggtgaacctgaacctgtggcagaagctgaagctaagcagagatgatgccaagcctctgctgagactgaagggattcccttcctttcctctggtcgagagacaggccaacgaagtggactggtgggacatggtgtgtaacgtgaagaagctgatcaacgagaaaaaggaggatggcaaggtgttttggcagaatctggctggctacaagagacaggaagccctgagaccatacctgagcagcgaggaagatcggaagaagggaaagaaattcgctcggtaccagctgggcgacctgctgctgcacctggaaaagaagcacggcgaggactggggaaaggtgtacgacgaggcctgggagcggattgacaagaaagtggaaggcctgagcaagcacatcaagctggaagaggaacggagaagcgaggacgcccagagcaaggccgccctgaccgactggctgcgggctaaggccagcttcgtgatcgagggcctgaaggaggccgacaaggacgagttctgcagatgcgagctgaagctgcagaagtggtacggggacctgcggggaaagcccttcgccatcgaagccgagaacagcatcctggacatcagcggcttcagcaagcagtacaactgtgccttcatctggcagaaggacggcgtgaagaagctgaacctgtacctgatcatcaactacttcaagggcggcaagctgcggttcaagaagatcaaacctgaagccttcgaagccaacagattctacaccgtgatcaacaaaaagagcggcgagatcgtgcccatggaggtgaacttcaacttcgacgaccccaacctgatcatcctgcctctggcctttggcaagagacagggcagagaattcatctggaacgacctgctgtccctggaaaccggcagcctgaagctggccaacggaagagtgatcgagaagacactgtacaacagaagaacccggcaggatgagcctgccctgttcgtggccctgaccttcgagcggcgggaggtcctggactcctccaatatcaaaccaatgaacctgatcggcgtggcaagaggcgaaaacatccccgccgtgatcgccctgaccgaccccgagggctgcccactgagccggtttaaggatagcctgggaaacccaacccacatcctgagaatcggcgagagctataaggagaagcagcggaccatccaggccaagaaggaggtggagcagcggagagccggcggctacagccggaagtacgccagcaaagccaagaatctggcagacgatatggtgagaaacaccgctagagatctgctgtactacgccgtgacccaggatgccatgctgatcttcgccaacctgagccggggcttcggccggcagggcaagcggaccttcatggccgagagacagtacacacggatggaggactggctgaccgccaagctggcctacgagggcctgagcaagacctacctgtccaagacactggcccagtacacctccaagacatgcagcaactgtgggtttaccatcaccagcgccgactacgacagggtgctggagaagctgaagaagacagcaacaggctggatgaccacaattaacggcaaggagctgaaggtggagggccagattacctactacaacagatacaagagacagaacgtagtcaaggacctgtccgtcgagctggatagactgagcgaagaatctgtgaacaacgacatctcctcctggacaaagggcagaagcggagaagctctgagcctcctgaagaaaagattctcccatagacccgtgcaggagaagttcgtgtgcctgaactgcggcttcgagacacacgcagccgagcaagccgccctgaacatcgccagatcctggctgttcctgcggagccaggagtacaagaaataccagacaaacaagacaaccggcaacaccgataagagagccttcgtcgagacctggcagtccttttaccggaagaagcttaaggaggtgtggaaacctgccgtgcggtctggcggatctggcggaggctccaccagccccaagaaaaagagaaaagtctaagctgccttctgcggggcttgccttctggccatgcccttcttctctcccttgcacctgtacctcttggtctttgaataaagcctgagtaggaaggctagcaaaaaaaaaaaaaaaaaaaaaaaaaaaaaaaaaaaaaaaaaaaaaaaaaaaaaaaaaaaaaaaaaaaaaaaaaaaaaaaagcccagccggctccccaacctctaccgaggagggcacctctgagtccgccacccccgagagcggccctggcacctccaccgagcccagcgagggcagcgcacccggcagccctgccggcagccccacctccacagaggagggaaccagcaccgagcccagcgaaggcagcgccccaggcaccagcaccgagcctagtgagcaggagattaaacggatcaacaagatcagaagaagacttgtgaaagacagcaacaccaagaaggccggcaagacaggccccatgaaaaccctgctggttagagtgatgacacccgatctgagagagcggctggaaaacctgagaaagaagcctgaaaatatcccccagcccatcagcaatacatctagagccaacctgaataagctgctgaccgattacaccgaaatgaagaaggcgatcctgcatgtgtactgggaagagttccagaaggaccctgtgggcctgatgagccgggtggcccagcctgccagcaagaagatcgatcagaacaagctgaaacctgagatggacgagaagggcaacctgaccaccgccggctttgcctgctctcagtgtggccagcccctgttcgtgtacaagctggagcaggtgtctgagaagggcaaggcttacaccaactacttcggacggtgcaatgtggccgagcacgaaaagctgatcctgctggcccagctgaagcccgagaaggatagcgacgaagccgtgacatatagcctgggaaagtttgggcagagggccctggatttctacagcattcatgtgaccaaggagtccacccaccccgtgaagcccctggcccagatcgccggaaacagatacgcctccggacctgtgggaaaggccctgagcgacgcatgtatgggcacaatcgcctccttcctgtctaagtaccaggacatcatcatcgaacaccagaaggtggtgaagggcaaccagaagagactggagagcctgcgggagctggccggcaaggaaaacctggaataccctagcgtgaccctgccacctcagcctcacaccaaggagggcgttgatgcctacaacgaagtgatcgcccgggtgcgaatgtgggtgaacctgaacctgtggcagaagctgaagctaagcagagatgatgccaagcctctgctgagactgaagggattcccttcctttcctctggtcgagagacaggccaacgaagtggactggtgggacatggtgtgtaacgtgaagaagctgatcaacgagaaaaaggaggatggcaaggtgttttggcagaatctggctggctacaagagacaggaagccctgagaccatacctgagcagcgaggaagatcggaagaagggaaagaaattcgctcggtaccagctgggcgacctgctgctgcacctggaaaagaagcacggcgaggactggggaaaggtgtacgacgaggcctgggagcggattgacaagaaagtggaaggcctgagcaagcacatcaagctggaagaggaacggagaagcgaggacgcccagagcaaggccgccctgaccgactggctgcgggctaaggccagcttcgtgatcgagggcctgaaggaggccgacaaggacgagttctgcagatgcgagctgaagctgcagaagtggtacggggacctgcggggaaagcccttcgccatcgaagccgagaacagcatcctggacatcagcggcttcagcaagcagtacaactgtgccttcatctggcagaaggacggcgtgaagaagctgaacctgtacctgatcatcaactacttcaagggcggcaagctgcggttcaagaagatcaaacctgaagccttcgaagccaacagattctacaccgtgatcaacaaaaagagcggcgagatcgtgcccatggaggtgaacttcaacttcgacgaccccaacctgatcatcctgcctctggcctttggcaagagacagggcagagaattcatctggaacgacctgctgtccctggaaaccggcagcctgaagctggccaacggaagagtgatcgagaagacactgtacaacagaagaacccggcaggatgagcctgccctgttcgtggccctgaccttcgagcggcgggaggtcctggactcctccaatatcaaaccaatgaacctgatcggcgtggcaagaggcgaaaacatccccgccgtgatcgccctgaccgaccccgagggctgcccactgagccggtttaaggatagcctgggaaacccaacccacatcctgagaatcggcgagagctataaggagaagcagcggaccatccaggccaagaaggaggtggagcagcggagagccggcggctacagccggaagtacgccagcaaagccaagaatctggcagacgatatggtgagaaacaccgctagagatctgctgtactacgccgtgacccaggatgccatgctgatcttcgccaacctgagccggggcttcggccggcagggcaagcggaccttcatggccgagagacagtacacacggatggaggactggctgaccgccaagctggcctacgagggcctgagcaagacctacctgtccaagacactggcccagtacacctccaagacatgcagcaactgtgggtttaccatcaccagcgccgactacgacagggtgctggagaagctgaagaagacagcaacaggctggatgaccacaattaacggcaaggagctgaaggtggagggccagattacctactacaacagatacaagagacagaacgtagtcaaggacctgtccgtcgagctggatagactgagcgaagaatctgtgaacaacgacatctcctcctggacaaagggcagaagcggagaagctctgagcctcctgaagaaaagattctcccatagacccgtgcaggagaagttcgtgtgcctgaactgcggcttcgagacacacgcagccgagcaagccgccctgaacatcgccagatcctggctgttcctgcggagccaggagtacaagaaataccagacaaacaagacaaccggcaacaccgataagagagccttcgtcgagacctggcagtccttttaccggaagaagcttaaggaggtgtggaaacctgccgtgcggtctggcggatctggcggaggctccaccagccccaagaaaaagagaaaagtctaagctgccttctgcggggcttgccttctggccatgcccttcttctctcccttgcacctgtacctcttggtctttgaataaagcctgagtaggaaggctagcaaaaaaaaaaaaaaaaaaaaaaaaaaaaaaaaaaaaaaaaaaaaaaaaaaaaaaaaaaaaaaaaaaaaaaaaaaaaaaaa

SEQ ID NO: 10172 - RNA, 8787 nt, synthetic construct
  source 1..8787: mol_type = other RNA
aggaaataagagagaaaagaagagtaagaagaaatataagagccaccatggcccctaagaagaagcgtaaagtgagccggatgaaccacgaccaggagttcgacccccctaaggtgtaccctcccgtccccgccgagaagagaaagcccatccgggtcctgagcctgttcgatggcatcgccaccggtctgctggtgctgaaggacctgggcatccaggtggataggtacattgcctccgaggtgtgcgaggactccatcaccgtgggaatggtgcgtcatcagggcaagatcatgtacgtgggcgacgtgcggagcgtgacacagaagcatatccaggagtggggccctttcgacctggtgatcggcggcagcccttgcaatgacctgagcatcgtgaacccagcccggaagggcctgtacgagggaaccggcagactgttcttcgagttttacagactgctgcacgacgcccggcctaaggaaggcgacgaccggcccttcttttggctgttcgagaatgtggtggccatgggagtcagcgacaagcgggatattagccggttcctggagagcaaccccgtgatgatcgatgccaaggaagtgagcgccgcccaccgggccagatacttctggggcaatctgcctggcatgaacagacccctggccagcaccgtgaacgacaagctggagctgcaggagtgcctggagcacggccggatcgccaagttcagcaaggtgagaaccatcaccacccgaagcaacagcatcaaacaaggcaaggaccagcactttcctgtgttcatgaacgagaaggaggacatcctgtggtgtaccgagatggagagagtgttcgggttcccagtccactacacagatgtcagcaacatgtctagactggccagacagagactgctgggaagaagctggtccgtccctgtgatcagacacctgttcgcccctctgaaggagtacttcgcctgcgtgagcagcggcaacagcaacgccaacagccggggccccagcttctctagcggcctggtgccactgtccctgagagggagccacatgggccccatggagatctacaaaaccgtgagcgcctggaagcggcagcctgtgcgcgtgctgagcctgtttcggaatatcgataaagtcctgaaaagcctgggattcctggagagcggctctggctccggcggtggcaccctgaagtacgtggaggatgtgacaaacgtggtcagacgggatgtggagaagtggggccccttcgatctggtgtacggcagcacccaacccctgggcagctcttgtgaccggtgccctggctggtacatgtttcagttccaccggatcctgcagtacgccctgccgagacaggagtcccagcggccattcttttggattttcatggacaacttgctgctgaccgaggatgaccaggaaactaccactcggttcctgcagaccgaagccgtgaccctgcaggacgtgagaggccgggactaccagaacgccatgcgggtgtggtccaacatccctggactgaaaagcaagcacgcacctctgacccctaaagaagaggagtacctgcaggcccaggtgcggagcagaagcaagctggacgcccctaaggtggatctgctggtgaagaattgcctcctgcccctgagagagtacttcaagtatttcagccagaatagtctgcccctgggaggcagcggcggcggcatgaacgccgtgacctacagggacgtgcacgtgaacttcacccaggaggagtgggccctgctggaccccagccagaagaagctgtacaaggacgtgatgctggagacctacaggaacctgaacgccatcggcttcaactgggaggcccagaacatcgaggagcactgccagagcagcaggaggcacaggaggtgcgagaggagccagagcgccgagaagcccagcgagtacacccagagggacggcggcccaagcagcggcgcccctcctcccagcggcggcaggcggcccaagcagcggcgcccctcctcccagcggcggcagcccagccggctccccaacctctaccgaggagggcacctctgagtccgccacccccgagagcggccctggcacctccaccgagcccagcgagggcagcgcacccggcagccctgccggcagccccacctccacagaggagggaaccagcaccgagcccagcgaaggcagcgccccaggcaccagcaccgagcctagtgagcaggagattaaacggatcaacaagatcagaagaagacttgtgaaagacagcaacaccaagaaggccggcaagacaggccccatgaaaaccctgctggttagagtgatgacacccgatctgagagagcggctggaaaacctgagaaagaagcctgaaaatatcccccagcccatcagcaatacatctagagccaacctgaataagctgctgaccgattacaccgaaatgaagaaggcgatcctgcatgtgtactgggaagagttccagaaggaccctgtgggcctgatgagccgggtggcccagcctgccagcaagaagatcgatcagaacaagctgaaacctgagatggacgagaagggcaacctgaccaccgccggctttgcctgctctcagtgtggccagcccctgttcgtgtacaagctggagcaggtgtctgagaagggcaaggcttacaccaactacttcggacggtgcaatgtggccgagcacgaaaagctgatcctgctggcccagctgaagcccgagaaggatagcgacgaagccgtgacatatagcctgggaaagtttgggcagagggccctggatttctacagcattcatgtgaccaaggagtccacccaccccgtgaagcccctggcccagatcgccggaaacagatacgcctccggacctgtgggaaaggccctgagcgacgcatgtatgggcacaatcgcctccttcctgtctaagtaccaggacatcatcatcgaacaccagaaggtggtgaagggcaaccagaagagactggagagcctgcgggagctggccggcaaggaaaacctggaataccctagcgtgaccctgccacctcagcctcacaccaaggagggcgttgatgcctacaacgaagtgatcgcccgggtgcgaatgtgggtgaacctgaacctgtggcagaagctgaagctaagcagagatgatgccaagcctctgctgagactgaagggattcccttcctttcctctggtcgagagacaggccaacgaagtggactggtgggacatggtgtgtaacgtgaagaagctgatcaacgagaaaaaggaggatggcaaggtgttttggcagaatctggctggctacaagagacaggaagccctgagaccatacctgagcagcgaggaagatcggaagaagggaaagaaattcgctcggtaccagctgggcgacctgctgctgcacctggaaaagaagcacggcgaggactggggaaaggtgtacgacgaggcctgggagcggattgacaagaaagtggaaggcctgagcaagcacatcaagctggaagaggaacggagaagcgaggacgcccagagcaaggccgccctgaccgactggctgcgggctaaggccagcttcgtgatcgagggcctgaaggaggccgacaaggacgagttctgcagatgcgagctgaagctgcagaagtggtacggggacctgcggggaaagcccttcgccatcgaagccgagaacagcatcctggacatcagcggcttcagcaagcagtacaactgtgccttcatctggcagaaggacggcgtgaagaagctgaacctgtacctgatcatcaactacttcaagggcggcaagctgcggttcaagaagatcaaacctgaagccttcgaagccaacagattctacaccgtgatcaacaaaaagagcggcgagatcgtgcccatggaggtgaacttcaacttcgacgaccccaacctgatcatcctgcctctggcctttggcaagagacagggcagagaattcatctggaacgacctgctgtccctggaaaccggcagcctgaagctggccaacggaagagtgatcgagaagacactgtacaacagaagaacccggcaggatgagcctgccctgttcgtggccctgaccttcgagcggcgggaggtcctggactcctccaatatcaaaccaatgaacctgatcggcgtggcaagaggcgaaaacatccccgccgtgatcgccctgaccgaccccgagggctgcccactgagccggtttaaggatagcctgggaaacccaacccacatcctgagaatcggcgagagctataaggagaagcagcggaccatccaggccaagaaggaggtggagcagcggagagccggcggctacagccggaagtacgccagcaaagccaagaatctggcagacgatatggtgagaaacaccgctagagatctgctgtactacgccgtgacccaggatgccatgctgatcttcgccaacctgagccggggcttcggccggcagggcaagcggaccttcatggccgagagacagtacacacggatggaggactggctgaccgccaagctggcctacgagggcctgagcaagacctacctgtccaagacactggcccagtacacctccaagacatgcagcaactgtgggtttaccatcaccagcgccgactacgacagggtgctggagaagctgaagaagacagcaacaggctggatgaccacaattaacggcaaggagctgaaggtggagggccagattacctactacaacagatacaagagacagaacgtagtcaaggacctgtccgtcgagctggatagactgagcgaagaatctgtgaacaacgacatctcctcctggacaaagggcagaagcggagaagctctgagcctcctgaagaaaagattctcccatagacccgtgcaggagaagttcgtgtgcctgaactgcggcttcgagacacacgcagccgagcaagccgccctgaacatcgccagatcctggctgttcctgcggagccaggagtacaagaaataccagacaaacaagacaaccggcaacaccgataagagagccttcgtcgagacctggcagtccttttaccggaagaagcttaaggaggtgtggaaacctgccgtgcggtctggcggatctggcggaggctccaccagccccaagaaaaagagaaaagtctaagctgccttctgcggggcttgccttctggccatgcccttcttctctcccttgcacctgtacctcttggtctttgaataaagcctgagtaggaaggctagcaaaaaaaaaaaaaaaaaaaaaaaaaaaaaaaaaaaaaaaaaaaaaaaaaaaaaaaaaaaaaaaaaaaaaaaaaaaaaaaagcccagccggctccccaacctctaccgaggagggcacctctgagtccgccacccccgagagcggccctggcacctccaccgagcccagcgagggcagcgcacccggcagccctgccggcagccccacctccacagaggagggaaccagcaccgagcccagcgaaggcagcgccccaggcaccagcaccgagcctagtgagcaggagattaaacggatcaacaagatcagaagaagacttgtgaaagacagcaacaccaagaaggccggcaagacaggccccatgaaaaccctgctggttagagtgatgacacccgatctgagagagcggctggaaaacctgagaaagaagcctgaaaatatcccccagcccatcagcaatacatctagagccaacctgaataagctgctgaccgattacaccgaaatgaagaaggcgatcctgcatgtgtactgggaagagttccagaaggaccctgtgggcctgatgagccgggtggcccagcctgccagcaagaagatcgatcagaacaagctgaaacctgagatggacgagaagggcaacctgaccaccgccggctttgcctgctctcagtgtggccagcccctgttcgtgtacaagctggagcaggtgtctgagaagggcaaggcttacaccaactacttcggacggtgcaatgtggccgagcacgaaaagctgatcctgctggcccagctgaagcccgagaaggatagcgacgaagccgtgacatatagcctgggaaagtttgggcagagggccctggatttctacagcattcatgtgaccaaggagtccacccaccccgtgaagcccctggcccagatcgccggaaacagatacgcctccggacctgtgggaaaggccctgagcgacgcatgtatgggcacaatcgcctccttcctgtctaagtaccaggacatcatcatcgaacaccagaaggtggtgaagggcaaccagaagagactggagagcctgcgggagctggccggcaaggaaaacctggaataccctagcgtgaccctgccacctcagcctcacaccaaggagggcgttgatgcctacaacgaagtgatcgcccgggtgcgaatgtgggtgaacctgaacctgtggcagaagctgaagctaagcagagatgatgccaagcctctgctgagactgaagggattcccttcctttcctctggtcgagagacaggccaacgaagtggactggtgggacatggtgtgtaacgtgaagaagctgatcaacgagaaaaaggaggatggcaaggtgttttggcagaatctggctggctacaagagacaggaagccctgagaccatacctgagcagcgaggaagatcggaagaagggaaagaaattcgctcggtaccagctgggcgacctgctgctgcacctggaaaagaagcacggcgaggactggggaaaggtgtacgacgaggcctgggagcggattgacaagaaagtggaaggcctgagcaagcacatcaagctggaagaggaacggagaagcgaggacgcccagagcaaggccgccctgaccgactggctgcgggctaaggccagcttcgtgatcgagggcctgaaggaggccgacaaggacgagttctgcagatgcgagctgaagctgcagaagtggtacggggacctgcggggaaagcccttcgccatcgaagccgagaacagcatcctggacatcagcggcttcagcaagcagtacaactgtgccttcatctggcagaaggacggcgtgaagaagctgaacctgtacctgatcatcaactacttcaagggcggcaagctgcggttcaagaagatcaaacctgaagccttcgaagccaacagattctacaccgtgatcaacaaaaagagcggcgagatcgtgcccatggaggtgaacttcaacttcgacgaccccaacctgatcatcctgcctctggcctttggcaagagacagggcagagaattcatctggaacgacctgctgtccctggaaaccggcagcctgaagctggccaacggaagagtgatcgagaagacactgtacaacagaagaacccggcaggatgagcctgccctgttcgtggccctgaccttcgagcggcgggaggtcctggactcctccaatatcaaaccaatgaacctgatcggcgtggcaagaggcgaaaacatccccgccgtgatcgccctgaccgaccccgagggctgcccactgagccggtttaaggatagcctgggaaacccaacccacatcctgagaatcggcgagagctataaggagaagcagcggaccatccaggccaagaaggaggtggagcagcggagagccggcggctacagccggaagtacgccagcaaagccaagaatctggcagacgatatggtgagaaacaccgctagagatctgctgtactacgccgtgacccaggatgccatgctgatcttcgccaacctgagccggggcttcggccggcagggcaagcggaccttcatggccgagagacagtacacacggatggaggactggctgaccgccaagctggcctacgagggcctgagcaagacctacctgtccaagacactggcccagtacacctccaagacatgcagcaactgtgggtttaccatcaccagcgccgactacgacagggtgctggagaagctgaagaagacagcaacaggctggatgaccacaattaacggcaaggagctgaaggtggagggccagattacctactacaacagatacaagagacagaacgtagtcaaggacctgtccgtcgagctggatagactgagcgaagaatctgtgaacaacgacatctcctcctggacaaagggcagaagcggagaagctctgagcctcctgaagaaaagattctcccatagacccgtgcaggagaagttcgtgtgcctgaactgcggcttcgagacacacgcagccgagcaagccgccctgaacatcgccagatcctggctgttcctgcggagccaggagtacaagaaataccagacaaacaagacaaccggcaacaccgataagagagccttcgtcgagacctggcagtccttttaccggaagaagcttaaggaggtgtggaaacctgccgtgcggtctggcggatctggcggaggctccaccagccccaagaaaaagagaaaagtctaagctgccttctgcggggcttgccttctggccatgcccttcttctctcccttgcacctgtacctcttggtctttgaataaagcctgagtaggaaggctagcaaaaaaaaaaaaaaaaaaaaaaaaaaaaaaaaaaaaaaaaaaaaaaaaaaaaaaaaaaaaaaaaaaaaaaaaaaaaaaaa

SEQ ID NO: 10173 - RNA, 8787 nt, synthetic construct
  source 1..8787: mol_type = other RNA
aggaaataagagagaaaagaagagtaagaagaaatataagagccaccatggcccctaagaagaagcgtaaagtgagccggatgaaccacgaccaggagttcgacccccctaaggtgtaccctcccgtccccgccgagaagagaaagcccatccgggtcctgagcctgttcgatggcatcgccaccggtctgctggtgctgaaggacctgggcatccaggtggataggtacattgcctccgaggtgtgcgaggactccatcaccgtgggaatggtgcgtcatcagggcaagatcatgtacgtgggcgacgtgcggagcgtgacacagaagcatatccaggagtggggccctttcgacctggtgatcggcggcagcccttgcaatgacctgagcatcgtgaacccagcccggaagggcctgtacgagggaaccggcagactgttcttcgagttttacagactgctgcacgacgcccggcctaaggaaggcgacgaccggcccttcttttggctgttcgagaatgtggtggccatgggagtcagcgacaagcgggatattagccggttcctggagagcaaccccgtgatgatcgatgccaaggaagtgagcgccgcccaccgggccagatacttctggggcaatctgcctggcatgaacagacccctggccagcaccgtgaacgacaagctggagctgcaggagtgcctggagcacggccggatcgccaagttcagcaaggtgagaaccatcaccacccgaagcaacagcatcaaacaaggcaaggaccagcactttcctgtgttcatgaacgagaaggaggacatcctgtggtgtaccgagatggagagagtgttcgggttcccagtccactacacagatgtcagcaacatgtctagactggccagacagagactgctgggaagaagctggtccgtccctgtgatcagacacctgttcgcccctctgaaggagtacttcgcctgcgtgagcagcggcaacagcaacgccaacagccggggccccagcttctctagcggcctggtgccactgtccctgagagggagccacatgggccccatggagatctacaaaaccgtgagcgcctggaagcggcagcctgtgcgcgtgctgagcctgtttcggaatatcgataaagtcctgaaaagcctgggattcctggagagcggctctggctccggcggtggcaccctgaagtacgtggaggatgtgacaaacgtggtcagacgggatgtggagaagtggggccccttcgatctggtgtacggcagcacccaacccctgggcagctcttgtgaccggtgccctggctggtacatgtttcagttccaccggatcctgcagtacgccctgccgagacaggagtcccagcggccattcttttggattttcatggacaacttgctgctgaccgaggatgaccaggaaactaccactcggttcctgcagaccgaagccgtgaccctgcaggacgtgagaggccgggactaccagaacgccatgcgggtgtggtccaacatccctggactgaaaagcaagcacgcacctctgacccctaaagaagaggagtacctgcaggcccaggtgcggagcagaagcaagctggacgcccctaaggtggatctgctggtgaagaattgcctcctgcccctgagagagtacttcaagtatttcagccagaatagtctgcccctgggaggcagcggcggcggcctggtgagcttcgaggacgtggccatggacttcagcagggaggagtggcagcagctggaccccgcccagaggtgcctgtaccaggacgtgatgctggagatctacagccacctgctgagcgtggagggcgccctgggcctgaagaccagccagcagaagatcttcgagaaggccagcttccacaacggcaaggagagcgaggtgaccaggggcggcatgtggtgcagcatcagcgaggacctgggcggcccaagcagcggcgcccctcctcccagcggcggcaggcggcccaagcagcggcgcccctcctcccagcggcggcagcccagccggctccccaacctctaccgaggagggcacctctgagtccgccacccccgagagcggccctggcacctccaccgagcccagcgagggcagcgcacccggcagccctgccggcagccccacctccacagaggagggaaccagcaccgagcccagcgaaggcagcgccccaggcaccagcaccgagcctagtgagcaggagattaaacggatcaacaagatcagaagaagacttgtgaaagacagcaacaccaagaaggccggcaagacaggccccatgaaaaccctgctggttagagtgatgacacccgatctgagagagcggctggaaaacctgagaaagaagcctgaaaatatcccccagcccatcagcaatacatctagagccaacctgaataagctgctgaccgattacaccgaaatgaagaaggcgatcctgcatgtgtactgggaagagttccagaaggaccctgtgggcctgatgagccgggtggcccagcctgccagcaagaagatcgatcagaacaagctgaaacctgagatggacgagaagggcaacctgaccaccgccggctttgcctgctctcagtgtggccagcccctgttcgtgtacaagctggagcaggtgtctgagaagggcaaggcttacaccaactacttcggacggtgcaatgtggccgagcacgaaaagctgatcctgctggcccagctgaagcccgagaaggatagcgacgaagccgtgacatatagcctgggaaagtttgggcagagggccctggatttctacagcattcatgtgaccaaggagtccacccaccccgtgaagcccctggcccagatcgccggaaacagatacgcctccggacctgtgggaaaggccctgagcgacgcatgtatgggcacaatcgcctccttcctgtctaagtaccaggacatcatcatcgaacaccagaaggtggtgaagggcaaccagaagagactggagagcctgcgggagctggccggcaaggaaaacctggaataccctagcgtgaccctgccacctcagcctcacaccaaggagggcgttgatgcctacaacgaagtgatcgcccgggtgcgaatgtgggtgaacctgaacctgtggcagaagctgaagctaagcagagatgatgccaagcctctgctgagactgaagggattcccttcctttcctctggtcgagagacaggccaacgaagtggactggtgggacatggtgtgtaacgtgaagaagctgatcaacgagaaaaaggaggatggcaaggtgttttggcagaatctggctggctacaagagacaggaagccctgagaccatacctgagcagcgaggaagatcggaagaagggaaagaaattcgctcggtaccagctgggcgacctgctgctgcacctggaaaagaagcacggcgaggactggggaaaggtgtacgacgaggcctgggagcggattgacaagaaagtggaaggcctgagcaagcacatcaagctggaagaggaacggagaagcgaggacgcccagagcaaggccgccctgaccgactggctgcgggctaaggccagcttcgtgatcgagggcctgaaggaggccgacaaggacgagttctgcagatgcgagctgaagctgcagaagtggtacggggacctgcggggaaagcccttcgccatcgaagccgagaacagcatcctggacatcagcggcttcagcaagcagtacaactgtgccttcatctggcagaaggacggcgtgaagaagctgaacctgtacctgatcatcaactacttcaagggcggcaagctgcggttcaagaagatcaaacctgaagccttcgaagccaacagattctacaccgtgatcaacaaaaagagcggcgagatcgtgcccatggaggtgaacttcaacttcgacgaccccaacctgatcatcctgcctctggcctttggcaagagacagggcagagaattcatctggaacgacctgctgtccctggaaaccggcagcctgaagctggccaacggaagagtgatcgagaagacactgtacaacagaagaacccggcaggatgagcctgccctgttcgtggccctgaccttcgagcggcgggaggtcctggactcctccaatatcaaaccaatgaacctgatcggcgtggcaagaggcgaaaacatccccgccgtgatcgccctgaccgaccccgagggctgcccactgagccggtttaaggatagcctgggaaacccaacccacatcctgagaatcggcgagagctataaggagaagcagcggaccatccaggccaagaaggaggtggagcagcggagagccggcggctacagccggaagtacgccagcaaagccaagaatctggcagacgatatggtgagaaacaccgctagagatctgctgtactacgccgtgacccaggatgccatgctgatcttcgccaacctgagccggggcttcggccggcagggcaagcggaccttcatggccgagagacagtacacacggatggaggactggctgaccgccaagctggcctacgagggcctgagcaagacctacctgtccaagacactggcccagtacacctccaagacatgcagcaactgtgggtttaccatcaccagcgccgactacgacagggtgctggagaagctgaagaagacagcaacaggctggatgaccacaattaacggcaaggagctgaaggtggagggccagattacctactacaacagatacaagagacagaacgtagtcaaggacctgtccgtcgagctggatagactgagcgaagaatctgtgaacaacgacatctcctcctggacaaagggcagaagcggagaagctctgagcctcctgaagaaaagattctcccatagacccgtgcaggagaagttcgtgtgcctgaactgcggcttcgagacacacgcagccgagcaagccgccctgaacatcgccagatcctggctgttcctgcggagccaggagtacaagaaataccagacaaacaagacaaccggcaacaccgataagagagccttcgtcgagacctggcagtccttttaccggaagaagcttaaggaggtgtggaaacctgccgtgcggtctggcggatctggcggaggctccaccagccccaagaaaaagagaaaagtctaagctgccttctgcggggcttgccttctggccatgcccttcttctctcccttgcacctgtacctcttggtctttgaataaagcctgagtaggaaggctagcaaaaaaaaaaaaaaaaaaaaaaaaaaaaaaaaaaaaaaaaaaaaaaaaaaaaaaaaaaaaaaaaaaaaaaaaaaaaaaaagcccagccggctccccaacctctaccgaggagggcacctctgagtccgccacccccgagagcggccctggcacctccaccgagcccagcgagggcagcgcacccggcagccctgccggcagccccacctccacagaggagggaaccagcaccgagcccagcgaaggcagcgccccaggcaccagcaccgagcctagtgagcaggagattaaacggatcaacaagatcagaagaagacttgtgaaagacagcaacaccaagaaggccggcaagacaggccccatgaaaaccctgctggttagagtgatgacacccgatctgagagagcggctggaaaacctgagaaagaagcctgaaaatatcccccagcccatcagcaatacatctagagccaacctgaataagctgctgaccgattacaccgaaatgaagaaggcgatcctgcatgtgtactgggaagagttccagaaggaccctgtgggcctgatgagccgggtggcccagcctgccagcaagaagatcgatcagaacaagctgaaacctgagatggacgagaagggcaacctgaccaccgccggctttgcctgctctcagtgtggccagcccctgttcgtgtacaagctggagcaggtgtctgagaagggcaaggcttacaccaactacttcggacggtgcaatgtggccgagcacgaaaagctgatcctgctggcccagctgaagcccgagaaggatagcgacgaagccgtgacatatagcctgggaaagtttgggcagagggccctggatttctacagcattcatgtgaccaaggagtccacccaccccgtgaagcccctggcccagatcgccggaaacagatacgcctccggacctgtgggaaaggccctgagcgacgcatgtatgggcacaatcgcctccttcctgtctaagtaccaggacatcatcatcgaacaccagaaggtggtgaagggcaaccagaagagactggagagcctgcgggagctggccggcaaggaaaacctggaataccctagcgtgaccctgccacctcagcctcacaccaaggagggcgttgatgcctacaacgaagtgatcgcccgggtgcgaatgtgggtgaacctgaacctgtggcagaagctgaagctaagcagagatgatgccaagcctctgctgagactgaagggattcccttcctttcctctggtcgagagacaggccaacgaagtggactggtgggacatggtgtgtaacgtgaagaagctgatcaacgagaaaaaggaggatggcaaggtgttttggcagaatctggctggctacaagagacaggaagccctgagaccatacctgagcagcgaggaagatcggaagaagggaaagaaattcgctcggtaccagctgggcgacctgctgctgcacctggaaaagaagcacggcgaggactggggaaaggtgtacgacgaggcctgggagcggattgacaagaaagtggaaggcctgagcaagcacatcaagctggaagaggaacggagaagcgaggacgcccagagcaaggccgccctgaccgactggctgcgggctaaggccagcttcgtgatcgagggcctgaaggaggccgacaaggacgagttctgcagatgcgagctgaagctgcagaagtggtacggggacctgcggggaaagcccttcgccatcgaagccgagaacagcatcctggacatcagcggcttcagcaagcagtacaactgtgccttcatctggcagaaggacggcgtgaagaagctgaacctgtacctgatcatcaactacttcaagggcggcaagctgcggttcaagaagatcaaacctgaagccttcgaagccaacagattctacaccgtgatcaacaaaaagagcggcgagatcgtgcccatggaggtgaacttcaacttcgacgaccccaacctgatcatcctgcctctggcctttggcaagagacagggcagagaattcatctggaacgacctgctgtccctggaaaccggcagcctgaagctggccaacggaagagtgatcgagaagacactgtacaacagaagaacccggcaggatgagcctgccctgttcgtggccctgaccttcgagcggcgggaggtcctggactcctccaatatcaaaccaatgaacctgatcggcgtggcaagaggcgaaaacatccccgccgtgatcgccctgaccgaccccgagggctgcccactgagccggtttaaggatagcctgggaaacccaacccacatcctgagaatcggcgagagctataaggagaagcagcggaccatccaggccaagaaggaggtggagcagcggagagccggcggctacagccggaagtacgccagcaaagccaagaatctggcagacgatatggtgagaaacaccgctagagatctgctgtactacgccgtgacccaggatgccatgctgatcttcgccaacctgagccggggcttcggccggcagggcaagcggaccttcatggccgagagacagtacacacggatggaggactggctgaccgccaagctggcctacgagggcctgagcaagacctacctgtccaagacactggcccagtacacctccaagacatgcagcaactgtgggtttaccatcaccagcgccgactacgacagggtgctggagaagctgaagaagacagcaacaggctggatgaccacaattaacggcaaggagctgaaggtggagggccagattacctactacaacagatacaagagacagaacgtagtcaaggacctgtccgtcgagctggatagactgagcgaagaatctgtgaacaacgacatctcctcctggacaaagggcagaagcggagaagctctgagcctcctgaagaaaagattctcccatagacccgtgcaggagaagttcgtgtgcctgaactgcggcttcgagacacacgcagccgagcaagccgccctgaacatcgccagatcctggctgttcctgcggagccaggagtacaagaaataccagacaaacaagacaaccggcaacaccgataagagagccttcgtcgagacctggcagtccttttaccggaagaagcttaaggaggtgtggaaacctgccgtgcggtctggcggatctggcggaggctccaccagccccaagaaaaagagaaaagtctaagctgccttctgcggggcttgccttctggccatgcccttcttctctcccttgcacctgtacctcttggtctttgaataaagcctgagtaggaaggctagcaaaaaaaaaaaaaaaaaaaaaaaaaaaaaaaaaaaaaaaaaaaaaaaaaaaaaaaaaaaaaaaaaaaaaaaaaaaaaaaa

SEQ ID NO: 10174 - RNA, 8787 nt, synthetic construct
  source 1..8787: mol_type = other RNA
aggaaataagagagaaaagaagagtaagaagaaatataagagccaccatggcccctaagaagaagcgtaaagtgagccggatgaaccacgaccaggagttcgacccccctaaggtgtaccctcccgtccccgccgagaagagaaagcccatccgggtcctgagcctgttcgatggcatcgccaccggtctgctggtgctgaaggacctgggcatccaggtggataggtacattgcctccgaggtgtgcgaggactccatcaccgtgggaatggtgcgtcatcagggcaagatcatgtacgtgggcgacgtgcggagcgtgacacagaagcatatccaggagtggggccctttcgacctggtgatcggcggcagcccttgcaatgacctgagcatcgtgaacccagcccggaagggcctgtacgagggaaccggcagactgttcttcgagttttacagactgctgcacgacgcccggcctaaggaaggcgacgaccggcccttcttttggctgttcgagaatgtggtggccatgggagtcagcgacaagcgggatattagccggttcctggagagcaaccccgtgatgatcgatgccaaggaagtgagcgccgcccaccgggccagatacttctggggcaatctgcctggcatgaacagacccctggccagcaccgtgaacgacaagctggagctgcaggagtgcctggagcacggccggatcgccaagttcagcaaggtgagaaccatcaccacccgaagcaacagcatcaaacaaggcaaggaccagcactttcctgtgttcatgaacgagaaggaggacatcctgtggtgtaccgagatggagagagtgttcgggttcccagtccactacacagatgtcagcaacatgtctagactggccagacagagactgctgggaagaagctggtccgtccctgtgatcagacacctgttcgcccctctgaaggagtacttcgcctgcgtgagcagcggcaacagcaacgccaacagccggggccccagcttctctagcggcctggtgccactgtccctgagagggagccacatgggccccatggagatctacaaaaccgtgagcgcctggaagcggcagcctgtgcgcgtgctgagcctgtttcggaatatcgataaagtcctgaaaagcctgggattcctggagagcggctctggctccggcggtggcaccctgaagtacgtggaggatgtgacaaacgtggtcagacgggatgtggagaagtggggccccttcgatctggtgtacggcagcacccaacccctgggcagctcttgtgaccggtgccctggctggtacatgtttcagttccaccggatcctgcagtacgccctgccgagacaggagtcccagcggccattcttttggattttcatggacaacttgctgctgaccgaggatgaccaggaaactaccactcggttcctgcagaccgaagccgtgaccctgcaggacgtgagaggccgggactaccagaacgccatgcgggtgtggtccaacatccctggactgaaaagcaagcacgcacctctgacccctaaagaagaggagtacctgcaggcccaggtgcggagcagaagcaagctggacgcccctaaggtggatctgctggtgaagaattgcctcctgcccctgagagagtacttcaagtatttcagccagaatagtctgcccctgggaggcagcggcggcggcagccagcacctggtgaccttcgaggacgtggccgtgaacttcacccaggaggagtggaccctgctggaccagacccagagggacctgtacagggacgtgatgctggagaactaccagaacctgatggccctgggcagcgagagctgcaagccccacgtgaacagccccctggagggcgccgaggagctgaggaccagggccaggaggatcctgcagagcgagttcatggccgagagcgacctgggcggcccaagcagcggcgcccctcctcccagcggcggcaggcggcccaagcagcggcgcccctcctcccagcggcggcagcccagccggctccccaacctctaccgaggagggcacctctgagtccgccacccccgagagcggccctggcacctccaccgagcccagcgagggcagcgcacccggcagccctgccggcagccccacctccacagaggagggaaccagcaccgagcccagcgaaggcagcgccccaggcaccagcaccgagcctagtgagcaggagattaaacggatcaacaagatcagaagaagacttgtgaaagacagcaacaccaagaaggccggcaagacaggccccatgaaaaccctgctggttagagtgatgacacccgatctgagagagcggctggaaaacctgagaaagaagcctgaaaatatcccccagcccatcagcaatacatctagagccaacctgaataagctgctgaccgattacaccgaaatgaagaaggcgatcctgcatgtgtactgggaagagttccagaaggaccctgtgggcctgatgagccgggtggcccagcctgccagcaagaagatcgatcagaacaagctgaaacctgagatggacgagaagggcaacctgaccaccgccggctttgcctgctctcagtgtggccagcccctgttcgtgtacaagctggagcaggtgtctgagaagggcaaggcttacaccaactacttcggacggtgcaatgtggccgagcacgaaaagctgatcctgctggcccagctgaagcccgagaaggatagcgacgaagccgtgacatatagcctgggaaagtttgggcagagggccctggatttctacagcattcatgtgaccaaggagtccacccaccccgtgaagcccctggcccagatcgccggaaacagatacgcctccggacctgtgggaaaggccctgagcgacgcatgtatgggcacaatcgcctccttcctgtctaagtaccaggacatcatcatcgaacaccagaaggtggtgaagggcaaccagaagagactggagagcctgcgggagctggccggcaaggaaaacctggaataccctagcgtgaccctgccacctcagcctcacaccaaggagggcgttgatgcctacaacgaagtgatcgcccgggtgcgaatgtgggtgaacctgaacctgtggcagaagctgaagctaagcagagatgatgccaagcctctgctgagactgaagggattcccttcctttcctctggtcgagagacaggccaacgaagtggactggtgggacatggtgtgtaacgtgaagaagctgatcaacgagaaaaaggaggatggcaaggtgttttggcagaatctggctggctacaagagacaggaagccctgagaccatacctgagcagcgaggaagatcggaagaagggaaagaaattcgctcggtaccagctgggcgacctgctgctgcacctggaaaagaagcacggcgaggactggggaaaggtgtacgacgaggcctgggagcggattgacaagaaagtggaaggcctgagcaagcacatcaagctggaagaggaacggagaagcgaggacgcccagagcaaggccgccctgaccgactggctgcgggctaaggccagcttcgtgatcgagggcctgaaggaggccgacaaggacgagttctgcagatgcgagctgaagctgcagaagtggtacggggacctgcggggaaagcccttcgccatcgaagccgagaacagcatcctggacatcagcggcttcagcaagcagtacaactgtgccttcatctggcagaaggacggcgtgaagaagctgaacctgtacctgatcatcaactacttcaagggcggcaagctgcggttcaagaagatcaaacctgaagccttcgaagccaacagattctacaccgtgatcaacaaaaagagcggcgagatcgtgcccatggaggtgaacttcaacttcgacgaccccaacctgatcatcctgcctctggcctttggcaagagacagggcagagaattcatctggaacgacctgctgtccctggaaaccggcagcctgaagctggccaacggaagagtgatcgagaagacactgtacaacagaagaacccggcaggatgagcctgccctgttcgtggccctgaccttcgagcggcgggaggtcctggactcctccaatatcaaaccaatgaacctgatcggcgtggcaagaggcgaaaacatccccgccgtgatcgccctgaccgaccccgagggctgcccactgagccggtttaaggatagcctgggaaacccaacccacatcctgagaatcggcgagagctataaggagaagcagcggaccatccaggccaagaaggaggtggagcagcggagagccggcggctacagccggaagtacgccagcaaagccaagaatctggcagacgatatggtgagaaacaccgctagagatctgctgtactacgccgtgacccaggatgccatgctgatcttcgccaacctgagccggggcttcggccggcagggcaagcggaccttcatggccgagagacagtacacacggatggaggactggctgaccgccaagctggcctacgagggcctgagcaagacctacctgtccaagacactggcccagtacacctccaagacatgcagcaactgtgggtttaccatcaccagcgccgactacgacagggtgctggagaagctgaagaagacagcaacaggctggatgaccacaattaacggcaaggagctgaaggtggagggccagattacctactacaacagatacaagagacagaacgtagtcaaggacctgtccgtcgagctggatagactgagcgaagaatctgtgaacaacgacatctcctcctggacaaagggcagaagcggagaagctctgagcctcctgaagaaaagattctcccatagacccgtgcaggagaagttcgtgtgcctgaactgcggcttcgagacacacgcagccgagcaagccgccctgaacatcgccagatcctggctgttcctgcggagccaggagtacaagaaataccagacaaacaagacaaccggcaacaccgataagagagccttcgtcgagacctggcagtccttttaccggaagaagcttaaggaggtgtggaaacctgccgtgcggtctggcggatctggcggaggctccaccagccccaagaaaaagagaaaagtctaagctgccttctgcggggcttgccttctggccatgcccttcttctctcccttgcacctgtacctcttggtctttgaataaagcctgagtaggaaggctagcaaaaaaaaaaaaaaaaaaaaaaaaaaaaaaaaaaaaaaaaaaaaaaaaaaaaaaaaaaaaaaaaaaaaaaaaaaaaaaaagcccagccggctccccaacctctaccgaggagggcacctctgagtccgccacccccgagagcggccctggcacctccaccgagcccagcgagggcagcgcacccggcagccctgccggcagccccacctccacagaggagggaaccagcaccgagcccagcgaaggcagcgccccaggcaccagcaccgagcctagtgagcaggagattaaacggatcaacaagatcagaagaagacttgtgaaagacagcaacaccaagaaggccggcaagacaggccccatgaaaaccctgctggttagagtgatgacacccgatctgagagagcggctggaaaacctgagaaagaagcctgaaaatatcccccagcccatcagcaatacatctagagccaacctgaataagctgctgaccgattacaccgaaatgaagaaggcgatcctgcatgtgtactgggaagagttccagaaggaccctgtgggcctgatgagccgggtggcccagcctgccagcaagaagatcgatcagaacaagctgaaacctgagatggacgagaagggcaacctgaccaccgccggctttgcctgctctcagtgtggccagcccctgttcgtgtacaagctggagcaggtgtctgagaagggcaaggcttacaccaactacttcggacggtgcaatgtggccgagcacgaaaagctgatcctgctggcccagctgaagcccgagaaggatagcgacgaagccgtgacatatagcctgggaaagtttgggcagagggccctggatttctacagcattcatgtgaccaaggagtccacccaccccgtgaagcccctggcccagatcgccggaaacagatacgcctccggacctgtgggaaaggccctgagcgacgcatgtatgggcacaatcgcctccttcctgtctaagtaccaggacatcatcatcgaacaccagaaggtggtgaagggcaaccagaagagactggagagcctgcgggagctggccggcaaggaaaacctggaataccctagcgtgaccctgccacctcagcctcacaccaaggagggcgttgatgcctacaacgaagtgatcgcccgggtgcgaatgtgggtgaacctgaacctgtggcagaagctgaagctaagcagagatgatgccaagcctctgctgagactgaagggattcccttcctttcctctggtcgagagacaggccaacgaagtggactggtgggacatggtgtgtaacgtgaagaagctgatcaacgagaaaaaggaggatggcaaggtgttttggcagaatctggctggctacaagagacaggaagccctgagaccatacctgagcagcgaggaagatcggaagaagggaaagaaattcgctcggtaccagctgggcgacctgctgctgcacctggaaaagaagcacggcgaggactggggaaaggtgtacgacgaggcctgggagcggattgacaagaaagtggaaggcctgagcaagcacatcaagctggaagaggaacggagaagcgaggacgcccagagcaaggccgccctgaccgactggctgcgggctaaggccagcttcgtgatcgagggcctgaaggaggccgacaaggacgagttctgcagatgcgagctgaagctgcagaagtggtacggggacctgcggggaaagcccttcgccatcgaagccgagaacagcatcctggacatcagcggcttcagcaagcagtacaactgtgccttcatctggcagaaggacggcgtgaagaagctgaacctgtacctgatcatcaactacttcaagggcggcaagctgcggttcaagaagatcaaacctgaagccttcgaagccaacagattctacaccgtgatcaacaaaaagagcggcgagatcgtgcccatggaggtgaacttcaacttcgacgaccccaacctgatcatcctgcctctggcctttggcaagagacagggcagagaattcatctggaacgacctgctgtccctggaaaccggcagcctgaagctggccaacggaagagtgatcgagaagacactgtacaacagaagaacccggcaggatgagcctgccctgttcgtggccctgaccttcgagcggcgggaggtcctggactcctccaatatcaaaccaatgaacctgatcggcgtggcaagaggcgaaaacatccccgccgtgatcgccctgaccgaccccgagggctgcccactgagccggtttaaggatagcctgggaaacccaacccacatcctgagaatcggcgagagctataaggagaagcagcggaccatccaggccaagaaggaggtggagcagcggagagccggcggctacagccggaagtacgccagcaaagccaagaatctggcagacgatatggtgagaaacaccgctagagatctgctgtactacgccgtgacccaggatgccatgctgatcttcgccaacctgagccggggcttcggccggcagggcaagcggaccttcatggccgagagacagtacacacggatggaggactggctgaccgccaagctggcctacgagggcctgagcaagacctacctgtccaagacactggcccagtacacctccaagacatgcagcaactgtgggtttaccatcaccagcgccgactacgacagggtgctggagaagctgaagaagacagcaacaggctggatgaccacaattaacggcaaggagctgaaggtggagggccagattacctactacaacagatacaagagacagaacgtagtcaaggacctgtccgtcgagctggatagactgagcgaagaatctgtgaacaacgacatctcctcctggacaaagggcagaagcggagaagctctgagcctcctgaagaaaagattctcccatagacccgtgcaggagaagttcgtgtgcctgaactgcggcttcgagacacacgcagccgagcaagccgccctgaacatcgccagatcctggctgttcctgcggagccaggagtacaagaaataccagacaaacaagacaaccggcaacaccgataagagagccttcgtcgagacctggcagtccttttaccggaagaagcttaaggaggtgtggaaacctgccgtgcggtctggcggatctggcggaggctccaccagccccaagaaaaagagaaaagtctaagctgccttctgcggggcttgccttctggccatgcccttcttctctcccttgcacctgtacctcttggtctttgaataaagcctgagtaggaaggctagcaaaaaaaaaaaaaaaaaaaaaaaaaaaaaaaaaaaaaaaaaaaaaaaaaaaaaaaaaaaaaaaaaaaaaaaaaaaaaaaa

SEQ ID NO: 10175 - RNA, 8787 nt, synthetic construct
  source 1..8787: mol_type = other RNA
aggaaataagagagaaaagaagagtaagaagaaatataagagccaccatggcccctaagaagaagcgtaaagtgagccggatgaaccacgaccaggagttcgacccccctaaggtgtaccctcccgtccccgccgagaagagaaagcccatccgggtcctgagcctgttcgatggcatcgccaccggtctgctggtgctgaaggacctgggcatccaggtggataggtacattgcctccgaggtgtgcgaggactccatcaccgtgggaatggtgcgtcatcagggcaagatcatgtacgtgggcgacgtgcggagcgtgacacagaagcatatccaggagtggggccctttcgacctggtgatcggcggcagcccttgcaatgacctgagcatcgtgaacccagcccggaagggcctgtacgagggaaccggcagactgttcttcgagttttacagactgctgcacgacgcccggcctaaggaaggcgacgaccggcccttcttttggctgttcgagaatgtggtggccatgggagtcagcgacaagcgggatattagccggttcctggagagcaaccccgtgatgatcgatgccaaggaagtgagcgccgcccaccgggccagatacttctggggcaatctgcctggcatgaacagacccctggccagcaccgtgaacgacaagctggagctgcaggagtgcctggagcacggccggatcgccaagttcagcaaggtgagaaccatcaccacccgaagcaacagcatcaaacaaggcaaggaccagcactttcctgtgttcatgaacgagaaggaggacatcctgtggtgtaccgagatggagagagtgttcgggttcccagtccactacacagatgtcagcaacatgtctagactggccagacagagactgctgggaagaagctggtccgtccctgtgatcagacacctgttcgcccctctgaaggagtacttcgcctgcgtgagcagcggcaacagcaacgccaacagccggggccccagcttctctagcggcctggtgccactgtccctgagagggagccacatgggccccatggagatctacaaaaccgtgagcgcctggaagcggcagcctgtgcgcgtgctgagcctgtttcggaatatcgataaagtcctgaaaagcctgggattcctggagagcggctctggctccggcggtggcaccctgaagtacgtggaggatgtgacaaacgtggtcagacgggatgtggagaagtggggccccttcgatctggtgtacggcagcacccaacccctgggcagctcttgtgaccggtgccctggctggtacatgtttcagttccaccggatcctgcagtacgccctgccgagacaggagtcccagcggccattcttttggattttcatggacaacttgctgctgaccgaggatgaccaggaaactaccactcggttcctgcagaccgaagccgtgaccctgcaggacgtgagaggccgggactaccagaacgccatgcgggtgtggtccaacatccctggactgaaaagcaagcacgcacctctgacccctaaagaagaggagtacctgcaggcccaggtgcggagcagaagcaagctggacgcccctaaggtggatctgctggtgaagaattgcctcctgcccctgagagagtacttcaagtatttcagccagaatagtctgcccctgggaggcagcggcggcggcatgggcctgctgaccttcagggacgtggccatcgagttcagcctggaggagtggcagtgcctggacaccgcccagaagaacctgtacaggaacgtgatgctggagaactacaggaacctggccttcctgggcatcgccgtgagcaagcccgacctgatcatctgcctggagaaggagaaggagccctggaacatgaagaggcacgagatggtggacgagccccccggcctggccgtgagcaacggcggcccaagcagcggcgcccctcctcccagcggcggcaggcggcccaagcagcggcgcccctcctcccagcggcggcagcccagccggctccccaacctctaccgaggagggcacctctgagtccgccacccccgagagcggccctggcacctccaccgagcccagcgagggcagcgcacccggcagccctgccggcagccccacctccacagaggagggaaccagcaccgagcccagcgaaggcagcgccccaggcaccagcaccgagcctagtgagcaggagattaaacggatcaacaagatcagaagaagacttgtgaaagacagcaacaccaagaaggccggcaagacaggccccatgaaaaccctgctggttagagtgatgacacccgatctgagagagcggctggaaaacctgagaaagaagcctgaaaatatcccccagcccatcagcaatacatctagagccaacctgaataagctgctgaccgattacaccgaaatgaagaaggcgatcctgcatgtgtactgggaagagttccagaaggaccctgtgggcctgatgagccgggtggcccagcctgccagcaagaagatcgatcagaacaagctgaaacctgagatggacgagaagggcaacctgaccaccgccggctttgcctgctctcagtgtggccagcccctgttcgtgtacaagctggagcaggtgtctgagaagggcaaggcttacaccaactacttcggacggtgcaatgtggccgagcacgaaaagctgatcctgctggcccagctgaagcccgagaaggatagcgacgaagccgtgacatatagcctgggaaagtttgggcagagggccctggatttctacagcattcatgtgaccaaggagtccacccaccccgtgaagcccctggcccagatcgccggaaacagatacgcctccggacctgtgggaaaggccctgagcgacgcatgtatgggcacaatcgcctccttcctgtctaagtaccaggacatcatcatcgaacaccagaaggtggtgaagggcaaccagaagagactggagagcctgcgggagctggccggcaaggaaaacctggaataccctagcgtgaccctgccacctcagcctcacaccaaggagggcgttgatgcctacaacgaagtgatcgcccgggtgcgaatgtgggtgaacctgaacctgtggcagaagctgaagctaagcagagatgatgccaagcctctgctgagactgaagggattcccttcctttcctctggtcgagagacaggccaacgaagtggactggtgggacatggtgtgtaacgtgaagaagctgatcaacgagaaaaaggaggatggcaaggtgttttggcagaatctggctggctacaagagacaggaagccctgagaccatacctgagcagcgaggaagatcggaagaagggaaagaaattcgctcggtaccagctgggcgacctgctgctgcacctggaaaagaagcacggcgaggactggggaaaggtgtacgacgaggcctgggagcggattgacaagaaagtggaaggcctgagcaagcacatcaagctggaagaggaacggagaagcgaggacgcccagagcaaggccgccctgaccgactggctgcgggctaaggccagcttcgtgatcgagggcctgaaggaggccgacaaggacgagttctgcagatgcgagctgaagctgcagaagtggtacggggacctgcggggaaagcccttcgccatcgaagccgagaacagcatcctggacatcagcggcttcagcaagcagtacaactgtgccttcatctggcagaaggacggcgtgaagaagctgaacctgtacctgatcatcaactacttcaagggcggcaagctgcggttcaagaagatcaaacctgaagccttcgaagccaacagattctacaccgtgatcaacaaaaagagcggcgagatcgtgcccatggaggtgaacttcaacttcgacgaccccaacctgatcatcctgcctctggcctttggcaagagacagggcagagaattcatctggaacgacctgctgtccctggaaaccggcagcctgaagctggccaacggaagagtgatcgagaagacactgtacaacagaagaacccggcaggatgagcctgccctgttcgtggccctgaccttcgagcggcgggaggtcctggactcctccaatatcaaaccaatgaacctgatcggcgtggcaagaggcgaaaacatccccgccgtgatcgccctgaccgaccccgagggctgcccactgagccggtttaaggatagcctgggaaacccaacccacatcctgagaatcggcgagagctataaggagaagcagcggaccatccaggccaagaaggaggtggagcagcggagagccggcggctacagccggaagtacgccagcaaagccaagaatctggcagacgatatggtgagaaacaccgctagagatctgctgtactacgccgtgacccaggatgccatgctgatcttcgccaacctgagccggggcttcggccggcagggcaagcggaccttcatggccgagagacagtacacacggatggaggactggctgaccgccaagctggcctacgagggcctgagcaagacctacctgtccaagacactggcccagtacacctccaagacatgcagcaactgtgggtttaccatcaccagcgccgactacgacagggtgctggagaagctgaagaagacagcaacaggctggatgaccacaattaacggcaaggagctgaaggtggagggccagattacctactacaacagatacaagagacagaacgtagtcaaggacctgtccgtcgagctggatagactgagcgaagaatctgtgaacaacgacatctcctcctggacaaagggcagaagcggagaagctctgagcctcctgaagaaaagattctcccatagacccgtgcaggagaagttcgtgtgcctgaactgcggcttcgagacacacgcagccgagcaagccgccctgaacatcgccagatcctggctgttcctgcggagccaggagtacaagaaataccagacaaacaagacaaccggcaacaccgataagagagccttcgtcgagacctggcagtccttttaccggaagaagcttaaggaggtgtggaaacctgccgtgcggtctggcggatctggcggaggctccaccagccccaagaaaaagagaaaagtctaagctgccttctgcggggcttgccttctggccatgcccttcttctctcccttgcacctgtacctcttggtctttgaataaagcctgagtaggaaggctagcaaaaaaaaaaaaaaaaaaaaaaaaaaaaaaaaaaaaaaaaaaaaaaaaaaaaaaaaaaaaaaaaaaaaaaaaaaaaaaaagcccagccggctccccaacctctaccgaggagggcacctctgagtccgccacccccgagagcggccctggcacctccaccgagcccagcgagggcagcgcacccggcagccctgccggcagccccacctccacagaggagggaaccagcaccgagcccagcgaaggcagcgccccaggcaccagcaccgagcctagtgagcaggagattaaacggatcaacaagatcagaagaagacttgtgaaagacagcaacaccaagaaggccggcaagacaggccccatgaaaaccctgctggttagagtgatgacacccgatctgagagagcggctggaaaacctgagaaagaagcctgaaaatatcccccagcccatcagcaatacatctagagccaacctgaataagctgctgaccgattacaccgaaatgaagaaggcgatcctgcatgtgtactgggaagagttccagaaggaccctgtgggcctgatgagccgggtggcccagcctgccagcaagaagatcgatcagaacaagctgaaacctgagatggacgagaagggcaacctgaccaccgccggctttgcctgctctcagtgtggccagcccctgttcgtgtacaagctggagcaggtgtctgagaagggcaaggcttacaccaactacttcggacggtgcaatgtggccgagcacgaaaagctgatcctgctggcccagctgaagcccgagaaggatagcgacgaagccgtgacatatagcctgggaaagtttgggcagagggccctggatttctacagcattcatgtgaccaaggagtccacccaccccgtgaagcccctggcccagatcgccggaaacagatacgcctccggacctgtgggaaaggccctgagcgacgcatgtatgggcacaatcgcctccttcctgtctaagtaccaggacatcatcatcgaacaccagaaggtggtgaagggcaaccagaagagactggagagcctgcgggagctggccggcaaggaaaacctggaataccctagcgtgaccctgccacctcagcctcacaccaaggagggcgttgatgcctacaacgaagtgatcgcccgggtgcgaatgtgggtgaacctgaacctgtggcagaagctgaagctaagcagagatgatgccaagcctctgctgagactgaagggattcccttcctttcctctggtcgagagacaggccaacgaagtggactggtgggacatggtgtgtaacgtgaagaagctgatcaacgagaaaaaggaggatggcaaggtgttttggcagaatctggctggctacaagagacaggaagccctgagaccatacctgagcagcgaggaagatcggaagaagggaaagaaattcgctcggtaccagctgggcgacctgctgctgcacctggaaaagaagcacggcgaggactggggaaaggtgtacgacgaggcctgggagcggattgacaagaaagtggaaggcctgagcaagcacatcaagctggaagaggaacggagaagcgaggacgcccagagcaaggccgccctgaccgactggctgcgggctaaggccagcttcgtgatcgagggcctgaaggaggccgacaaggacgagttctgcagatgcgagctgaagctgcagaagtggtacggggacctgcggggaaagcccttcgccatcgaagccgagaacagcatcctggacatcagcggcttcagcaagcagtacaactgtgccttcatctggcagaaggacggcgtgaagaagctgaacctgtacctgatcatcaactacttcaagggcggcaagctgcggttcaagaagatcaaacctgaagccttcgaagccaacagattctacaccgtgatcaacaaaaagagcggcgagatcgtgcccatggaggtgaacttcaacttcgacgaccccaacctgatcatcctgcctctggcctttggcaagagacagggcagagaattcatctggaacgacctgctgtccctggaaaccggcagcctgaagctggccaacggaagagtgatcgagaagacactgtacaacagaagaacccggcaggatgagcctgccctgttcgtggccctgaccttcgagcggcgggaggtcctggactcctccaatatcaaaccaatgaacctgatcggcgtggcaagaggcgaaaacatccccgccgtgatcgccctgaccgaccccgagggctgcccactgagccggtttaaggatagcctgggaaacccaacccacatcctgagaatcggcgagagctataaggagaagcagcggaccatccaggccaagaaggaggtggagcagcggagagccggcggctacagccggaagtacgccagcaaagccaagaatctggcagacgatatggtgagaaacaccgctagagatctgctgtactacgccgtgacccaggatgccatgctgatcttcgccaacctgagccggggcttcggccggcagggcaagcggaccttcatggccgagagacagtacacacggatggaggactggctgaccgccaagctggcctacgagggcctgagcaagacctacctgtccaagacactggcccagtacacctccaagacatgcagcaactgtgggtttaccatcaccagcgccgactacgacagggtgctggagaagctgaagaagacagcaacaggctggatgaccacaattaacggcaaggagctgaaggtggagggccagattacctactacaacagatacaagagacagaacgtagtcaaggacctgtccgtcgagctggatagactgagcgaagaatctgtgaacaacgacatctcctcctggacaaagggcagaagcggagaagctctgagcctcctgaagaaaagattctcccatagacccgtgcaggagaagttcgtgtgcctgaactgcggcttcgagacacacgcagccgagcaagccgccctgaacatcgccagatcctggctgttcctgcggagccaggagtacaagaaataccagacaaacaagacaaccggcaacaccgataagagagccttcgtcgagacctggcagtccttttaccggaagaagcttaaggaggtgtggaaacctgccgtgcggtctggcggatctggcggaggctccaccagccccaagaaaaagagaaaagtctaagctgccttctgcggggcttgccttctggccatgcccttcttctctcccttgcacctgtacctcttggtctttgaataaagcctgagtaggaaggctagcaaaaaaaaaaaaaaaaaaaaaaaaaaaaaaaaaaaaaaaaaaaaaaaaaaaaaaaaaaaaaaaaaaaaaaaaaaaaaaaa

SEQ ID NO: 10176 - RNA, 8787 nt, synthetic construct
  source 1..8787: mol_type = other RNA
aggaaataagagagaaaagaagagtaagaagaaatataagagccaccatggcccctaagaagaagcgtaaagtgagccggatgaaccacgaccaggagttcgacccccctaaggtgtaccctcccgtccccgccgagaagagaaagcccatccgggtcctgagcctgttcgatggcatcgccaccggtctgctggtgctgaaggacctgggcatccaggtggataggtacattgcctccgaggtgtgcgaggactccatcaccgtgggaatggtgcgtcatcagggcaagatcatgtacgtgggcgacgtgcggagcgtgacacagaagcatatccaggagtggggccctttcgacctggtgatcggcggcagcccttgcaatgacctgagcatcgtgaacccagcccggaagggcctgtacgagggaaccggcagactgttcttcgagttttacagactgctgcacgacgcccggcctaaggaaggcgacgaccggcccttcttttggctgttcgagaatgtggtggccatgggagtcagcgacaagcgggatattagccggttcctggagagcaaccccgtgatgatcgatgccaaggaagtgagcgccgcccaccgggccagatacttctggggcaatctgcctggcatgaacagacccctggccagcaccgtgaacgacaagctggagctgcaggagtgcctggagcacggccggatcgccaagttcagcaaggtgagaaccatcaccacccgaagcaacagcatcaaacaaggcaaggaccagcactttcctgtgttcatgaacgagaaggaggacatcctgtggtgtaccgagatggagagagtgttcgggttcccagtccactacacagatgtcagcaacatgtctagactggccagacagagactgctgggaagaagctggtccgtccctgtgatcagacacctgttcgcccctctgaaggagtacttcgcctgcgtgagcagcggcaacagcaacgccaacagccggggccccagcttctctagcggcctggtgccactgtccctgagagggagccacatgggccccatggagatctacaaaaccgtgagcgcctggaagcggcagcctgtgcgcgtgctgagcctgtttcggaatatcgataaagtcctgaaaagcctgggattcctggagagcggctctggctccggcggtggcaccctgaagtacgtggaggatgtgacaaacgtggtcagacgggatgtggagaagtggggccccttcgatctggtgtacggcagcacccaacccctgggcagctcttgtgaccggtgccctggctggtacatgtttcagttccaccggatcctgcagtacgccctgccgagacaggagtcccagcggccattcttttggattttcatggacaacttgctgctgaccgaggatgaccaggaaactaccactcggttcctgcagaccgaagccgtgaccctgcaggacgtgagaggccgggactaccagaacgccatgcgggtgtggtccaacatccctggactgaaaagcaagcacgcacctctgacccctaaagaagaggagtacctgcaggcccaggtgcggagcagaagcaagctggacgcccctaaggtggatctgctggtgaagaattgcctcctgcccctgagagagtacttcaagtatttcagccagaatagtctgcccctgggaggcagcggcggcggcatggccgccctgttcctgagcgccccccaccaggccaaggtgaccttcgaggacgtggccgtgtacctgagcagggaggagtggggcaggctgggccccgcccagaggggcctgtacagggacgtgatgctggagacctacggcaacctggtgagcctgggcgtgggccccgccggccccaagcccggcgtgatcagccagctggagaggggcgacgagccctgggtgctggacgtgcagggcggcggcccaagcagcggcgcccctcctcccagcggcggcaggcggcccaagcagcggcgcccctcctcccagcggcggcagcccagccggctccccaacctctaccgaggagggcacctctgagtccgccacccccgagagcggccctggcacctccaccgagcccagcgagggcagcgcacccggcagccctgccggcagccccacctccacagaggagggaaccagcaccgagcccagcgaaggcagcgccccaggcaccagcaccgagcctagtgagcaggagattaaacggatcaacaagatcagaagaagacttgtgaaagacagcaacaccaagaaggccggcaagacaggccccatgaaaaccctgctggttagagtgatgacacccgatctgagagagcggctggaaaacctgagaaagaagcctgaaaatatcccccagcccatcagcaatacatctagagccaacctgaataagctgctgaccgattacaccgaaatgaagaaggcgatcctgcatgtgtactgggaagagttccagaaggaccctgtgggcctgatgagccgggtggcccagcctgccagcaagaagatcgatcagaacaagctgaaacctgagatggacgagaagggcaacctgaccaccgccggctttgcctgctctcagtgtggccagcccctgttcgtgtacaagctggagcaggtgtctgagaagggcaaggcttacaccaactacttcggacggtgcaatgtggccgagcacgaaaagctgatcctgctggcccagctgaagcccgagaaggatagcgacgaagccgtgacatatagcctgggaaagtttgggcagagggccctggatttctacagcattcatgtgaccaaggagtccacccaccccgtgaagcccctggcccagatcgccggaaacagatacgcctccggacctgtgggaaaggccctgagcgacgcatgtatgggcacaatcgcctccttcctgtctaagtaccaggacatcatcatcgaacaccagaaggtggtgaagggcaaccagaagagactggagagcctgcgggagctggccggcaaggaaaacctggaataccctagcgtgaccctgccacctcagcctcacaccaaggagggcgttgatgcctacaacgaagtgatcgcccgggtgcgaatgtgggtgaacctgaacctgtggcagaagctgaagctaagcagagatgatgccaagcctctgctgagactgaagggattcccttcctttcctctggtcgagagacaggccaacgaagtggactggtgggacatggtgtgtaacgtgaagaagctgatcaacgagaaaaaggaggatggcaaggtgttttggcagaatctggctggctacaagagacaggaagccctgagaccatacctgagcagcgaggaagatcggaagaagggaaagaaattcgctcggtaccagctgggcgacctgctgctgcacctggaaaagaagcacggcgaggactggggaaaggtgtacgacgaggcctgggagcggattgacaagaaagtggaaggcctgagcaagcacatcaagctggaagaggaacggagaagcgaggacgcccagagcaaggccgccctgaccgactggctgcgggctaaggccagcttcgtgatcgagggcctgaaggaggccgacaaggacgagttctgcagatgcgagctgaagctgcagaagtggtacggggacctgcggggaaagcccttcgccatcgaagccgagaacagcatcctggacatcagcggcttcagcaagcagtacaactgtgccttcatctggcagaaggacggcgtgaagaagctgaacctgtacctgatcatcaactacttcaagggcggcaagctgcggttcaagaagatcaaacctgaagccttcgaagccaacagattctacaccgtgatcaacaaaaagagcggcgagatcgtgcccatggaggtgaacttcaacttcgacgaccccaacctgatcatcctgcctctggcctttggcaagagacagggcagagaattcatctggaacgacctgctgtccctggaaaccggcagcctgaagctggccaacggaagagtgatcgagaagacactgtacaacagaagaacccggcaggatgagcctgccctgttcgtggccctgaccttcgagcggcgggaggtcctggactcctccaatatcaaaccaatgaacctgatcggcgtggcaagaggcgaaaacatccccgccgtgatcgccctgaccgaccccgagggctgcccactgagccggtttaaggatagcctgggaaacccaacccacatcctgagaatcggcgagagctataaggagaagcagcggaccatccaggccaagaaggaggtggagcagcggagagccggcggctacagccggaagtacgccagcaaagccaagaatctggcagacgatatggtgagaaacaccgctagagatctgctgtactacgccgtgacccaggatgccatgctgatcttcgccaacctgagccggggcttcggccggcagggcaagcggaccttcatggccgagagacagtacacacggatggaggactggctgaccgccaagctggcctacgagggcctgagcaagacctacctgtccaagacactggcccagtacacctccaagacatgcagcaactgtgggtttaccatcaccagcgccgactacgacagggtgctggagaagctgaagaagacagcaacaggctggatgaccacaattaacggcaaggagctgaaggtggagggccagattacctactacaacagatacaagagacagaacgtagtcaaggacctgtccgtcgagctggatagactgagcgaagaatctgtgaacaacgacatctcctcctggacaaagggcagaagcggagaagctctgagcctcctgaagaaaagattctcccatagacccgtgcaggagaagttcgtgtgcctgaactgcggcttcgagacacacgcagccgagcaagccgccctgaacatcgccagatcctggctgttcctgcggagccaggagtacaagaaataccagacaaacaagacaaccggcaacaccgataagagagccttcgtcgagacctggcagtccttttaccggaagaagcttaaggaggtgtggaaacctgccgtgcggtctggcggatctggcggaggctccaccagccccaagaaaaagagaaaagtctaagctgccttctgcggggcttgccttctggccatgcccttcttctctcccttgcacctgtacctcttggtctttgaataaagcctgagtaggaaggctagcaaaaaaaaaaaaaaaaaaaaaaaaaaaaaaaaaaaaaaaaaaaaaaaaaaaaaaaaaaaaaaaaaaaaaaaaaaaaaaaagcccagccggctccccaacctctaccgaggagggcacctctgagtccgccacccccgagagcggccctggcacctccaccgagcccagcgagggcagcgcacccggcagccctgccggcagccccacctccacagaggagggaaccagcaccgagcccagcgaaggcagcgccccaggcaccagcaccgagcctagtgagcaggagattaaacggatcaacaagatcagaagaagacttgtgaaagacagcaacaccaagaaggccggcaagacaggccccatgaaaaccctgctggttagagtgatgacacccgatctgagagagcggctggaaaacctgagaaagaagcctgaaaatatcccccagcccatcagcaatacatctagagccaacctgaataagctgctgaccgattacaccgaaatgaagaaggcgatcctgcatgtgtactgggaagagttccagaaggaccctgtgggcctgatgagccgggtggcccagcctgccagcaagaagatcgatcagaacaagctgaaacctgagatggacgagaagggcaacctgaccaccgccggctttgcctgctctcagtgtggccagcccctgttcgtgtacaagctggagcaggtgtctgagaagggcaaggcttacaccaactacttcggacggtgcaatgtggccgagcacgaaaagctgatcctgctggcccagctgaagcccgagaaggatagcgacgaagccgtgacatatagcctgggaaagtttgggcagagggccctggatttctacagcattcatgtgaccaaggagtccacccaccccgtgaagcccctggcccagatcgccggaaacagatacgcctccggacctgtgggaaaggccctgagcgacgcatgtatgggcacaatcgcctccttcctgtctaagtaccaggacatcatcatcgaacaccagaaggtggtgaagggcaaccagaagagactggagagcctgcgggagctggccggcaaggaaaacctggaataccctagcgtgaccctgccacctcagcctcacaccaaggagggcgttgatgcctacaacgaagtgatcgcccgggtgcgaatgtgggtgaacctgaacctgtggcagaagctgaagctaagcagagatgatgccaagcctctgctgagactgaagggattcccttcctttcctctggtcgagagacaggccaacgaagtggactggtgggacatggtgtgtaacgtgaagaagctgatcaacgagaaaaaggaggatggcaaggtgttttggcagaatctggctggctacaagagacaggaagccctgagaccatacctgagcagcgaggaagatcggaagaagggaaagaaattcgctcggtaccagctgggcgacctgctgctgcacctggaaaagaagcacggcgaggactggggaaaggtgtacgacgaggcctgggagcggattgacaagaaagtggaaggcctgagcaagcacatcaagctggaagaggaacggagaagcgaggacgcccagagcaaggccgccctgaccgactggctgcgggctaaggccagcttcgtgatcgagggcctgaaggaggccgacaaggacgagttctgcagatgcgagctgaagctgcagaagtggtacggggacctgcggggaaagcccttcgccatcgaagccgagaacagcatcctggacatcagcggcttcagcaagcagtacaactgtgccttcatctggcagaaggacggcgtgaagaagctgaacctgtacctgatcatcaactacttcaagggcggcaagctgcggttcaagaagatcaaacctgaagccttcgaagccaacagattctacaccgtgatcaacaaaaagagcggcgagatcgtgcccatggaggtgaacttcaacttcgacgaccccaacctgatcatcctgcctctggcctttggcaagagacagggcagagaattcatctggaacgacctgctgtccctggaaaccggcagcctgaagctggccaacggaagagtgatcgagaagacactgtacaacagaagaacccggcaggatgagcctgccctgttcgtggccctgaccttcgagcggcgggaggtcctggactcctccaatatcaaaccaatgaacctgatcggcgtggcaagaggcgaaaacatccccgccgtgatcgccctgaccgaccccgagggctgcccactgagccggtttaaggatagcctgggaaacccaacccacatcctgagaatcggcgagagctataaggagaagcagcggaccatccaggccaagaaggaggtggagcagcggagagccggcggctacagccggaagtacgccagcaaagccaagaatctggcagacgatatggtgagaaacaccgctagagatctgctgtactacgccgtgacccaggatgccatgctgatcttcgccaacctgagccggggcttcggccggcagggcaagcggaccttcatggccgagagacagtacacacggatggaggactggctgaccgccaagctggcctacgagggcctgagcaagacctacctgtccaagacactggcccagtacacctccaagacatgcagcaactgtgggtttaccatcaccagcgccgactacgacagggtgctggagaagctgaagaagacagcaacaggctggatgaccacaattaacggcaaggagctgaaggtggagggccagattacctactacaacagatacaagagacagaacgtagtcaaggacctgtccgtcgagctggatagactgagcgaagaatctgtgaacaacgacatctcctcctggacaaagggcagaagcggagaagctctgagcctcctgaagaaaagattctcccatagacccgtgcaggagaagttcgtgtgcctgaactgcggcttcgagacacacgcagccgagcaagccgccctgaacatcgccagatcctggctgttcctgcggagccaggagtacaagaaataccagacaaacaagacaaccggcaacaccgataagagagccttcgtcgagacctggcagtccttttaccggaagaagcttaaggaggtgtggaaacctgccgtgcggtctggcggatctggcggaggctccaccagccccaagaaaaagagaaaagtctaagctgccttctgcggggcttgccttctggccatgcccttcttctctcccttgcacctgtacctcttggtctttgaataaagcctgagtaggaaggctagcaaaaaaaaaaaaaaaaaaaaaaaaaaaaaaaaaaaaaaaaaaaaaaaaaaaaaaaaaaaaaaaaaaaaaaaaaaaaaaaa

SEQ ID NO: 10177 - RNA, 8787 nt, synthetic construct
  source 1..8787: mol_type = other RNA
aggaaataagagagaaaagaagagtaagaagaaatataagagccaccatggcccctaagaagaagcgtaaagtgagccggatgaaccacgaccaggagttcgacccccctaaggtgtaccctcccgtccccgccgagaagagaaagcccatccgggtcctgagcctgttcgatggcatcgccaccggtctgctggtgctgaaggacctgggcatccaggtggataggtacattgcctccgaggtgtgcgaggactccatcaccgtgggaatggtgcgtcatcagggcaagatcatgtacgtgggcgacgtgcggagcgtgacacagaagcatatccaggagtggggccctttcgacctggtgatcggcggcagcccttgcaatgacctgagcatcgtgaacccagcccggaagggcctgtacgagggaaccggcagactgttcttcgagttttacagactgctgcacgacgcccggcctaaggaaggcgacgaccggcccttcttttggctgttcgagaatgtggtggccatgggagtcagcgacaagcgggatattagccggttcctggagagcaaccccgtgatgatcgatgccaaggaagtgagcgccgcccaccgggccagatacttctggggcaatctgcctggcatgaacagacccctggccagcaccgtgaacgacaagctggagctgcaggagtgcctggagcacggccggatcgccaagttcagcaaggtgagaaccatcaccacccgaagcaacagcatcaaacaaggcaaggaccagcactttcctgtgttcatgaacgagaaggaggacatcctgtggtgtaccgagatggagagagtgttcgggttcccagtccactacacagatgtcagcaacatgtctagactggccagacagagactgctgggaagaagctggtccgtccctgtgatcagacacctgttcgcccctctgaaggagtacttcgcctgcgtgagcagcggcaacagcaacgccaacagccggggccccagcttctctagcggcctggtgccactgtccctgagagggagccacatgggccccatggagatctacaaaaccgtgagcgcctggaagcggcagcctgtgcgcgtgctgagcctgtttcggaatatcgataaagtcctgaaaagcctgggattcctggagagcggctctggctccggcggtggcaccctgaagtacgtggaggatgtgacaaacgtggtcagacgggatgtggagaagtggggccccttcgatctggtgtacggcagcacccaacccctgggcagctcttgtgaccggtgccctggctggtacatgtttcagttccaccggatcctgcagtacgccctgccgagacaggagtcccagcggccattcttttggattttcatggacaacttgctgctgaccgaggatgaccaggaaactaccactcggttcctgcagaccgaagccgtgaccctgcaggacgtgagaggccgggactaccagaacgccatgcgggtgtggtccaacatccctggactgaaaagcaagcacgcacctctgacccctaaagaagaggagtacctgcaggcccaggtgcggagcagaagcaagctggacgcccctaaggtggatctgctggtgaagaattgcctcctgcccctgagagagtacttcaagtatttcagccagaatagtctgcccctgggaggcagcggcggcggcatggccttcagggacgtggccgtggccttcagccagaaggagtggaagctgctgagccccgcccagaggaccctgtacagggacgtgatgctggagaactacagcctgctggtgagcctgggcatcgccttccccaagcccaagctgatcacccagctggagcagggcgacgagccctggagggaggagagcgagtgcttcctggacctgtacagcgagcccaggaccgagttccagccctgcggcggcccaagcagcggcgcccctcctcccagcggcggcaggcggcccaagcagcggcgcccctcctcccagcggcggcagcccagccggctccccaacctctaccgaggagggcacctctgagtccgccacccccgagagcggccctggcacctccaccgagcccagcgagggcagcgcacccggcagccctgccggcagccccacctccacagaggagggaaccagcaccgagcccagcgaaggcagcgccccaggcaccagcaccgagcctagtgagcaggagattaaacggatcaacaagatcagaagaagacttgtgaaagacagcaacaccaagaaggccggcaagacaggccccatgaaaaccctgctggttagagtgatgacacccgatctgagagagcggctggaaaacctgagaaagaagcctgaaaatatcccccagcccatcagcaatacatctagagccaacctgaataagctgctgaccgattacaccgaaatgaagaaggcgatcctgcatgtgtactgggaagagttccagaaggaccctgtgggcctgatgagccgggtggcccagcctgccagcaagaagatcgatcagaacaagctgaaacctgagatggacgagaagggcaacctgaccaccgccggctttgcctgctctcagtgtggccagcccctgttcgtgtacaagctggagcaggtgtctgagaagggcaaggcttacaccaactacttcggacggtgcaatgtggccgagcacgaaaagctgatcctgctggcccagctgaagcccgagaaggatagcgacgaagccgtgacatatagcctgggaaagtttgggcagagggccctggatttctacagcattcatgtgaccaaggagtccacccaccccgtgaagcccctggcccagatcgccggaaacagatacgcctccggacctgtgggaaaggccctgagcgacgcatgtatgggcacaatcgcctccttcctgtctaagtaccaggacatcatcatcgaacaccagaaggtggtgaagggcaaccagaagagactggagagcctgcgggagctggccggcaaggaaaacctggaataccctagcgtgaccctgccacctcagcctcacaccaaggagggcgttgatgcctacaacgaagtgatcgcccgggtgcgaatgtgggtgaacctgaacctgtggcagaagctgaagctaagcagagatgatgccaagcctctgctgagactgaagggattcccttcctttcctctggtcgagagacaggccaacgaagtggactggtgggacatggtgtgtaacgtgaagaagctgatcaacgagaaaaaggaggatggcaaggtgttttggcagaatctggctggctacaagagacaggaagccctgagaccatacctgagcagcgaggaagatcggaagaagggaaagaaattcgctcggtaccagctgggcgacctgctgctgcacctggaaaagaagcacggcgaggactggggaaaggtgtacgacgaggcctgggagcggattgacaagaaagtggaaggcctgagcaagcacatcaagctggaagaggaacggagaagcgaggacgcccagagcaaggccgccctgaccgactggctgcgggctaaggccagcttcgtgatcgagggcctgaaggaggccgacaaggacgagttctgcagatgcgagctgaagctgcagaagtggtacggggacctgcggggaaagcccttcgccatcgaagccgagaacagcatcctggacatcagcggcttcagcaagcagtacaactgtgccttcatctggcagaaggacggcgtgaagaagctgaacctgtacctgatcatcaactacttcaagggcggcaagctgcggttcaagaagatcaaacctgaagccttcgaagccaacagattctacaccgtgatcaacaaaaagagcggcgagatcgtgcccatggaggtgaacttcaacttcgacgaccccaacctgatcatcctgcctctggcctttggcaagagacagggcagagaattcatctggaacgacctgctgtccctggaaaccggcagcctgaagctggccaacggaagagtgatcgagaagacactgtacaacagaagaacccggcaggatgagcctgccctgttcgtggccctgaccttcgagcggcgggaggtcctggactcctccaatatcaaaccaatgaacctgatcggcgtggcaagaggcgaaaacatccccgccgtgatcgccctgaccgaccccgagggctgcccactgagccggtttaaggatagcctgggaaacccaacccacatcctgagaatcggcgagagctataaggagaagcagcggaccatccaggccaagaaggaggtggagcagcggagagccggcggctacagccggaagtacgccagcaaagccaagaatctggcagacgatatggtgagaaacaccgctagagatctgctgtactacgccgtgacccaggatgccatgctgatcttcgccaacctgagccggggcttcggccggcagggcaagcggaccttcatggccgagagacagtacacacggatggaggactggctgaccgccaagctggcctacgagggcctgagcaagacctacctgtccaagacactggcccagtacacctccaagacatgcagcaactgtgggtttaccatcaccagcgccgactacgacagggtgctggagaagctgaagaagacagcaacaggctggatgaccacaattaacggcaaggagctgaaggtggagggccagattacctactacaacagatacaagagacagaacgtagtcaaggacctgtccgtcgagctggatagactgagcgaagaatctgtgaacaacgacatctcctcctggacaaagggcagaagcggagaagctctgagcctcctgaagaaaagattctcccatagacccgtgcaggagaagttcgtgtgcctgaactgcggcttcgagacacacgcagccgagcaagccgccctgaacatcgccagatcctggctgttcctgcggagccaggagtacaagaaataccagacaaacaagacaaccggcaacaccgataagagagccttcgtcgagacctggcagtccttttaccggaagaagcttaaggaggtgtggaaacctgccgtgcggtctggcggatctggcggaggctccaccagccccaagaaaaagagaaaagtctaagctgccttctgcggggcttgccttctggccatgcccttcttctctcccttgcacctgtacctcttggtctttgaataaagcctgagtaggaaggctagcaaaaaaaaaaaaaaaaaaaaaaaaaaaaaaaaaaaaaaaaaaaaaaaaaaaaaaaaaaaaaaaaaaaaaaaaaaaaaaaagcccagccggctccccaacctctaccgaggagggcacctctgagtccgccacccccgagagcggccctggcacctccaccgagcccagcgagggcagcgcacccggcagccctgccggcagccccacctccacagaggagggaaccagcaccgagcccagcgaaggcagcgccccaggcaccagcaccgagcctagtgagcaggagattaaacggatcaacaagatcagaagaagacttgtgaaagacagcaacaccaagaaggccggcaagacaggccccatgaaaaccctgctggttagagtgatgacacccgatctgagagagcggctggaaaacctgagaaagaagcctgaaaatatcccccagcccatcagcaatacatctagagccaacctgaataagctgctgaccgattacaccgaaatgaagaaggcgatcctgcatgtgtactgggaagagttccagaaggaccctgtgggcctgatgagccgggtggcccagcctgccagcaagaagatcgatcagaacaagctgaaacctgagatggacgagaagggcaacctgaccaccgccggctttgcctgctctcagtgtggccagcccctgttcgtgtacaagctggagcaggtgtctgagaagggcaaggcttacaccaactacttcggacggtgcaatgtggccgagcacgaaaagctgatcctgctggcccagctgaagcccgagaaggatagcgacgaagccgtgacatatagcctgggaaagtttgggcagagggccctggatttctacagcattcatgtgaccaaggagtccacccaccccgtgaagcccctggcccagatcgccggaaacagatacgcctccggacctgtgggaaaggccctgagcgacgcatgtatgggcacaatcgcctccttcctgtctaagtaccaggacatcatcatcgaacaccagaaggtggtgaagggcaaccagaagagactggagagcctgcgggagctggccggcaaggaaaacctggaataccctagcgtgaccctgccacctcagcctcacaccaaggagggcgttgatgcctacaacgaagtgatcgcccgggtgcgaatgtgggtgaacctgaacctgtggcagaagctgaagctaagcagagatgatgccaagcctctgctgagactgaagggattcccttcctttcctctggtcgagagacaggccaacgaagtggactggtgggacatggtgtgtaacgtgaagaagctgatcaacgagaaaaaggaggatggcaaggtgttttggcagaatctggctggctacaagagacaggaagccctgagaccatacctgagcagcgaggaagatcggaagaagggaaagaaattcgctcggtaccagctgggcgacctgctgctgcacctggaaaagaagcacggcgaggactggggaaaggtgtacgacgaggcctgggagcggattgacaagaaagtggaaggcctgagcaagcacatcaagctggaagaggaacggagaagcgaggacgcccagagcaaggccgccctgaccgactggctgcgggctaaggccagcttcgtgatcgagggcctgaaggaggccgacaaggacgagttctgcagatgcgagctgaagctgcagaagtggtacggggacctgcggggaaagcccttcgccatcgaagccgagaacagcatcctggacatcagcggcttcagcaagcagtacaactgtgccttcatctggcagaaggacggcgtgaagaagctgaacctgtacctgatcatcaactacttcaagggcggcaagctgcggttcaagaagatcaaacctgaagccttcgaagccaacagattctacaccgtgatcaacaaaaagagcggcgagatcgtgcccatggaggtgaacttcaacttcgacgaccccaacctgatcatcctgcctctggcctttggcaagagacagggcagagaattcatctggaacgacctgctgtccctggaaaccggcagcctgaagctggccaacggaagagtgatcgagaagacactgtacaacagaagaacccggcaggatgagcctgccctgttcgtggccctgaccttcgagcggcgggaggtcctggactcctccaatatcaaaccaatgaacctgatcggcgtggcaagaggcgaaaacatccccgccgtgatcgccctgaccgaccccgagggctgcccactgagccggtttaaggatagcctgggaaacccaacccacatcctgagaatcggcgagagctataaggagaagcagcggaccatccaggccaagaaggaggtggagcagcggagagccggcggctacagccggaagtacgccagcaaagccaagaatctggcagacgatatggtgagaaacaccgctagagatctgctgtactacgccgtgacccaggatgccatgctgatcttcgccaacctgagccggggcttcggccggcagggcaagcggaccttcatggccgagagacagtacacacggatggaggactggctgaccgccaagctggcctacgagggcctgagcaagacctacctgtccaagacactggcccagtacacctccaagacatgcagcaactgtgggtttaccatcaccagcgccgactacgacagggtgctggagaagctgaagaagacagcaacaggctggatgaccacaattaacggcaaggagctgaaggtggagggccagattacctactacaacagatacaagagacagaacgtagtcaaggacctgtccgtcgagctggatagactgagcgaagaatctgtgaacaacgacatctcctcctggacaaagggcagaagcggagaagctctgagcctcctgaagaaaagattctcccatagacccgtgcaggagaagttcgtgtgcctgaactgcggcttcgagacacacgcagccgagcaagccgccctgaacatcgccagatcctggctgttcctgcggagccaggagtacaagaaataccagacaaacaagacaaccggcaacaccgataagagagccttcgtcgagacctggcagtccttttaccggaagaagcttaaggaggtgtggaaacctgccgtgcggtctggcggatctggcggaggctccaccagccccaagaaaaagagaaaagtctaagctgccttctgcggggcttgccttctggccatgcccttcttctctcccttgcacctgtacctcttggtctttgaataaagcctgagtaggaaggctagcaaaaaaaaaaaaaaaaaaaaaaaaaaaaaaaaaaaaaaaaaaaaaaaaaaaaaaaaaaaaaaaaaaaaaaaaaaaaaaaa

SEQ ID NO: 10178 - RNA, 8787 nt, synthetic construct
  source 1..8787: mol_type = other RNA
aggaaataagagagaaaagaagagtaagaagaaatataagagccaccatggcccctaagaagaagcgtaaagtgagccggatgaaccacgaccaggagttcgacccccctaaggtgtaccctcccgtccccgccgagaagagaaagcccatccgggtcctgagcctgttcgatggcatcgccaccggtctgctggtgctgaaggacctgggcatccaggtggataggtacattgcctccgaggtgtgcgaggactccatcaccgtgggaatggtgcgtcatcagggcaagatcatgtacgtgggcgacgtgcggagcgtgacacagaagcatatccaggagtggggccctttcgacctggtgatcggcggcagcccttgcaatgacctgagcatcgtgaacccagcccggaagggcctgtacgagggaaccggcagactgttcttcgagttttacagactgctgcacgacgcccggcctaaggaaggcgacgaccggcccttcttttggctgttcgagaatgtggtggccatgggagtcagcgacaagcgggatattagccggttcctggagagcaaccccgtgatgatcgatgccaaggaagtgagcgccgcccaccgggccagatacttctggggcaatctgcctggcatgaacagacccctggccagcaccgtgaacgacaagctggagctgcaggagtgcctggagcacggccggatcgccaagttcagcaaggtgagaaccatcaccacccgaagcaacagcatcaaacaaggcaaggaccagcactttcctgtgttcatgaacgagaaggaggacatcctgtggtgtaccgagatggagagagtgttcgggttcccagtccactacacagatgtcagcaacatgtctagactggccagacagagactgctgggaagaagctggtccgtccctgtgatcagacacctgttcgcccctctgaaggagtacttcgcctgcgtgagcagcggcaacagcaacgccaacagccggggccccagcttctctagcggcctggtgccactgtccctgagagggagccacatgggccccatggagatctacaaaaccgtgagcgcctggaagcggcagcctgtgcgcgtgctgagcctgtttcggaatatcgataaagtcctgaaaagcctgggattcctggagagcggctctggctccggcggtggcaccctgaagtacgtggaggatgtgacaaacgtggtcagacgggatgtggagaagtggggccccttcgatctggtgtacggcagcacccaacccctgggcagctcttgtgaccggtgccctggctggtacatgtttcagttccaccggatcctgcagtacgccctgccgagacaggagtcccagcggccattcttttggattttcatggacaacttgctgctgaccgaggatgaccaggaaactaccactcggttcctgcagaccgaagccgtgaccctgcaggacgtgagaggccgggactaccagaacgccatgcgggtgtggtccaacatccctggactgaaaagcaagcacgcacctctgacccctaaagaagaggagtacctgcaggcccaggtgcggagcagaagcaagctggacgcccctaaggtggatctgctggtgaagaattgcctcctgcccctgagagagtacttcaagtatttcagccagaatagtctgcccctgggaggcagcggcggcggcatggccatgagccaggagagcctgaccttcaaggacgtgttcgtggacttcaccctggaggagtggcagcagctggacagcgcccagaagaacctgtacagggacgtgatgctggagaactacagccacctggtgagcgtgggctacctggtggagaagcccgacgtgatcttcaggctgggccccggcgaggagagctggatggccgacggcggcacccccgtgaggacctgcgccggcgagggcggcccaagcagcggcgcccctcctcccagcggcggcaggcggcccaagcagcggcgcccctcctcccagcggcggcagcccagccggctccccaacctctaccgaggagggcacctctgagtccgccacccccgagagcggccctggcacctccaccgagcccagcgagggcagcgcacccggcagccctgccggcagccccacctccacagaggagggaaccagcaccgagcccagcgaaggcagcgccccaggcaccagcaccgagcctagtgagcaggagattaaacggatcaacaagatcagaagaagacttgtgaaagacagcaacaccaagaaggccggcaagacaggccccatgaaaaccctgctggttagagtgatgacacccgatctgagagagcggctggaaaacctgagaaagaagcctgaaaatatcccccagcccatcagcaatacatctagagccaacctgaataagctgctgaccgattacaccgaaatgaagaaggcgatcctgcatgtgtactgggaagagttccagaaggaccctgtgggcctgatgagccgggtggcccagcctgccagcaagaagatcgatcagaacaagctgaaacctgagatggacgagaagggcaacctgaccaccgccggctttgcctgctctcagtgtggccagcccctgttcgtgtacaagctggagcaggtgtctgagaagggcaaggcttacaccaactacttcggacggtgcaatgtggccgagcacgaaaagctgatcctgctggcccagctgaagcccgagaaggatagcgacgaagccgtgacatatagcctgggaaagtttgggcagagggccctggatttctacagcattcatgtgaccaaggagtccacccaccccgtgaagcccctggcccagatcgccggaaacagatacgcctccggacctgtgggaaaggccctgagcgacgcatgtatgggcacaatcgcctccttcctgtctaagtaccaggacatcatcatcgaacaccagaaggtggtgaagggcaaccagaagagactggagagcctgcgggagctggccggcaaggaaaacctggaataccctagcgtgaccctgccacctcagcctcacaccaaggagggcgttgatgcctacaacgaagtgatcgcccgggtgcgaatgtgggtgaacctgaacctgtggcagaagctgaagctaagcagagatgatgccaagcctctgctgagactgaagggattcccttcctttcctctggtcgagagacaggccaacgaagtggactggtgggacatggtgtgtaacgtgaagaagctgatcaacgagaaaaaggaggatggcaaggtgttttggcagaatctggctggctacaagagacaggaagccctgagaccatacctgagcagcgaggaagatcggaagaagggaaagaaattcgctcggtaccagctgggcgacctgctgctgcacctggaaaagaagcacggcgaggactggggaaaggtgtacgacgaggcctgggagcggattgacaagaaagtggaaggcctgagcaagcacatcaagctggaagaggaacggagaagcgaggacgcccagagcaaggccgccctgaccgactggctgcgggctaaggccagcttcgtgatcgagggcctgaaggaggccgacaaggacgagttctgcagatgcgagctgaagctgcagaagtggtacggggacctgcggggaaagcccttcgccatcgaagccgagaacagcatcctggacatcagcggcttcagcaagcagtacaactgtgccttcatctggcagaaggacggcgtgaagaagctgaacctgtacctgatcatcaactacttcaagggcggcaagctgcggttcaagaagatcaaacctgaagccttcgaagccaacagattctacaccgtgatcaacaaaaagagcggcgagatcgtgcccatggaggtgaacttcaacttcgacgaccccaacctgatcatcctgcctctggcctttggcaagagacagggcagagaattcatctggaacgacctgctgtccctggaaaccggcagcctgaagctggccaacggaagagtgatcgagaagacactgtacaacagaagaacccggcaggatgagcctgccctgttcgtggccctgaccttcgagcggcgggaggtcctggactcctccaatatcaaaccaatgaacctgatcggcgtggcaagaggcgaaaacatccccgccgtgatcgccctgaccgaccccgagggctgcccactgagccggtttaaggatagcctgggaaacccaacccacatcctgagaatcggcgagagctataaggagaagcagcggaccatccaggccaagaaggaggtggagcagcggagagccggcggctacagccggaagtacgccagcaaagccaagaatctggcagacgatatggtgagaaacaccgctagagatctgctgtactacgccgtgacccaggatgccatgctgatcttcgccaacctgagccggggcttcggccggcagggcaagcggaccttcatggccgagagacagtacacacggatggaggactggctgaccgccaagctggcctacgagggcctgagcaagacctacctgtccaagacactggcccagtacacctccaagacatgcagcaactgtgggtttaccatcaccagcgccgactacgacagggtgctggagaagctgaagaagacagcaacaggctggatgaccacaattaacggcaaggagctgaaggtggagggccagattacctactacaacagatacaagagacagaacgtagtcaaggacctgtccgtcgagctggatagactgagcgaagaatctgtgaacaacgacatctcctcctggacaaagggcagaagcggagaagctctgagcctcctgaagaaaagattctcccatagacccgtgcaggagaagttcgtgtgcctgaactgcggcttcgagacacacgcagccgagcaagccgccctgaacatcgccagatcctggctgttcctgcggagccaggagtacaagaaataccagacaaacaagacaaccggcaacaccgataagagagccttcgtcgagacctggcagtccttttaccggaagaagcttaaggaggtgtggaaacctgccgtgcggtctggcggatctggcggaggctccaccagccccaagaaaaagagaaaagtctaagctgccttctgcggggcttgccttctggccatgcccttcttctctcccttgcacctgtacctcttggtctttgaataaagcctgagtaggaaggctagcaaaaaaaaaaaaaaaaaaaaaaaaaaaaaaaaaaaaaaaaaaaaaaaaaaaaaaaaaaaaaaaaaaaaaaaaaaaaaaaagcccagccggctccccaacctctaccgaggagggcacctctgagtccgccacccccgagagcggccctggcacctccaccgagcccagcgagggcagcgcacccggcagccctgccggcagccccacctccacagaggagggaaccagcaccgagcccagcgaaggcagcgccccaggcaccagcaccgagcctagtgagcaggagattaaacggatcaacaagatcagaagaagacttgtgaaagacagcaacaccaagaaggccggcaagacaggccccatgaaaaccctgctggttagagtgatgacacccgatctgagagagcggctggaaaacctgagaaagaagcctgaaaatatcccccagcccatcagcaatacatctagagccaacctgaataagctgctgaccgattacaccgaaatgaagaaggcgatcctgcatgtgtactgggaagagttccagaaggaccctgtgggcctgatgagccgggtggcccagcctgccagcaagaagatcgatcagaacaagctgaaacctgagatggacgagaagggcaacctgaccaccgccggctttgcctgctctcagtgtggccagcccctgttcgtgtacaagctggagcaggtgtctgagaagggcaaggcttacaccaactacttcggacggtgcaatgtggccgagcacgaaaagctgatcctgctggcccagctgaagcccgagaaggatagcgacgaagccgtgacatatagcctgggaaagtttgggcagagggccctggatttctacagcattcatgtgaccaaggagtccacccaccccgtgaagcccctggcccagatcgccggaaacagatacgcctccggacctgtgggaaaggccctgagcgacgcatgtatgggcacaatcgcctccttcctgtctaagtaccaggacatcatcatcgaacaccagaaggtggtgaagggcaaccagaagagactggagagcctgcgggagctggccggcaaggaaaacctggaataccctagcgtgaccctgccacctcagcctcacaccaaggagggcgttgatgcctacaacgaagtgatcgcccgggtgcgaatgtgggtgaacctgaacctgtggcagaagctgaagctaagcagagatgatgccaagcctctgctgagactgaagggattcccttcctttcctctggtcgagagacaggccaacgaagtggactggtgggacatggtgtgtaacgtgaagaagctgatcaacgagaaaaaggaggatggcaaggtgttttggcagaatctggctggctacaagagacaggaagccctgagaccatacctgagcagcgaggaagatcggaagaagggaaagaaattcgctcggtaccagctgggcgacctgctgctgcacctggaaaagaagcacggcgaggactggggaaaggtgtacgacgaggcctgggagcggattgacaagaaagtggaaggcctgagcaagcacatcaagctggaagaggaacggagaagcgaggacgcccagagcaaggccgccctgaccgactggctgcgggctaaggccagcttcgtgatcgagggcctgaaggaggccgacaaggacgagttctgcagatgcgagctgaagctgcagaagtggtacggggacctgcggggaaagcccttcgccatcgaagccgagaacagcatcctggacatcagcggcttcagcaagcagtacaactgtgccttcatctggcagaaggacggcgtgaagaagctgaacctgtacctgatcatcaactacttcaagggcggcaagctgcggttcaagaagatcaaacctgaagccttcgaagccaacagattctacaccgtgatcaacaaaaagagcggcgagatcgtgcccatggaggtgaacttcaacttcgacgaccccaacctgatcatcctgcctctggcctttggcaagagacagggcagagaattcatctggaacgacctgctgtccctggaaaccggcagcctgaagctggccaacggaagagtgatcgagaagacactgtacaacagaagaacccggcaggatgagcctgccctgttcgtggccctgaccttcgagcggcgggaggtcctggactcctccaatatcaaaccaatgaacctgatcggcgtggcaagaggcgaaaacatccccgccgtgatcgccctgaccgaccccgagggctgcccactgagccggtttaaggatagcctgggaaacccaacccacatcctgagaatcggcgagagctataaggagaagcagcggaccatccaggccaagaaggaggtggagcagcggagagccggcggctacagccggaagtacgccagcaaagccaagaatctggcagacgatatggtgagaaacaccgctagagatctgctgtactacgccgtgacccaggatgccatgctgatcttcgccaacctgagccggggcttcggccggcagggcaagcggaccttcatggccgagagacagtacacacggatggaggactggctgaccgccaagctggcctacgagggcctgagcaagacctacctgtccaagacactggcccagtacacctccaagacatgcagcaactgtgggtttaccatcaccagcgccgactacgacagggtgctggagaagctgaagaagacagcaacaggctggatgaccacaattaacggcaaggagctgaaggtggagggccagattacctactacaacagatacaagagacagaacgtagtcaaggacctgtccgtcgagctggatagactgagcgaagaatctgtgaacaacgacatctcctcctggacaaagggcagaagcggagaagctctgagcctcctgaagaaaagattctcccatagacccgtgcaggagaagttcgtgtgcctgaactgcggcttcgagacacacgcagccgagcaagccgccctgaacatcgccagatcctggctgttcctgcggagccaggagtacaagaaataccagacaaacaagacaaccggcaacaccgataagagagccttcgtcgagacctggcagtccttttaccggaagaagcttaaggaggtgtggaaacctgccgtgcggtctggcggatctggcggaggctccaccagccccaagaaaaagagaaaagtctaagctgccttctgcggggcttgccttctggccatgcccttcttctctcccttgcacctgtacctcttggtctttgaataaagcctgagtaggaaggctagcaaaaaaaaaaaaaaaaaaaaaaaaaaaaaaaaaaaaaaaaaaaaaaaaaaaaaaaaaaaaaaaaaaaaaaaaaaaaaaaa

SEQ ID NO: 10179 - RNA, 8787 nt, synthetic construct
  source 1..8787: mol_type = other RNA
aggaaataagagagaaaagaagagtaagaagaaatataagagccaccatggcccctaagaagaagcgtaaagtgagccggatgaaccacgaccaggagttcgacccccctaaggtgtaccctcccgtccccgccgagaagagaaagcccatccgggtcctgagcctgttcgatggcatcgccaccggtctgctggtgctgaaggacctgggcatccaggtggataggtacattgcctccgaggtgtgcgaggactccatcaccgtgggaatggtgcgtcatcagggcaagatcatgtacgtgggcgacgtgcggagcgtgacacagaagcatatccaggagtggggccctttcgacctggtgatcggcggcagcccttgcaatgacctgagcatcgtgaacccagcccggaagggcctgtacgagggaaccggcagactgttcttcgagttttacagactgctgcacgacgcccggcctaaggaaggcgacgaccggcccttcttttggctgttcgagaatgtggtggccatgggagtcagcgacaagcgggatattagccggttcctggagagcaaccccgtgatgatcgatgccaaggaagtgagcgccgcccaccgggccagatacttctggggcaatctgcctggcatgaacagacccctggccagcaccgtgaacgacaagctggagctgcaggagtgcctggagcacggccggatcgccaagttcagcaaggtgagaaccatcaccacccgaagcaacagcatcaaacaaggcaaggaccagcactttcctgtgttcatgaacgagaaggaggacatcctgtggtgtaccgagatggagagagtgttcgggttcccagtccactacacagatgtcagcaacatgtctagactggccagacagagactgctgggaagaagctggtccgtccctgtgatcagacacctgttcgcccctctgaaggagtacttcgcctgcgtgagcagcggcaacagcaacgccaacagccggggccccagcttctctagcggcctggtgccactgtccctgagagggagccacatgggccccatggagatctacaaaaccgtgagcgcctggaagcggcagcctgtgcgcgtgctgagcctgtttcggaatatcgataaagtcctgaaaagcctgggattcctggagagcggctctggctccggcggtggcaccctgaagtacgtggaggatgtgacaaacgtggtcagacgggatgtggagaagtggggccccttcgatctggtgtacggcagcacccaacccctgggcagctcttgtgaccggtgccctggctggtacatgtttcagttccaccggatcctgcagtacgccctgccgagacaggagtcccagcggccattcttttggattttcatggacaacttgctgctgaccgaggatgaccaggaaactaccactcggttcctgcagaccgaagccgtgaccctgcaggacgtgagaggccgggactaccagaacgccatgcgggtgtggtccaacatccctggactgaaaagcaagcacgcacctctgacccctaaagaagaggagtacctgcaggcccaggtgcggagcagaagcaagctggacgcccctaaggtggatctgctggtgaagaattgcctcctgcccctgagagagtacttcaagtatttcagccagaatagtctgcccctgggaggcagcggcggcggcctgctgaccttcgaggacgtggccgtgagcttcagcgaggaggagtggaagctgctggaccccagccagaagatcctgtacaacgacgtgatgcaggagaactacgagaccgtgatcagcctgggcctgaagctgaagaacgacaccggcaacgaccagcccatcagcctgagcgccctggagatccaggccagcggcggcaaggtgctgaggaaggccaggatgaaggtggcccagaagaccggcggcccaagcagcggcgcccctcctcccagcggcggcaggcggcccaagcagcggcgcccctcctcccagcggcggcagcccagccggctccccaacctctaccgaggagggcacctctgagtccgccacccccgagagcggccctggcacctccaccgagcccagcgagggcagcgcacccggcagccctgccggcagccccacctccacagaggagggaaccagcaccgagcccagcgaaggcagcgccccaggcaccagcaccgagcctagtgagcaggagattaaacggatcaacaagatcagaagaagacttgtgaaagacagcaacaccaagaaggccggcaagacaggccccatgaaaaccctgctggttagagtgatgacacccgatctgagagagcggctggaaaacctgagaaagaagcctgaaaatatcccccagcccatcagcaatacatctagagccaacctgaataagctgctgaccgattacaccgaaatgaagaaggcgatcctgcatgtgtactgggaagagttccagaaggaccctgtgggcctgatgagccgggtggcccagcctgccagcaagaagatcgatcagaacaagctgaaacctgagatggacgagaagggcaacctgaccaccgccggctttgcctgctctcagtgtggccagcccctgttcgtgtacaagctggagcaggtgtctgagaagggcaaggcttacaccaactacttcggacggtgcaatgtggccgagcacgaaaagctgatcctgctggcccagctgaagcccgagaaggatagcgacgaagccgtgacatatagcctgggaaagtttgggcagagggccctggatttctacagcattcatgtgaccaaggagtccacccaccccgtgaagcccctggcccagatcgccggaaacagatacgcctccggacctgtgggaaaggccctgagcgacgcatgtatgggcacaatcgcctccttcctgtctaagtaccaggacatcatcatcgaacaccagaaggtggtgaagggcaaccagaagagactggagagcctgcgggagctggccggcaaggaaaacctggaataccctagcgtgaccctgccacctcagcctcacaccaaggagggcgttgatgcctacaacgaagtgatcgcccgggtgcgaatgtgggtgaacctgaacctgtggcagaagctgaagctaagcagagatgatgccaagcctctgctgagactgaagggattcccttcctttcctctggtcgagagacaggccaacgaagtggactggtgggacatggtgtgtaacgtgaagaagctgatcaacgagaaaaaggaggatggcaaggtgttttggcagaatctggctggctacaagagacaggaagccctgagaccatacctgagcagcgaggaagatcggaagaagggaaagaaattcgctcggtaccagctgggcgacctgctgctgcacctggaaaagaagcacggcgaggactggggaaaggtgtacgacgaggcctgggagcggattgacaagaaagtggaaggcctgagcaagcacatcaagctggaagaggaacggagaagcgaggacgcccagagcaaggccgccctgaccgactggctgcgggctaaggccagcttcgtgatcgagggcctgaaggaggccgacaaggacgagttctgcagatgcgagctgaagctgcagaagtggtacggggacctgcggggaaagcccttcgccatcgaagccgagaacagcatcctggacatcagcggcttcagcaagcagtacaactgtgccttcatctggcagaaggacggcgtgaagaagctgaacctgtacctgatcatcaactacttcaagggcggcaagctgcggttcaagaagatcaaacctgaagccttcgaagccaacagattctacaccgtgatcaacaaaaagagcggcgagatcgtgcccatggaggtgaacttcaacttcgacgaccccaacctgatcatcctgcctctggcctttggcaagagacagggcagagaattcatctggaacgacctgctgtccctggaaaccggcagcctgaagctggccaacggaagagtgatcgagaagacactgtacaacagaagaacccggcaggatgagcctgccctgttcgtggccctgaccttcgagcggcgggaggtcctggactcctccaatatcaaaccaatgaacctgatcggcgtggcaagaggcgaaaacatccccgccgtgatcgccctgaccgaccccgagggctgcccactgagccggtttaaggatagcctgggaaacccaacccacatcctgagaatcggcgagagctataaggagaagcagcggaccatccaggccaagaaggaggtggagcagcggagagccggcggctacagccggaagtacgccagcaaagccaagaatctggcagacgatatggtgagaaacaccgctagagatctgctgtactacgccgtgacccaggatgccatgctgatcttcgccaacctgagccggggcttcggccggcagggcaagcggaccttcatggccgagagacagtacacacggatggaggactggctgaccgccaagctggcctacgagggcctgagcaagacctacctgtccaagacactggcccagtacacctccaagacatgcagcaactgtgggtttaccatcaccagcgccgactacgacagggtgctggagaagctgaagaagacagcaacaggctggatgaccacaattaacggcaaggagctgaaggtggagggccagattacctactacaacagatacaagagacagaacgtagtcaaggacctgtccgtcgagctggatagactgagcgaagaatctgtgaacaacgacatctcctcctggacaaagggcagaagcggagaagctctgagcctcctgaagaaaagattctcccatagacccgtgcaggagaagttcgtgtgcctgaactgcggcttcgagacacacgcagccgagcaagccgccctgaacatcgccagatcctggctgttcctgcggagccaggagtacaagaaataccagacaaacaagacaaccggcaacaccgataagagagccttcgtcgagacctggcagtccttttaccggaagaagcttaaggaggtgtggaaacctgccgtgcggtctggcggatctggcggaggctccaccagccccaagaaaaagagaaaagtctaagctgccttctgcggggcttgccttctggccatgcccttcttctctcccttgcacctgtacctcttggtctttgaataaagcctgagtaggaaggctagcaaaaaaaaaaaaaaaaaaaaaaaaaaaaaaaaaaaaaaaaaaaaaaaaaaaaaaaaaaaaaaaaaaaaaaaaaaaaaaaagcccagccggctccccaacctctaccgaggagggcacctctgagtccgccacccccgagagcggccctggcacctccaccgagcccagcgagggcagcgcacccggcagccctgccggcagccccacctccacagaggagggaaccagcaccgagcccagcgaaggcagcgccccaggcaccagcaccgagcctagtgagcaggagattaaacggatcaacaagatcagaagaagacttgtgaaagacagcaacaccaagaaggccggcaagacaggccccatgaaaaccctgctggttagagtgatgacacccgatctgagagagcggctggaaaacctgagaaagaagcctgaaaatatcccccagcccatcagcaatacatctagagccaacctgaataagctgctgaccgattacaccgaaatgaagaaggcgatcctgcatgtgtactgggaagagttccagaaggaccctgtgggcctgatgagccgggtggcccagcctgccagcaagaagatcgatcagaacaagctgaaacctgagatggacgagaagggcaacctgaccaccgccggctttgcctgctctcagtgtggccagcccctgttcgtgtacaagctggagcaggtgtctgagaagggcaaggcttacaccaactacttcggacggtgcaatgtggccgagcacgaaaagctgatcctgctggcccagctgaagcccgagaaggatagcgacgaagccgtgacatatagcctgggaaagtttgggcagagggccctggatttctacagcattcatgtgaccaaggagtccacccaccccgtgaagcccctggcccagatcgccggaaacagatacgcctccggacctgtgggaaaggccctgagcgacgcatgtatgggcacaatcgcctccttcctgtctaagtaccaggacatcatcatcgaacaccagaaggtggtgaagggcaaccagaagagactggagagcctgcgggagctggccggcaaggaaaacctggaataccctagcgtgaccctgccacctcagcctcacaccaaggagggcgttgatgcctacaacgaagtgatcgcccgggtgcgaatgtgggtgaacctgaacctgtggcagaagctgaagctaagcagagatgatgccaagcctctgctgagactgaagggattcccttcctttcctctggtcgagagacaggccaacgaagtggactggtgggacatggtgtgtaacgtgaagaagctgatcaacgagaaaaaggaggatggcaaggtgttttggcagaatctggctggctacaagagacaggaagccctgagaccatacctgagcagcgaggaagatcggaagaagggaaagaaattcgctcggtaccagctgggcgacctgctgctgcacctggaaaagaagcacggcgaggactggggaaaggtgtacgacgaggcctgggagcggattgacaagaaagtggaaggcctgagcaagcacatcaagctggaagaggaacggagaagcgaggacgcccagagcaaggccgccctgaccgactggctgcgggctaaggccagcttcgtgatcgagggcctgaaggaggccgacaaggacgagttctgcagatgcgagctgaagctgcagaagtggtacggggacctgcggggaaagcccttcgccatcgaagccgagaacagcatcctggacatcagcggcttcagcaagcagtacaactgtgccttcatctggcagaaggacggcgtgaagaagctgaacctgtacctgatcatcaactacttcaagggcggcaagctgcggttcaagaagatcaaacctgaagccttcgaagccaacagattctacaccgtgatcaacaaaaagagcggcgagatcgtgcccatggaggtgaacttcaacttcgacgaccccaacctgatcatcctgcctctggcctttggcaagagacagggcagagaattcatctggaacgacctgctgtccctggaaaccggcagcctgaagctggccaacggaagagtgatcgagaagacactgtacaacagaagaacccggcaggatgagcctgccctgttcgtggccctgaccttcgagcggcgggaggtcctggactcctccaatatcaaaccaatgaacctgatcggcgtggcaagaggcgaaaacatccccgccgtgatcgccctgaccgaccccgagggctgcccactgagccggtttaaggatagcctgggaaacccaacccacatcctgagaatcggcgagagctataaggagaagcagcggaccatccaggccaagaaggaggtggagcagcggagagccggcggctacagccggaagtacgccagcaaagccaagaatctggcagacgatatggtgagaaacaccgctagagatctgctgtactacgccgtgacccaggatgccatgctgatcttcgccaacctgagccggggcttcggccggcagggcaagcggaccttcatggccgagagacagtacacacggatggaggactggctgaccgccaagctggcctacgagggcctgagcaagacctacctgtccaagacactggcccagtacacctccaagacatgcagcaactgtgggtttaccatcaccagcgccgactacgacagggtgctggagaagctgaagaagacagcaacaggctggatgaccacaattaacggcaaggagctgaaggtggagggccagattacctactacaacagatacaagagacagaacgtagtcaaggacctgtccgtcgagctggatagactgagcgaagaatctgtgaacaacgacatctcctcctggacaaagggcagaagcggagaagctctgagcctcctgaagaaaagattctcccatagacccgtgcaggagaagttcgtgtgcctgaactgcggcttcgagacacacgcagccgagcaagccgccctgaacatcgccagatcctggctgttcctgcggagccaggagtacaagaaataccagacaaacaagacaaccggcaacaccgataagagagccttcgtcgagacctggcagtccttttaccggaagaagcttaaggaggtgtggaaacctgccgtgcggtctggcggatctggcggaggctccaccagccccaagaaaaagagaaaagtctaagctgccttctgcggggcttgccttctggccatgcccttcttctctcccttgcacctgtacctcttggtctttgaataaagcctgagtaggaaggctagcaaaaaaaaaaaaaaaaaaaaaaaaaaaaaaaaaaaaaaaaaaaaaaaaaaaaaaaaaaaaaaaaaaaaaaaaaaaaaaaa

SEQ ID NO: 10180 - RNA, 8787 nt, synthetic construct
  source 1..8787: mol_type = other RNA
aggaaataagagagaaaagaagagtaagaagaaatataagagccaccatggcccctaagaagaagcgtaaagtgagccggatgaaccacgaccaggagttcgacccccctaaggtgtaccctcccgtccccgccgagaagagaaagcccatccgggtcctgagcctgttcgatggcatcgccaccggtctgctggtgctgaaggacctgggcatccaggtggataggtacattgcctccgaggtgtgcgaggactccatcaccgtgggaatggtgcgtcatcagggcaagatcatgtacgtgggcgacgtgcggagcgtgacacagaagcatatccaggagtggggccctttcgacctggtgatcggcggcagcccttgcaatgacctgagcatcgtgaacccagcccggaagggcctgtacgagggaaccggcagactgttcttcgagttttacagactgctgcacgacgcccggcctaaggaaggcgacgaccggcccttcttttggctgttcgagaatgtggtggccatgggagtcagcgacaagcgggatattagccggttcctggagagcaaccccgtgatgatcgatgccaaggaagtgagcgccgcccaccgggccagatacttctggggcaatctgcctggcatgaacagacccctggccagcaccgtgaacgacaagctggagctgcaggagtgcctggagcacggccggatcgccaagttcagcaaggtgagaaccatcaccacccgaagcaacagcatcaaacaaggcaaggaccagcactttcctgtgttcatgaacgagaaggaggacatcctgtggtgtaccgagatggagagagtgttcgggttcccagtccactacacagatgtcagcaacatgtctagactggccagacagagactgctgggaagaagctggtccgtccctgtgatcagacacctgttcgcccctctgaaggagtacttcgcctgcgtgagcagcggcaacagcaacgccaacagccggggccccagcttctctagcggcctggtgccactgtccctgagagggagccacatgggccccatggagatctacaaaaccgtgagcgcctggaagcggcagcctgtgcgcgtgctgagcctgtttcggaatatcgataaagtcctgaaaagcctgggattcctggagagcggctctggctccggcggtggcaccctgaagtacgtggaggatgtgacaaacgtggtcagacgggatgtggagaagtggggccccttcgatctggtgtacggcagcacccaacccctgggcagctcttgtgaccggtgccctggctggtacatgtttcagttccaccggatcctgcagtacgccctgccgagacaggagtcccagcggccattcttttggattttcatggacaacttgctgctgaccgaggatgaccaggaaactaccactcggttcctgcagaccgaagccgtgaccctgcaggacgtgagaggccgggactaccagaacgccatgcgggtgtggtccaacatccctggactgaaaagcaagcacgcacctctgacccctaaagaagaggagtacctgcaggcccaggtgcggagcagaagcaagctggacgcccctaaggtggatctgctggtgaagaattgcctcctgcccctgagagagtacttcaagtatttcagccagaatagtctgcccctgggaggcagcggcggcggcgagcccgtgaccttcaaggacgtggccgtggtgttcagcgaggaggagctgggcctgctggacagcgtgcagaggaagctgtacagggacgtgaccctggagaacttcaggaacctggtgagcgtgggccacctgttcagcaagcccgacgtgatcagccagctggagagggaggagcagctgtggatgaccgagatccagacccagaggggcggccacagcgccgagaactgcgccgccaggggcggcccaagcagcggcgcccctcctcccagcggcggcaggcggcccaagcagcggcgcccctcctcccagcggcggcagcccagccggctccccaacctctaccgaggagggcacctctgagtccgccacccccgagagcggccctggcacctccaccgagcccagcgagggcagcgcacccggcagccctgccggcagccccacctccacagaggagggaaccagcaccgagcccagcgaaggcagcgccccaggcaccagcaccgagcctagtgagcaggagattaaacggatcaacaagatcagaagaagacttgtgaaagacagcaacaccaagaaggccggcaagacaggccccatgaaaaccctgctggttagagtgatgacacccgatctgagagagcggctggaaaacctgagaaagaagcctgaaaatatcccccagcccatcagcaatacatctagagccaacctgaataagctgctgaccgattacaccgaaatgaagaaggcgatcctgcatgtgtactgggaagagttccagaaggaccctgtgggcctgatgagccgggtggcccagcctgccagcaagaagatcgatcagaacaagctgaaacctgagatggacgagaagggcaacctgaccaccgccggctttgcctgctctcagtgtggccagcccctgttcgtgtacaagctggagcaggtgtctgagaagggcaaggcttacaccaactacttcggacggtgcaatgtggccgagcacgaaaagctgatcctgctggcccagctgaagcccgagaaggatagcgacgaagccgtgacatatagcctgggaaagtttgggcagagggccctggatttctacagcattcatgtgaccaaggagtccacccaccccgtgaagcccctggcccagatcgccggaaacagatacgcctccggacctgtgggaaaggccctgagcgacgcatgtatgggcacaatcgcctccttcctgtctaagtaccaggacatcatcatcgaacaccagaaggtggtgaagggcaaccagaagagactggagagcctgcgggagctggccggcaaggaaaacctggaataccctagcgtgaccctgccacctcagcctcacaccaaggagggcgttgatgcctacaacgaagtgatcgcccgggtgcgaatgtgggtgaacctgaacctgtggcagaagctgaagctaagcagagatgatgccaagcctctgctgagactgaagggattcccttcctttcctctggtcgagagacaggccaacgaagtggactggtgggacatggtgtgtaacgtgaagaagctgatcaacgagaaaaaggaggatggcaaggtgttttggcagaatctggctggctacaagagacaggaagccctgagaccatacctgagcagcgaggaagatcggaagaagggaaagaaattcgctcggtaccagctgggcgacctgctgctgcacctggaaaagaagcacggcgaggactggggaaaggtgtacgacgaggcctgggagcggattgacaagaaagtggaaggcctgagcaagcacatcaagctggaagaggaacggagaagcgaggacgcccagagcaaggccgccctgaccgactggctgcgggctaaggccagcttcgtgatcgagggcctgaaggaggccgacaaggacgagttctgcagatgcgagctgaagctgcagaagtggtacggggacctgcggggaaagcccttcgccatcgaagccgagaacagcatcctggacatcagcggcttcagcaagcagtacaactgtgccttcatctggcagaaggacggcgtgaagaagctgaacctgtacctgatcatcaactacttcaagggcggcaagctgcggttcaagaagatcaaacctgaagccttcgaagccaacagattctacaccgtgatcaacaaaaagagcggcgagatcgtgcccatggaggtgaacttcaacttcgacgaccccaacctgatcatcctgcctctggcctttggcaagagacagggcagagaattcatctggaacgacctgctgtccctggaaaccggcagcctgaagctggccaacggaagagtgatcgagaagacactgtacaacagaagaacccggcaggatgagcctgccctgttcgtggccctgaccttcgagcggcgggaggtcctggactcctccaatatcaaaccaatgaacctgatcggcgtggcaagaggcgaaaacatccccgccgtgatcgccctgaccgaccccgagggctgcccactgagccggtttaaggatagcctgggaaacccaacccacatcctgagaatcggcgagagctataaggagaagcagcggaccatccaggccaagaaggaggtggagcagcggagagccggcggctacagccggaagtacgccagcaaagccaagaatctggcagacgatatggtgagaaacaccgctagagatctgctgtactacgccgtgacccaggatgccatgctgatcttcgccaacctgagccggggcttcggccggcagggcaagcggaccttcatggccgagagacagtacacacggatggaggactggctgaccgccaagctggcctacgagggcctgagcaagacctacctgtccaagacactggcccagtacacctccaagacatgcagcaactgtgggtttaccatcaccagcgccgactacgacagggtgctggagaagctgaagaagacagcaacaggctggatgaccacaattaacggcaaggagctgaaggtggagggccagattacctactacaacagatacaagagacagaacgtagtcaaggacctgtccgtcgagctggatagactgagcgaagaatctgtgaacaacgacatctcctcctggacaaagggcagaagcggagaagctctgagcctcctgaagaaaagattctcccatagacccgtgcaggagaagttcgtgtgcctgaactgcggcttcgagacacacgcagccgagcaagccgccctgaacatcgccagatcctggctgttcctgcggagccaggagtacaagaaataccagacaaacaagacaaccggcaacaccgataagagagccttcgtcgagacctggcagtccttttaccggaagaagcttaaggaggtgtggaaacctgccgtgcggtctggcggatctggcggaggctccaccagccccaagaaaaagagaaaagtctaagctgccttctgcggggcttgccttctggccatgcccttcttctctcccttgcacctgtacctcttggtctttgaataaagcctgagtaggaaggctagcaaaaaaaaaaaaaaaaaaaaaaaaaaaaaaaaaaaaaaaaaaaaaaaaaaaaaaaaaaaaaaaaaaaaaaaaaaaaaaaagcccagccggctccccaacctctaccgaggagggcacctctgagtccgccacccccgagagcggccctggcacctccaccgagcccagcgagggcagcgcacccggcagccctgccggcagccccacctccacagaggagggaaccagcaccgagcccagcgaaggcagcgccccaggcaccagcaccgagcctagtgagcaggagattaaacggatcaacaagatcagaagaagacttgtgaaagacagcaacaccaagaaggccggcaagacaggccccatgaaaaccctgctggttagagtgatgacacccgatctgagagagcggctggaaaacctgagaaagaagcctgaaaatatcccccagcccatcagcaatacatctagagccaacctgaataagctgctgaccgattacaccgaaatgaagaaggcgatcctgcatgtgtactgggaagagttccagaaggaccctgtgggcctgatgagccgggtggcccagcctgccagcaagaagatcgatcagaacaagctgaaacctgagatggacgagaagggcaacctgaccaccgccggctttgcctgctctcagtgtggccagcccctgttcgtgtacaagctggagcaggtgtctgagaagggcaaggcttacaccaactacttcggacggtgcaatgtggccgagcacgaaaagctgatcctgctggcccagctgaagcccgagaaggatagcgacgaagccgtgacatatagcctgggaaagtttgggcagagggccctggatttctacagcattcatgtgaccaaggagtccacccaccccgtgaagcccctggcccagatcgccggaaacagatacgcctccggacctgtgggaaaggccctgagcgacgcatgtatgggcacaatcgcctccttcctgtctaagtaccaggacatcatcatcgaacaccagaaggtggtgaagggcaaccagaagagactggagagcctgcgggagctggccggcaaggaaaacctggaataccctagcgtgaccctgccacctcagcctcacaccaaggagggcgttgatgcctacaacgaagtgatcgcccgggtgcgaatgtgggtgaacctgaacctgtggcagaagctgaagctaagcagagatgatgccaagcctctgctgagactgaagggattcccttcctttcctctggtcgagagacaggccaacgaagtggactggtgggacatggtgtgtaacgtgaagaagctgatcaacgagaaaaaggaggatggcaaggtgttttggcagaatctggctggctacaagagacaggaagccctgagaccatacctgagcagcgaggaagatcggaagaagggaaagaaattcgctcggtaccagctgggcgacctgctgctgcacctggaaaagaagcacggcgaggactggggaaaggtgtacgacgaggcctgggagcggattgacaagaaagtggaaggcctgagcaagcacatcaagctggaagaggaacggagaagcgaggacgcccagagcaaggccgccctgaccgactggctgcgggctaaggccagcttcgtgatcgagggcctgaaggaggccgacaaggacgagttctgcagatgcgagctgaagctgcagaagtggtacggggacctgcggggaaagcccttcgccatcgaagccgagaacagcatcctggacatcagcggcttcagcaagcagtacaactgtgccttcatctggcagaaggacggcgtgaagaagctgaacctgtacctgatcatcaactacttcaagggcggcaagctgcggttcaagaagatcaaacctgaagccttcgaagccaacagattctacaccgtgatcaacaaaaagagcggcgagatcgtgcccatggaggtgaacttcaacttcgacgaccccaacctgatcatcctgcctctggcctttggcaagagacagggcagagaattcatctggaacgacctgctgtccctggaaaccggcagcctgaagctggccaacggaagagtgatcgagaagacactgtacaacagaagaacccggcaggatgagcctgccctgttcgtggccctgaccttcgagcggcgggaggtcctggactcctccaatatcaaaccaatgaacctgatcggcgtggcaagaggcgaaaacatccccgccgtgatcgccctgaccgaccccgagggctgcccactgagccggtttaaggatagcctgggaaacccaacccacatcctgagaatcggcgagagctataaggagaagcagcggaccatccaggccaagaaggaggtggagcagcggagagccggcggctacagccggaagtacgccagcaaagccaagaatctggcagacgatatggtgagaaacaccgctagagatctgctgtactacgccgtgacccaggatgccatgctgatcttcgccaacctgagccggggcttcggccggcagggcaagcggaccttcatggccgagagacagtacacacggatggaggactggctgaccgccaagctggcctacgagggcctgagcaagacctacctgtccaagacactggcccagtacacctccaagacatgcagcaactgtgggtttaccatcaccagcgccgactacgacagggtgctggagaagctgaagaagacagcaacaggctggatgaccacaattaacggcaaggagctgaaggtggagggccagattacctactacaacagatacaagagacagaacgtagtcaaggacctgtccgtcgagctggatagactgagcgaagaatctgtgaacaacgacatctcctcctggacaaagggcagaagcggagaagctctgagcctcctgaagaaaagattctcccatagacccgtgcaggagaagttcgtgtgcctgaactgcggcttcgagacacacgcagccgagcaagccgccctgaacatcgccagatcctggctgttcctgcggagccaggagtacaagaaataccagacaaacaagacaaccggcaacaccgataagagagccttcgtcgagacctggcagtccttttaccggaagaagcttaaggaggtgtggaaacctgccgtgcggtctggcggatctggcggaggctccaccagccccaagaaaaagagaaaagtctaagctgccttctgcggggcttgccttctggccatgcccttcttctctcccttgcacctgtacctcttggtctttgaataaagcctgagtaggaaggctagcaaaaaaaaaaaaaaaaaaaaaaaaaaaaaaaaaaaaaaaaaaaaaaaaaaaaaaaaaaaaaaaaaaaaaaaaaaaaaaaa

SEQ ID NO: 10181 - RNA, 8787 nt, synthetic construct
  source 1..8787: mol_type = other RNA
aggaaataagagagaaaagaagagtaagaagaaatataagagccaccatggcccctaagaagaagcgtaaagtgagccggatgaaccacgaccaggagttcgacccccctaaggtgtaccctcccgtccccgccgagaagagaaagcccatccgggtcctgagcctgttcgatggcatcgccaccggtctgctggtgctgaaggacctgggcatccaggtggataggtacattgcctccgaggtgtgcgaggactccatcaccgtgggaatggtgcgtcatcagggcaagatcatgtacgtgggcgacgtgcggagcgtgacacagaagcatatccaggagtggggccctttcgacctggtgatcggcggcagcccttgcaatgacctgagcatcgtgaacccagcccggaagggcctgtacgagggaaccggcagactgttcttcgagttttacagactgctgcacgacgcccggcctaaggaaggcgacgaccggcccttcttttggctgttcgagaatgtggtggccatgggagtcagcgacaagcgggatattagccggttcctggagagcaaccccgtgatgatcgatgccaaggaagtgagcgccgcccaccgggccagatacttctggggcaatctgcctggcatgaacagacccctggccagcaccgtgaacgacaagctggagctgcaggagtgcctggagcacggccggatcgccaagttcagcaaggtgagaaccatcaccacccgaagcaacagcatcaaacaaggcaaggaccagcactttcctgtgttcatgaacgagaaggaggacatcctgtggtgtaccgagatggagagagtgttcgggttcccagtccactacacagatgtcagcaacatgtctagactggccagacagagactgctgggaagaagctggtccgtccctgtgatcagacacctgttcgcccctctgaaggagtacttcgcctgcgtgagcagcggcaacagcaacgccaacagccggggccccagcttctctagcggcctggtgccactgtccctgagagggagccacatgggccccatggagatctacaaaaccgtgagcgcctggaagcggcagcctgtgcgcgtgctgagcctgtttcggaatatcgataaagtcctgaaaagcctgggattcctggagagcggctctggctccggcggtggcaccctgaagtacgtggaggatgtgacaaacgtggtcagacgggatgtggagaagtggggccccttcgatctggtgtacggcagcacccaacccctgggcagctcttgtgaccggtgccctggctggtacatgtttcagttccaccggatcctgcagtacgccctgccgagacaggagtcccagcggccattcttttggattttcatggacaacttgctgctgaccgaggatgaccaggaaactaccactcggttcctgcagaccgaagccgtgaccctgcaggacgtgagaggccgggactaccagaacgccatgcgggtgtggtccaacatccctggactgaaaagcaagcacgcacctctgacccctaaagaagaggagtacctgcaggcccaggtgcggagcagaagcaagctggacgcccctaaggtggatctgctggtgaagaattgcctcctgcccctgagagagtacttcaagtatttcagccagaatagtctgcccctgggaggcagcggcggcggcttccagggcctggtgaccttccaggacgtggccgtgatcttcagcctggacgagtggggccacctggaccccgcccagagggagctgtacagggaggtgatgctggagaactaccagaccctggcctgcctgggcctggccgtgagcaagcccgacgtgatcgcccagctggagcagggcggcgccccctggaagctggagaaggacatccccgccagcccctgccccggcgagcagtacgtgggcggcccaagcagcggcgcccctcctcccagcggcggcaggcggcccaagcagcggcgcccctcctcccagcggcggcagcccagccggctccccaacctctaccgaggagggcacctctgagtccgccacccccgagagcggccctggcacctccaccgagcccagcgagggcagcgcacccggcagccctgccggcagccccacctccacagaggagggaaccagcaccgagcccagcgaaggcagcgccccaggcaccagcaccgagcctagtgagcaggagattaaacggatcaacaagatcagaagaagacttgtgaaagacagcaacaccaagaaggccggcaagacaggccccatgaaaaccctgctggttagagtgatgacacccgatctgagagagcggctggaaaacctgagaaagaagcctgaaaatatcccccagcccatcagcaatacatctagagccaacctgaataagctgctgaccgattacaccgaaatgaagaaggcgatcctgcatgtgtactgggaagagttccagaaggaccctgtgggcctgatgagccgggtggcccagcctgccagcaagaagatcgatcagaacaagctgaaacctgagatggacgagaagggcaacctgaccaccgccggctttgcctgctctcagtgtggccagcccctgttcgtgtacaagctggagcaggtgtctgagaagggcaaggcttacaccaactacttcggacggtgcaatgtggccgagcacgaaaagctgatcctgctggcccagctgaagcccgagaaggatagcgacgaagccgtgacatatagcctgggaaagtttgggcagagggccctggatttctacagcattcatgtgaccaaggagtccacccaccccgtgaagcccctggcccagatcgccggaaacagatacgcctccggacctgtgggaaaggccctgagcgacgcatgtatgggcacaatcgcctccttcctgtctaagtaccaggacatcatcatcgaacaccagaaggtggtgaagggcaaccagaagagactggagagcctgcgggagctggccggcaaggaaaacctggaataccctagcgtgaccctgccacctcagcctcacaccaaggagggcgttgatgcctacaacgaagtgatcgcccgggtgcgaatgtgggtgaacctgaacctgtggcagaagctgaagctaagcagagatgatgccaagcctctgctgagactgaagggattcccttcctttcctctggtcgagagacaggccaacgaagtggactggtgggacatggtgtgtaacgtgaagaagctgatcaacgagaaaaaggaggatggcaaggtgttttggcagaatctggctggctacaagagacaggaagccctgagaccatacctgagcagcgaggaagatcggaagaagggaaagaaattcgctcggtaccagctgggcgacctgctgctgcacctggaaaagaagcacggcgaggactggggaaaggtgtacgacgaggcctgggagcggattgacaagaaagtggaaggcctgagcaagcacatcaagctggaagaggaacggagaagcgaggacgcccagagcaaggccgccctgaccgactggctgcgggctaaggccagcttcgtgatcgagggcctgaaggaggccgacaaggacgagttctgcagatgcgagctgaagctgcagaagtggtacggggacctgcggggaaagcccttcgccatcgaagccgagaacagcatcctggacatcagcggcttcagcaagcagtacaactgtgccttcatctggcagaaggacggcgtgaagaagctgaacctgtacctgatcatcaactacttcaagggcggcaagctgcggttcaagaagatcaaacctgaagccttcgaagccaacagattctacaccgtgatcaacaaaaagagcggcgagatcgtgcccatggaggtgaacttcaacttcgacgaccccaacctgatcatcctgcctctggcctttggcaagagacagggcagagaattcatctggaacgacctgctgtccctggaaaccggcagcctgaagctggccaacggaagagtgatcgagaagacactgtacaacagaagaacccggcaggatgagcctgccctgttcgtggccctgaccttcgagcggcgggaggtcctggactcctccaatatcaaaccaatgaacctgatcggcgtggcaagaggcgaaaacatccccgccgtgatcgccctgaccgaccccgagggctgcccactgagccggtttaaggatagcctgggaaacccaacccacatcctgagaatcggcgagagctataaggagaagcagcggaccatccaggccaagaaggaggtggagcagcggagagccggcggctacagccggaagtacgccagcaaagccaagaatctggcagacgatatggtgagaaacaccgctagagatctgctgtactacgccgtgacccaggatgccatgctgatcttcgccaacctgagccggggcttcggccggcagggcaagcggaccttcatggccgagagacagtacacacggatggaggactggctgaccgccaagctggcctacgagggcctgagcaagacctacctgtccaagacactggcccagtacacctccaagacatgcagcaactgtgggtttaccatcaccagcgccgactacgacagggtgctggagaagctgaagaagacagcaacaggctggatgaccacaattaacggcaaggagctgaaggtggagggccagattacctactacaacagatacaagagacagaacgtagtcaaggacctgtccgtcgagctggatagactgagcgaagaatctgtgaacaacgacatctcctcctggacaaagggcagaagcggagaagctctgagcctcctgaagaaaagattctcccatagacccgtgcaggagaagttcgtgtgcctgaactgcggcttcgagacacacgcagccgagcaagccgccctgaacatcgccagatcctggctgttcctgcggagccaggagtacaagaaataccagacaaacaagacaaccggcaacaccgataagagagccttcgtcgagacctggcagtccttttaccggaagaagcttaaggaggtgtggaaacctgccgtgcggtctggcggatctggcggaggctccaccagccccaagaaaaagagaaaagtctaagctgccttctgcggggcttgccttctggccatgcccttcttctctcccttgcacctgtacctcttggtctttgaataaagcctgagtaggaaggctagcaaaaaaaaaaaaaaaaaaaaaaaaaaaaaaaaaaaaaaaaaaaaaaaaaaaaaaaaaaaaaaaaaaaaaaaaaaaaaaaagcccagccggctccccaacctctaccgaggagggcacctctgagtccgccacccccgagagcggccctggcacctccaccgagcccagcgagggcagcgcacccggcagccctgccggcagccccacctccacagaggagggaaccagcaccgagcccagcgaaggcagcgccccaggcaccagcaccgagcctagtgagcaggagattaaacggatcaacaagatcagaagaagacttgtgaaagacagcaacaccaagaaggccggcaagacaggccccatgaaaaccctgctggttagagtgatgacacccgatctgagagagcggctggaaaacctgagaaagaagcctgaaaatatcccccagcccatcagcaatacatctagagccaacctgaataagctgctgaccgattacaccgaaatgaagaaggcgatcctgcatgtgtactgggaagagttccagaaggaccctgtgggcctgatgagccgggtggcccagcctgccagcaagaagatcgatcagaacaagctgaaacctgagatggacgagaagggcaacctgaccaccgccggctttgcctgctctcagtgtggccagcccctgttcgtgtacaagctggagcaggtgtctgagaagggcaaggcttacaccaactacttcggacggtgcaatgtggccgagcacgaaaagctgatcctgctggcccagctgaagcccgagaaggatagcgacgaagccgtgacatatagcctgggaaagtttgggcagagggccctggatttctacagcattcatgtgaccaaggagtccacccaccccgtgaagcccctggcccagatcgccggaaacagatacgcctccggacctgtgggaaaggccctgagcgacgcatgtatgggcacaatcgcctccttcctgtctaagtaccaggacatcatcatcgaacaccagaaggtggtgaagggcaaccagaagagactggagagcctgcgggagctggccggcaaggaaaacctggaataccctagcgtgaccctgccacctcagcctcacaccaaggagggcgttgatgcctacaacgaagtgatcgcccgggtgcgaatgtgggtgaacctgaacctgtggcagaagctgaagctaagcagagatgatgccaagcctctgctgagactgaagggattcccttcctttcctctggtcgagagacaggccaacgaagtggactggtgggacatggtgtgtaacgtgaagaagctgatcaacgagaaaaaggaggatggcaaggtgttttggcagaatctggctggctacaagagacaggaagccctgagaccatacctgagcagcgaggaagatcggaagaagggaaagaaattcgctcggtaccagctgggcgacctgctgctgcacctggaaaagaagcacggcgaggactggggaaaggtgtacgacgaggcctgggagcggattgacaagaaagtggaaggcctgagcaagcacatcaagctggaagaggaacggagaagcgaggacgcccagagcaaggccgccctgaccgactggctgcgggctaaggccagcttcgtgatcgagggcctgaaggaggccgacaaggacgagttctgcagatgcgagctgaagctgcagaagtggtacggggacctgcggggaaagcccttcgccatcgaagccgagaacagcatcctggacatcagcggcttcagcaagcagtacaactgtgccttcatctggcagaaggacggcgtgaagaagctgaacctgtacctgatcatcaactacttcaagggcggcaagctgcggttcaagaagatcaaacctgaagccttcgaagccaacagattctacaccgtgatcaacaaaaagagcggcgagatcgtgcccatggaggtgaacttcaacttcgacgaccccaacctgatcatcctgcctctggcctttggcaagagacagggcagagaattcatctggaacgacctgctgtccctggaaaccggcagcctgaagctggccaacggaagagtgatcgagaagacactgtacaacagaagaacccggcaggatgagcctgccctgttcgtggccctgaccttcgagcggcgggaggtcctggactcctccaatatcaaaccaatgaacctgatcggcgtggcaagaggcgaaaacatccccgccgtgatcgccctgaccgaccccgagggctgcccactgagccggtttaaggatagcctgggaaacccaacccacatcctgagaatcggcgagagctataaggagaagcagcggaccatccaggccaagaaggaggtggagcagcggagagccggcggctacagccggaagtacgccagcaaagccaagaatctggcagacgatatggtgagaaacaccgctagagatctgctgtactacgccgtgacccaggatgccatgctgatcttcgccaacctgagccggggcttcggccggcagggcaagcggaccttcatggccgagagacagtacacacggatggaggactggctgaccgccaagctggcctacgagggcctgagcaagacctacctgtccaagacactggcccagtacacctccaagacatgcagcaactgtgggtttaccatcaccagcgccgactacgacagggtgctggagaagctgaagaagacagcaacaggctggatgaccacaattaacggcaaggagctgaaggtggagggccagattacctactacaacagatacaagagacagaacgtagtcaaggacctgtccgtcgagctggatagactgagcgaagaatctgtgaacaacgacatctcctcctggacaaagggcagaagcggagaagctctgagcctcctgaagaaaagattctcccatagacccgtgcaggagaagttcgtgtgcctgaactgcggcttcgagacacacgcagccgagcaagccgccctgaacatcgccagatcctggctgttcctgcggagccaggagtacaagaaataccagacaaacaagacaaccggcaacaccgataagagagccttcgtcgagacctggcagtccttttaccggaagaagcttaaggaggtgtggaaacctgccgtgcggtctggcggatctggcggaggctccaccagccccaagaaaaagagaaaagtctaagctgccttctgcggggcttgccttctggccatgcccttcttctctcccttgcacctgtacctcttggtctttgaataaagcctgagtaggaaggctagcaaaaaaaaaaaaaaaaaaaaaaaaaaaaaaaaaaaaaaaaaaaaaaaaaaaaaaaaaaaaaaaaaaaaaaaaaaaaaaaa

SEQ ID NO: 10182 - RNA, 8787 nt, synthetic construct
  source 1..8787: mol_type = other RNA
aggaaataagagagaaaagaagagtaagaagaaatataagagccaccatggcccctaagaagaagcgtaaagtgagccggatgaaccacgaccaggagttcgacccccctaaggtgtaccctcccgtccccgccgagaagagaaagcccatccgggtcctgagcctgttcgatggcatcgccaccggtctgctggtgctgaaggacctgggcatccaggtggataggtacattgcctccgaggtgtgcgaggactccatcaccgtgggaatggtgcgtcatcagggcaagatcatgtacgtgggcgacgtgcggagcgtgacacagaagcatatccaggagtggggccctttcgacctggtgatcggcggcagcccttgcaatgacctgagcatcgtgaacccagcccggaagggcctgtacgagggaaccggcagactgttcttcgagttttacagactgctgcacgacgcccggcctaaggaaggcgacgaccggcccttcttttggctgttcgagaatgtggtggccatgggagtcagcgacaagcgggatattagccggttcctggagagcaaccccgtgatgatcgatgccaaggaagtgagcgccgcccaccgggccagatacttctggggcaatctgcctggcatgaacagacccctggccagcaccgtgaacgacaagctggagctgcaggagtgcctggagcacggccggatcgccaagttcagcaaggtgagaaccatcaccacccgaagcaacagcatcaaacaaggcaaggaccagcactttcctgtgttcatgaacgagaaggaggacatcctgtggtgtaccgagatggagagagtgttcgggttcccagtccactacacagatgtcagcaacatgtctagactggccagacagagactgctgggaagaagctggtccgtccctgtgatcagacacctgttcgcccctctgaaggagtacttcgcctgcgtgagcagcggcaacagcaacgccaacagccggggccccagcttctctagcggcctggtgccactgtccctgagagggagccacatgggccccatggagatctacaaaaccgtgagcgcctggaagcggcagcctgtgcgcgtgctgagcctgtttcggaatatcgataaagtcctgaaaagcctgggattcctggagagcggctctggctccggcggtggcaccctgaagtacgtggaggatgtgacaaacgtggtcagacgggatgtggagaagtggggccccttcgatctggtgtacggcagcacccaacccctgggcagctcttgtgaccggtgccctggctggtacatgtttcagttccaccggatcctgcagtacgccctgccgagacaggagtcccagcggccattcttttggattttcatggacaacttgctgctgaccgaggatgaccaggaaactaccactcggttcctgcagaccgaagccgtgaccctgcaggacgtgagaggccgggactaccagaacgccatgcgggtgtggtccaacatccctggactgaaaagcaagcacgcacctctgacccctaaagaagaggagtacctgcaggcccaggtgcggagcagaagcaagctggacgcccctaaggtggatctgctggtgaagaattgcctcctgcccctgagagagtacttcaagtatttcagccagaatagtctgcccctgggaggcagcggcggcggcacccagggccaggtgaccttcagggacgtggccatcgagttcagccaggaggagtggacctgcctggaccccgcccagaggagcctgtacagggacgtgatgctggagaactacaggaacctggccagcctgggcatcagctgcttcgacctgagcatcatcagcatgctggagcagaggaaggagcccttcaccctggagagccaggtgcagatcgccggcaaccccgacggctgggagtggggcggcccaagcagcggcgcccctcctcccagcggcggcaggcggcccaagcagcggcgcccctcctcccagcggcggcagcccagccggctccccaacctctaccgaggagggcacctctgagtccgccacccccgagagcggccctggcacctccaccgagcccagcgagggcagcgcacccggcagccctgccggcagccccacctccacagaggagggaaccagcaccgagcccagcgaaggcagcgccccaggcaccagcaccgagcctagtgagcaggagattaaacggatcaacaagatcagaagaagacttgtgaaagacagcaacaccaagaaggccggcaagacaggccccatgaaaaccctgctggttagagtgatgacacccgatctgagagagcggctggaaaacctgagaaagaagcctgaaaatatcccccagcccatcagcaatacatctagagccaacctgaataagctgctgaccgattacaccgaaatgaagaaggcgatcctgcatgtgtactgggaagagttccagaaggaccctgtgggcctgatgagccgggtggcccagcctgccagcaagaagatcgatcagaacaagctgaaacctgagatggacgagaagggcaacctgaccaccgccggctttgcctgctctcagtgtggccagcccctgttcgtgtacaagctggagcaggtgtctgagaagggcaaggcttacaccaactacttcggacggtgcaatgtggccgagcacgaaaagctgatcctgctggcccagctgaagcccgagaaggatagcgacgaagccgtgacatatagcctgggaaagtttgggcagagggccctggatttctacagcattcatgtgaccaaggagtccacccaccccgtgaagcccctggcccagatcgccggaaacagatacgcctccggacctgtgggaaaggccctgagcgacgcatgtatgggcacaatcgcctccttcctgtctaagtaccaggacatcatcatcgaacaccagaaggtggtgaagggcaaccagaagagactggagagcctgcgggagctggccggcaaggaaaacctggaataccctagcgtgaccctgccacctcagcctcacaccaaggagggcgttgatgcctacaacgaagtgatcgcccgggtgcgaatgtgggtgaacctgaacctgtggcagaagctgaagctaagcagagatgatgccaagcctctgctgagactgaagggattcccttcctttcctctggtcgagagacaggccaacgaagtggactggtgggacatggtgtgtaacgtgaagaagctgatcaacgagaaaaaggaggatggcaaggtgttttggcagaatctggctggctacaagagacaggaagccctgagaccatacctgagcagcgaggaagatcggaagaagggaaagaaattcgctcggtaccagctgggcgacctgctgctgcacctggaaaagaagcacggcgaggactggggaaaggtgtacgacgaggcctgggagcggattgacaagaaagtggaaggcctgagcaagcacatcaagctggaagaggaacggagaagcgaggacgcccagagcaaggccgccctgaccgactggctgcgggctaaggccagcttcgtgatcgagggcctgaaggaggccgacaaggacgagttctgcagatgcgagctgaagctgcagaagtggtacggggacctgcggggaaagcccttcgccatcgaagccgagaacagcatcctggacatcagcggcttcagcaagcagtacaactgtgccttcatctggcagaaggacggcgtgaagaagctgaacctgtacctgatcatcaactacttcaagggcggcaagctgcggttcaagaagatcaaacctgaagccttcgaagccaacagattctacaccgtgatcaacaaaaagagcggcgagatcgtgcccatggaggtgaacttcaacttcgacgaccccaacctgatcatcctgcctctggcctttggcaagagacagggcagagaattcatctggaacgacctgctgtccctggaaaccggcagcctgaagctggccaacggaagagtgatcgagaagacactgtacaacagaagaacccggcaggatgagcctgccctgttcgtggccctgaccttcgagcggcgggaggtcctggactcctccaatatcaaaccaatgaacctgatcggcgtggcaagaggcgaaaacatccccgccgtgatcgccctgaccgaccccgagggctgcccactgagccggtttaaggatagcctgggaaacccaacccacatcctgagaatcggcgagagctataaggagaagcagcggaccatccaggccaagaaggaggtggagcagcggagagccggcggctacagccggaagtacgccagcaaagccaagaatctggcagacgatatggtgagaaacaccgctagagatctgctgtactacgccgtgacccaggatgccatgctgatcttcgccaacctgagccggggcttcggccggcagggcaagcggaccttcatggccgagagacagtacacacggatggaggactggctgaccgccaagctggcctacgagggcctgagcaagacctacctgtccaagacactggcccagtacacctccaagacatgcagcaactgtgggtttaccatcaccagcgccgactacgacagggtgctggagaagctgaagaagacagcaacaggctggatgaccacaattaacggcaaggagctgaaggtggagggccagattacctactacaacagatacaagagacagaacgtagtcaaggacctgtccgtcgagctggatagactgagcgaagaatctgtgaacaacgacatctcctcctggacaaagggcagaagcggagaagctctgagcctcctgaagaaaagattctcccatagacccgtgcaggagaagttcgtgtgcctgaactgcggcttcgagacacacgcagccgagcaagccgccctgaacatcgccagatcctggctgttcctgcggagccaggagtacaagaaataccagacaaacaagacaaccggcaacaccgataagagagccttcgtcgagacctggcagtccttttaccggaagaagcttaaggaggtgtggaaacctgccgtgcggtctggcggatctggcggaggctccaccagccccaagaaaaagagaaaagtctaagctgccttctgcggggcttgccttctggccatgcccttcttctctcccttgcacctgtacctcttggtctttgaataaagcctgagtaggaaggctagcaaaaaaaaaaaaaaaaaaaaaaaaaaaaaaaaaaaaaaaaaaaaaaaaaaaaaaaaaaaaaaaaaaaaaaaaaaaaaaaagcccagccggctccccaacctctaccgaggagggcacctctgagtccgccacccccgagagcggccctggcacctccaccgagcccagcgagggcagcgcacccggcagccctgccggcagccccacctccacagaggagggaaccagcaccgagcccagcgaaggcagcgccccaggcaccagcaccgagcctagtgagcaggagattaaacggatcaacaagatcagaagaagacttgtgaaagacagcaacaccaagaaggccggcaagacaggccccatgaaaaccctgctggttagagtgatgacacccgatctgagagagcggctggaaaacctgagaaagaagcctgaaaatatcccccagcccatcagcaatacatctagagccaacctgaataagctgctgaccgattacaccgaaatgaagaaggcgatcctgcatgtgtactgggaagagttccagaaggaccctgtgggcctgatgagccgggtggcccagcctgccagcaagaagatcgatcagaacaagctgaaacctgagatggacgagaagggcaacctgaccaccgccggctttgcctgctctcagtgtggccagcccctgttcgtgtacaagctggagcaggtgtctgagaagggcaaggcttacaccaactacttcggacggtgcaatgtggccgagcacgaaaagctgatcctgctggcccagctgaagcccgagaaggatagcgacgaagccgtgacatatagcctgggaaagtttgggcagagggccctggatttctacagcattcatgtgaccaaggagtccacccaccccgtgaagcccctggcccagatcgccggaaacagatacgcctccggacctgtgggaaaggccctgagcgacgcatgtatgggcacaatcgcctccttcctgtctaagtaccaggacatcatcatcgaacaccagaaggtggtgaagggcaaccagaagagactggagagcctgcgggagctggccggcaaggaaaacctggaataccctagcgtgaccctgccacctcagcctcacaccaaggagggcgttgatgcctacaacgaagtgatcgcccgggtgcgaatgtgggtgaacctgaacctgtggcagaagctgaagctaagcagagatgatgccaagcctctgctgagactgaagggattcccttcctttcctctggtcgagagacaggccaacgaagtggactggtgggacatggtgtgtaacgtgaagaagctgatcaacgagaaaaaggaggatggcaaggtgttttggcagaatctggctggctacaagagacaggaagccctgagaccatacctgagcagcgaggaagatcggaagaagggaaagaaattcgctcggtaccagctgggcgacctgctgctgcacctggaaaagaagcacggcgaggactggggaaaggtgtacgacgaggcctgggagcggattgacaagaaagtggaaggcctgagcaagcacatcaagctggaagaggaacggagaagcgaggacgcccagagcaaggccgccctgaccgactggctgcgggctaaggccagcttcgtgatcgagggcctgaaggaggccgacaaggacgagttctgcagatgcgagctgaagctgcagaagtggtacggggacctgcggggaaagcccttcgccatcgaagccgagaacagcatcctggacatcagcggcttcagcaagcagtacaactgtgccttcatctggcagaaggacggcgtgaagaagctgaacctgtacctgatcatcaactacttcaagggcggcaagctgcggttcaagaagatcaaacctgaagccttcgaagccaacagattctacaccgtgatcaacaaaaagagcggcgagatcgtgcccatggaggtgaacttcaacttcgacgaccccaacctgatcatcctgcctctggcctttggcaagagacagggcagagaattcatctggaacgacctgctgtccctggaaaccggcagcctgaagctggccaacggaagagtgatcgagaagacactgtacaacagaagaacccggcaggatgagcctgccctgttcgtggccctgaccttcgagcggcgggaggtcctggactcctccaatatcaaaccaatgaacctgatcggcgtggcaagaggcgaaaacatccccgccgtgatcgccctgaccgaccccgagggctgcccactgagccggtttaaggatagcctgggaaacccaacccacatcctgagaatcggcgagagctataaggagaagcagcggaccatccaggccaagaaggaggtggagcagcggagagccggcggctacagccggaagtacgccagcaaagccaagaatctggcagacgatatggtgagaaacaccgctagagatctgctgtactacgccgtgacccaggatgccatgctgatcttcgccaacctgagccggggcttcggccggcagggcaagcggaccttcatggccgagagacagtacacacggatggaggactggctgaccgccaagctggcctacgagggcctgagcaagacctacctgtccaagacactggcccagtacacctccaagacatgcagcaactgtgggtttaccatcaccagcgccgactacgacagggtgctggagaagctgaagaagacagcaacaggctggatgaccacaattaacggcaaggagctgaaggtggagggccagattacctactacaacagatacaagagacagaacgtagtcaaggacctgtccgtcgagctggatagactgagcgaagaatctgtgaacaacgacatctcctcctggacaaagggcagaagcggagaagctctgagcctcctgaagaaaagattctcccatagacccgtgcaggagaagttcgtgtgcctgaactgcggcttcgagacacacgcagccgagcaagccgccctgaacatcgccagatcctggctgttcctgcggagccaggagtacaagaaataccagacaaacaagacaaccggcaacaccgataagagagccttcgtcgagacctggcagtccttttaccggaagaagcttaaggaggtgtggaaacctgccgtgcggtctggcggatctggcggaggctccaccagccccaagaaaaagagaaaagtctaagctgccttctgcggggcttgccttctggccatgcccttcttctctcccttgcacctgtacctcttggtctttgaataaagcctgagtaggaaggctagcaaaaaaaaaaaaaaaaaaaaaaaaaaaaaaaaaaaaaaaaaaaaaaaaaaaaaaaaaaaaaaaaaaaaaaaaaaaaaaaa

SEQ ID NO: 10183 - RNA, 8787 nt, synthetic construct
  source 1..8787: mol_type = other RNA
aggaaataagagagaaaagaagagtaagaagaaatataagagccaccatggcccctaagaagaagcgtaaagtgagccggatgaaccacgaccaggagttcgacccccctaaggtgtaccctcccgtccccgccgagaagagaaagcccatccgggtcctgagcctgttcgatggcatcgccaccggtctgctggtgctgaaggacctgggcatccaggtggataggtacattgcctccgaggtgtgcgaggactccatcaccgtgggaatggtgcgtcatcagggcaagatcatgtacgtgggcgacgtgcggagcgtgacacagaagcatatccaggagtggggccctttcgacctggtgatcggcggcagcccttgcaatgacctgagcatcgtgaacccagcccggaagggcctgtacgagggaaccggcagactgttcttcgagttttacagactgctgcacgacgcccggcctaaggaaggcgacgaccggcccttcttttggctgttcgagaatgtggtggccatgggagtcagcgacaagcgggatattagccggttcctggagagcaaccccgtgatgatcgatgccaaggaagtgagcgccgcccaccgggccagatacttctggggcaatctgcctggcatgaacagacccctggccagcaccgtgaacgacaagctggagctgcaggagtgcctggagcacggccggatcgccaagttcagcaaggtgagaaccatcaccacccgaagcaacagcatcaaacaaggcaaggaccagcactttcctgtgttcatgaacgagaaggaggacatcctgtggtgtaccgagatggagagagtgttcgggttcccagtccactacacagatgtcagcaacatgtctagactggccagacagagactgctgggaagaagctggtccgtccctgtgatcagacacctgttcgcccctctgaaggagtacttcgcctgcgtgagcagcggcaacagcaacgccaacagccggggccccagcttctctagcggcctggtgccactgtccctgagagggagccacatgggccccatggagatctacaaaaccgtgagcgcctggaagcggcagcctgtgcgcgtgctgagcctgtttcggaatatcgataaagtcctgaaaagcctgggattcctggagagcggctctggctccggcggtggcaccctgaagtacgtggaggatgtgacaaacgtggtcagacgggatgtggagaagtggggccccttcgatctggtgtacggcagcacccaacccctgggcagctcttgtgaccggtgccctggctggtacatgtttcagttccaccggatcctgcagtacgccctgccgagacaggagtcccagcggccattcttttggattttcatggacaacttgctgctgaccgaggatgaccaggaaactaccactcggttcctgcagaccgaagccgtgaccctgcaggacgtgagaggccgggactaccagaacgccatgcgggtgtggtccaacatccctggactgaaaagcaagcacgcacctctgacccctaaagaagaggagtacctgcaggcccaggtgcggagcagaagcaagctggacgcccctaaggtggatctgctggtgaagaattgcctcctgcccctgagagagtacttcaagtatttcagccagaatagtctgcccctgggaggcagcggcggcggcgacagggtgaagttcaccttcagcgacgtggccgtgtacttcagcgaggaggagtggcagctgctggaggagcagcagaaggagctgtacaggaacgtgatgaaggagaactacaccaccctgaccagcctgggctacaccaccgtgaagcccgacgtgatcagcaagatcgagcagggcaagcagcccagcgtgagcagccccagcggcagcaagggcaggagggccgtgggcaggcccaccggcggcccaagcagcggcgcccctcctcccagcggcggcaggcggcccaagcagcggcgcccctcctcccagcggcggcagcccagccggctccccaacctctaccgaggagggcacctctgagtccgccacccccgagagcggccctggcacctccaccgagcccagcgagggcagcgcacccggcagccctgccggcagccccacctccacagaggagggaaccagcaccgagcccagcgaaggcagcgccccaggcaccagcaccgagcctagtgagcaggagattaaacggatcaacaagatcagaagaagacttgtgaaagacagcaacaccaagaaggccggcaagacaggccccatgaaaaccctgctggttagagtgatgacacccgatctgagagagcggctggaaaacctgagaaagaagcctgaaaatatcccccagcccatcagcaatacatctagagccaacctgaataagctgctgaccgattacaccgaaatgaagaaggcgatcctgcatgtgtactgggaagagttccagaaggaccctgtgggcctgatgagccgggtggcccagcctgccagcaagaagatcgatcagaacaagctgaaacctgagatggacgagaagggcaacctgaccaccgccggctttgcctgctctcagtgtggccagcccctgttcgtgtacaagctggagcaggtgtctgagaagggcaaggcttacaccaactacttcggacggtgcaatgtggccgagcacgaaaagctgatcctgctggcccagctgaagcccgagaaggatagcgacgaagccgtgacatatagcctgggaaagtttgggcagagggccctggatttctacagcattcatgtgaccaaggagtccacccaccccgtgaagcccctggcccagatcgccggaaacagatacgcctccggacctgtgggaaaggccctgagcgacgcatgtatgggcacaatcgcctccttcctgtctaagtaccaggacatcatcatcgaacaccagaaggtggtgaagggcaaccagaagagactggagagcctgcgggagctggccggcaaggaaaacctggaataccctagcgtgaccctgccacctcagcctcacaccaaggagggcgttgatgcctacaacgaagtgatcgcccgggtgcgaatgtgggtgaacctgaacctgtggcagaagctgaagctaagcagagatgatgccaagcctctgctgagactgaagggattcccttcctttcctctggtcgagagacaggccaacgaagtggactggtgggacatggtgtgtaacgtgaagaagctgatcaacgagaaaaaggaggatggcaaggtgttttggcagaatctggctggctacaagagacaggaagccctgagaccatacctgagcagcgaggaagatcggaagaagggaaagaaattcgctcggtaccagctgggcgacctgctgctgcacctggaaaagaagcacggcgaggactggggaaaggtgtacgacgaggcctgggagcggattgacaagaaagtggaaggcctgagcaagcacatcaagctggaagaggaacggagaagcgaggacgcccagagcaaggccgccctgaccgactggctgcgggctaaggccagcttcgtgatcgagggcctgaaggaggccgacaaggacgagttctgcagatgcgagctgaagctgcagaagtggtacggggacctgcggggaaagcccttcgccatcgaagccgagaacagcatcctggacatcagcggcttcagcaagcagtacaactgtgccttcatctggcagaaggacggcgtgaagaagctgaacctgtacctgatcatcaactacttcaagggcggcaagctgcggttcaagaagatcaaacctgaagccttcgaagccaacagattctacaccgtgatcaacaaaaagagcggcgagatcgtgcccatggaggtgaacttcaacttcgacgaccccaacctgatcatcctgcctctggcctttggcaagagacagggcagagaattcatctggaacgacctgctgtccctggaaaccggcagcctgaagctggccaacggaagagtgatcgagaagacactgtacaacagaagaacccggcaggatgagcctgccctgttcgtggccctgaccttcgagcggcgggaggtcctggactcctccaatatcaaaccaatgaacctgatcggcgtggcaagaggcgaaaacatccccgccgtgatcgccctgaccgaccccgagggctgcccactgagccggtttaaggatagcctgggaaacccaacccacatcctgagaatcggcgagagctataaggagaagcagcggaccatccaggccaagaaggaggtggagcagcggagagccggcggctacagccggaagtacgccagcaaagccaagaatctggcagacgatatggtgagaaacaccgctagagatctgctgtactacgccgtgacccaggatgccatgctgatcttcgccaacctgagccggggcttcggccggcagggcaagcggaccttcatggccgagagacagtacacacggatggaggactggctgaccgccaagctggcctacgagggcctgagcaagacctacctgtccaagacactggcccagtacacctccaagacatgcagcaactgtgggtttaccatcaccagcgccgactacgacagggtgctggagaagctgaagaagacagcaacaggctggatgaccacaattaacggcaaggagctgaaggtggagggccagattacctactacaacagatacaagagacagaacgtagtcaaggacctgtccgtcgagctggatagactgagcgaagaatctgtgaacaacgacatctcctcctggacaaagggcagaagcggagaagctctgagcctcctgaagaaaagattctcccatagacccgtgcaggagaagttcgtgtgcctgaactgcggcttcgagacacacgcagccgagcaagccgccctgaacatcgccagatcctggctgttcctgcggagccaggagtacaagaaataccagacaaacaagacaaccggcaacaccgataagagagccttcgtcgagacctggcagtccttttaccggaagaagcttaaggaggtgtggaaacctgccgtgcggtctggcggatctggcggaggctccaccagccccaagaaaaagagaaaagtctaagctgccttctgcggggcttgccttctggccatgcccttcttctctcccttgcacctgtacctcttggtctttgaataaagcctgagtaggaaggctagcaaaaaaaaaaaaaaaaaaaaaaaaaaaaaaaaaaaaaaaaaaaaaaaaaaaaaaaaaaaaaaaaaaaaaaaaaaaaaaaagcccagccggctccccaacctctaccgaggagggcacctctgagtccgccacccccgagagcggccctggcacctccaccgagcccagcgagggcagcgcacccggcagccctgccggcagccccacctccacagaggagggaaccagcaccgagcccagcgaaggcagcgccccaggcaccagcaccgagcctagtgagcaggagattaaacggatcaacaagatcagaagaagacttgtgaaagacagcaacaccaagaaggccggcaagacaggccccatgaaaaccctgctggttagagtgatgacacccgatctgagagagcggctggaaaacctgagaaagaagcctgaaaatatcccccagcccatcagcaatacatctagagccaacctgaataagctgctgaccgattacaccgaaatgaagaaggcgatcctgcatgtgtactgggaagagttccagaaggaccctgtgggcctgatgagccgggtggcccagcctgccagcaagaagatcgatcagaacaagctgaaacctgagatggacgagaagggcaacctgaccaccgccggctttgcctgctctcagtgtggccagcccctgttcgtgtacaagctggagcaggtgtctgagaagggcaaggcttacaccaactacttcggacggtgcaatgtggccgagcacgaaaagctgatcctgctggcccagctgaagcccgagaaggatagcgacgaagccgtgacatatagcctgggaaagtttgggcagagggccctggatttctacagcattcatgtgaccaaggagtccacccaccccgtgaagcccctggcccagatcgccggaaacagatacgcctccggacctgtgggaaaggccctgagcgacgcatgtatgggcacaatcgcctccttcctgtctaagtaccaggacatcatcatcgaacaccagaaggtggtgaagggcaaccagaagagactggagagcctgcgggagctggccggcaaggaaaacctggaataccctagcgtgaccctgccacctcagcctcacaccaaggagggcgttgatgcctacaacgaagtgatcgcccgggtgcgaatgtgggtgaacctgaacctgtggcagaagctgaagctaagcagagatgatgccaagcctctgctgagactgaagggattcccttcctttcctctggtcgagagacaggccaacgaagtggactggtgggacatggtgtgtaacgtgaagaagctgatcaacgagaaaaaggaggatggcaaggtgttttggcagaatctggctggctacaagagacaggaagccctgagaccatacctgagcagcgaggaagatcggaagaagggaaagaaattcgctcggtaccagctgggcgacctgctgctgcacctggaaaagaagcacggcgaggactggggaaaggtgtacgacgaggcctgggagcggattgacaagaaagtggaaggcctgagcaagcacatcaagctggaagaggaacggagaagcgaggacgcccagagcaaggccgccctgaccgactggctgcgggctaaggccagcttcgtgatcgagggcctgaaggaggccgacaaggacgagttctgcagatgcgagctgaagctgcagaagtggtacggggacctgcggggaaagcccttcgccatcgaagccgagaacagcatcctggacatcagcggcttcagcaagcagtacaactgtgccttcatctggcagaaggacggcgtgaagaagctgaacctgtacctgatcatcaactacttcaagggcggcaagctgcggttcaagaagatcaaacctgaagccttcgaagccaacagattctacaccgtgatcaacaaaaagagcggcgagatcgtgcccatggaggtgaacttcaacttcgacgaccccaacctgatcatcctgcctctggcctttggcaagagacagggcagagaattcatctggaacgacctgctgtccctggaaaccggcagcctgaagctggccaacggaagagtgatcgagaagacactgtacaacagaagaacccggcaggatgagcctgccctgttcgtggccctgaccttcgagcggcgggaggtcctggactcctccaatatcaaaccaatgaacctgatcggcgtggcaagaggcgaaaacatccccgccgtgatcgccctgaccgaccccgagggctgcccactgagccggtttaaggatagcctgggaaacccaacccacatcctgagaatcggcgagagctataaggagaagcagcggaccatccaggccaagaaggaggtggagcagcggagagccggcggctacagccggaagtacgccagcaaagccaagaatctggcagacgatatggtgagaaacaccgctagagatctgctgtactacgccgtgacccaggatgccatgctgatcttcgccaacctgagccggggcttcggccggcagggcaagcggaccttcatggccgagagacagtacacacggatggaggactggctgaccgccaagctggcctacgagggcctgagcaagacctacctgtccaagacactggcccagtacacctccaagacatgcagcaactgtgggtttaccatcaccagcgccgactacgacagggtgctggagaagctgaagaagacagcaacaggctggatgaccacaattaacggcaaggagctgaaggtggagggccagattacctactacaacagatacaagagacagaacgtagtcaaggacctgtccgtcgagctggatagactgagcgaagaatctgtgaacaacgacatctcctcctggacaaagggcagaagcggagaagctctgagcctcctgaagaaaagattctcccatagacccgtgcaggagaagttcgtgtgcctgaactgcggcttcgagacacacgcagccgagcaagccgccctgaacatcgccagatcctggctgttcctgcggagccaggagtacaagaaataccagacaaacaagacaaccggcaacaccgataagagagccttcgtcgagacctggcagtccttttaccggaagaagcttaaggaggtgtggaaacctgccgtgcggtctggcggatctggcggaggctccaccagccccaagaaaaagagaaaagtctaagctgccttctgcggggcttgccttctggccatgcccttcttctctcccttgcacctgtacctcttggtctttgaataaagcctgagtaggaaggctagcaaaaaaaaaaaaaaaaaaaaaaaaaaaaaaaaaaaaaaaaaaaaaaaaaaaaaaaaaaaaaaaaaaaaaaaaaaaaaaaa

SEQ ID NO: 10184 - RNA, 8787 nt, synthetic construct
  source 1..8787: mol_type = other RNA
aggaaataagagagaaaagaagagtaagaagaaatataagagccaccatggcccctaagaagaagcgtaaagtgagccggatgaaccacgaccaggagttcgacccccctaaggtgtaccctcccgtccccgccgagaagagaaagcccatccgggtcctgagcctgttcgatggcatcgccaccggtctgctggtgctgaaggacctgggcatccaggtggataggtacattgcctccgaggtgtgcgaggactccatcaccgtgggaatggtgcgtcatcagggcaagatcatgtacgtgggcgacgtgcggagcgtgacacagaagcatatccaggagtggggccctttcgacctggtgatcggcggcagcccttgcaatgacctgagcatcgtgaacccagcccggaagggcctgtacgagggaaccggcagactgttcttcgagttttacagactgctgcacgacgcccggcctaaggaaggcgacgaccggcccttcttttggctgttcgagaatgtggtggccatgggagtcagcgacaagcgggatattagccggttcctggagagcaaccccgtgatgatcgatgccaaggaagtgagcgccgcccaccgggccagatacttctggggcaatctgcctggcatgaacagacccctggccagcaccgtgaacgacaagctggagctgcaggagtgcctggagcacggccggatcgccaagttcagcaaggtgagaaccatcaccacccgaagcaacagcatcaaacaaggcaaggaccagcactttcctgtgttcatgaacgagaaggaggacatcctgtggtgtaccgagatggagagagtgttcgggttcccagtccactacacagatgtcagcaacatgtctagactggccagacagagactgctgggaagaagctggtccgtccctgtgatcagacacctgttcgcccctctgaaggagtacttcgcctgcgtgagcagcggcaacagcaacgccaacagccggggccccagcttctctagcggcctggtgccactgtccctgagagggagccacatgggccccatggagatctacaaaaccgtgagcgcctggaagcggcagcctgtgcgcgtgctgagcctgtttcggaatatcgataaagtcctgaaaagcctgggattcctggagagcggctctggctccggcggtggcaccctgaagtacgtggaggatgtgacaaacgtggtcagacgggatgtggagaagtggggccccttcgatctggtgtacggcagcacccaacccctgggcagctcttgtgaccggtgccctggctggtacatgtttcagttccaccggatcctgcagtacgccctgccgagacaggagtcccagcggccattcttttggattttcatggacaacttgctgctgaccgaggatgaccaggaaactaccactcggttcctgcagaccgaagccgtgaccctgcaggacgtgagaggccgggactaccagaacgccatgcgggtgtggtccaacatccctggactgaaaagcaagcacgcacctctgacccctaaagaagaggagtacctgcaggcccaggtgcggagcagaagcaagctggacgcccctaaggtggatctgctggtgaagaattgcctcctgcccctgagagagtacttcaagtatttcagccagaatagtctgcccctgggaggcagcggcggcggcagccagcacctggtgaccttcgaggacgtggccgtgaacttcacccaggaggagtggaccctgctggaccagacccagagggacctgtacagggacgtgatgctggagaactaccagaacctgatggccctggccggcagcgagagctgcaagccccacgtgaacagccccctggagggcgccgaggagctgaggaccagggccaggaggatcctgcagagcgagttcatggccgagagcgacggcggcccaagcagcggcgcccctcctcccagcggcggcaggcggcccaagcagcggcgcccctcctcccagcggcggcagcccagccggctccccaacctctaccgaggagggcacctctgagtccgccacccccgagagcggccctggcacctccaccgagcccagcgagggcagcgcacccggcagccctgccggcagccccacctccacagaggagggaaccagcaccgagcccagcgaaggcagcgccccaggcaccagcaccgagcctagtgagcaggagattaaacggatcaacaagatcagaagaagacttgtgaaagacagcaacaccaagaaggccggcaagacaggccccatgaaaaccctgctggttagagtgatgacacccgatctgagagagcggctggaaaacctgagaaagaagcctgaaaatatcccccagcccatcagcaatacatctagagccaacctgaataagctgctgaccgattacaccgaaatgaagaaggcgatcctgcatgtgtactgggaagagttccagaaggaccctgtgggcctgatgagccgggtggcccagcctgccagcaagaagatcgatcagaacaagctgaaacctgagatggacgagaagggcaacctgaccaccgccggctttgcctgctctcagtgtggccagcccctgttcgtgtacaagctggagcaggtgtctgagaagggcaaggcttacaccaactacttcggacggtgcaatgtggccgagcacgaaaagctgatcctgctggcccagctgaagcccgagaaggatagcgacgaagccgtgacatatagcctgggaaagtttgggcagagggccctggatttctacagcattcatgtgaccaaggagtccacccaccccgtgaagcccctggcccagatcgccggaaacagatacgcctccggacctgtgggaaaggccctgagcgacgcatgtatgggcacaatcgcctccttcctgtctaagtaccaggacatcatcatcgaacaccagaaggtggtgaagggcaaccagaagagactggagagcctgcgggagctggccggcaaggaaaacctggaataccctagcgtgaccctgccacctcagcctcacaccaaggagggcgttgatgcctacaacgaagtgatcgcccgggtgcgaatgtgggtgaacctgaacctgtggcagaagctgaagctaagcagagatgatgccaagcctctgctgagactgaagggattcccttcctttcctctggtcgagagacaggccaacgaagtggactggtgggacatggtgtgtaacgtgaagaagctgatcaacgagaaaaaggaggatggcaaggtgttttggcagaatctggctggctacaagagacaggaagccctgagaccatacctgagcagcgaggaagatcggaagaagggaaagaaattcgctcggtaccagctgggcgacctgctgctgcacctggaaaagaagcacggcgaggactggggaaaggtgtacgacgaggcctgggagcggattgacaagaaagtggaaggcctgagcaagcacatcaagctggaagaggaacggagaagcgaggacgcccagagcaaggccgccctgaccgactggctgcgggctaaggccagcttcgtgatcgagggcctgaaggaggccgacaaggacgagttctgcagatgcgagctgaagctgcagaagtggtacggggacctgcggggaaagcccttcgccatcgaagccgagaacagcatcctggacatcagcggcttcagcaagcagtacaactgtgccttcatctggcagaaggacggcgtgaagaagctgaacctgtacctgatcatcaactacttcaagggcggcaagctgcggttcaagaagatcaaacctgaagccttcgaagccaacagattctacaccgtgatcaacaaaaagagcggcgagatcgtgcccatggaggtgaacttcaacttcgacgaccccaacctgatcatcctgcctctggcctttggcaagagacagggcagagaattcatctggaacgacctgctgtccctggaaaccggcagcctgaagctggccaacggaagagtgatcgagaagacactgtacaacagaagaacccggcaggatgagcctgccctgttcgtggccctgaccttcgagcggcgggaggtcctggactcctccaatatcaaaccaatgaacctgatcggcgtggcaagaggcgaaaacatccccgccgtgatcgccctgaccgaccccgagggctgcccactgagccggtttaaggatagcctgggaaacccaacccacatcctgagaatcggcgagagctataaggagaagcagcggaccatccaggccaagaaggaggtggagcagcggagagccggcggctacagccggaagtacgccagcaaagccaagaatctggcagacgatatggtgagaaacaccgctagagatctgctgtactacgccgtgacccaggatgccatgctgatcttcgccaacctgagccggggcttcggccggcagggcaagcggaccttcatggccgagagacagtacacacggatggaggactggctgaccgccaagctggcctacgagggcctgagcaagacctacctgtccaagacactggcccagtacacctccaagacatgcagcaactgtgggtttaccatcaccagcgccgactacgacagggtgctggagaagctgaagaagacagcaacaggctggatgaccacaattaacggcaaggagctgaaggtggagggccagattacctactacaacagatacaagagacagaacgtagtcaaggacctgtccgtcgagctggatagactgagcgaagaatctgtgaacaacgacatctcctcctggacaaagggcagaagcggagaagctctgagcctcctgaagaaaagattctcccatagacccgtgcaggagaagttcgtgtgcctgaactgcggcttcgagacacacgcagccgagcaagccgccctgaacatcgccagatcctggctgttcctgcggagccaggagtacaagaaataccagacaaacaagacaaccggcaacaccgataagagagccttcgtcgagacctggcagtccttttaccggaagaagcttaaggaggtgtggaaacctgccgtgcggtctggcggatctggcggaggctccaccagccccaagaaaaagagaaaagtctaagctgccttctgcggggcttgccttctggccatgcccttcttctctcccttgcacctgtacctcttggtctttgaataaagcctgagtaggaaggctagcaaaaaaaaaaaaaaaaaaaaaaaaaaaaaaaaaaaaaaaaaaaaaaaaaaaaaaaaaaaaaaaaaaaaaaaaaaaaaaaagcccagccggctccccaacctctaccgaggagggcacctctgagtccgccacccccgagagcggccctggcacctccaccgagcccagcgagggcagcgcacccggcagccctgccggcagccccacctccacagaggagggaaccagcaccgagcccagcgaaggcagcgccccaggcaccagcaccgagcctagtgagcaggagattaaacggatcaacaagatcagaagaagacttgtgaaagacagcaacaccaagaaggccggcaagacaggccccatgaaaaccctgctggttagagtgatgacacccgatctgagagagcggctggaaaacctgagaaagaagcctgaaaatatcccccagcccatcagcaatacatctagagccaacctgaataagctgctgaccgattacaccgaaatgaagaaggcgatcctgcatgtgtactgggaagagttccagaaggaccctgtgggcctgatgagccgggtggcccagcctgccagcaagaagatcgatcagaacaagctgaaacctgagatggacgagaagggcaacctgaccaccgccggctttgcctgctctcagtgtggccagcccctgttcgtgtacaagctggagcaggtgtctgagaagggcaaggcttacaccaactacttcggacggtgcaatgtggccgagcacgaaaagctgatcctgctggcccagctgaagcccgagaaggatagcgacgaagccgtgacatatagcctgggaaagtttgggcagagggccctggatttctacagcattcatgtgaccaaggagtccacccaccccgtgaagcccctggcccagatcgccggaaacagatacgcctccggacctgtgggaaaggccctgagcgacgcatgtatgggcacaatcgcctccttcctgtctaagtaccaggacatcatcatcgaacaccagaaggtggtgaagggcaaccagaagagactggagagcctgcgggagctggccggcaaggaaaacctggaataccctagcgtgaccctgccacctcagcctcacaccaaggagggcgttgatgcctacaacgaagtgatcgcccgggtgcgaatgtgggtgaacctgaacctgtggcagaagctgaagctaagcagagatgatgccaagcctctgctgagactgaagggattcccttcctttcctctggtcgagagacaggccaacgaagtggactggtgggacatggtgtgtaacgtgaagaagctgatcaacgagaaaaaggaggatggcaaggtgttttggcagaatctggctggctacaagagacaggaagccctgagaccatacctgagcagcgaggaagatcggaagaagggaaagaaattcgctcggtaccagctgggcgacctgctgctgcacctggaaaagaagcacggcgaggactggggaaaggtgtacgacgaggcctgggagcggattgacaagaaagtggaaggcctgagcaagcacatcaagctggaagaggaacggagaagcgaggacgcccagagcaaggccgccctgaccgactggctgcgggctaaggccagcttcgtgatcgagggcctgaaggaggccgacaaggacgagttctgcagatgcgagctgaagctgcagaagtggtacggggacctgcggggaaagcccttcgccatcgaagccgagaacagcatcctggacatcagcggcttcagcaagcagtacaactgtgccttcatctggcagaaggacggcgtgaagaagctgaacctgtacctgatcatcaactacttcaagggcggcaagctgcggttcaagaagatcaaacctgaagccttcgaagccaacagattctacaccgtgatcaacaaaaagagcggcgagatcgtgcccatggaggtgaacttcaacttcgacgaccccaacctgatcatcctgcctctggcctttggcaagagacagggcagagaattcatctggaacgacctgctgtccctggaaaccggcagcctgaagctggccaacggaagagtgatcgagaagacactgtacaacagaagaacccggcaggatgagcctgccctgttcgtggccctgaccttcgagcggcgggaggtcctggactcctccaatatcaaaccaatgaacctgatcggcgtggcaagaggcgaaaacatccccgccgtgatcgccctgaccgaccccgagggctgcccactgagccggtttaaggatagcctgggaaacccaacccacatcctgagaatcggcgagagctataaggagaagcagcggaccatccaggccaagaaggaggtggagcagcggagagccggcggctacagccggaagtacgccagcaaagccaagaatctggcagacgatatggtgagaaacaccgctagagatctgctgtactacgccgtgacccaggatgccatgctgatcttcgccaacctgagccggggcttcggccggcagggcaagcggaccttcatggccgagagacagtacacacggatggaggactggctgaccgccaagctggcctacgagggcctgagcaagacctacctgtccaagacactggcccagtacacctccaagacatgcagcaactgtgggtttaccatcaccagcgccgactacgacagggtgctggagaagctgaagaagacagcaacaggctggatgaccacaattaacggcaaggagctgaaggtggagggccagattacctactacaacagatacaagagacagaacgtagtcaaggacctgtccgtcgagctggatagactgagcgaagaatctgtgaacaacgacatctcctcctggacaaagggcagaagcggagaagctctgagcctcctgaagaaaagattctcccatagacccgtgcaggagaagttcgtgtgcctgaactgcggcttcgagacacacgcagccgagcaagccgccctgaacatcgccagatcctggctgttcctgcggagccaggagtacaagaaataccagacaaacaagacaaccggcaacaccgataagagagccttcgtcgagacctggcagtccttttaccggaagaagcttaaggaggtgtggaaacctgccgtgcggtctggcggatctggcggaggctccaccagccccaagaaaaagagaaaagtctaagctgccttctgcggggcttgccttctggccatgcccttcttctctcccttgcacctgtacctcttggtctttgaataaagcctgagtaggaaggctagcaaaaaaaaaaaaaaaaaaaaaaaaaaaaaaaaaaaaaaaaaaaaaaaaaaaaaaaaaaaaaaaaaaaaaaaaaaaaaaaa

SEQ ID NO: 10185 - RNA, 8787 nt, synthetic construct
  source 1..8787: mol_type = other RNA
aggaaataagagagaaaagaagagtaagaagaaatataagagccaccatggcccctaagaagaagcgtaaagtgagccggatgaaccacgaccaggagttcgacccccctaaggtgtaccctcccgtccccgccgagaagagaaagcccatccgggtcctgagcctgttcgatggcatcgccaccggtctgctggtgctgaaggacctgggcatccaggtggataggtacattgcctccgaggtgtgcgaggactccatcaccgtgggaatggtgcgtcatcagggcaagatcatgtacgtgggcgacgtgcggagcgtgacacagaagcatatccaggagtggggccctttcgacctggtgatcggcggcagcccttgcaatgacctgagcatcgtgaacccagcccggaagggcctgtacgagggaaccggcagactgttcttcgagttttacagactgctgcacgacgcccggcctaaggaaggcgacgaccggcccttcttttggctgttcgagaatgtggtggccatgggagtcagcgacaagcgggatattagccggttcctggagagcaaccccgtgatgatcgatgccaaggaagtgagcgccgcccaccgggccagatacttctggggcaatctgcctggcatgaacagacccctggccagcaccgtgaacgacaagctggagctgcaggagtgcctggagcacggccggatcgccaagttcagcaaggtgagaaccatcaccacccgaagcaacagcatcaaacaaggcaaggaccagcactttcctgtgttcatgaacgagaaggaggacatcctgtggtgtaccgagatggagagagtgttcgggttcccagtccactacacagatgtcagcaacatgtctagactggccagacagagactgctgggaagaagctggtccgtccctgtgatcagacacctgttcgcccctctgaaggagtacttcgcctgcgtgagcagcggcaacagcaacgccaacagccggggccccagcttctctagcggcctggtgccactgtccctgagagggagccacatgggccccatggagatctacaaaaccgtgagcgcctggaagcggcagcctgtgcgcgtgctgagcctgtttcggaatatcgataaagtcctgaaaagcctgggattcctggagagcggctctggctccggcggtggcaccctgaagtacgtggaggatgtgacaaacgtggtcagacgggatgtggagaagtggggccccttcgatctggtgtacggcagcacccaacccctgggcagctcttgtgaccggtgccctggctggtacatgtttcagttccaccggatcctgcagtacgccctgccgagacaggagtcccagcggccattcttttggattttcatggacaacttgctgctgaccgaggatgaccaggaaactaccactcggttcctgcagaccgaagccgtgaccctgcaggacgtgagaggccgggactaccagaacgccatgcgggtgtggtccaacatccctggactgaaaagcaagcacgcacctctgacccctaaagaagaggagtacctgcaggcccaggtgcggagcagaagcaagctggacgcccctaaggtggatctgctggtgaagaattgcctcctgcccctgagagagtacttcaagtatttcagccagaatagtctgcccctgggaggcagcggcggcggctgcgagggcctggtgagcttcgaggacgtgaccatggacttcagcagggaggagtggcagcagctggaccccgcccagaggtgcctgtactgggacgtgatgctggagatctacagccacctgctgagcgtgggctaccacatccccaaccccgagatcatcagcaggatggagaagggcaagaagagctggatcaggggcgcccagctgccccaccagaggcacagggaggtggtgttcggcggcggcccaagcagcggcgcccctcctcccagcggcggcaggcggcccaagcagcggcgcccctcctcccagcggcggcagcccagccggctccccaacctctaccgaggagggcacctctgagtccgccacccccgagagcggccctggcacctccaccgagcccagcgagggcagcgcacccggcagccctgccggcagccccacctccacagaggagggaaccagcaccgagcccagcgaaggcagcgccccaggcaccagcaccgagcctagtgagcaggagattaaacggatcaacaagatcagaagaagacttgtgaaagacagcaacaccaagaaggccggcaagacaggccccatgaaaaccctgctggttagagtgatgacacccgatctgagagagcggctggaaaacctgagaaagaagcctgaaaatatcccccagcccatcagcaatacatctagagccaacctgaataagctgctgaccgattacaccgaaatgaagaaggcgatcctgcatgtgtactgggaagagttccagaaggaccctgtgggcctgatgagccgggtggcccagcctgccagcaagaagatcgatcagaacaagctgaaacctgagatggacgagaagggcaacctgaccaccgccggctttgcctgctctcagtgtggccagcccctgttcgtgtacaagctggagcaggtgtctgagaagggcaaggcttacaccaactacttcggacggtgcaatgtggccgagcacgaaaagctgatcctgctggcccagctgaagcccgagaaggatagcgacgaagccgtgacatatagcctgggaaagtttgggcagagggccctggatttctacagcattcatgtgaccaaggagtccacccaccccgtgaagcccctggcccagatcgccggaaacagatacgcctccggacctgtgggaaaggccctgagcgacgcatgtatgggcacaatcgcctccttcctgtctaagtaccaggacatcatcatcgaacaccagaaggtggtgaagggcaaccagaagagactggagagcctgcgggagctggccggcaaggaaaacctggaataccctagcgtgaccctgccacctcagcctcacaccaaggagggcgttgatgcctacaacgaagtgatcgcccgggtgcgaatgtgggtgaacctgaacctgtggcagaagctgaagctaagcagagatgatgccaagcctctgctgagactgaagggattcccttcctttcctctggtcgagagacaggccaacgaagtggactggtgggacatggtgtgtaacgtgaagaagctgatcaacgagaaaaaggaggatggcaaggtgttttggcagaatctggctggctacaagagacaggaagccctgagaccatacctgagcagcgaggaagatcggaagaagggaaagaaattcgctcggtaccagctgggcgacctgctgctgcacctggaaaagaagcacggcgaggactggggaaaggtgtacgacgaggcctgggagcggattgacaagaaagtggaaggcctgagcaagcacatcaagctggaagaggaacggagaagcgaggacgcccagagcaaggccgccctgaccgactggctgcgggctaaggccagcttcgtgatcgagggcctgaaggaggccgacaaggacgagttctgcagatgcgagctgaagctgcagaagtggtacggggacctgcggggaaagcccttcgccatcgaagccgagaacagcatcctggacatcagcggcttcagcaagcagtacaactgtgccttcatctggcagaaggacggcgtgaagaagctgaacctgtacctgatcatcaactacttcaagggcggcaagctgcggttcaagaagatcaaacctgaagccttcgaagccaacagattctacaccgtgatcaacaaaaagagcggcgagatcgtgcccatggaggtgaacttcaacttcgacgaccccaacctgatcatcctgcctctggcctttggcaagagacagggcagagaattcatctggaacgacctgctgtccctggaaaccggcagcctgaagctggccaacggaagagtgatcgagaagacactgtacaacagaagaacccggcaggatgagcctgccctgttcgtggccctgaccttcgagcggcgggaggtcctggactcctccaatatcaaaccaatgaacctgatcggcgtggcaagaggcgaaaacatccccgccgtgatcgccctgaccgaccccgagggctgcccactgagccggtttaaggatagcctgggaaacccaacccacatcctgagaatcggcgagagctataaggagaagcagcggaccatccaggccaagaaggaggtggagcagcggagagccggcggctacagccggaagtacgccagcaaagccaagaatctggcagacgatatggtgagaaacaccgctagagatctgctgtactacgccgtgacccaggatgccatgctgatcttcgccaacctgagccggggcttcggccggcagggcaagcggaccttcatggccgagagacagtacacacggatggaggactggctgaccgccaagctggcctacgagggcctgagcaagacctacctgtccaagacactggcccagtacacctccaagacatgcagcaactgtgggtttaccatcaccagcgccgactacgacagggtgctggagaagctgaagaagacagcaacaggctggatgaccacaattaacggcaaggagctgaaggtggagggccagattacctactacaacagatacaagagacagaacgtagtcaaggacctgtccgtcgagctggatagactgagcgaagaatctgtgaacaacgacatctcctcctggacaaagggcagaagcggagaagctctgagcctcctgaagaaaagattctcccatagacccgtgcaggagaagttcgtgtgcctgaactgcggcttcgagacacacgcagccgagcaagccgccctgaacatcgccagatcctggctgttcctgcggagccaggagtacaagaaataccagacaaacaagacaaccggcaacaccgataagagagccttcgtcgagacctggcagtccttttaccggaagaagcttaaggaggtgtggaaacctgccgtgcggtctggcggatctggcggaggctccaccagccccaagaaaaagagaaaagtctaagctgccttctgcggggcttgccttctggccatgcccttcttctctcccttgcacctgtacctcttggtctttgaataaagcctgagtaggaaggctagcaaaaaaaaaaaaaaaaaaaaaaaaaaaaaaaaaaaaaaaaaaaaaaaaaaaaaaaaaaaaaaaaaaaaaaaaaaaaaaaagcccagccggctccccaacctctaccgaggagggcacctctgagtccgccacccccgagagcggccctggcacctccaccgagcccagcgagggcagcgcacccggcagccctgccggcagccccacctccacagaggagggaaccagcaccgagcccagcgaaggcagcgccccaggcaccagcaccgagcctagtgagcaggagattaaacggatcaacaagatcagaagaagacttgtgaaagacagcaacaccaagaaggccggcaagacaggccccatgaaaaccctgctggttagagtgatgacacccgatctgagagagcggctggaaaacctgagaaagaagcctgaaaatatcccccagcccatcagcaatacatctagagccaacctgaataagctgctgaccgattacaccgaaatgaagaaggcgatcctgcatgtgtactgggaagagttccagaaggaccctgtgggcctgatgagccgggtggcccagcctgccagcaagaagatcgatcagaacaagctgaaacctgagatggacgagaagggcaacctgaccaccgccggctttgcctgctctcagtgtggccagcccctgttcgtgtacaagctggagcaggtgtctgagaagggcaaggcttacaccaactacttcggacggtgcaatgtggccgagcacgaaaagctgatcctgctggcccagctgaagcccgagaaggatagcgacgaagccgtgacatatagcctgggaaagtttgggcagagggccctggatttctacagcattcatgtgaccaaggagtccacccaccccgtgaagcccctggcccagatcgccggaaacagatacgcctccggacctgtgggaaaggccctgagcgacgcatgtatgggcacaatcgcctccttcctgtctaagtaccaggacatcatcatcgaacaccagaaggtggtgaagggcaaccagaagagactggagagcctgcgggagctggccggcaaggaaaacctggaataccctagcgtgaccctgccacctcagcctcacaccaaggagggcgttgatgcctacaacgaagtgatcgcccgggtgcgaatgtgggtgaacctgaacctgtggcagaagctgaagctaagcagagatgatgccaagcctctgctgagactgaagggattcccttcctttcctctggtcgagagacaggccaacgaagtggactggtgggacatggtgtgtaacgtgaagaagctgatcaacgagaaaaaggaggatggcaaggtgttttggcagaatctggctggctacaagagacaggaagccctgagaccatacctgagcagcgaggaagatcggaagaagggaaagaaattcgctcggtaccagctgggcgacctgctgctgcacctggaaaagaagcacggcgaggactggggaaaggtgtacgacgaggcctgggagcggattgacaagaaagtggaaggcctgagcaagcacatcaagctggaagaggaacggagaagcgaggacgcccagagcaaggccgccctgaccgactggctgcgggctaaggccagcttcgtgatcgagggcctgaaggaggccgacaaggacgagttctgcagatgcgagctgaagctgcagaagtggtacggggacctgcggggaaagcccttcgccatcgaagccgagaacagcatcctggacatcagcggcttcagcaagcagtacaactgtgccttcatctggcagaaggacggcgtgaagaagctgaacctgtacctgatcatcaactacttcaagggcggcaagctgcggttcaagaagatcaaacctgaagccttcgaagccaacagattctacaccgtgatcaacaaaaagagcggcgagatcgtgcccatggaggtgaacttcaacttcgacgaccccaacctgatcatcctgcctctggcctttggcaagagacagggcagagaattcatctggaacgacctgctgtccctggaaaccggcagcctgaagctggccaacggaagagtgatcgagaagacactgtacaacagaagaacccggcaggatgagcctgccctgttcgtggccctgaccttcgagcggcgggaggtcctggactcctccaatatcaaaccaatgaacctgatcggcgtggcaagaggcgaaaacatccccgccgtgatcgccctgaccgaccccgagggctgcccactgagccggtttaaggatagcctgggaaacccaacccacatcctgagaatcggcgagagctataaggagaagcagcggaccatccaggccaagaaggaggtggagcagcggagagccggcggctacagccggaagtacgccagcaaagccaagaatctggcagacgatatggtgagaaacaccgctagagatctgctgtactacgccgtgacccaggatgccatgctgatcttcgccaacctgagccggggcttcggccggcagggcaagcggaccttcatggccgagagacagtacacacggatggaggactggctgaccgccaagctggcctacgagggcctgagcaagacctacctgtccaagacactggcccagtacacctccaagacatgcagcaactgtgggtttaccatcaccagcgccgactacgacagggtgctggagaagctgaagaagacagcaacaggctggatgaccacaattaacggcaaggagctgaaggtggagggccagattacctactacaacagatacaagagacagaacgtagtcaaggacctgtccgtcgagctggatagactgagcgaagaatctgtgaacaacgacatctcctcctggacaaagggcagaagcggagaagctctgagcctcctgaagaaaagattctcccatagacccgtgcaggagaagttcgtgtgcctgaactgcggcttcgagacacacgcagccgagcaagccgccctgaacatcgccagatcctggctgttcctgcggagccaggagtacaagaaataccagacaaacaagacaaccggcaacaccgataagagagccttcgtcgagacctggcagtccttttaccggaagaagcttaaggaggtgtggaaacctgccgtgcggtctggcggatctggcggaggctccaccagccccaagaaaaagagaaaagtctaagctgccttctgcggggcttgccttctggccatgcccttcttctctcccttgcacctgtacctcttggtctttgaataaagcctgagtaggaaggctagcaaaaaaaaaaaaaaaaaaaaaaaaaaaaaaaaaaaaaaaaaaaaaaaaaaaaaaaaaaaaaaaaaaaaaaaaaaaaaaaa

SEQ ID NO: 10186 - RNA, 8787 nt, synthetic construct
  source 1..8787: mol_type = other RNA
aggaaataagagagaaaagaagagtaagaagaaatataagagccaccatggcccctaagaagaagcgtaaagtgagccggatgaaccacgaccaggagttcgacccccctaaggtgtaccctcccgtccccgccgagaagagaaagcccatccgggtcctgagcctgttcgatggcatcgccaccggtctgctggtgctgaaggacctgggcatccaggtggataggtacattgcctccgaggtgtgcgaggactccatcaccgtgggaatggtgcgtcatcagggcaagatcatgtacgtgggcgacgtgcggagcgtgacacagaagcatatccaggagtggggccctttcgacctggtgatcggcggcagcccttgcaatgacctgagcatcgtgaacccagcccggaagggcctgtacgagggaaccggcagactgttcttcgagttttacagactgctgcacgacgcccggcctaaggaaggcgacgaccggcccttcttttggctgttcgagaatgtggtggccatgggagtcagcgacaagcgggatattagccggttcctggagagcaaccccgtgatgatcgatgccaaggaagtgagcgccgcccaccgggccagatacttctggggcaatctgcctggcatgaacagacccctggccagcaccgtgaacgacaagctggagctgcaggagtgcctggagcacggccggatcgccaagttcagcaaggtgagaaccatcaccacccgaagcaacagcatcaaacaaggcaaggaccagcactttcctgtgttcatgaacgagaaggaggacatcctgtggtgtaccgagatggagagagtgttcgggttcccagtccactacacagatgtcagcaacatgtctagactggccagacagagactgctgggaagaagctggtccgtccctgtgatcagacacctgttcgcccctctgaaggagtacttcgcctgcgtgagcagcggcaacagcaacgccaacagccggggccccagcttctctagcggcctggtgccactgtccctgagagggagccacatgggccccatggagatctacaaaaccgtgagcgcctggaagcggcagcctgtgcgcgtgctgagcctgtttcggaatatcgataaagtcctgaaaagcctgggattcctggagagcggctctggctccggcggtggcaccctgaagtacgtggaggatgtgacaaacgtggtcagacgggatgtggagaagtggggccccttcgatctggtgtacggcagcacccaacccctgggcagctcttgtgaccggtgccctggctggtacatgtttcagttccaccggatcctgcagtacgccctgccgagacaggagtcccagcggccattcttttggattttcatggacaacttgctgctgaccgaggatgaccaggaaactaccactcggttcctgcagaccgaagccgtgaccctgcaggacgtgagaggccgggactaccagaacgccatgcgggtgtggtccaacatccctggactgaaaagcaagcacgcacctctgacccctaaagaagaggagtacctgcaggcccaggtgcggagcagaagcaagctggacgcccctaaggtggatctgctggtgaagaattgcctcctgcccctgagagagtacttcaagtatttcagccagaatagtctgcccctgggaggcagcggcggcggcttccaggagcccgtgaccttcgaggacgtggccgtgtacttcacccagaacgagtgggccagcctgcaccccacccagagggccctgtacagggaggtgatgctggagaactacgccaacgtgaccagcctgagcgccttccccttccccaagcccgacctgatcttccagctggagcagggcgaggccgcctggggccccgacccctggaccctggccggcggcgaggccctgaggggcatgggcggcccaagcagcggcgcccctcctcccagcggcggcaggcggcccaagcagcggcgcccctcctcccagcggcggcagcccagccggctccccaacctctaccgaggagggcacctctgagtccgccacccccgagagcggccctggcacctccaccgagcccagcgagggcagcgcacccggcagccctgccggcagccccacctccacagaggagggaaccagcaccgagcccagcgaaggcagcgccccaggcaccagcaccgagcctagtgagcaggagattaaacggatcaacaagatcagaagaagacttgtgaaagacagcaacaccaagaaggccggcaagacaggccccatgaaaaccctgctggttagagtgatgacacccgatctgagagagcggctggaaaacctgagaaagaagcctgaaaatatcccccagcccatcagcaatacatctagagccaacctgaataagctgctgaccgattacaccgaaatgaagaaggcgatcctgcatgtgtactgggaagagttccagaaggaccctgtgggcctgatgagccgggtggcccagcctgccagcaagaagatcgatcagaacaagctgaaacctgagatggacgagaagggcaacctgaccaccgccggctttgcctgctctcagtgtggccagcccctgttcgtgtacaagctggagcaggtgtctgagaagggcaaggcttacaccaactacttcggacggtgcaatgtggccgagcacgaaaagctgatcctgctggcccagctgaagcccgagaaggatagcgacgaagccgtgacatatagcctgggaaagtttgggcagagggccctggatttctacagcattcatgtgaccaaggagtccacccaccccgtgaagcccctggcccagatcgccggaaacagatacgcctccggacctgtgggaaaggccctgagcgacgcatgtatgggcacaatcgcctccttcctgtctaagtaccaggacatcatcatcgaacaccagaaggtggtgaagggcaaccagaagagactggagagcctgcgggagctggccggcaaggaaaacctggaataccctagcgtgaccctgccacctcagcctcacaccaaggagggcgttgatgcctacaacgaagtgatcgcccgggtgcgaatgtgggtgaacctgaacctgtggcagaagctgaagctaagcagagatgatgccaagcctctgctgagactgaagggattcccttcctttcctctggtcgagagacaggccaacgaagtggactggtgggacatggtgtgtaacgtgaagaagctgatcaacgagaaaaaggaggatggcaaggtgttttggcagaatctggctggctacaagagacaggaagccctgagaccatacctgagcagcgaggaagatcggaagaagggaaagaaattcgctcggtaccagctgggcgacctgctgctgcacctggaaaagaagcacggcgaggactggggaaaggtgtacgacgaggcctgggagcggattgacaagaaagtggaaggcctgagcaagcacatcaagctggaagaggaacggagaagcgaggacgcccagagcaaggccgccctgaccgactggctgcgggctaaggccagcttcgtgatcgagggcctgaaggaggccgacaaggacgagttctgcagatgcgagctgaagctgcagaagtggtacggggacctgcggggaaagcccttcgccatcgaagccgagaacagcatcctggacatcagcggcttcagcaagcagtacaactgtgccttcatctggcagaaggacggcgtgaagaagctgaacctgtacctgatcatcaactacttcaagggcggcaagctgcggttcaagaagatcaaacctgaagccttcgaagccaacagattctacaccgtgatcaacaaaaagagcggcgagatcgtgcccatggaggtgaacttcaacttcgacgaccccaacctgatcatcctgcctctggcctttggcaagagacagggcagagaattcatctggaacgacctgctgtccctggaaaccggcagcctgaagctggccaacggaagagtgatcgagaagacactgtacaacagaagaacccggcaggatgagcctgccctgttcgtggccctgaccttcgagcggcgggaggtcctggactcctccaatatcaaaccaatgaacctgatcggcgtggcaagaggcgaaaacatccccgccgtgatcgccctgaccgaccccgagggctgcccactgagccggtttaaggatagcctgggaaacccaacccacatcctgagaatcggcgagagctataaggagaagcagcggaccatccaggccaagaaggaggtggagcagcggagagccggcggctacagccggaagtacgccagcaaagccaagaatctggcagacgatatggtgagaaacaccgctagagatctgctgtactacgccgtgacccaggatgccatgctgatcttcgccaacctgagccggggcttcggccggcagggcaagcggaccttcatggccgagagacagtacacacggatggaggactggctgaccgccaagctggcctacgagggcctgagcaagacctacctgtccaagacactggcccagtacacctccaagacatgcagcaactgtgggtttaccatcaccagcgccgactacgacagggtgctggagaagctgaagaagacagcaacaggctggatgaccacaattaacggcaaggagctgaaggtggagggccagattacctactacaacagatacaagagacagaacgtagtcaaggacctgtccgtcgagctggatagactgagcgaagaatctgtgaacaacgacatctcctcctggacaaagggcagaagcggagaagctctgagcctcctgaagaaaagattctcccatagacccgtgcaggagaagttcgtgtgcctgaactgcggcttcgagacacacgcagccgagcaagccgccctgaacatcgccagatcctggctgttcctgcggagccaggagtacaagaaataccagacaaacaagacaaccggcaacaccgataagagagccttcgtcgagacctggcagtccttttaccggaagaagcttaaggaggtgtggaaacctgccgtgcggtctggcggatctggcggaggctccaccagccccaagaaaaagagaaaagtctaagctgccttctgcggggcttgccttctggccatgcccttcttctctcccttgcacctgtacctcttggtctttgaataaagcctgagtaggaaggctagcaaaaaaaaaaaaaaaaaaaaaaaaaaaaaaaaaaaaaaaaaaaaaaaaaaaaaaaaaaaaaaaaaaaaaaaaaaaaaaaagcccagccggctccccaacctctaccgaggagggcacctctgagtccgccacccccgagagcggccctggcacctccaccgagcccagcgagggcagcgcacccggcagccctgccggcagccccacctccacagaggagggaaccagcaccgagcccagcgaaggcagcgccccaggcaccagcaccgagcctagtgagcaggagattaaacggatcaacaagatcagaagaagacttgtgaaagacagcaacaccaagaaggccggcaagacaggccccatgaaaaccctgctggttagagtgatgacacccgatctgagagagcggctggaaaacctgagaaagaagcctgaaaatatcccccagcccatcagcaatacatctagagccaacctgaataagctgctgaccgattacaccgaaatgaagaaggcgatcctgcatgtgtactgggaagagttccagaaggaccctgtgggcctgatgagccgggtggcccagcctgccagcaagaagatcgatcagaacaagctgaaacctgagatggacgagaagggcaacctgaccaccgccggctttgcctgctctcagtgtggccagcccctgttcgtgtacaagctggagcaggtgtctgagaagggcaaggcttacaccaactacttcggacggtgcaatgtggccgagcacgaaaagctgatcctgctggcccagctgaagcccgagaaggatagcgacgaagccgtgacatatagcctgggaaagtttgggcagagggccctggatttctacagcattcatgtgaccaaggagtccacccaccccgtgaagcccctggcccagatcgccggaaacagatacgcctccggacctgtgggaaaggccctgagcgacgcatgtatgggcacaatcgcctccttcctgtctaagtaccaggacatcatcatcgaacaccagaaggtggtgaagggcaaccagaagagactggagagcctgcgggagctggccggcaaggaaaacctggaataccctagcgtgaccctgccacctcagcctcacaccaaggagggcgttgatgcctacaacgaagtgatcgcccgggtgcgaatgtgggtgaacctgaacctgtggcagaagctgaagctaagcagagatgatgccaagcctctgctgagactgaagggattcccttcctttcctctggtcgagagacaggccaacgaagtggactggtgggacatggtgtgtaacgtgaagaagctgatcaacgagaaaaaggaggatggcaaggtgttttggcagaatctggctggctacaagagacaggaagccctgagaccatacctgagcagcgaggaagatcggaagaagggaaagaaattcgctcggtaccagctgggcgacctgctgctgcacctggaaaagaagcacggcgaggactggggaaaggtgtacgacgaggcctgggagcggattgacaagaaagtggaaggcctgagcaagcacatcaagctggaagaggaacggagaagcgaggacgcccagagcaaggccgccctgaccgactggctgcgggctaaggccagcttcgtgatcgagggcctgaaggaggccgacaaggacgagttctgcagatgcgagctgaagctgcagaagtggtacggggacctgcggggaaagcccttcgccatcgaagccgagaacagcatcctggacatcagcggcttcagcaagcagtacaactgtgccttcatctggcagaaggacggcgtgaagaagctgaacctgtacctgatcatcaactacttcaagggcggcaagctgcggttcaagaagatcaaacctgaagccttcgaagccaacagattctacaccgtgatcaacaaaaagagcggcgagatcgtgcccatggaggtgaacttcaacttcgacgaccccaacctgatcatcctgcctctggcctttggcaagagacagggcagagaattcatctggaacgacctgctgtccctggaaaccggcagcctgaagctggccaacggaagagtgatcgagaagacactgtacaacagaagaacccggcaggatgagcctgccctgttcgtggccctgaccttcgagcggcgggaggtcctggactcctccaatatcaaaccaatgaacctgatcggcgtggcaagaggcgaaaacatccccgccgtgatcgccctgaccgaccccgagggctgcccactgagccggtttaaggatagcctgggaaacccaacccacatcctgagaatcggcgagagctataaggagaagcagcggaccatccaggccaagaaggaggtggagcagcggagagccggcggctacagccggaagtacgccagcaaagccaagaatctggcagacgatatggtgagaaacaccgctagagatctgctgtactacgccgtgacccaggatgccatgctgatcttcgccaacctgagccggggcttcggccggcagggcaagcggaccttcatggccgagagacagtacacacggatggaggactggctgaccgccaagctggcctacgagggcctgagcaagacctacctgtccaagacactggcccagtacacctccaagacatgcagcaactgtgggtttaccatcaccagcgccgactacgacagggtgctggagaagctgaagaagacagcaacaggctggatgaccacaattaacggcaaggagctgaaggtggagggccagattacctactacaacagatacaagagacagaacgtagtcaaggacctgtccgtcgagctggatagactgagcgaagaatctgtgaacaacgacatctcctcctggacaaagggcagaagcggagaagctctgagcctcctgaagaaaagattctcccatagacccgtgcaggagaagttcgtgtgcctgaactgcggcttcgagacacacgcagccgagcaagccgccctgaacatcgccagatcctggctgttcctgcggagccaggagtacaagaaataccagacaaacaagacaaccggcaacaccgataagagagccttcgtcgagacctggcagtccttttaccggaagaagcttaaggaggtgtggaaacctgccgtgcggtctggcggatctggcggaggctccaccagccccaagaaaaagagaaaagtctaagctgccttctgcggggcttgccttctggccatgcccttcttctctcccttgcacctgtacctcttggtctttgaataaagcctgagtaggaaggctagcaaaaaaaaaaaaaaaaaaaaaaaaaaaaaaaaaaaaaaaaaaaaaaaaaaaaaaaaaaaaaaaaaaaaaaaaaaaaaaaa

SEQ ID NO: 10187 - RNA, 8784 nt, synthetic construct
  source 1..8784: mol_type = other RNA
aggaaataagagagaaaagaagagtaagaagaaatataagagccaccatggcccctaagaagaagcgtaaagtgagccggatgaaccacgaccaggagttcgacccccctaaggtgtaccctcccgtccccgccgagaagagaaagcccatccgggtcctgagcctgttcgatggcatcgccaccggtctgctggtgctgaaggacctgggcatccaggtggataggtacattgcctccgaggtgtgcgaggactccatcaccgtgggaatggtgcgtcatcagggcaagatcatgtacgtgggcgacgtgcggagcgtgacacagaagcatatccaggagtggggccctttcgacctggtgatcggcggcagcccttgcaatgacctgagcatcgtgaacccagcccggaagggcctgtacgagggaaccggcagactgttcttcgagttttacagactgctgcacgacgcccggcctaaggaaggcgacgaccggcccttcttttggctgttcgagaatgtggtggccatgggagtcagcgacaagcgggatattagccggttcctggagagcaaccccgtgatgatcgatgccaaggaagtgagcgccgcccaccgggccagatacttctggggcaatctgcctggcatgaacagacccctggccagcaccgtgaacgacaagctggagctgcaggagtgcctggagcacggccggatcgccaagttcagcaaggtgagaaccatcaccacccgaagcaacagcatcaaacaaggcaaggaccagcactttcctgtgttcatgaacgagaaggaggacatcctgtggtgtaccgagatggagagagtgttcgggttcccagtccactacacagatgtcagcaacatgtctagactggccagacagagactgctgggaagaagctggtccgtccctgtgatcagacacctgttcgcccctctgaaggagtacttcgcctgcgtgagcagcggcaacagcaacgccaacagccggggccccagcttctctagcggcctggtgccactgtccctgagagggagccacatgggccccatggagatctacaaaaccgtgagcgcctggaagcggcagcctgtgcgcgtgctgagcctgtttcggaatatcgataaagtcctgaaaagcctgggattcctggagagcggctctggctccggcggtggcaccctgaagtacgtggaggatgtgacaaacgtggtcagacgggatgtggagaagtggggccccttcgatctggtgtacggcagcacccaacccctgggcagctcttgtgaccggtgccctggctggtacatgtttcagttccaccggatcctgcagtacgccctgccgagacaggagtcccagcggccattcttttggattttcatggacaacttgctgctgaccgaggatgaccaggaaactaccactcggttcctgcagaccgaagccgtgaccctgcaggacgtgagaggccgggactaccagaacgccatgcgggtgtggtccaacatccctggactgaaaagcaagcacgcacctctgacccctaaagaagaggagtacctgcaggcccaggtgcggagcagaagcaagctggacgcccctaaggtggatctgctggtgaagaattgcctcctgcccctgagagagtacttcaagtatttcagccagaatagtctgcccctgggaggcagcggcggcggcaacatgagccaggccagcgtgagcttccaggacgtgaccgtggagttcaccagagaggagtggcagcacctgggccccgtggagagaaccctgtacagagacgtgatgctggagaactacagccacctgatcagcgtgggctactgcatcaccaagcccaaggtgatcagcaagctggagaagggcgaggagccctggagcctggaggacgagttcctgaaccagagataccccggctacggcggcccaagcagcggcgcccctcctcccagcggcggcaggcggcccaagcagcggcgcccctcctcccagcggcggcagcccagccggctccccaacctctaccgaggagggcacctctgagtccgccacccccgagagcggccctggcacctccaccgagcccagcgagggcagcgcacccggcagccctgccggcagccccacctccacagaggagggaaccagcaccgagcccagcgaaggcagcgccccaggcaccagcaccgagcctagtgagcaggagattaaacggatcaacaagatcagaagaagacttgtgaaagacagcaacaccaagaaggccggcaagacaggccccatgaaaaccctgctggttagagtgatgacacccgatctgagagagcggctggaaaacctgagaaagaagcctgaaaatatcccccagcccatcagcaatacatctagagccaacctgaataagctgctgaccgattacaccgaaatgaagaaggcgatcctgcatgtgtactgggaagagttccagaaggaccctgtgggcctgatgagccgggtggcccagcctgccagcaagaagatcgatcagaacaagctgaaacctgagatggacgagaagggcaacctgaccaccgccggctttgcctgctctcagtgtggccagcccctgttcgtgtacaagctggagcaggtgtctgagaagggcaaggcttacaccaactacttcggacggtgcaatgtggccgagcacgaaaagctgatcctgctggcccagctgaagcccgagaaggatagcgacgaagccgtgacatatagcctgggaaagtttgggcagagggccctggatttctacagcattcatgtgaccaaggagtccacccaccccgtgaagcccctggcccagatcgccggaaacagatacgcctccggacctgtgggaaaggccctgagcgacgcatgtatgggcacaatcgcctccttcctgtctaagtaccaggacatcatcatcgaacaccagaaggtggtgaagggcaaccagaagagactggagagcctgcgggagctggccggcaaggaaaacctggaataccctagcgtgaccctgccacctcagcctcacaccaaggagggcgttgatgcctacaacgaagtgatcgcccgggtgcgaatgtgggtgaacctgaacctgtggcagaagctgaagctaagcagagatgatgccaagcctctgctgagactgaagggattcccttcctttcctctggtcgagagacaggccaacgaagtggactggtgggacatggtgtgtaacgtgaagaagctgatcaacgagaaaaaggaggatggcaaggtgttttggcagaatctggctggctacaagagacaggaagccctgagaccatacctgagcagcgaggaagatcggaagaagggaaagaaattcgctcggtaccagctgggcgacctgctgctgcacctggaaaagaagcacggcgaggactggggaaaggtgtacgacgaggcctgggagcggattgacaagaaagtggaaggcctgagcaagcacatcaagctggaagaggaacggagaagcgaggacgcccagagcaaggccgccctgaccgactggctgcgggctaaggccagcttcgtgatcgagggcctgaaggaggccgacaaggacgagttctgcagatgcgagctgaagctgcagaagtggtacggggacctgcggggaaagcccttcgccatcgaagccgagaacagcatcctggacatcagcggcttcagcaagcagtacaactgtgccttcatctggcagaaggacggcgtgaagaagctgaacctgtacctgatcatcaactacttcaagggcggcaagctgcggttcaagaagatcaaacctgaagccttcgaagccaacagattctacaccgtgatcaacaaaaagagcggcgagatcgtgcccatggaggtgaacttcaacttcgacgaccccaacctgatcatcctgcctctggcctttggcaagagacagggcagagaattcatctggaacgacctgctgtccctggaaaccggcagcctgaagctggccaacggaagagtgatcgagaagacactgtacaacagaagaacccggcaggatgagcctgccctgttcgtggccctgaccttcgagcggcgggaggtcctggactcctccaatatcaaaccaatgaacctgatcggcgtggcaagaggcgaaaacatccccgccgtgatcgccctgaccgaccccgagggctgcccactgagccggtttaaggatagcctgggaaacccaacccacatcctgagaatcggcgagagctataaggagaagcagcggaccatccaggccaagaaggaggtggagcagcggagagccggcggctacagccggaagtacgccagcaaagccaagaatctggcagacgatatggtgagaaacaccgctagagatctgctgtactacgccgtgacccaggatgccatgctgatcttcgccaacctgagccggggcttcggccggcagggcaagcggaccttcatggccgagagacagtacacacggatggaggactggctgaccgccaagctggcctacgagggcctgagcaagacctacctgtccaagacactggcccagtacacctccaagacatgcagcaactgtgggtttaccatcaccagcgccgactacgacagggtgctggagaagctgaagaagacagcaacaggctggatgaccacaattaacggcaaggagctgaaggtggagggccagattacctactacaacagatacaagagacagaacgtagtcaaggacctgtccgtcgagctggatagactgagcgaagaatctgtgaacaacgacatctcctcctggacaaagggcagaagcggagaagctctgagcctcctgaagaaaagattctcccatagacccgtgcaggagaagttcgtgtgcctgaactgcggcttcgagacacacgcagccgagcaagccgccctgaacatcgccagatcctggctgttcctgcggagccaggagtacaagaaataccagacaaacaagacaaccggcaacaccgataagagagccttcgtcgagacctggcagtccttttaccggaagaagcttaaggaggtgtggaaacctgccgtgcggtctggcggatctggcggaggctccaccagccccaagaaaaagagaaaagtctaagctgccttctgcggggcttgccttctggccatgcccttcttctctcccttgcacctgtacctcttggtctttgaataaagcctgagtaggaaggctagcaaaaaaaaaaaaaaaaaaaaaaaaaaaaaaaaaaaaaaaaaaaaaaaaaaaaaaaaaaaaaaaaaaaaaaaaaaaaaaaagcccagccggctccccaacctctaccgaggagggcacctctgagtccgccacccccgagagcggccctggcacctccaccgagcccagcgagggcagcgcacccggcagccctgccggcagccccacctccacagaggagggaaccagcaccgagcccagcgaaggcagcgccccaggcaccagcaccgagcctagtgagcaggagattaaacggatcaacaagatcagaagaagacttgtgaaagacagcaacaccaagaaggccggcaagacaggccccatgaaaaccctgctggttagagtgatgacacccgatctgagagagcggctggaaaacctgagaaagaagcctgaaaatatcccccagcccatcagcaatacatctagagccaacctgaataagctgctgaccgattacaccgaaatgaagaaggcgatcctgcatgtgtactgggaagagttccagaaggaccctgtgggcctgatgagccgggtggcccagcctgccagcaagaagatcgatcagaacaagctgaaacctgagatggacgagaagggcaacctgaccaccgccggctttgcctgctctcagtgtggccagcccctgttcgtgtacaagctggagcaggtgtctgagaagggcaaggcttacaccaactacttcggacggtgcaatgtggccgagcacgaaaagctgatcctgctggcccagctgaagcccgagaaggatagcgacgaagccgtgacatatagcctgggaaagtttgggcagagggccctggatttctacagcattcatgtgaccaaggagtccacccaccccgtgaagcccctggcccagatcgccggaaacagatacgcctccggacctgtgggaaaggccctgagcgacgcatgtatgggcacaatcgcctccttcctgtctaagtaccaggacatcatcatcgaacaccagaaggtggtgaagggcaaccagaagagactggagagcctgcgggagctggccggcaaggaaaacctggaataccctagcgtgaccctgccacctcagcctcacaccaaggagggcgttgatgcctacaacgaagtgatcgcccgggtgcgaatgtgggtgaacctgaacctgtggcagaagctgaagctaagcagagatgatgccaagcctctgctgagactgaagggattcccttcctttcctctggtcgagagacaggccaacgaagtggactggtgggacatggtgtgtaacgtgaagaagctgatcaacgagaaaaaggaggatggcaaggtgttttggcagaatctggctggctacaagagacaggaagccctgagaccatacctgagcagcgaggaagatcggaagaagggaaagaaattcgctcggtaccagctgggcgacctgctgctgcacctggaaaagaagcacggcgaggactggggaaaggtgtacgacgaggcctgggagcggattgacaagaaagtggaaggcctgagcaagcacatcaagctggaagaggaacggagaagcgaggacgcccagagcaaggccgccctgaccgactggctgcgggctaaggccagcttcgtgatcgagggcctgaaggaggccgacaaggacgagttctgcagatgcgagctgaagctgcagaagtggtacggggacctgcggggaaagcccttcgccatcgaagccgagaacagcatcctggacatcagcggcttcagcaagcagtacaactgtgccttcatctggcagaaggacggcgtgaagaagctgaacctgtacctgatcatcaactacttcaagggcggcaagctgcggttcaagaagatcaaacctgaagccttcgaagccaacagattctacaccgtgatcaacaaaaagagcggcgagatcgtgcccatggaggtgaacttcaacttcgacgaccccaacctgatcatcctgcctctggcctttggcaagagacagggcagagaattcatctggaacgacctgctgtccctggaaaccggcagcctgaagctggccaacggaagagtgatcgagaagacactgtacaacagaagaacccggcaggatgagcctgccctgttcgtggccctgaccttcgagcggcgggaggtcctggactcctccaatatcaaaccaatgaacctgatcggcgtggcaagaggcgaaaacatccccgccgtgatcgccctgaccgaccccgagggctgcccactgagccggtttaaggatagcctgggaaacccaacccacatcctgagaatcggcgagagctataaggagaagcagcggaccatccaggccaagaaggaggtggagcagcggagagccggcggctacagccggaagtacgccagcaaagccaagaatctggcagacgatatggtgagaaacaccgctagagatctgctgtactacgccgtgacccaggatgccatgctgatcttcgccaacctgagccggggcttcggccggcagggcaagcggaccttcatggccgagagacagtacacacggatggaggactggctgaccgccaagctggcctacgagggcctgagcaagacctacctgtccaagacactggcccagtacacctccaagacatgcagcaactgtgggtttaccatcaccagcgccgactacgacagggtgctggagaagctgaagaagacagcaacaggctggatgaccacaattaacggcaaggagctgaaggtggagggccagattacctactacaacagatacaagagacagaacgtagtcaaggacctgtccgtcgagctggatagactgagcgaagaatctgtgaacaacgacatctcctcctggacaaagggcagaagcggagaagctctgagcctcctgaagaaaagattctcccatagacccgtgcaggagaagttcgtgtgcctgaactgcggcttcgagacacacgcagccgagcaagccgccctgaacatcgccagatcctggctgttcctgcggagccaggagtacaagaaataccagacaaacaagacaaccggcaacaccgataagagagccttcgtcgagacctggcagtccttttaccggaagaagcttaaggaggtgtggaaacctgccgtgcggtctggcggatctggcggaggctccaccagccccaagaaaaagagaaaagtctaagctgccttctgcggggcttgccttctggccatgcccttcttctctcccttgcacctgtacctcttggtctttgaataaagcctgagtaggaaggctagcaaaaaaaaaaaaaaaaaaaaaaaaaaaaaaaaaaaaaaaaaaaaaaaaaaaaaaaaaaaaaaaaaaaaaaaaaaaaaaaa

SEQ ID NO: 10188 - RNA, 8787 nt, synthetic construct
  source 1..8787: mol_type = other RNA
aggaaataagagagaaaagaagagtaagaagaaatataagagccaccatggcccctaagaagaagcgtaaagtgagccggatgaaccacgaccaggagttcgacccccctaaggtgtaccctcccgtccccgccgagaagagaaagcccatccgggtcctgagcctgttcgatggcatcgccaccggtctgctggtgctgaaggacctgggcatccaggtggataggtacattgcctccgaggtgtgcgaggactccatcaccgtgggaatggtgcgtcatcagggcaagatcatgtacgtgggcgacgtgcggagcgtgacacagaagcatatccaggagtggggccctttcgacctggtgatcggcggcagcccttgcaatgacctgagcatcgtgaacccagcccggaagggcctgtacgagggaaccggcagactgttcttcgagttttacagactgctgcacgacgcccggcctaaggaaggcgacgaccggcccttcttttggctgttcgagaatgtggtggccatgggagtcagcgacaagcgggatattagccggttcctggagagcaaccccgtgatgatcgatgccaaggaagtgagcgccgcccaccgggccagatacttctggggcaatctgcctggcatgaacagacccctggccagcaccgtgaacgacaagctggagctgcaggagtgcctggagcacggccggatcgccaagttcagcaaggtgagaaccatcaccacccgaagcaacagcatcaaacaaggcaaggaccagcactttcctgtgttcatgaacgagaaggaggacatcctgtggtgtaccgagatggagagagtgttcgggttcccagtccactacacagatgtcagcaacatgtctagactggccagacagagactgctgggaagaagctggtccgtccctgtgatcagacacctgttcgcccctctgaaggagtacttcgcctgcgtgagcagcggcaacagcaacgccaacagccggggccccagcttctctagcggcctggtgccactgtccctgagagggagccacatgggccccatggagatctacaaaaccgtgagcgcctggaagcggcagcctgtgcgcgtgctgagcctgtttcggaatatcgataaagtcctgaaaagcctgggattcctggagagcggctctggctccggcggtggcaccctgaagtacgtggaggatgtgacaaacgtggtcagacgggatgtggagaagtggggccccttcgatctggtgtacggcagcacccaacccctgggcagctcttgtgaccggtgccctggctggtacatgtttcagttccaccggatcctgcagtacgccctgccgagacaggagtcccagcggccattcttttggattttcatggacaacttgctgctgaccgaggatgaccaggaaactaccactcggttcctgcagaccgaagccgtgaccctgcaggacgtgagaggccgggactaccagaacgccatgcgggtgtggtccaacatccctggactgaaaagcaagcacgcacctctgacccctaaagaagaggagtacctgcaggcccaggtgcggagcagaagcaagctggacgcccctaaggtggatctgctggtgaagaattgcctcctgcccctgagagagtacttcaagtatttcagccagaatagtctgcccctgggaggcagcggcggcggcctgaaggacctggtgaccttcaaggacgtggccatcgacttcagccaggaggagtggcagtggatgaaccccgcccagaagcacctgtacaggagcatgatgctggagaactaccagagcctggtgagcctgggcctgtgcatcagcaagccctacgtgatcagcctgctggagcagggcagggagccctgggagatgaccagcgagatgaccaggagccccttcagcgactgggagagcatcggcggcccaagcagcggcgcccctcctcccagcggcggcaggcggcccaagcagcggcgcccctcctcccagcggcggcagcccagccggctccccaacctctaccgaggagggcacctctgagtccgccacccccgagagcggccctggcacctccaccgagcccagcgagggcagcgcacccggcagccctgccggcagccccacctccacagaggagggaaccagcaccgagcccagcgaaggcagcgccccaggcaccagcaccgagcctagtgagcaggagattaaacggatcaacaagatcagaagaagacttgtgaaagacagcaacaccaagaaggccggcaagacaggccccatgaaaaccctgctggttagagtgatgacacccgatctgagagagcggctggaaaacctgagaaagaagcctgaaaatatcccccagcccatcagcaatacatctagagccaacctgaataagctgctgaccgattacaccgaaatgaagaaggcgatcctgcatgtgtactgggaagagttccagaaggaccctgtgggcctgatgagccgggtggcccagcctgccagcaagaagatcgatcagaacaagctgaaacctgagatggacgagaagggcaacctgaccaccgccggctttgcctgctctcagtgtggccagcccctgttcgtgtacaagctggagcaggtgtctgagaagggcaaggcttacaccaactacttcggacggtgcaatgtggccgagcacgaaaagctgatcctgctggcccagctgaagcccgagaaggatagcgacgaagccgtgacatatagcctgggaaagtttgggcagagggccctggatttctacagcattcatgtgaccaaggagtccacccaccccgtgaagcccctggcccagatcgccggaaacagatacgcctccggacctgtgggaaaggccctgagcgacgcatgtatgggcacaatcgcctccttcctgtctaagtaccaggacatcatcatcgaacaccagaaggtggtgaagggcaaccagaagagactggagagcctgcgggagctggccggcaaggaaaacctggaataccctagcgtgaccctgccacctcagcctcacaccaaggagggcgttgatgcctacaacgaagtgatcgcccgggtgcgaatgtgggtgaacctgaacctgtggcagaagctgaagctaagcagagatgatgccaagcctctgctgagactgaagggattcccttcctttcctctggtcgagagacaggccaacgaagtggactggtgggacatggtgtgtaacgtgaagaagctgatcaacgagaaaaaggaggatggcaaggtgttttggcagaatctggctggctacaagagacaggaagccctgagaccatacctgagcagcgaggaagatcggaagaagggaaagaaattcgctcggtaccagctgggcgacctgctgctgcacctggaaaagaagcacggcgaggactggggaaaggtgtacgacgaggcctgggagcggattgacaagaaagtggaaggcctgagcaagcacatcaagctggaagaggaacggagaagcgaggacgcccagagcaaggccgccctgaccgactggctgcgggctaaggccagcttcgtgatcgagggcctgaaggaggccgacaaggacgagttctgcagatgcgagctgaagctgcagaagtggtacggggacctgcggggaaagcccttcgccatcgaagccgagaacagcatcctggacatcagcggcttcagcaagcagtacaactgtgccttcatctggcagaaggacggcgtgaagaagctgaacctgtacctgatcatcaactacttcaagggcggcaagctgcggttcaagaagatcaaacctgaagccttcgaagccaacagattctacaccgtgatcaacaaaaagagcggcgagatcgtgcccatggaggtgaacttcaacttcgacgaccccaacctgatcatcctgcctctggcctttggcaagagacagggcagagaattcatctggaacgacctgctgtccctggaaaccggcagcctgaagctggccaacggaagagtgatcgagaagacactgtacaacagaagaacccggcaggatgagcctgccctgttcgtggccctgaccttcgagcggcgggaggtcctggactcctccaatatcaaaccaatgaacctgatcggcgtggcaagaggcgaaaacatccccgccgtgatcgccctgaccgaccccgagggctgcccactgagccggtttaaggatagcctgggaaacccaacccacatcctgagaatcggcgagagctataaggagaagcagcggaccatccaggccaagaaggaggtggagcagcggagagccggcggctacagccggaagtacgccagcaaagccaagaatctggcagacgatatggtgagaaacaccgctagagatctgctgtactacgccgtgacccaggatgccatgctgatcttcgccaacctgagccggggcttcggccggcagggcaagcggaccttcatggccgagagacagtacacacggatggaggactggctgaccgccaagctggcctacgagggcctgagcaagacctacctgtccaagacactggcccagtacacctccaagacatgcagcaactgtgggtttaccatcaccagcgccgactacgacagggtgctggagaagctgaagaagacagcaacaggctggatgaccacaattaacggcaaggagctgaaggtggagggccagattacctactacaacagatacaagagacagaacgtagtcaaggacctgtccgtcgagctggatagactgagcgaagaatctgtgaacaacgacatctcctcctggacaaagggcagaagcggagaagctctgagcctcctgaagaaaagattctcccatagacccgtgcaggagaagttcgtgtgcctgaactgcggcttcgagacacacgcagccgagcaagccgccctgaacatcgccagatcctggctgttcctgcggagccaggagtacaagaaataccagacaaacaagacaaccggcaacaccgataagagagccttcgtcgagacctggcagtccttttaccggaagaagcttaaggaggtgtggaaacctgccgtgcggtctggcggatctggcggaggctccaccagccccaagaaaaagagaaaagtctaagctgccttctgcggggcttgccttctggccatgcccttcttctctcccttgcacctgtacctcttggtctttgaataaagcctgagtaggaaggctagcaaaaaaaaaaaaaaaaaaaaaaaaaaaaaaaaaaaaaaaaaaaaaaaaaaaaaaaaaaaaaaaaaaaaaaaaaaaaaaaagcccagccggctccccaacctctaccgaggagggcacctctgagtccgccacccccgagagcggccctggcacctccaccgagcccagcgagggcagcgcacccggcagccctgccggcagccccacctccacagaggagggaaccagcaccgagcccagcgaaggcagcgccccaggcaccagcaccgagcctagtgagcaggagattaaacggatcaacaagatcagaagaagacttgtgaaagacagcaacaccaagaaggccggcaagacaggccccatgaaaaccctgctggttagagtgatgacacccgatctgagagagcggctggaaaacctgagaaagaagcctgaaaatatcccccagcccatcagcaatacatctagagccaacctgaataagctgctgaccgattacaccgaaatgaagaaggcgatcctgcatgtgtactgggaagagttccagaaggaccctgtgggcctgatgagccgggtggcccagcctgccagcaagaagatcgatcagaacaagctgaaacctgagatggacgagaagggcaacctgaccaccgccggctttgcctgctctcagtgtggccagcccctgttcgtgtacaagctggagcaggtgtctgagaagggcaaggcttacaccaactacttcggacggtgcaatgtggccgagcacgaaaagctgatcctgctggcccagctgaagcccgagaaggatagcgacgaagccgtgacatatagcctgggaaagtttgggcagagggccctggatttctacagcattcatgtgaccaaggagtccacccaccccgtgaagcccctggcccagatcgccggaaacagatacgcctccggacctgtgggaaaggccctgagcgacgcatgtatgggcacaatcgcctccttcctgtctaagtaccaggacatcatcatcgaacaccagaaggtggtgaagggcaaccagaagagactggagagcctgcgggagctggccggcaaggaaaacctggaataccctagcgtgaccctgccacctcagcctcacaccaaggagggcgttgatgcctacaacgaagtgatcgcccgggtgcgaatgtgggtgaacctgaacctgtggcagaagctgaagctaagcagagatgatgccaagcctctgctgagactgaagggattcccttcctttcctctggtcgagagacaggccaacgaagtggactggtgggacatggtgtgtaacgtgaagaagctgatcaacgagaaaaaggaggatggcaaggtgttttggcagaatctggctggctacaagagacaggaagccctgagaccatacctgagcagcgaggaagatcggaagaagggaaagaaattcgctcggtaccagctgggcgacctgctgctgcacctggaaaagaagcacggcgaggactggggaaaggtgtacgacgaggcctgggagcggattgacaagaaagtggaaggcctgagcaagcacatcaagctggaagaggaacggagaagcgaggacgcccagagcaaggccgccctgaccgactggctgcgggctaaggccagcttcgtgatcgagggcctgaaggaggccgacaaggacgagttctgcagatgcgagctgaagctgcagaagtggtacggggacctgcggggaaagcccttcgccatcgaagccgagaacagcatcctggacatcagcggcttcagcaagcagtacaactgtgccttcatctggcagaaggacggcgtgaagaagctgaacctgtacctgatcatcaactacttcaagggcggcaagctgcggttcaagaagatcaaacctgaagccttcgaagccaacagattctacaccgtgatcaacaaaaagagcggcgagatcgtgcccatggaggtgaacttcaacttcgacgaccccaacctgatcatcctgcctctggcctttggcaagagacagggcagagaattcatctggaacgacctgctgtccctggaaaccggcagcctgaagctggccaacggaagagtgatcgagaagacactgtacaacagaagaacccggcaggatgagcctgccctgttcgtggccctgaccttcgagcggcgggaggtcctggactcctccaatatcaaaccaatgaacctgatcggcgtggcaagaggcgaaaacatccccgccgtgatcgccctgaccgaccccgagggctgcccactgagccggtttaaggatagcctgggaaacccaacccacatcctgagaatcggcgagagctataaggagaagcagcggaccatccaggccaagaaggaggtggagcagcggagagccggcggctacagccggaagtacgccagcaaagccaagaatctggcagacgatatggtgagaaacaccgctagagatctgctgtactacgccgtgacccaggatgccatgctgatcttcgccaacctgagccggggcttcggccggcagggcaagcggaccttcatggccgagagacagtacacacggatggaggactggctgaccgccaagctggcctacgagggcctgagcaagacctacctgtccaagacactggcccagtacacctccaagacatgcagcaactgtgggtttaccatcaccagcgccgactacgacagggtgctggagaagctgaagaagacagcaacaggctggatgaccacaattaacggcaaggagctgaaggtggagggccagattacctactacaacagatacaagagacagaacgtagtcaaggacctgtccgtcgagctggatagactgagcgaagaatctgtgaacaacgacatctcctcctggacaaagggcagaagcggagaagctctgagcctcctgaagaaaagattctcccatagacccgtgcaggagaagttcgtgtgcctgaactgcggcttcgagacacacgcagccgagcaagccgccctgaacatcgccagatcctggctgttcctgcggagccaggagtacaagaaataccagacaaacaagacaaccggcaacaccgataagagagccttcgtcgagacctggcagtccttttaccggaagaagcttaaggaggtgtggaaacctgccgtgcggtctggcggatctggcggaggctccaccagccccaagaaaaagagaaaagtctaagctgccttctgcggggcttgccttctggccatgcccttcttctctcccttgcacctgtacctcttggtctttgaataaagcctgagtaggaaggctagcaaaaaaaaaaaaaaaaaaaaaaaaaaaaaaaaaaaaaaaaaaaaaaaaaaaaaaaaaaaaaaaaaaaaaaaaaaaaaaaa

SEQ ID NO: 10189 - RNA, 8787 nt, synthetic construct
  source 1..8787: mol_type = other RNA
aggaaataagagagaaaagaagagtaagaagaaatataagagccaccatggcccctaagaagaagcgtaaagtgagccggatgaaccacgaccaggagttcgacccccctaaggtgtaccctcccgtccccgccgagaagagaaagcccatccgggtcctgagcctgttcgatggcatcgccaccggtctgctggtgctgaaggacctgggcatccaggtggataggtacattgcctccgaggtgtgcgaggactccatcaccgtgggaatggtgcgtcatcagggcaagatcatgtacgtgggcgacgtgcggagcgtgacacagaagcatatccaggagtggggccctttcgacctggtgatcggcggcagcccttgcaatgacctgagcatcgtgaacccagcccggaagggcctgtacgagggaaccggcagactgttcttcgagttttacagactgctgcacgacgcccggcctaaggaaggcgacgaccggcccttcttttggctgttcgagaatgtggtggccatgggagtcagcgacaagcgggatattagccggttcctggagagcaaccccgtgatgatcgatgccaaggaagtgagcgccgcccaccgggccagatacttctggggcaatctgcctggcatgaacagacccctggccagcaccgtgaacgacaagctggagctgcaggagtgcctggagcacggccggatcgccaagttcagcaaggtgagaaccatcaccacccgaagcaacagcatcaaacaaggcaaggaccagcactttcctgtgttcatgaacgagaaggaggacatcctgtggtgtaccgagatggagagagtgttcgggttcccagtccactacacagatgtcagcaacatgtctagactggccagacagagactgctgggaagaagctggtccgtccctgtgatcagacacctgttcgcccctctgaaggagtacttcgcctgcgtgagcagcggcaacagcaacgccaacagccggggccccagcttctctagcggcctggtgccactgtccctgagagggagccacatgggccccatggagatctacaaaaccgtgagcgcctggaagcggcagcctgtgcgcgtgctgagcctgtttcggaatatcgataaagtcctgaaaagcctgggattcctggagagcggctctggctccggcggtggcaccctgaagtacgtggaggatgtgacaaacgtggtcagacgggatgtggagaagtggggccccttcgatctggtgtacggcagcacccaacccctgggcagctcttgtgaccggtgccctggctggtacatgtttcagttccaccggatcctgcagtacgccctgccgagacaggagtcccagcggccattcttttggattttcatggacaacttgctgctgaccgaggatgaccaggaaactaccactcggttcctgcagaccgaagccgtgaccctgcaggacgtgagaggccgggactaccagaacgccatgcgggtgtggtccaacatccctggactgaaaagcaagcacgcacctctgacccctaaagaagaggagtacctgcaggcccaggtgcggagcagaagcaagctggacgcccctaaggtggatctgctggtgaagaattgcctcctgcccctgagagagtacttcaagtatttcagccagaatagtctgcccctgggaggcagcggcggcggcatggacatggcccaggagcccgtgaccttcagggacgtggccatctacttcagcagggaggagtgggcctgcctggagcccagccagagggccctgtacagggacgtgatgctggacaacttcagcagcgtggccgccctgggcttctgcagccccaggcccgacctggtgagcaggctggagcagtgggaggagccctgggtggaggactgggagaggcccgagctgcaggccgtgcagaggggcggcccaagcagcggcgcccctcctcccagcggcggcaggcggcccaagcagcggcgcccctcctcccagcggcggcagcccagccggctccccaacctctaccgaggagggcacctctgagtccgccacccccgagagcggccctggcacctccaccgagcccagcgagggcagcgcacccggcagccctgccggcagccccacctccacagaggagggaaccagcaccgagcccagcgaaggcagcgccccaggcaccagcaccgagcctagtgagcaggagattaaacggatcaacaagatcagaagaagacttgtgaaagacagcaacaccaagaaggccggcaagacaggccccatgaaaaccctgctggttagagtgatgacacccgatctgagagagcggctggaaaacctgagaaagaagcctgaaaatatcccccagcccatcagcaatacatctagagccaacctgaataagctgctgaccgattacaccgaaatgaagaaggcgatcctgcatgtgtactgggaagagttccagaaggaccctgtgggcctgatgagccgggtggcccagcctgccagcaagaagatcgatcagaacaagctgaaacctgagatggacgagaagggcaacctgaccaccgccggctttgcctgctctcagtgtggccagcccctgttcgtgtacaagctggagcaggtgtctgagaagggcaaggcttacaccaactacttcggacggtgcaatgtggccgagcacgaaaagctgatcctgctggcccagctgaagcccgagaaggatagcgacgaagccgtgacatatagcctgggaaagtttgggcagagggccctggatttctacagcattcatgtgaccaaggagtccacccaccccgtgaagcccctggcccagatcgccggaaacagatacgcctccggacctgtgggaaaggccctgagcgacgcatgtatgggcacaatcgcctccttcctgtctaagtaccaggacatcatcatcgaacaccagaaggtggtgaagggcaaccagaagagactggagagcctgcgggagctggccggcaaggaaaacctggaataccctagcgtgaccctgccacctcagcctcacaccaaggagggcgttgatgcctacaacgaagtgatcgcccgggtgcgaatgtgggtgaacctgaacctgtggcagaagctgaagctaagcagagatgatgccaagcctctgctgagactgaagggattcccttcctttcctctggtcgagagacaggccaacgaagtggactggtgggacatggtgtgtaacgtgaagaagctgatcaacgagaaaaaggaggatggcaaggtgttttggcagaatctggctggctacaagagacaggaagccctgagaccatacctgagcagcgaggaagatcggaagaagggaaagaaattcgctcggtaccagctgggcgacctgctgctgcacctggaaaagaagcacggcgaggactggggaaaggtgtacgacgaggcctgggagcggattgacaagaaagtggaaggcctgagcaagcacatcaagctggaagaggaacggagaagcgaggacgcccagagcaaggccgccctgaccgactggctgcgggctaaggccagcttcgtgatcgagggcctgaaggaggccgacaaggacgagttctgcagatgcgagctgaagctgcagaagtggtacggggacctgcggggaaagcccttcgccatcgaagccgagaacagcatcctggacatcagcggcttcagcaagcagtacaactgtgccttcatctggcagaaggacggcgtgaagaagctgaacctgtacctgatcatcaactacttcaagggcggcaagctgcggttcaagaagatcaaacctgaagccttcgaagccaacagattctacaccgtgatcaacaaaaagagcggcgagatcgtgcccatggaggtgaacttcaacttcgacgaccccaacctgatcatcctgcctctggcctttggcaagagacagggcagagaattcatctggaacgacctgctgtccctggaaaccggcagcctgaagctggccaacggaagagtgatcgagaagacactgtacaacagaagaacccggcaggatgagcctgccctgttcgtggccctgaccttcgagcggcgggaggtcctggactcctccaatatcaaaccaatgaacctgatcggcgtggcaagaggcgaaaacatccccgccgtgatcgccctgaccgaccccgagggctgcccactgagccggtttaaggatagcctgggaaacccaacccacatcctgagaatcggcgagagctataaggagaagcagcggaccatccaggccaagaaggaggtggagcagcggagagccggcggctacagccggaagtacgccagcaaagccaagaatctggcagacgatatggtgagaaacaccgctagagatctgctgtactacgccgtgacccaggatgccatgctgatcttcgccaacctgagccggggcttcggccggcagggcaagcggaccttcatggccgagagacagtacacacggatggaggactggctgaccgccaagctggcctacgagggcctgagcaagacctacctgtccaagacactggcccagtacacctccaagacatgcagcaactgtgggtttaccatcaccagcgccgactacgacagggtgctggagaagctgaagaagacagcaacaggctggatgaccacaattaacggcaaggagctgaaggtggagggccagattacctactacaacagatacaagagacagaacgtagtcaaggacctgtccgtcgagctggatagactgagcgaagaatctgtgaacaacgacatctcctcctggacaaagggcagaagcggagaagctctgagcctcctgaagaaaagattctcccatagacccgtgcaggagaagttcgtgtgcctgaactgcggcttcgagacacacgcagccgagcaagccgccctgaacatcgccagatcctggctgttcctgcggagccaggagtacaagaaataccagacaaacaagacaaccggcaacaccgataagagagccttcgtcgagacctggcagtccttttaccggaagaagcttaaggaggtgtggaaacctgccgtgcggtctggcggatctggcggaggctccaccagccccaagaaaaagagaaaagtctaagctgccttctgcggggcttgccttctggccatgcccttcttctctcccttgcacctgtacctcttggtctttgaataaagcctgagtaggaaggctagcaaaaaaaaaaaaaaaaaaaaaaaaaaaaaaaaaaaaaaaaaaaaaaaaaaaaaaaaaaaaaaaaaaaaaaaaaaaaaaaagcccagccggctccccaacctctaccgaggagggcacctctgagtccgccacccccgagagcggccctggcacctccaccgagcccagcgagggcagcgcacccggcagccctgccggcagccccacctccacagaggagggaaccagcaccgagcccagcgaaggcagcgccccaggcaccagcaccgagcctagtgagcaggagattaaacggatcaacaagatcagaagaagacttgtgaaagacagcaacaccaagaaggccggcaagacaggccccatgaaaaccctgctggttagagtgatgacacccgatctgagagagcggctggaaaacctgagaaagaagcctgaaaatatcccccagcccatcagcaatacatctagagccaacctgaataagctgctgaccgattacaccgaaatgaagaaggcgatcctgcatgtgtactgggaagagttccagaaggaccctgtgggcctgatgagccgggtggcccagcctgccagcaagaagatcgatcagaacaagctgaaacctgagatggacgagaagggcaacctgaccaccgccggctttgcctgctctcagtgtggccagcccctgttcgtgtacaagctggagcaggtgtctgagaagggcaaggcttacaccaactacttcggacggtgcaatgtggccgagcacgaaaagctgatcctgctggcccagctgaagcccgagaaggatagcgacgaagccgtgacatatagcctgggaaagtttgggcagagggccctggatttctacagcattcatgtgaccaaggagtccacccaccccgtgaagcccctggcccagatcgccggaaacagatacgcctccggacctgtgggaaaggccctgagcgacgcatgtatgggcacaatcgcctccttcctgtctaagtaccaggacatcatcatcgaacaccagaaggtggtgaagggcaaccagaagagactggagagcctgcgggagctggccggcaaggaaaacctggaataccctagcgtgaccctgccacctcagcctcacaccaaggagggcgttgatgcctacaacgaagtgatcgcccgggtgcgaatgtgggtgaacctgaacctgtggcagaagctgaagctaagcagagatgatgccaagcctctgctgagactgaagggattcccttcctttcctctggtcgagagacaggccaacgaagtggactggtgggacatggtgtgtaacgtgaagaagctgatcaacgagaaaaaggaggatggcaaggtgttttggcagaatctggctggctacaagagacaggaagccctgagaccatacctgagcagcgaggaagatcggaagaagggaaagaaattcgctcggtaccagctgggcgacctgctgctgcacctggaaaagaagcacggcgaggactggggaaaggtgtacgacgaggcctgggagcggattgacaagaaagtggaaggcctgagcaagcacatcaagctggaagaggaacggagaagcgaggacgcccagagcaaggccgccctgaccgactggctgcgggctaaggccagcttcgtgatcgagggcctgaaggaggccgacaaggacgagttctgcagatgcgagctgaagctgcagaagtggtacggggacctgcggggaaagcccttcgccatcgaagccgagaacagcatcctggacatcagcggcttcagcaagcagtacaactgtgccttcatctggcagaaggacggcgtgaagaagctgaacctgtacctgatcatcaactacttcaagggcggcaagctgcggttcaagaagatcaaacctgaagccttcgaagccaacagattctacaccgtgatcaacaaaaagagcggcgagatcgtgcccatggaggtgaacttcaacttcgacgaccccaacctgatcatcctgcctctggcctttggcaagagacagggcagagaattcatctggaacgacctgctgtccctggaaaccggcagcctgaagctggccaacggaagagtgatcgagaagacactgtacaacagaagaacccggcaggatgagcctgccctgttcgtggccctgaccttcgagcggcgggaggtcctggactcctccaatatcaaaccaatgaacctgatcggcgtggcaagaggcgaaaacatccccgccgtgatcgccctgaccgaccccgagggctgcccactgagccggtttaaggatagcctgggaaacccaacccacatcctgagaatcggcgagagctataaggagaagcagcggaccatccaggccaagaaggaggtggagcagcggagagccggcggctacagccggaagtacgccagcaaagccaagaatctggcagacgatatggtgagaaacaccgctagagatctgctgtactacgccgtgacccaggatgccatgctgatcttcgccaacctgagccggggcttcggccggcagggcaagcggaccttcatggccgagagacagtacacacggatggaggactggctgaccgccaagctggcctacgagggcctgagcaagacctacctgtccaagacactggcccagtacacctccaagacatgcagcaactgtgggtttaccatcaccagcgccgactacgacagggtgctggagaagctgaagaagacagcaacaggctggatgaccacaattaacggcaaggagctgaaggtggagggccagattacctactacaacagatacaagagacagaacgtagtcaaggacctgtccgtcgagctggatagactgagcgaagaatctgtgaacaacgacatctcctcctggacaaagggcagaagcggagaagctctgagcctcctgaagaaaagattctcccatagacccgtgcaggagaagttcgtgtgcctgaactgcggcttcgagacacacgcagccgagcaagccgccctgaacatcgccagatcctggctgttcctgcggagccaggagtacaagaaataccagacaaacaagacaaccggcaacaccgataagagagccttcgtcgagacctggcagtccttttaccggaagaagcttaaggaggtgtggaaacctgccgtgcggtctggcggatctggcggaggctccaccagccccaagaaaaagagaaaagtctaagctgccttctgcggggcttgccttctggccatgcccttcttctctcccttgcacctgtacctcttggtctttgaataaagcctgagtaggaaggctagcaaaaaaaaaaaaaaaaaaaaaaaaaaaaaaaaaaaaaaaaaaaaaaaaaaaaaaaaaaaaaaaaaaaaaaaaaaaaaaaa

SEQ ID NO: 10190 - RNA, 8787 nt, synthetic construct
  source 1..8787: mol_type = other RNA
aggaaataagagagaaaagaagagtaagaagaaatataagagccaccatggcccctaagaagaagcgtaaagtgagccggatgaaccacgaccaggagttcgacccccctaaggtgtaccctcccgtccccgccgagaagagaaagcccatccgggtcctgagcctgttcgatggcatcgccaccggtctgctggtgctgaaggacctgggcatccaggtggataggtacattgcctccgaggtgtgcgaggactccatcaccgtgggaatggtgcgtcatcagggcaagatcatgtacgtgggcgacgtgcggagcgtgacacagaagcatatccaggagtggggccctttcgacctggtgatcggcggcagcccttgcaatgacctgagcatcgtgaacccagcccggaagggcctgtacgagggaaccggcagactgttcttcgagttttacagactgctgcacgacgcccggcctaaggaaggcgacgaccggcccttcttttggctgttcgagaatgtggtggccatgggagtcagcgacaagcgggatattagccggttcctggagagcaaccccgtgatgatcgatgccaaggaagtgagcgccgcccaccgggccagatacttctggggcaatctgcctggcatgaacagacccctggccagcaccgtgaacgacaagctggagctgcaggagtgcctggagcacggccggatcgccaagttcagcaaggtgagaaccatcaccacccgaagcaacagcatcaaacaaggcaaggaccagcactttcctgtgttcatgaacgagaaggaggacatcctgtggtgtaccgagatggagagagtgttcgggttcccagtccactacacagatgtcagcaacatgtctagactggccagacagagactgctgggaagaagctggtccgtccctgtgatcagacacctgttcgcccctctgaaggagtacttcgcctgcgtgagcagcggcaacagcaacgccaacagccggggccccagcttctctagcggcctggtgccactgtccctgagagggagccacatgggccccatggagatctacaaaaccgtgagcgcctggaagcggcagcctgtgcgcgtgctgagcctgtttcggaatatcgataaagtcctgaaaagcctgggattcctggagagcggctctggctccggcggtggcaccctgaagtacgtggaggatgtgacaaacgtggtcagacgggatgtggagaagtggggccccttcgatctggtgtacggcagcacccaacccctgggcagctcttgtgaccggtgccctggctggtacatgtttcagttccaccggatcctgcagtacgccctgccgagacaggagtcccagcggccattcttttggattttcatggacaacttgctgctgaccgaggatgaccaggaaactaccactcggttcctgcagaccgaagccgtgaccctgcaggacgtgagaggccgggactaccagaacgccatgcgggtgtggtccaacatccctggactgaaaagcaagcacgcacctctgacccctaaagaagaggagtacctgcaggcccaggtgcggagcagaagcaagctggacgcccctaaggtggatctgctggtgaagaattgcctcctgcccctgagagagtacttcaagtatttcagccagaatagtctgcccctgggaggcagcggcggcggcatgggcctgctgaccttcagggacgtggccatcgagttcagcctggaggagtggcagtgcctggacaccgcccagaagaacctgtacaggaacgtgatgctggagaactacaggaacctggccttcctgggcgtggccgtgagcaagcccgacctgatcatctgcctggagaaggacaaggagccctggaacatgaagaggcacgagatggtggacgagccccccggcctgaccgtgagcaacggcggcccaagcagcggcgcccctcctcccagcggcggcaggcggcccaagcagcggcgcccctcctcccagcggcggcagcccagccggctccccaacctctaccgaggagggcacctctgagtccgccacccccgagagcggccctggcacctccaccgagcccagcgagggcagcgcacccggcagccctgccggcagccccacctccacagaggagggaaccagcaccgagcccagcgaaggcagcgccccaggcaccagcaccgagcctagtgagcaggagattaaacggatcaacaagatcagaagaagacttgtgaaagacagcaacaccaagaaggccggcaagacaggccccatgaaaaccctgctggttagagtgatgacacccgatctgagagagcggctggaaaacctgagaaagaagcctgaaaatatcccccagcccatcagcaatacatctagagccaacctgaataagctgctgaccgattacaccgaaatgaagaaggcgatcctgcatgtgtactgggaagagttccagaaggaccctgtgggcctgatgagccgggtggcccagcctgccagcaagaagatcgatcagaacaagctgaaacctgagatggacgagaagggcaacctgaccaccgccggctttgcctgctctcagtgtggccagcccctgttcgtgtacaagctggagcaggtgtctgagaagggcaaggcttacaccaactacttcggacggtgcaatgtggccgagcacgaaaagctgatcctgctggcccagctgaagcccgagaaggatagcgacgaagccgtgacatatagcctgggaaagtttgggcagagggccctggatttctacagcattcatgtgaccaaggagtccacccaccccgtgaagcccctggcccagatcgccggaaacagatacgcctccggacctgtgggaaaggccctgagcgacgcatgtatgggcacaatcgcctccttcctgtctaagtaccaggacatcatcatcgaacaccagaaggtggtgaagggcaaccagaagagactggagagcctgcgggagctggccggcaaggaaaacctggaataccctagcgtgaccctgccacctcagcctcacaccaaggagggcgttgatgcctacaacgaagtgatcgcccgggtgcgaatgtgggtgaacctgaacctgtggcagaagctgaagctaagcagagatgatgccaagcctctgctgagactgaagggattcccttcctttcctctggtcgagagacaggccaacgaagtggactggtgggacatggtgtgtaacgtgaagaagctgatcaacgagaaaaaggaggatggcaaggtgttttggcagaatctggctggctacaagagacaggaagccctgagaccatacctgagcagcgaggaagatcggaagaagggaaagaaattcgctcggtaccagctgggcgacctgctgctgcacctggaaaagaagcacggcgaggactggggaaaggtgtacgacgaggcctgggagcggattgacaagaaagtggaaggcctgagcaagcacatcaagctggaagaggaacggagaagcgaggacgcccagagcaaggccgccctgaccgactggctgcgggctaaggccagcttcgtgatcgagggcctgaaggaggccgacaaggacgagttctgcagatgcgagctgaagctgcagaagtggtacggggacctgcggggaaagcccttcgccatcgaagccgagaacagcatcctggacatcagcggcttcagcaagcagtacaactgtgccttcatctggcagaaggacggcgtgaagaagctgaacctgtacctgatcatcaactacttcaagggcggcaagctgcggttcaagaagatcaaacctgaagccttcgaagccaacagattctacaccgtgatcaacaaaaagagcggcgagatcgtgcccatggaggtgaacttcaacttcgacgaccccaacctgatcatcctgcctctggcctttggcaagagacagggcagagaattcatctggaacgacctgctgtccctggaaaccggcagcctgaagctggccaacggaagagtgatcgagaagacactgtacaacagaagaacccggcaggatgagcctgccctgttcgtggccctgaccttcgagcggcgggaggtcctggactcctccaatatcaaaccaatgaacctgatcggcgtggcaagaggcgaaaacatccccgccgtgatcgccctgaccgaccccgagggctgcccactgagccggtttaaggatagcctgggaaacccaacccacatcctgagaatcggcgagagctataaggagaagcagcggaccatccaggccaagaaggaggtggagcagcggagagccggcggctacagccggaagtacgccagcaaagccaagaatctggcagacgatatggtgagaaacaccgctagagatctgctgtactacgccgtgacccaggatgccatgctgatcttcgccaacctgagccggggcttcggccggcagggcaagcggaccttcatggccgagagacagtacacacggatggaggactggctgaccgccaagctggcctacgagggcctgagcaagacctacctgtccaagacactggcccagtacacctccaagacatgcagcaactgtgggtttaccatcaccagcgccgactacgacagggtgctggagaagctgaagaagacagcaacaggctggatgaccacaattaacggcaaggagctgaaggtggagggccagattacctactacaacagatacaagagacagaacgtagtcaaggacctgtccgtcgagctggatagactgagcgaagaatctgtgaacaacgacatctcctcctggacaaagggcagaagcggagaagctctgagcctcctgaagaaaagattctcccatagacccgtgcaggagaagttcgtgtgcctgaactgcggcttcgagacacacgcagccgagcaagccgccctgaacatcgccagatcctggctgttcctgcggagccaggagtacaagaaataccagacaaacaagacaaccggcaacaccgataagagagccttcgtcgagacctggcagtccttttaccggaagaagcttaaggaggtgtggaaacctgccgtgcggtctggcggatctggcggaggctccaccagccccaagaaaaagagaaaagtctaagctgccttctgcggggcttgccttctggccatgcccttcttctctcccttgcacctgtacctcttggtctttgaataaagcctgagtaggaaggctagcaaaaaaaaaaaaaaaaaaaaaaaaaaaaaaaaaaaaaaaaaaaaaaaaaaaaaaaaaaaaaaaaaaaaaaaaaaaaaaaagcccagccggctccccaacctctaccgaggagggcacctctgagtccgccacccccgagagcggccctggcacctccaccgagcccagcgagggcagcgcacccggcagccctgccggcagccccacctccacagaggagggaaccagcaccgagcccagcgaaggcagcgccccaggcaccagcaccgagcctagtgagcaggagattaaacggatcaacaagatcagaagaagacttgtgaaagacagcaacaccaagaaggccggcaagacaggccccatgaaaaccctgctggttagagtgatgacacccgatctgagagagcggctggaaaacctgagaaagaagcctgaaaatatcccccagcccatcagcaatacatctagagccaacctgaataagctgctgaccgattacaccgaaatgaagaaggcgatcctgcatgtgtactgggaagagttccagaaggaccctgtgggcctgatgagccgggtggcccagcctgccagcaagaagatcgatcagaacaagctgaaacctgagatggacgagaagggcaacctgaccaccgccggctttgcctgctctcagtgtggccagcccctgttcgtgtacaagctggagcaggtgtctgagaagggcaaggcttacaccaactacttcggacggtgcaatgtggccgagcacgaaaagctgatcctgctggcccagctgaagcccgagaaggatagcgacgaagccgtgacatatagcctgggaaagtttgggcagagggccctggatttctacagcattcatgtgaccaaggagtccacccaccccgtgaagcccctggcccagatcgccggaaacagatacgcctccggacctgtgggaaaggccctgagcgacgcatgtatgggcacaatcgcctccttcctgtctaagtaccaggacatcatcatcgaacaccagaaggtggtgaagggcaaccagaagagactggagagcctgcgggagctggccggcaaggaaaacctggaataccctagcgtgaccctgccacctcagcctcacaccaaggagggcgttgatgcctacaacgaagtgatcgcccgggtgcgaatgtgggtgaacctgaacctgtggcagaagctgaagctaagcagagatgatgccaagcctctgctgagactgaagggattcccttcctttcctctggtcgagagacaggccaacgaagtggactggtgggacatggtgtgtaacgtgaagaagctgatcaacgagaaaaaggaggatggcaaggtgttttggcagaatctggctggctacaagagacaggaagccctgagaccatacctgagcagcgaggaagatcggaagaagggaaagaaattcgctcggtaccagctgggcgacctgctgctgcacctggaaaagaagcacggcgaggactggggaaaggtgtacgacgaggcctgggagcggattgacaagaaagtggaaggcctgagcaagcacatcaagctggaagaggaacggagaagcgaggacgcccagagcaaggccgccctgaccgactggctgcgggctaaggccagcttcgtgatcgagggcctgaaggaggccgacaaggacgagttctgcagatgcgagctgaagctgcagaagtggtacggggacctgcggggaaagcccttcgccatcgaagccgagaacagcatcctggacatcagcggcttcagcaagcagtacaactgtgccttcatctggcagaaggacggcgtgaagaagctgaacctgtacctgatcatcaactacttcaagggcggcaagctgcggttcaagaagatcaaacctgaagccttcgaagccaacagattctacaccgtgatcaacaaaaagagcggcgagatcgtgcccatggaggtgaacttcaacttcgacgaccccaacctgatcatcctgcctctggcctttggcaagagacagggcagagaattcatctggaacgacctgctgtccctggaaaccggcagcctgaagctggccaacggaagagtgatcgagaagacactgtacaacagaagaacccggcaggatgagcctgccctgttcgtggccctgaccttcgagcggcgggaggtcctggactcctccaatatcaaaccaatgaacctgatcggcgtggcaagaggcgaaaacatccccgccgtgatcgccctgaccgaccccgagggctgcccactgagccggtttaaggatagcctgggaaacccaacccacatcctgagaatcggcgagagctataaggagaagcagcggaccatccaggccaagaaggaggtggagcagcggagagccggcggctacagccggaagtacgccagcaaagccaagaatctggcagacgatatggtgagaaacaccgctagagatctgctgtactacgccgtgacccaggatgccatgctgatcttcgccaacctgagccggggcttcggccggcagggcaagcggaccttcatggccgagagacagtacacacggatggaggactggctgaccgccaagctggcctacgagggcctgagcaagacctacctgtccaagacactggcccagtacacctccaagacatgcagcaactgtgggtttaccatcaccagcgccgactacgacagggtgctggagaagctgaagaagacagcaacaggctggatgaccacaattaacggcaaggagctgaaggtggagggccagattacctactacaacagatacaagagacagaacgtagtcaaggacctgtccgtcgagctggatagactgagcgaagaatctgtgaacaacgacatctcctcctggacaaagggcagaagcggagaagctctgagcctcctgaagaaaagattctcccatagacccgtgcaggagaagttcgtgtgcctgaactgcggcttcgagacacacgcagccgagcaagccgccctgaacatcgccagatcctggctgttcctgcggagccaggagtacaagaaataccagacaaacaagacaaccggcaacaccgataagagagccttcgtcgagacctggcagtccttttaccggaagaagcttaaggaggtgtggaaacctgccgtgcggtctggcggatctggcggaggctccaccagccccaagaaaaagagaaaagtctaagctgccttctgcggggcttgccttctggccatgcccttcttctctcccttgcacctgtacctcttggtctttgaataaagcctgagtaggaaggctagcaaaaaaaaaaaaaaaaaaaaaaaaaaaaaaaaaaaaaaaaaaaaaaaaaaaaaaaaaaaaaaaaaaaaaaaaaaaaaaaa

SEQ ID NO: 10191 - RNA, 8787 nt, synthetic construct
  source 1..8787: mol_type = other RNA
aggaaataagagagaaaagaagagtaagaagaaatataagagccaccatggcccctaagaagaagcgtaaagtgagccggatgaaccacgaccaggagttcgacccccctaaggtgtaccctcccgtccccgccgagaagagaaagcccatccgggtcctgagcctgttcgatggcatcgccaccggtctgctggtgctgaaggacctgggcatccaggtggataggtacattgcctccgaggtgtgcgaggactccatcaccgtgggaatggtgcgtcatcagggcaagatcatgtacgtgggcgacgtgcggagcgtgacacagaagcatatccaggagtggggccctttcgacctggtgatcggcggcagcccttgcaatgacctgagcatcgtgaacccagcccggaagggcctgtacgagggaaccggcagactgttcttcgagttttacagactgctgcacgacgcccggcctaaggaaggcgacgaccggcccttcttttggctgttcgagaatgtggtggccatgggagtcagcgacaagcgggatattagccggttcctggagagcaaccccgtgatgatcgatgccaaggaagtgagcgccgcccaccgggccagatacttctggggcaatctgcctggcatgaacagacccctggccagcaccgtgaacgacaagctggagctgcaggagtgcctggagcacggccggatcgccaagttcagcaaggtgagaaccatcaccacccgaagcaacagcatcaaacaaggcaaggaccagcactttcctgtgttcatgaacgagaaggaggacatcctgtggtgtaccgagatggagagagtgttcgggttcccagtccactacacagatgtcagcaacatgtctagactggccagacagagactgctgggaagaagctggtccgtccctgtgatcagacacctgttcgcccctctgaaggagtacttcgcctgcgtgagcagcggcaacagcaacgccaacagccggggccccagcttctctagcggcctggtgccactgtccctgagagggagccacatgggccccatggagatctacaaaaccgtgagcgcctggaagcggcagcctgtgcgcgtgctgagcctgtttcggaatatcgataaagtcctgaaaagcctgggattcctggagagcggctctggctccggcggtggcaccctgaagtacgtggaggatgtgacaaacgtggtcagacgggatgtggagaagtggggccccttcgatctggtgtacggcagcacccaacccctgggcagctcttgtgaccggtgccctggctggtacatgtttcagttccaccggatcctgcagtacgccctgccgagacaggagtcccagcggccattcttttggattttcatggacaacttgctgctgaccgaggatgaccaggaaactaccactcggttcctgcagaccgaagccgtgaccctgcaggacgtgagaggccgggactaccagaacgccatgcgggtgtggtccaacatccctggactgaaaagcaagcacgcacctctgacccctaaagaagaggagtacctgcaggcccaggtgcggagcagaagcaagctggacgcccctaaggtggatctgctggtgaagaattgcctcctgcccctgagagagtacttcaagtatttcagccagaatagtctgcccctgggaggcagcggcggcggcagccccggcctgctgaccttcagggacgtggtgatcgagttcagcctggaggagtggcagtgcctggaccacgcccagcagaacctgtacagggacgtgatgctggagaactacaggaacctggtgagcctgggcatcgccgtgagcaagcccgacctgatcacctgcctggagcagaacaaggacccctggaacatcaagaggaacgagatggtgaccaagcaccccgtgatgtgcagccacggcggcccaagcagcggcgcccctcctcccagcggcggcaggcggcccaagcagcggcgcccctcctcccagcggcggcagcccagccggctccccaacctctaccgaggagggcacctctgagtccgccacccccgagagcggccctggcacctccaccgagcccagcgagggcagcgcacccggcagccctgccggcagccccacctccacagaggagggaaccagcaccgagcccagcgaaggcagcgccccaggcaccagcaccgagcctagtgagcaggagattaaacggatcaacaagatcagaagaagacttgtgaaagacagcaacaccaagaaggccggcaagacaggccccatgaaaaccctgctggttagagtgatgacacccgatctgagagagcggctggaaaacctgagaaagaagcctgaaaatatcccccagcccatcagcaatacatctagagccaacctgaataagctgctgaccgattacaccgaaatgaagaaggcgatcctgcatgtgtactgggaagagttccagaaggaccctgtgggcctgatgagccgggtggcccagcctgccagcaagaagatcgatcagaacaagctgaaacctgagatggacgagaagggcaacctgaccaccgccggctttgcctgctctcagtgtggccagcccctgttcgtgtacaagctggagcaggtgtctgagaagggcaaggcttacaccaactacttcggacggtgcaatgtggccgagcacgaaaagctgatcctgctggcccagctgaagcccgagaaggatagcgacgaagccgtgacatatagcctgggaaagtttgggcagagggccctggatttctacagcattcatgtgaccaaggagtccacccaccccgtgaagcccctggcccagatcgccggaaacagatacgcctccggacctgtgggaaaggccctgagcgacgcatgtatgggcacaatcgcctccttcctgtctaagtaccaggacatcatcatcgaacaccagaaggtggtgaagggcaaccagaagagactggagagcctgcgggagctggccggcaaggaaaacctggaataccctagcgtgaccctgccacctcagcctcacaccaaggagggcgttgatgcctacaacgaagtgatcgcccgggtgcgaatgtgggtgaacctgaacctgtggcagaagctgaagctaagcagagatgatgccaagcctctgctgagactgaagggattcccttcctttcctctggtcgagagacaggccaacgaagtggactggtgggacatggtgtgtaacgtgaagaagctgatcaacgagaaaaaggaggatggcaaggtgttttggcagaatctggctggctacaagagacaggaagccctgagaccatacctgagcagcgaggaagatcggaagaagggaaagaaattcgctcggtaccagctgggcgacctgctgctgcacctggaaaagaagcacggcgaggactggggaaaggtgtacgacgaggcctgggagcggattgacaagaaagtggaaggcctgagcaagcacatcaagctggaagaggaacggagaagcgaggacgcccagagcaaggccgccctgaccgactggctgcgggctaaggccagcttcgtgatcgagggcctgaaggaggccgacaaggacgagttctgcagatgcgagctgaagctgcagaagtggtacggggacctgcggggaaagcccttcgccatcgaagccgagaacagcatcctggacatcagcggcttcagcaagcagtacaactgtgccttcatctggcagaaggacggcgtgaagaagctgaacctgtacctgatcatcaactacttcaagggcggcaagctgcggttcaagaagatcaaacctgaagccttcgaagccaacagattctacaccgtgatcaacaaaaagagcggcgagatcgtgcccatggaggtgaacttcaacttcgacgaccccaacctgatcatcctgcctctggcctttggcaagagacagggcagagaattcatctggaacgacctgctgtccctggaaaccggcagcctgaagctggccaacggaagagtgatcgagaagacactgtacaacagaagaacccggcaggatgagcctgccctgttcgtggccctgaccttcgagcggcgggaggtcctggactcctccaatatcaaaccaatgaacctgatcggcgtggcaagaggcgaaaacatccccgccgtgatcgccctgaccgaccccgagggctgcccactgagccggtttaaggatagcctgggaaacccaacccacatcctgagaatcggcgagagctataaggagaagcagcggaccatccaggccaagaaggaggtggagcagcggagagccggcggctacagccggaagtacgccagcaaagccaagaatctggcagacgatatggtgagaaacaccgctagagatctgctgtactacgccgtgacccaggatgccatgctgatcttcgccaacctgagccggggcttcggccggcagggcaagcggaccttcatggccgagagacagtacacacggatggaggactggctgaccgccaagctggcctacgagggcctgagcaagacctacctgtccaagacactggcccagtacacctccaagacatgcagcaactgtgggtttaccatcaccagcgccgactacgacagggtgctggagaagctgaagaagacagcaacaggctggatgaccacaattaacggcaaggagctgaaggtggagggccagattacctactacaacagatacaagagacagaacgtagtcaaggacctgtccgtcgagctggatagactgagcgaagaatctgtgaacaacgacatctcctcctggacaaagggcagaagcggagaagctctgagcctcctgaagaaaagattctcccatagacccgtgcaggagaagttcgtgtgcctgaactgcggcttcgagacacacgcagccgagcaagccgccctgaacatcgccagatcctggctgttcctgcggagccaggagtacaagaaataccagacaaacaagacaaccggcaacaccgataagagagccttcgtcgagacctggcagtccttttaccggaagaagcttaaggaggtgtggaaacctgccgtgcggtctggcggatctggcggaggctccaccagccccaagaaaaagagaaaagtctaagctgccttctgcggggcttgccttctggccatgcccttcttctctcccttgcacctgtacctcttggtctttgaataaagcctgagtaggaaggctagcaaaaaaaaaaaaaaaaaaaaaaaaaaaaaaaaaaaaaaaaaaaaaaaaaaaaaaaaaaaaaaaaaaaaaaaaaaaaaaaagcccagccggctccccaacctctaccgaggagggcacctctgagtccgccacccccgagagcggccctggcacctccaccgagcccagcgagggcagcgcacccggcagccctgccggcagccccacctccacagaggagggaaccagcaccgagcccagcgaaggcagcgccccaggcaccagcaccgagcctagtgagcaggagattaaacggatcaacaagatcagaagaagacttgtgaaagacagcaacaccaagaaggccggcaagacaggccccatgaaaaccctgctggttagagtgatgacacccgatctgagagagcggctggaaaacctgagaaagaagcctgaaaatatcccccagcccatcagcaatacatctagagccaacctgaataagctgctgaccgattacaccgaaatgaagaaggcgatcctgcatgtgtactgggaagagttccagaaggaccctgtgggcctgatgagccgggtggcccagcctgccagcaagaagatcgatcagaacaagctgaaacctgagatggacgagaagggcaacctgaccaccgccggctttgcctgctctcagtgtggccagcccctgttcgtgtacaagctggagcaggtgtctgagaagggcaaggcttacaccaactacttcggacggtgcaatgtggccgagcacgaaaagctgatcctgctggcccagctgaagcccgagaaggatagcgacgaagccgtgacatatagcctgggaaagtttgggcagagggccctggatttctacagcattcatgtgaccaaggagtccacccaccccgtgaagcccctggcccagatcgccggaaacagatacgcctccggacctgtgggaaaggccctgagcgacgcatgtatgggcacaatcgcctccttcctgtctaagtaccaggacatcatcatcgaacaccagaaggtggtgaagggcaaccagaagagactggagagcctgcgggagctggccggcaaggaaaacctggaataccctagcgtgaccctgccacctcagcctcacaccaaggagggcgttgatgcctacaacgaagtgatcgcccgggtgcgaatgtgggtgaacctgaacctgtggcagaagctgaagctaagcagagatgatgccaagcctctgctgagactgaagggattcccttcctttcctctggtcgagagacaggccaacgaagtggactggtgggacatggtgtgtaacgtgaagaagctgatcaacgagaaaaaggaggatggcaaggtgttttggcagaatctggctggctacaagagacaggaagccctgagaccatacctgagcagcgaggaagatcggaagaagggaaagaaattcgctcggtaccagctgggcgacctgctgctgcacctggaaaagaagcacggcgaggactggggaaaggtgtacgacgaggcctgggagcggattgacaagaaagtggaaggcctgagcaagcacatcaagctggaagaggaacggagaagcgaggacgcccagagcaaggccgccctgaccgactggctgcgggctaaggccagcttcgtgatcgagggcctgaaggaggccgacaaggacgagttctgcagatgcgagctgaagctgcagaagtggtacggggacctgcggggaaagcccttcgccatcgaagccgagaacagcatcctggacatcagcggcttcagcaagcagtacaactgtgccttcatctggcagaaggacggcgtgaagaagctgaacctgtacctgatcatcaactacttcaagggcggcaagctgcggttcaagaagatcaaacctgaagccttcgaagccaacagattctacaccgtgatcaacaaaaagagcggcgagatcgtgcccatggaggtgaacttcaacttcgacgaccccaacctgatcatcctgcctctggcctttggcaagagacagggcagagaattcatctggaacgacctgctgtccctggaaaccggcagcctgaagctggccaacggaagagtgatcgagaagacactgtacaacagaagaacccggcaggatgagcctgccctgttcgtggccctgaccttcgagcggcgggaggtcctggactcctccaatatcaaaccaatgaacctgatcggcgtggcaagaggcgaaaacatccccgccgtgatcgccctgaccgaccccgagggctgcccactgagccggtttaaggatagcctgggaaacccaacccacatcctgagaatcggcgagagctataaggagaagcagcggaccatccaggccaagaaggaggtggagcagcggagagccggcggctacagccggaagtacgccagcaaagccaagaatctggcagacgatatggtgagaaacaccgctagagatctgctgtactacgccgtgacccaggatgccatgctgatcttcgccaacctgagccggggcttcggccggcagggcaagcggaccttcatggccgagagacagtacacacggatggaggactggctgaccgccaagctggcctacgagggcctgagcaagacctacctgtccaagacactggcccagtacacctccaagacatgcagcaactgtgggtttaccatcaccagcgccgactacgacagggtgctggagaagctgaagaagacagcaacaggctggatgaccacaattaacggcaaggagctgaaggtggagggccagattacctactacaacagatacaagagacagaacgtagtcaaggacctgtccgtcgagctggatagactgagcgaagaatctgtgaacaacgacatctcctcctggacaaagggcagaagcggagaagctctgagcctcctgaagaaaagattctcccatagacccgtgcaggagaagttcgtgtgcctgaactgcggcttcgagacacacgcagccgagcaagccgccctgaacatcgccagatcctggctgttcctgcggagccaggagtacaagaaataccagacaaacaagacaaccggcaacaccgataagagagccttcgtcgagacctggcagtccttttaccggaagaagcttaaggaggtgtggaaacctgccgtgcggtctggcggatctggcggaggctccaccagccccaagaaaaagagaaaagtctaagctgccttctgcggggcttgccttctggccatgcccttcttctctcccttgcacctgtacctcttggtctttgaataaagcctgagtaggaaggctagcaaaaaaaaaaaaaaaaaaaaaaaaaaaaaaaaaaaaaaaaaaaaaaaaaaaaaaaaaaaaaaaaaaaaaaaaaaaaaaaa

SEQ ID NO: 10192 - RNA, 8787 nt, synthetic construct
  source 1..8787: mol_type = other RNA
aggaaataagagagaaaagaagagtaagaagaaatataagagccaccatggcccctaagaagaagcgtaaagtgagccggatgaaccacgaccaggagttcgacccccctaaggtgtaccctcccgtccccgccgagaagagaaagcccatccgggtcctgagcctgttcgatggcatcgccaccggtctgctggtgctgaaggacctgggcatccaggtggataggtacattgcctccgaggtgtgcgaggactccatcaccgtgggaatggtgcgtcatcagggcaagatcatgtacgtgggcgacgtgcggagcgtgacacagaagcatatccaggagtggggccctttcgacctggtgatcggcggcagcccttgcaatgacctgagcatcgtgaacccagcccggaagggcctgtacgagggaaccggcagactgttcttcgagttttacagactgctgcacgacgcccggcctaaggaaggcgacgaccggcccttcttttggctgttcgagaatgtggtggccatgggagtcagcgacaagcgggatattagccggttcctggagagcaaccccgtgatgatcgatgccaaggaagtgagcgccgcccaccgggccagatacttctggggcaatctgcctggcatgaacagacccctggccagcaccgtgaacgacaagctggagctgcaggagtgcctggagcacggccggatcgccaagttcagcaaggtgagaaccatcaccacccgaagcaacagcatcaaacaaggcaaggaccagcactttcctgtgttcatgaacgagaaggaggacatcctgtggtgtaccgagatggagagagtgttcgggttcccagtccactacacagatgtcagcaacatgtctagactggccagacagagactgctgggaagaagctggtccgtccctgtgatcagacacctgttcgcccctctgaaggagtacttcgcctgcgtgagcagcggcaacagcaacgccaacagccggggccccagcttctctagcggcctggtgccactgtccctgagagggagccacatgggccccatggagatctacaaaaccgtgagcgcctggaagcggcagcctgtgcgcgtgctgagcctgtttcggaatatcgataaagtcctgaaaagcctgggattcctggagagcggctctggctccggcggtggcaccctgaagtacgtggaggatgtgacaaacgtggtcagacgggatgtggagaagtggggccccttcgatctggtgtacggcagcacccaacccctgggcagctcttgtgaccggtgccctggctggtacatgtttcagttccaccggatcctgcagtacgccctgccgagacaggagtcccagcggccattcttttggattttcatggacaacttgctgctgaccgaggatgaccaggaaactaccactcggttcctgcagaccgaagccgtgaccctgcaggacgtgagaggccgggactaccagaacgccatgcgggtgtggtccaacatccctggactgaaaagcaagcacgcacctctgacccctaaagaagaggagtacctgcaggcccaggtgcggagcagaagcaagctggacgcccctaaggtggatctgctggtgaagaattgcctcctgcccctgagagagtacttcaagtatttcagccagaatagtctgcccctgggaggcagcggcggcggcagccagggcctggtgaccttcagggacgtggccctggacttcagccaggaggagtgggagtggctggaccccagccagaaggacctgtacagggacgtgatgctggagaactacaggaacctggtgtggctgggcctgagcatcagcaagcccaacatgatcagcctgctggagcagggcaaggagccctggatggtggagaaggagatgagcgacggccagtgcgccgactgggagagctggggcggcccaagcagcggcgcccctcctcccagcggcggcaggcggcccaagcagcggcgcccctcctcccagcggcggcagcccagccggctccccaacctctaccgaggagggcacctctgagtccgccacccccgagagcggccctggcacctccaccgagcccagcgagggcagcgcacccggcagccctgccggcagccccacctccacagaggagggaaccagcaccgagcccagcgaaggcagcgccccaggcaccagcaccgagcctagtgagcaggagattaaacggatcaacaagatcagaagaagacttgtgaaagacagcaacaccaagaaggccggcaagacaggccccatgaaaaccctgctggttagagtgatgacacccgatctgagagagcggctggaaaacctgagaaagaagcctgaaaatatcccccagcccatcagcaatacatctagagccaacctgaataagctgctgaccgattacaccgaaatgaagaaggcgatcctgcatgtgtactgggaagagttccagaaggaccctgtgggcctgatgagccgggtggcccagcctgccagcaagaagatcgatcagaacaagctgaaacctgagatggacgagaagggcaacctgaccaccgccggctttgcctgctctcagtgtggccagcccctgttcgtgtacaagctggagcaggtgtctgagaagggcaaggcttacaccaactacttcggacggtgcaatgtggccgagcacgaaaagctgatcctgctggcccagctgaagcccgagaaggatagcgacgaagccgtgacatatagcctgggaaagtttgggcagagggccctggatttctacagcattcatgtgaccaaggagtccacccaccccgtgaagcccctggcccagatcgccggaaacagatacgcctccggacctgtgggaaaggccctgagcgacgcatgtatgggcacaatcgcctccttcctgtctaagtaccaggacatcatcatcgaacaccagaaggtggtgaagggcaaccagaagagactggagagcctgcgggagctggccggcaaggaaaacctggaataccctagcgtgaccctgccacctcagcctcacaccaaggagggcgttgatgcctacaacgaagtgatcgcccgggtgcgaatgtgggtgaacctgaacctgtggcagaagctgaagctaagcagagatgatgccaagcctctgctgagactgaagggattcccttcctttcctctggtcgagagacaggccaacgaagtggactggtgggacatggtgtgtaacgtgaagaagctgatcaacgagaaaaaggaggatggcaaggtgttttggcagaatctggctggctacaagagacaggaagccctgagaccatacctgagcagcgaggaagatcggaagaagggaaagaaattcgctcggtaccagctgggcgacctgctgctgcacctggaaaagaagcacggcgaggactggggaaaggtgtacgacgaggcctgggagcggattgacaagaaagtggaaggcctgagcaagcacatcaagctggaagaggaacggagaagcgaggacgcccagagcaaggccgccctgaccgactggctgcgggctaaggccagcttcgtgatcgagggcctgaaggaggccgacaaggacgagttctgcagatgcgagctgaagctgcagaagtggtacggggacctgcggggaaagcccttcgccatcgaagccgagaacagcatcctggacatcagcggcttcagcaagcagtacaactgtgccttcatctggcagaaggacggcgtgaagaagctgaacctgtacctgatcatcaactacttcaagggcggcaagctgcggttcaagaagatcaaacctgaagccttcgaagccaacagattctacaccgtgatcaacaaaaagagcggcgagatcgtgcccatggaggtgaacttcaacttcgacgaccccaacctgatcatcctgcctctggcctttggcaagagacagggcagagaattcatctggaacgacctgctgtccctggaaaccggcagcctgaagctggccaacggaagagtgatcgagaagacactgtacaacagaagaacccggcaggatgagcctgccctgttcgtggccctgaccttcgagcggcgggaggtcctggactcctccaatatcaaaccaatgaacctgatcggcgtggcaagaggcgaaaacatccccgccgtgatcgccctgaccgaccccgagggctgcccactgagccggtttaaggatagcctgggaaacccaacccacatcctgagaatcggcgagagctataaggagaagcagcggaccatccaggccaagaaggaggtggagcagcggagagccggcggctacagccggaagtacgccagcaaagccaagaatctggcagacgatatggtgagaaacaccgctagagatctgctgtactacgccgtgacccaggatgccatgctgatcttcgccaacctgagccggggcttcggccggcagggcaagcggaccttcatggccgagagacagtacacacggatggaggactggctgaccgccaagctggcctacgagggcctgagcaagacctacctgtccaagacactggcccagtacacctccaagacatgcagcaactgtgggtttaccatcaccagcgccgactacgacagggtgctggagaagctgaagaagacagcaacaggctggatgaccacaattaacggcaaggagctgaaggtggagggccagattacctactacaacagatacaagagacagaacgtagtcaaggacctgtccgtcgagctggatagactgagcgaagaatctgtgaacaacgacatctcctcctggacaaagggcagaagcggagaagctctgagcctcctgaagaaaagattctcccatagacccgtgcaggagaagttcgtgtgcctgaactgcggcttcgagacacacgcagccgagcaagccgccctgaacatcgccagatcctggctgttcctgcggagccaggagtacaagaaataccagacaaacaagacaaccggcaacaccgataagagagccttcgtcgagacctggcagtccttttaccggaagaagcttaaggaggtgtggaaacctgccgtgcggtctggcggatctggcggaggctccaccagccccaagaaaaagagaaaagtctaagctgccttctgcggggcttgccttctggccatgcccttcttctctcccttgcacctgtacctcttggtctttgaataaagcctgagtaggaaggctagcaaaaaaaaaaaaaaaaaaaaaaaaaaaaaaaaaaaaaaaaaaaaaaaaaaaaaaaaaaaaaaaaaaaaaaaaaaaaaaaagcccagccggctccccaacctctaccgaggagggcacctctgagtccgccacccccgagagcggccctggcacctccaccgagcccagcgagggcagcgcacccggcagccctgccggcagccccacctccacagaggagggaaccagcaccgagcccagcgaaggcagcgccccaggcaccagcaccgagcctagtgagcaggagattaaacggatcaacaagatcagaagaagacttgtgaaagacagcaacaccaagaaggccggcaagacaggccccatgaaaaccctgctggttagagtgatgacacccgatctgagagagcggctggaaaacctgagaaagaagcctgaaaatatcccccagcccatcagcaatacatctagagccaacctgaataagctgctgaccgattacaccgaaatgaagaaggcgatcctgcatgtgtactgggaagagttccagaaggaccctgtgggcctgatgagccgggtggcccagcctgccagcaagaagatcgatcagaacaagctgaaacctgagatggacgagaagggcaacctgaccaccgccggctttgcctgctctcagtgtggccagcccctgttcgtgtacaagctggagcaggtgtctgagaagggcaaggcttacaccaactacttcggacggtgcaatgtggccgagcacgaaaagctgatcctgctggcccagctgaagcccgagaaggatagcgacgaagccgtgacatatagcctgggaaagtttgggcagagggccctggatttctacagcattcatgtgaccaaggagtccacccaccccgtgaagcccctggcccagatcgccggaaacagatacgcctccggacctgtgggaaaggccctgagcgacgcatgtatgggcacaatcgcctccttcctgtctaagtaccaggacatcatcatcgaacaccagaaggtggtgaagggcaaccagaagagactggagagcctgcgggagctggccggcaaggaaaacctggaataccctagcgtgaccctgccacctcagcctcacaccaaggagggcgttgatgcctacaacgaagtgatcgcccgggtgcgaatgtgggtgaacctgaacctgtggcagaagctgaagctaagcagagatgatgccaagcctctgctgagactgaagggattcccttcctttcctctggtcgagagacaggccaacgaagtggactggtgggacatggtgtgtaacgtgaagaagctgatcaacgagaaaaaggaggatggcaaggtgttttggcagaatctggctggctacaagagacaggaagccctgagaccatacctgagcagcgaggaagatcggaagaagggaaagaaattcgctcggtaccagctgggcgacctgctgctgcacctggaaaagaagcacggcgaggactggggaaaggtgtacgacgaggcctgggagcggattgacaagaaagtggaaggcctgagcaagcacatcaagctggaagaggaacggagaagcgaggacgcccagagcaaggccgccctgaccgactggctgcgggctaaggccagcttcgtgatcgagggcctgaaggaggccgacaaggacgagttctgcagatgcgagctgaagctgcagaagtggtacggggacctgcggggaaagcccttcgccatcgaagccgagaacagcatcctggacatcagcggcttcagcaagcagtacaactgtgccttcatctggcagaaggacggcgtgaagaagctgaacctgtacctgatcatcaactacttcaagggcggcaagctgcggttcaagaagatcaaacctgaagccttcgaagccaacagattctacaccgtgatcaacaaaaagagcggcgagatcgtgcccatggaggtgaacttcaacttcgacgaccccaacctgatcatcctgcctctggcctttggcaagagacagggcagagaattcatctggaacgacctgctgtccctggaaaccggcagcctgaagctggccaacggaagagtgatcgagaagacactgtacaacagaagaacccggcaggatgagcctgccctgttcgtggccctgaccttcgagcggcgggaggtcctggactcctccaatatcaaaccaatgaacctgatcggcgtggcaagaggcgaaaacatccccgccgtgatcgccctgaccgaccccgagggctgcccactgagccggtttaaggatagcctgggaaacccaacccacatcctgagaatcggcgagagctataaggagaagcagcggaccatccaggccaagaaggaggtggagcagcggagagccggcggctacagccggaagtacgccagcaaagccaagaatctggcagacgatatggtgagaaacaccgctagagatctgctgtactacgccgtgacccaggatgccatgctgatcttcgccaacctgagccggggcttcggccggcagggcaagcggaccttcatggccgagagacagtacacacggatggaggactggctgaccgccaagctggcctacgagggcctgagcaagacctacctgtccaagacactggcccagtacacctccaagacatgcagcaactgtgggtttaccatcaccagcgccgactacgacagggtgctggagaagctgaagaagacagcaacaggctggatgaccacaattaacggcaaggagctgaaggtggagggccagattacctactacaacagatacaagagacagaacgtagtcaaggacctgtccgtcgagctggatagactgagcgaagaatctgtgaacaacgacatctcctcctggacaaagggcagaagcggagaagctctgagcctcctgaagaaaagattctcccatagacccgtgcaggagaagttcgtgtgcctgaactgcggcttcgagacacacgcagccgagcaagccgccctgaacatcgccagatcctggctgttcctgcggagccaggagtacaagaaataccagacaaacaagacaaccggcaacaccgataagagagccttcgtcgagacctggcagtccttttaccggaagaagcttaaggaggtgtggaaacctgccgtgcggtctggcggatctggcggaggctccaccagccccaagaaaaagagaaaagtctaagctgccttctgcggggcttgccttctggccatgcccttcttctctcccttgcacctgtacctcttggtctttgaataaagcctgagtaggaaggctagcaaaaaaaaaaaaaaaaaaaaaaaaaaaaaaaaaaaaaaaaaaaaaaaaaaaaaaaaaaaaaaaaaaaaaaaaaaaaaaaa

SEQ ID NO: 10193 - RNA, 8787 nt, synthetic construct
  source 1..8787: mol_type = other RNA
aggaaataagagagaaaagaagagtaagaagaaatataagagccaccatggcccctaagaagaagcgtaaagtgagccggatgaaccacgaccaggagttcgacccccctaaggtgtaccctcccgtccccgccgagaagagaaagcccatccgggtcctgagcctgttcgatggcatcgccaccggtctgctggtgctgaaggacctgggcatccaggtggataggtacattgcctccgaggtgtgcgaggactccatcaccgtgggaatggtgcgtcatcagggcaagatcatgtacgtgggcgacgtgcggagcgtgacacagaagcatatccaggagtggggccctttcgacctggtgatcggcggcagcccttgcaatgacctgagcatcgtgaacccagcccggaagggcctgtacgagggaaccggcagactgttcttcgagttttacagactgctgcacgacgcccggcctaaggaaggcgacgaccggcccttcttttggctgttcgagaatgtggtggccatgggagtcagcgacaagcgggatattagccggttcctggagagcaaccccgtgatgatcgatgccaaggaagtgagcgccgcccaccgggccagatacttctggggcaatctgcctggcatgaacagacccctggccagcaccgtgaacgacaagctggagctgcaggagtgcctggagcacggccggatcgccaagttcagcaaggtgagaaccatcaccacccgaagcaacagcatcaaacaaggcaaggaccagcactttcctgtgttcatgaacgagaaggaggacatcctgtggtgtaccgagatggagagagtgttcgggttcccagtccactacacagatgtcagcaacatgtctagactggccagacagagactgctgggaagaagctggtccgtccctgtgatcagacacctgttcgcccctctgaaggagtacttcgcctgcgtgagcagcggcaacagcaacgccaacagccggggccccagcttctctagcggcctggtgccactgtccctgagagggagccacatgggccccatggagatctacaaaaccgtgagcgcctggaagcggcagcctgtgcgcgtgctgagcctgtttcggaatatcgataaagtcctgaaaagcctgggattcctggagagcggctctggctccggcggtggcaccctgaagtacgtggaggatgtgacaaacgtggtcagacgggatgtggagaagtggggccccttcgatctggtgtacggcagcacccaacccctgggcagctcttgtgaccggtgccctggctggtacatgtttcagttccaccggatcctgcagtacgccctgccgagacaggagtcccagcggccattcttttggattttcatggacaacttgctgctgaccgaggatgaccaggaaactaccactcggttcctgcagaccgaagccgtgaccctgcaggacgtgagaggccgggactaccagaacgccatgcgggtgtggtccaacatccctggactgaaaagcaagcacgcacctctgacccctaaagaagaggagtacctgcaggcccaggtgcggagcagaagcaagctggacgcccctaaggtggatctgctggtgaagaattgcctcctgcccctgagagagtacttcaagtatttcagccagaatagtctgcccctgggaggcagcggcggcggcatcggcagcgacctgttcagggacgtggccgtggtgttcagcagggaggagtgggagcagctgacccccgcccagagggacctgtacagggacgtgatgctggagatctacagcatcctgctgagcctgggccccgacctggccgtgagcaagcccgacgtgatcagcttcctggagcagggcaaggagccctggagggtggaggaggccgtgaccggcggcctgtgccccgtgctggagagcggcggcccaagcagcggcgcccctcctcccagcggcggcaggcggcccaagcagcggcgcccctcctcccagcggcggcagcccagccggctccccaacctctaccgaggagggcacctctgagtccgccacccccgagagcggccctggcacctccaccgagcccagcgagggcagcgcacccggcagccctgccggcagccccacctccacagaggagggaaccagcaccgagcccagcgaaggcagcgccccaggcaccagcaccgagcctagtgagcaggagattaaacggatcaacaagatcagaagaagacttgtgaaagacagcaacaccaagaaggccggcaagacaggccccatgaaaaccctgctggttagagtgatgacacccgatctgagagagcggctggaaaacctgagaaagaagcctgaaaatatcccccagcccatcagcaatacatctagagccaacctgaataagctgctgaccgattacaccgaaatgaagaaggcgatcctgcatgtgtactgggaagagttccagaaggaccctgtgggcctgatgagccgggtggcccagcctgccagcaagaagatcgatcagaacaagctgaaacctgagatggacgagaagggcaacctgaccaccgccggctttgcctgctctcagtgtggccagcccctgttcgtgtacaagctggagcaggtgtctgagaagggcaaggcttacaccaactacttcggacggtgcaatgtggccgagcacgaaaagctgatcctgctggcccagctgaagcccgagaaggatagcgacgaagccgtgacatatagcctgggaaagtttgggcagagggccctggatttctacagcattcatgtgaccaaggagtccacccaccccgtgaagcccctggcccagatcgccggaaacagatacgcctccggacctgtgggaaaggccctgagcgacgcatgtatgggcacaatcgcctccttcctgtctaagtaccaggacatcatcatcgaacaccagaaggtggtgaagggcaaccagaagagactggagagcctgcgggagctggccggcaaggaaaacctggaataccctagcgtgaccctgccacctcagcctcacaccaaggagggcgttgatgcctacaacgaagtgatcgcccgggtgcgaatgtgggtgaacctgaacctgtggcagaagctgaagctaagcagagatgatgccaagcctctgctgagactgaagggattcccttcctttcctctggtcgagagacaggccaacgaagtggactggtgggacatggtgtgtaacgtgaagaagctgatcaacgagaaaaaggaggatggcaaggtgttttggcagaatctggctggctacaagagacaggaagccctgagaccatacctgagcagcgaggaagatcggaagaagggaaagaaattcgctcggtaccagctgggcgacctgctgctgcacctggaaaagaagcacggcgaggactggggaaaggtgtacgacgaggcctgggagcggattgacaagaaagtggaaggcctgagcaagcacatcaagctggaagaggaacggagaagcgaggacgcccagagcaaggccgccctgaccgactggctgcgggctaaggccagcttcgtgatcgagggcctgaaggaggccgacaaggacgagttctgcagatgcgagctgaagctgcagaagtggtacggggacctgcggggaaagcccttcgccatcgaagccgagaacagcatcctggacatcagcggcttcagcaagcagtacaactgtgccttcatctggcagaaggacggcgtgaagaagctgaacctgtacctgatcatcaactacttcaagggcggcaagctgcggttcaagaagatcaaacctgaagccttcgaagccaacagattctacaccgtgatcaacaaaaagagcggcgagatcgtgcccatggaggtgaacttcaacttcgacgaccccaacctgatcatcctgcctctggcctttggcaagagacagggcagagaattcatctggaacgacctgctgtccctggaaaccggcagcctgaagctggccaacggaagagtgatcgagaagacactgtacaacagaagaacccggcaggatgagcctgccctgttcgtggccctgaccttcgagcggcgggaggtcctggactcctccaatatcaaaccaatgaacctgatcggcgtggcaagaggcgaaaacatccccgccgtgatcgccctgaccgaccccgagggctgcccactgagccggtttaaggatagcctgggaaacccaacccacatcctgagaatcggcgagagctataaggagaagcagcggaccatccaggccaagaaggaggtggagcagcggagagccggcggctacagccggaagtacgccagcaaagccaagaatctggcagacgatatggtgagaaacaccgctagagatctgctgtactacgccgtgacccaggatgccatgctgatcttcgccaacctgagccggggcttcggccggcagggcaagcggaccttcatggccgagagacagtacacacggatggaggactggctgaccgccaagctggcctacgagggcctgagcaagacctacctgtccaagacactggcccagtacacctccaagacatgcagcaactgtgggtttaccatcaccagcgccgactacgacagggtgctggagaagctgaagaagacagcaacaggctggatgaccacaattaacggcaaggagctgaaggtggagggccagattacctactacaacagatacaagagacagaacgtagtcaaggacctgtccgtcgagctggatagactgagcgaagaatctgtgaacaacgacatctcctcctggacaaagggcagaagcggagaagctctgagcctcctgaagaaaagattctcccatagacccgtgcaggagaagttcgtgtgcctgaactgcggcttcgagacacacgcagccgagcaagccgccctgaacatcgccagatcctggctgttcctgcggagccaggagtacaagaaataccagacaaacaagacaaccggcaacaccgataagagagccttcgtcgagacctggcagtccttttaccggaagaagcttaaggaggtgtggaaacctgccgtgcggtctggcggatctggcggaggctccaccagccccaagaaaaagagaaaagtctaagctgccttctgcggggcttgccttctggccatgcccttcttctctcccttgcacctgtacctcttggtctttgaataaagcctgagtaggaaggctagcaaaaaaaaaaaaaaaaaaaaaaaaaaaaaaaaaaaaaaaaaaaaaaaaaaaaaaaaaaaaaaaaaaaaaaaaaaaaaaaagcccagccggctccccaacctctaccgaggagggcacctctgagtccgccacccccgagagcggccctggcacctccaccgagcccagcgagggcagcgcacccggcagccctgccggcagccccacctccacagaggagggaaccagcaccgagcccagcgaaggcagcgccccaggcaccagcaccgagcctagtgagcaggagattaaacggatcaacaagatcagaagaagacttgtgaaagacagcaacaccaagaaggccggcaagacaggccccatgaaaaccctgctggttagagtgatgacacccgatctgagagagcggctggaaaacctgagaaagaagcctgaaaatatcccccagcccatcagcaatacatctagagccaacctgaataagctgctgaccgattacaccgaaatgaagaaggcgatcctgcatgtgtactgggaagagttccagaaggaccctgtgggcctgatgagccgggtggcccagcctgccagcaagaagatcgatcagaacaagctgaaacctgagatggacgagaagggcaacctgaccaccgccggctttgcctgctctcagtgtggccagcccctgttcgtgtacaagctggagcaggtgtctgagaagggcaaggcttacaccaactacttcggacggtgcaatgtggccgagcacgaaaagctgatcctgctggcccagctgaagcccgagaaggatagcgacgaagccgtgacatatagcctgggaaagtttgggcagagggccctggatttctacagcattcatgtgaccaaggagtccacccaccccgtgaagcccctggcccagatcgccggaaacagatacgcctccggacctgtgggaaaggccctgagcgacgcatgtatgggcacaatcgcctccttcctgtctaagtaccaggacatcatcatcgaacaccagaaggtggtgaagggcaaccagaagagactggagagcctgcgggagctggccggcaaggaaaacctggaataccctagcgtgaccctgccacctcagcctcacaccaaggagggcgttgatgcctacaacgaagtgatcgcccgggtgcgaatgtgggtgaacctgaacctgtggcagaagctgaagctaagcagagatgatgccaagcctctgctgagactgaagggattcccttcctttcctctggtcgagagacaggccaacgaagtggactggtgggacatggtgtgtaacgtgaagaagctgatcaacgagaaaaaggaggatggcaaggtgttttggcagaatctggctggctacaagagacaggaagccctgagaccatacctgagcagcgaggaagatcggaagaagggaaagaaattcgctcggtaccagctgggcgacctgctgctgcacctggaaaagaagcacggcgaggactggggaaaggtgtacgacgaggcctgggagcggattgacaagaaagtggaaggcctgagcaagcacatcaagctggaagaggaacggagaagcgaggacgcccagagcaaggccgccctgaccgactggctgcgggctaaggccagcttcgtgatcgagggcctgaaggaggccgacaaggacgagttctgcagatgcgagctgaagctgcagaagtggtacggggacctgcggggaaagcccttcgccatcgaagccgagaacagcatcctggacatcagcggcttcagcaagcagtacaactgtgccttcatctggcagaaggacggcgtgaagaagctgaacctgtacctgatcatcaactacttcaagggcggcaagctgcggttcaagaagatcaaacctgaagccttcgaagccaacagattctacaccgtgatcaacaaaaagagcggcgagatcgtgcccatggaggtgaacttcaacttcgacgaccccaacctgatcatcctgcctctggcctttggcaagagacagggcagagaattcatctggaacgacctgctgtccctggaaaccggcagcctgaagctggccaacggaagagtgatcgagaagacactgtacaacagaagaacccggcaggatgagcctgccctgttcgtggccctgaccttcgagcggcgggaggtcctggactcctccaatatcaaaccaatgaacctgatcggcgtggcaagaggcgaaaacatccccgccgtgatcgccctgaccgaccccgagggctgcccactgagccggtttaaggatagcctgggaaacccaacccacatcctgagaatcggcgagagctataaggagaagcagcggaccatccaggccaagaaggaggtggagcagcggagagccggcggctacagccggaagtacgccagcaaagccaagaatctggcagacgatatggtgagaaacaccgctagagatctgctgtactacgccgtgacccaggatgccatgctgatcttcgccaacctgagccggggcttcggccggcagggcaagcggaccttcatggccgagagacagtacacacggatggaggactggctgaccgccaagctggcctacgagggcctgagcaagacctacctgtccaagacactggcccagtacacctccaagacatgcagcaactgtgggtttaccatcaccagcgccgactacgacagggtgctggagaagctgaagaagacagcaacaggctggatgaccacaattaacggcaaggagctgaaggtggagggccagattacctactacaacagatacaagagacagaacgtagtcaaggacctgtccgtcgagctggatagactgagcgaagaatctgtgaacaacgacatctcctcctggacaaagggcagaagcggagaagctctgagcctcctgaagaaaagattctcccatagacccgtgcaggagaagttcgtgtgcctgaactgcggcttcgagacacacgcagccgagcaagccgccctgaacatcgccagatcctggctgttcctgcggagccaggagtacaagaaataccagacaaacaagacaaccggcaacaccgataagagagccttcgtcgagacctggcagtccttttaccggaagaagcttaaggaggtgtggaaacctgccgtgcggtctggcggatctggcggaggctccaccagccccaagaaaaagagaaaagtctaagctgccttctgcggggcttgccttctggccatgcccttcttctctcccttgcacctgtacctcttggtctttgaataaagcctgagtaggaaggctagcaaaaaaaaaaaaaaaaaaaaaaaaaaaaaaaaaaaaaaaaaaaaaaaaaaaaaaaaaaaaaaaaaaaaaaaaaaaaaaaa

SEQ ID NO: 10194 - RNA, 8787 nt, synthetic construct
  source 1..8787: mol_type = other RNA
aggaaataagagagaaaagaagagtaagaagaaatataagagccaccatggcccctaagaagaagcgtaaagtgagccggatgaaccacgaccaggagttcgacccccctaaggtgtaccctcccgtccccgccgagaagagaaagcccatccgggtcctgagcctgttcgatggcatcgccaccggtctgctggtgctgaaggacctgggcatccaggtggataggtacattgcctccgaggtgtgcgaggactccatcaccgtgggaatggtgcgtcatcagggcaagatcatgtacgtgggcgacgtgcggagcgtgacacagaagcatatccaggagtggggccctttcgacctggtgatcggcggcagcccttgcaatgacctgagcatcgtgaacccagcccggaagggcctgtacgagggaaccggcagactgttcttcgagttttacagactgctgcacgacgcccggcctaaggaaggcgacgaccggcccttcttttggctgttcgagaatgtggtggccatgggagtcagcgacaagcgggatattagccggttcctggagagcaaccccgtgatgatcgatgccaaggaagtgagcgccgcccaccgggccagatacttctggggcaatctgcctggcatgaacagacccctggccagcaccgtgaacgacaagctggagctgcaggagtgcctggagcacggccggatcgccaagttcagcaaggtgagaaccatcaccacccgaagcaacagcatcaaacaaggcaaggaccagcactttcctgtgttcatgaacgagaaggaggacatcctgtggtgtaccgagatggagagagtgttcgggttcccagtccactacacagatgtcagcaacatgtctagactggccagacagagactgctgggaagaagctggtccgtccctgtgatcagacacctgttcgcccctctgaaggagtacttcgcctgcgtgagcagcggcaacagcaacgccaacagccggggccccagcttctctagcggcctggtgccactgtccctgagagggagccacatgggccccatggagatctacaaaaccgtgagcgcctggaagcggcagcctgtgcgcgtgctgagcctgtttcggaatatcgataaagtcctgaaaagcctgggattcctggagagcggctctggctccggcggtggcaccctgaagtacgtggaggatgtgacaaacgtggtcagacgggatgtggagaagtggggccccttcgatctggtgtacggcagcacccaacccctgggcagctcttgtgaccggtgccctggctggtacatgtttcagttccaccggatcctgcagtacgccctgccgagacaggagtcccagcggccattcttttggattttcatggacaacttgctgctgaccgaggatgaccaggaaactaccactcggttcctgcagaccgaagccgtgaccctgcaggacgtgagaggccgggactaccagaacgccatgcgggtgtggtccaacatccctggactgaaaagcaagcacgcacctctgacccctaaagaagaggagtacctgcaggcccaggtgcggagcagaagcaagctggacgcccctaaggtggatctgctggtgaagaattgcctcctgcccctgagagagtacttcaagtatttcagccagaatagtctgcccctgggaggcagcggcggcggcatgatcaagagccaggagagcctgaccctggaggacgtggccgtggagttcacctgggaggagtggcagctgctgggccccgcccagaaggacctgtacagggacgtgatgctggagaactacagcaacctggtgagcgtgggctaccaggccagcaagcccgacgccctgttcaagctggagcagggcgagccctggaccgtggagaacgacagccacatctgccccgagatcaagaaggtgggcggcccaagcagcggcgcccctcctcccagcggcggcaggcggcccaagcagcggcgcccctcctcccagcggcggcagcccagccggctccccaacctctaccgaggagggcacctctgagtccgccacccccgagagcggccctggcacctccaccgagcccagcgagggcagcgcacccggcagccctgccggcagccccacctccacagaggagggaaccagcaccgagcccagcgaaggcagcgccccaggcaccagcaccgagcctagtgagcaggagattaaacggatcaacaagatcagaagaagacttgtgaaagacagcaacaccaagaaggccggcaagacaggccccatgaaaaccctgctggttagagtgatgacacccgatctgagagagcggctggaaaacctgagaaagaagcctgaaaatatcccccagcccatcagcaatacatctagagccaacctgaataagctgctgaccgattacaccgaaatgaagaaggcgatcctgcatgtgtactgggaagagttccagaaggaccctgtgggcctgatgagccgggtggcccagcctgccagcaagaagatcgatcagaacaagctgaaacctgagatggacgagaagggcaacctgaccaccgccggctttgcctgctctcagtgtggccagcccctgttcgtgtacaagctggagcaggtgtctgagaagggcaaggcttacaccaactacttcggacggtgcaatgtggccgagcacgaaaagctgatcctgctggcccagctgaagcccgagaaggatagcgacgaagccgtgacatatagcctgggaaagtttgggcagagggccctggatttctacagcattcatgtgaccaaggagtccacccaccccgtgaagcccctggcccagatcgccggaaacagatacgcctccggacctgtgggaaaggccctgagcgacgcatgtatgggcacaatcgcctccttcctgtctaagtaccaggacatcatcatcgaacaccagaaggtggtgaagggcaaccagaagagactggagagcctgcgggagctggccggcaaggaaaacctggaataccctagcgtgaccctgccacctcagcctcacaccaaggagggcgttgatgcctacaacgaagtgatcgcccgggtgcgaatgtgggtgaacctgaacctgtggcagaagctgaagctaagcagagatgatgccaagcctctgctgagactgaagggattcccttcctttcctctggtcgagagacaggccaacgaagtggactggtgggacatggtgtgtaacgtgaagaagctgatcaacgagaaaaaggaggatggcaaggtgttttggcagaatctggctggctacaagagacaggaagccctgagaccatacctgagcagcgaggaagatcggaagaagggaaagaaattcgctcggtaccagctgggcgacctgctgctgcacctggaaaagaagcacggcgaggactggggaaaggtgtacgacgaggcctgggagcggattgacaagaaagtggaaggcctgagcaagcacatcaagctggaagaggaacggagaagcgaggacgcccagagcaaggccgccctgaccgactggctgcgggctaaggccagcttcgtgatcgagggcctgaaggaggccgacaaggacgagttctgcagatgcgagctgaagctgcagaagtggtacggggacctgcggggaaagcccttcgccatcgaagccgagaacagcatcctggacatcagcggcttcagcaagcagtacaactgtgccttcatctggcagaaggacggcgtgaagaagctgaacctgtacctgatcatcaactacttcaagggcggcaagctgcggttcaagaagatcaaacctgaagccttcgaagccaacagattctacaccgtgatcaacaaaaagagcggcgagatcgtgcccatggaggtgaacttcaacttcgacgaccccaacctgatcatcctgcctctggcctttggcaagagacagggcagagaattcatctggaacgacctgctgtccctggaaaccggcagcctgaagctggccaacggaagagtgatcgagaagacactgtacaacagaagaacccggcaggatgagcctgccctgttcgtggccctgaccttcgagcggcgggaggtcctggactcctccaatatcaaaccaatgaacctgatcggcgtggcaagaggcgaaaacatccccgccgtgatcgccctgaccgaccccgagggctgcccactgagccggtttaaggatagcctgggaaacccaacccacatcctgagaatcggcgagagctataaggagaagcagcggaccatccaggccaagaaggaggtggagcagcggagagccggcggctacagccggaagtacgccagcaaagccaagaatctggcagacgatatggtgagaaacaccgctagagatctgctgtactacgccgtgacccaggatgccatgctgatcttcgccaacctgagccggggcttcggccggcagggcaagcggaccttcatggccgagagacagtacacacggatggaggactggctgaccgccaagctggcctacgagggcctgagcaagacctacctgtccaagacactggcccagtacacctccaagacatgcagcaactgtgggtttaccatcaccagcgccgactacgacagggtgctggagaagctgaagaagacagcaacaggctggatgaccacaattaacggcaaggagctgaaggtggagggccagattacctactacaacagatacaagagacagaacgtagtcaaggacctgtccgtcgagctggatagactgagcgaagaatctgtgaacaacgacatctcctcctggacaaagggcagaagcggagaagctctgagcctcctgaagaaaagattctcccatagacccgtgcaggagaagttcgtgtgcctgaactgcggcttcgagacacacgcagccgagcaagccgccctgaacatcgccagatcctggctgttcctgcggagccaggagtacaagaaataccagacaaacaagacaaccggcaacaccgataagagagccttcgtcgagacctggcagtccttttaccggaagaagcttaaggaggtgtggaaacctgccgtgcggtctggcggatctggcggaggctccaccagccccaagaaaaagagaaaagtctaagctgccttctgcggggcttgccttctggccatgcccttcttctctcccttgcacctgtacctcttggtctttgaataaagcctgagtaggaaggctagcaaaaaaaaaaaaaaaaaaaaaaaaaaaaaaaaaaaaaaaaaaaaaaaaaaaaaaaaaaaaaaaaaaaaaaaaaaaaaaaagcccagccggctccccaacctctaccgaggagggcacctctgagtccgccacccccgagagcggccctggcacctccaccgagcccagcgagggcagcgcacccggcagccctgccggcagccccacctccacagaggagggaaccagcaccgagcccagcgaaggcagcgccccaggcaccagcaccgagcctagtgagcaggagattaaacggatcaacaagatcagaagaagacttgtgaaagacagcaacaccaagaaggccggcaagacaggccccatgaaaaccctgctggttagagtgatgacacccgatctgagagagcggctggaaaacctgagaaagaagcctgaaaatatcccccagcccatcagcaatacatctagagccaacctgaataagctgctgaccgattacaccgaaatgaagaaggcgatcctgcatgtgtactgggaagagttccagaaggaccctgtgggcctgatgagccgggtggcccagcctgccagcaagaagatcgatcagaacaagctgaaacctgagatggacgagaagggcaacctgaccaccgccggctttgcctgctctcagtgtggccagcccctgttcgtgtacaagctggagcaggtgtctgagaagggcaaggcttacaccaactacttcggacggtgcaatgtggccgagcacgaaaagctgatcctgctggcccagctgaagcccgagaaggatagcgacgaagccgtgacatatagcctgggaaagtttgggcagagggccctggatttctacagcattcatgtgaccaaggagtccacccaccccgtgaagcccctggcccagatcgccggaaacagatacgcctccggacctgtgggaaaggccctgagcgacgcatgtatgggcacaatcgcctccttcctgtctaagtaccaggacatcatcatcgaacaccagaaggtggtgaagggcaaccagaagagactggagagcctgcgggagctggccggcaaggaaaacctggaataccctagcgtgaccctgccacctcagcctcacaccaaggagggcgttgatgcctacaacgaagtgatcgcccgggtgcgaatgtgggtgaacctgaacctgtggcagaagctgaagctaagcagagatgatgccaagcctctgctgagactgaagggattcccttcctttcctctggtcgagagacaggccaacgaagtggactggtgggacatggtgtgtaacgtgaagaagctgatcaacgagaaaaaggaggatggcaaggtgttttggcagaatctggctggctacaagagacaggaagccctgagaccatacctgagcagcgaggaagatcggaagaagggaaagaaattcgctcggtaccagctgggcgacctgctgctgcacctggaaaagaagcacggcgaggactggggaaaggtgtacgacgaggcctgggagcggattgacaagaaagtggaaggcctgagcaagcacatcaagctggaagaggaacggagaagcgaggacgcccagagcaaggccgccctgaccgactggctgcgggctaaggccagcttcgtgatcgagggcctgaaggaggccgacaaggacgagttctgcagatgcgagctgaagctgcagaagtggtacggggacctgcggggaaagcccttcgccatcgaagccgagaacagcatcctggacatcagcggcttcagcaagcagtacaactgtgccttcatctggcagaaggacggcgtgaagaagctgaacctgtacctgatcatcaactacttcaagggcggcaagctgcggttcaagaagatcaaacctgaagccttcgaagccaacagattctacaccgtgatcaacaaaaagagcggcgagatcgtgcccatggaggtgaacttcaacttcgacgaccccaacctgatcatcctgcctctggcctttggcaagagacagggcagagaattcatctggaacgacctgctgtccctggaaaccggcagcctgaagctggccaacggaagagtgatcgagaagacactgtacaacagaagaacccggcaggatgagcctgccctgttcgtggccctgaccttcgagcggcgggaggtcctggactcctccaatatcaaaccaatgaacctgatcggcgtggcaagaggcgaaaacatccccgccgtgatcgccctgaccgaccccgagggctgcccactgagccggtttaaggatagcctgggaaacccaacccacatcctgagaatcggcgagagctataaggagaagcagcggaccatccaggccaagaaggaggtggagcagcggagagccggcggctacagccggaagtacgccagcaaagccaagaatctggcagacgatatggtgagaaacaccgctagagatctgctgtactacgccgtgacccaggatgccatgctgatcttcgccaacctgagccggggcttcggccggcagggcaagcggaccttcatggccgagagacagtacacacggatggaggactggctgaccgccaagctggcctacgagggcctgagcaagacctacctgtccaagacactggcccagtacacctccaagacatgcagcaactgtgggtttaccatcaccagcgccgactacgacagggtgctggagaagctgaagaagacagcaacaggctggatgaccacaattaacggcaaggagctgaaggtggagggccagattacctactacaacagatacaagagacagaacgtagtcaaggacctgtccgtcgagctggatagactgagcgaagaatctgtgaacaacgacatctcctcctggacaaagggcagaagcggagaagctctgagcctcctgaagaaaagattctcccatagacccgtgcaggagaagttcgtgtgcctgaactgcggcttcgagacacacgcagccgagcaagccgccctgaacatcgccagatcctggctgttcctgcggagccaggagtacaagaaataccagacaaacaagacaaccggcaacaccgataagagagccttcgtcgagacctggcagtccttttaccggaagaagcttaaggaggtgtggaaacctgccgtgcggtctggcggatctggcggaggctccaccagccccaagaaaaagagaaaagtctaagctgccttctgcggggcttgccttctggccatgcccttcttctctcccttgcacctgtacctcttggtctttgaataaagcctgagtaggaaggctagcaaaaaaaaaaaaaaaaaaaaaaaaaaaaaaaaaaaaaaaaaaaaaaaaaaaaaaaaaaaaaaaaaaaaaaaaaaaaaaaa

SEQ ID NO: 10195 - RNA, 8787 nt, synthetic construct
  source 1..8787: mol_type = other RNA
aggaaataagagagaaaagaagagtaagaagaaatataagagccaccatggcccctaagaagaagcgtaaagtgagccggatgaaccacgaccaggagttcgacccccctaaggtgtaccctcccgtccccgccgagaagagaaagcccatccgggtcctgagcctgttcgatggcatcgccaccggtctgctggtgctgaaggacctgggcatccaggtggataggtacattgcctccgaggtgtgcgaggactccatcaccgtgggaatggtgcgtcatcagggcaagatcatgtacgtgggcgacgtgcggagcgtgacacagaagcatatccaggagtggggccctttcgacctggtgatcggcggcagcccttgcaatgacctgagcatcgtgaacccagcccggaagggcctgtacgagggaaccggcagactgttcttcgagttttacagactgctgcacgacgcccggcctaaggaaggcgacgaccggcccttcttttggctgttcgagaatgtggtggccatgggagtcagcgacaagcgggatattagccggttcctggagagcaaccccgtgatgatcgatgccaaggaagtgagcgccgcccaccgggccagatacttctggggcaatctgcctggcatgaacagacccctggccagcaccgtgaacgacaagctggagctgcaggagtgcctggagcacggccggatcgccaagttcagcaaggtgagaaccatcaccacccgaagcaacagcatcaaacaaggcaaggaccagcactttcctgtgttcatgaacgagaaggaggacatcctgtggtgtaccgagatggagagagtgttcgggttcccagtccactacacagatgtcagcaacatgtctagactggccagacagagactgctgggaagaagctggtccgtccctgtgatcagacacctgttcgcccctctgaaggagtacttcgcctgcgtgagcagcggcaacagcaacgccaacagccggggccccagcttctctagcggcctggtgccactgtccctgagagggagccacatgggccccatggagatctacaaaaccgtgagcgcctggaagcggcagcctgtgcgcgtgctgagcctgtttcggaatatcgataaagtcctgaaaagcctgggattcctggagagcggctctggctccggcggtggcaccctgaagtacgtggaggatgtgacaaacgtggtcagacgggatgtggagaagtggggccccttcgatctggtgtacggcagcacccaacccctgggcagctcttgtgaccggtgccctggctggtacatgtttcagttccaccggatcctgcagtacgccctgccgagacaggagtcccagcggccattcttttggattttcatggacaacttgctgctgaccgaggatgaccaggaaactaccactcggttcctgcagaccgaagccgtgaccctgcaggacgtgagaggccgggactaccagaacgccatgcgggtgtggtccaacatccctggactgaaaagcaagcacgcacctctgacccctaaagaagaggagtacctgcaggcccaggtgcggagcagaagcaagctggacgcccctaaggtggatctgctggtgaagaattgcctcctgcccctgagagagtacttcaagtatttcagccagaatagtctgcccctgggaggcagcggcggcggcatgttccaggtgaccttcagcgacgtggccatcgacttcagccacgaggagtggggctggctggacagcgcccagagggacctgtacaaggacgtgatggtgcagaactacgagaacctggtgagcctgggcctgagcatccccaagcccaacgtgatcgccctgctggaggagggcaaggacccctggatggtggagaggaagctgagcaccggcatgttccccgactgggacagcaggtggggcggcccaagcagcggcgcccctcctcccagcggcggcaggcggcccaagcagcggcgcccctcctcccagcggcggcagcccagccggctccccaacctctaccgaggagggcacctctgagtccgccacccccgagagcggccctggcacctccaccgagcccagcgagggcagcgcacccggcagccctgccggcagccccacctccacagaggagggaaccagcaccgagcccagcgaaggcagcgccccaggcaccagcaccgagcctagtgagcaggagattaaacggatcaacaagatcagaagaagacttgtgaaagacagcaacaccaagaaggccggcaagacaggccccatgaaaaccctgctggttagagtgatgacacccgatctgagagagcggctggaaaacctgagaaagaagcctgaaaatatcccccagcccatcagcaatacatctagagccaacctgaataagctgctgaccgattacaccgaaatgaagaaggcgatcctgcatgtgtactgggaagagttccagaaggaccctgtgggcctgatgagccgggtggcccagcctgccagcaagaagatcgatcagaacaagctgaaacctgagatggacgagaagggcaacctgaccaccgccggctttgcctgctctcagtgtggccagcccctgttcgtgtacaagctggagcaggtgtctgagaagggcaaggcttacaccaactacttcggacggtgcaatgtggccgagcacgaaaagctgatcctgctggcccagctgaagcccgagaaggatagcgacgaagccgtgacatatagcctgggaaagtttgggcagagggccctggatttctacagcattcatgtgaccaaggagtccacccaccccgtgaagcccctggcccagatcgccggaaacagatacgcctccggacctgtgggaaaggccctgagcgacgcatgtatgggcacaatcgcctccttcctgtctaagtaccaggacatcatcatcgaacaccagaaggtggtgaagggcaaccagaagagactggagagcctgcgggagctggccggcaaggaaaacctggaataccctagcgtgaccctgccacctcagcctcacaccaaggagggcgttgatgcctacaacgaagtgatcgcccgggtgcgaatgtgggtgaacctgaacctgtggcagaagctgaagctaagcagagatgatgccaagcctctgctgagactgaagggattcccttcctttcctctggtcgagagacaggccaacgaagtggactggtgggacatggtgtgtaacgtgaagaagctgatcaacgagaaaaaggaggatggcaaggtgttttggcagaatctggctggctacaagagacaggaagccctgagaccatacctgagcagcgaggaagatcggaagaagggaaagaaattcgctcggtaccagctgggcgacctgctgctgcacctggaaaagaagcacggcgaggactggggaaaggtgtacgacgaggcctgggagcggattgacaagaaagtggaaggcctgagcaagcacatcaagctggaagaggaacggagaagcgaggacgcccagagcaaggccgccctgaccgactggctgcgggctaaggccagcttcgtgatcgagggcctgaaggaggccgacaaggacgagttctgcagatgcgagctgaagctgcagaagtggtacggggacctgcggggaaagcccttcgccatcgaagccgagaacagcatcctggacatcagcggcttcagcaagcagtacaactgtgccttcatctggcagaaggacggcgtgaagaagctgaacctgtacctgatcatcaactacttcaagggcggcaagctgcggttcaagaagatcaaacctgaagccttcgaagccaacagattctacaccgtgatcaacaaaaagagcggcgagatcgtgcccatggaggtgaacttcaacttcgacgaccccaacctgatcatcctgcctctggcctttggcaagagacagggcagagaattcatctggaacgacctgctgtccctggaaaccggcagcctgaagctggccaacggaagagtgatcgagaagacactgtacaacagaagaacccggcaggatgagcctgccctgttcgtggccctgaccttcgagcggcgggaggtcctggactcctccaatatcaaaccaatgaacctgatcggcgtggcaagaggcgaaaacatccccgccgtgatcgccctgaccgaccccgagggctgcccactgagccggtttaaggatagcctgggaaacccaacccacatcctgagaatcggcgagagctataaggagaagcagcggaccatccaggccaagaaggaggtggagcagcggagagccggcggctacagccggaagtacgccagcaaagccaagaatctggcagacgatatggtgagaaacaccgctagagatctgctgtactacgccgtgacccaggatgccatgctgatcttcgccaacctgagccggggcttcggccggcagggcaagcggaccttcatggccgagagacagtacacacggatggaggactggctgaccgccaagctggcctacgagggcctgagcaagacctacctgtccaagacactggcccagtacacctccaagacatgcagcaactgtgggtttaccatcaccagcgccgactacgacagggtgctggagaagctgaagaagacagcaacaggctggatgaccacaattaacggcaaggagctgaaggtggagggccagattacctactacaacagatacaagagacagaacgtagtcaaggacctgtccgtcgagctggatagactgagcgaagaatctgtgaacaacgacatctcctcctggacaaagggcagaagcggagaagctctgagcctcctgaagaaaagattctcccatagacccgtgcaggagaagttcgtgtgcctgaactgcggcttcgagacacacgcagccgagcaagccgccctgaacatcgccagatcctggctgttcctgcggagccaggagtacaagaaataccagacaaacaagacaaccggcaacaccgataagagagccttcgtcgagacctggcagtccttttaccggaagaagcttaaggaggtgtggaaacctgccgtgcggtctggcggatctggcggaggctccaccagccccaagaaaaagagaaaagtctaagctgccttctgcggggcttgccttctggccatgcccttcttctctcccttgcacctgtacctcttggtctttgaataaagcctgagtaggaaggctagcaaaaaaaaaaaaaaaaaaaaaaaaaaaaaaaaaaaaaaaaaaaaaaaaaaaaaaaaaaaaaaaaaaaaaaaaaaaaaaaagcccagccggctccccaacctctaccgaggagggcacctctgagtccgccacccccgagagcggccctggcacctccaccgagcccagcgagggcagcgcacccggcagccctgccggcagccccacctccacagaggagggaaccagcaccgagcccagcgaaggcagcgccccaggcaccagcaccgagcctagtgagcaggagattaaacggatcaacaagatcagaagaagacttgtgaaagacagcaacaccaagaaggccggcaagacaggccccatgaaaaccctgctggttagagtgatgacacccgatctgagagagcggctggaaaacctgagaaagaagcctgaaaatatcccccagcccatcagcaatacatctagagccaacctgaataagctgctgaccgattacaccgaaatgaagaaggcgatcctgcatgtgtactgggaagagttccagaaggaccctgtgggcctgatgagccgggtggcccagcctgccagcaagaagatcgatcagaacaagctgaaacctgagatggacgagaagggcaacctgaccaccgccggctttgcctgctctcagtgtggccagcccctgttcgtgtacaagctggagcaggtgtctgagaagggcaaggcttacaccaactacttcggacggtgcaatgtggccgagcacgaaaagctgatcctgctggcccagctgaagcccgagaaggatagcgacgaagccgtgacatatagcctgggaaagtttgggcagagggccctggatttctacagcattcatgtgaccaaggagtccacccaccccgtgaagcccctggcccagatcgccggaaacagatacgcctccggacctgtgggaaaggccctgagcgacgcatgtatgggcacaatcgcctccttcctgtctaagtaccaggacatcatcatcgaacaccagaaggtggtgaagggcaaccagaagagactggagagcctgcgggagctggccggcaaggaaaacctggaataccctagcgtgaccctgccacctcagcctcacaccaaggagggcgttgatgcctacaacgaagtgatcgcccgggtgcgaatgtgggtgaacctgaacctgtggcagaagctgaagctaagcagagatgatgccaagcctctgctgagactgaagggattcccttcctttcctctggtcgagagacaggccaacgaagtggactggtgggacatggtgtgtaacgtgaagaagctgatcaacgagaaaaaggaggatggcaaggtgttttggcagaatctggctggctacaagagacaggaagccctgagaccatacctgagcagcgaggaagatcggaagaagggaaagaaattcgctcggtaccagctgggcgacctgctgctgcacctggaaaagaagcacggcgaggactggggaaaggtgtacgacgaggcctgggagcggattgacaagaaagtggaaggcctgagcaagcacatcaagctggaagaggaacggagaagcgaggacgcccagagcaaggccgccctgaccgactggctgcgggctaaggccagcttcgtgatcgagggcctgaaggaggccgacaaggacgagttctgcagatgcgagctgaagctgcagaagtggtacggggacctgcggggaaagcccttcgccatcgaagccgagaacagcatcctggacatcagcggcttcagcaagcagtacaactgtgccttcatctggcagaaggacggcgtgaagaagctgaacctgtacctgatcatcaactacttcaagggcggcaagctgcggttcaagaagatcaaacctgaagccttcgaagccaacagattctacaccgtgatcaacaaaaagagcggcgagatcgtgcccatggaggtgaacttcaacttcgacgaccccaacctgatcatcctgcctctggcctttggcaagagacagggcagagaattcatctggaacgacctgctgtccctggaaaccggcagcctgaagctggccaacggaagagtgatcgagaagacactgtacaacagaagaacccggcaggatgagcctgccctgttcgtggccctgaccttcgagcggcgggaggtcctggactcctccaatatcaaaccaatgaacctgatcggcgtggcaagaggcgaaaacatccccgccgtgatcgccctgaccgaccccgagggctgcccactgagccggtttaaggatagcctgggaaacccaacccacatcctgagaatcggcgagagctataaggagaagcagcggaccatccaggccaagaaggaggtggagcagcggagagccggcggctacagccggaagtacgccagcaaagccaagaatctggcagacgatatggtgagaaacaccgctagagatctgctgtactacgccgtgacccaggatgccatgctgatcttcgccaacctgagccggggcttcggccggcagggcaagcggaccttcatggccgagagacagtacacacggatggaggactggctgaccgccaagctggcctacgagggcctgagcaagacctacctgtccaagacactggcccagtacacctccaagacatgcagcaactgtgggtttaccatcaccagcgccgactacgacagggtgctggagaagctgaagaagacagcaacaggctggatgaccacaattaacggcaaggagctgaaggtggagggccagattacctactacaacagatacaagagacagaacgtagtcaaggacctgtccgtcgagctggatagactgagcgaagaatctgtgaacaacgacatctcctcctggacaaagggcagaagcggagaagctctgagcctcctgaagaaaagattctcccatagacccgtgcaggagaagttcgtgtgcctgaactgcggcttcgagacacacgcagccgagcaagccgccctgaacatcgccagatcctggctgttcctgcggagccaggagtacaagaaataccagacaaacaagacaaccggcaacaccgataagagagccttcgtcgagacctggcagtccttttaccggaagaagcttaaggaggtgtggaaacctgccgtgcggtctggcggatctggcggaggctccaccagccccaagaaaaagagaaaagtctaagctgccttctgcggggcttgccttctggccatgcccttcttctctcccttgcacctgtacctcttggtctttgaataaagcctgagtaggaaggctagcaaaaaaaaaaaaaaaaaaaaaaaaaaaaaaaaaaaaaaaaaaaaaaaaaaaaaaaaaaaaaaaaaaaaaaaaaaaaaaaa

SEQ ID NO: 10196 - RNA, 8787 nt, synthetic construct
  source 1..8787: mol_type = other RNA
aggaaataagagagaaaagaagagtaagaagaaatataagagccaccatggcccctaagaagaagcgtaaagtgagccggatgaaccacgaccaggagttcgacccccctaaggtgtaccctcccgtccccgccgagaagagaaagcccatccgggtcctgagcctgttcgatggcatcgccaccggtctgctggtgctgaaggacctgggcatccaggtggataggtacattgcctccgaggtgtgcgaggactccatcaccgtgggaatggtgcgtcatcagggcaagatcatgtacgtgggcgacgtgcggagcgtgacacagaagcatatccaggagtggggccctttcgacctggtgatcggcggcagcccttgcaatgacctgagcatcgtgaacccagcccggaagggcctgtacgagggaaccggcagactgttcttcgagttttacagactgctgcacgacgcccggcctaaggaaggcgacgaccggcccttcttttggctgttcgagaatgtggtggccatgggagtcagcgacaagcgggatattagccggttcctggagagcaaccccgtgatgatcgatgccaaggaagtgagcgccgcccaccgggccagatacttctggggcaatctgcctggcatgaacagacccctggccagcaccgtgaacgacaagctggagctgcaggagtgcctggagcacggccggatcgccaagttcagcaaggtgagaaccatcaccacccgaagcaacagcatcaaacaaggcaaggaccagcactttcctgtgttcatgaacgagaaggaggacatcctgtggtgtaccgagatggagagagtgttcgggttcccagtccactacacagatgtcagcaacatgtctagactggccagacagagactgctgggaagaagctggtccgtccctgtgatcagacacctgttcgcccctctgaaggagtacttcgcctgcgtgagcagcggcaacagcaacgccaacagccggggccccagcttctctagcggcctggtgccactgtccctgagagggagccacatgggccccatggagatctacaaaaccgtgagcgcctggaagcggcagcctgtgcgcgtgctgagcctgtttcggaatatcgataaagtcctgaaaagcctgggattcctggagagcggctctggctccggcggtggcaccctgaagtacgtggaggatgtgacaaacgtggtcagacgggatgtggagaagtggggccccttcgatctggtgtacggcagcacccaacccctgggcagctcttgtgaccggtgccctggctggtacatgtttcagttccaccggatcctgcagtacgccctgccgagacaggagtcccagcggccattcttttggattttcatggacaacttgctgctgaccgaggatgaccaggaaactaccactcggttcctgcagaccgaagccgtgaccctgcaggacgtgagaggccgggactaccagaacgccatgcgggtgtggtccaacatccctggactgaaaagcaagcacgcacctctgacccctaaagaagaggagtacctgcaggcccaggtgcggagcagaagcaagctggacgcccctaaggtggatctgctggtgaagaattgcctcctgcccctgagagagtacttcaagtatttcagccagaatagtctgcccctgggaggcagcggcggcggcccccaggagcccgtgaccttcgccgacgtggccgtgctgttcacccccgaggagtggctgttcctggacagcagccagaagagcctgtacagggacgtgatgctggagaactacaggaacgtggccagcgtgggcgaccagctgtgcaagaccaggatgagcagccacctggagcagagggaggagctgtgcgtgaccgagaggggcatcttccccggcgcccacctgggcccccacctgcagggcggcccaagcagcggcgcccctcctcccagcggcggcaggcggcccaagcagcggcgcccctcctcccagcggcggcagcccagccggctccccaacctctaccgaggagggcacctctgagtccgccacccccgagagcggccctggcacctccaccgagcccagcgagggcagcgcacccggcagccctgccggcagccccacctccacagaggagggaaccagcaccgagcccagcgaaggcagcgccccaggcaccagcaccgagcctagtgagcaggagattaaacggatcaacaagatcagaagaagacttgtgaaagacagcaacaccaagaaggccggcaagacaggccccatgaaaaccctgctggttagagtgatgacacccgatctgagagagcggctggaaaacctgagaaagaagcctgaaaatatcccccagcccatcagcaatacatctagagccaacctgaataagctgctgaccgattacaccgaaatgaagaaggcgatcctgcatgtgtactgggaagagttccagaaggaccctgtgggcctgatgagccgggtggcccagcctgccagcaagaagatcgatcagaacaagctgaaacctgagatggacgagaagggcaacctgaccaccgccggctttgcctgctctcagtgtggccagcccctgttcgtgtacaagctggagcaggtgtctgagaagggcaaggcttacaccaactacttcggacggtgcaatgtggccgagcacgaaaagctgatcctgctggcccagctgaagcccgagaaggatagcgacgaagccgtgacatatagcctgggaaagtttgggcagagggccctggatttctacagcattcatgtgaccaaggagtccacccaccccgtgaagcccctggcccagatcgccggaaacagatacgcctccggacctgtgggaaaggccctgagcgacgcatgtatgggcacaatcgcctccttcctgtctaagtaccaggacatcatcatcgaacaccagaaggtggtgaagggcaaccagaagagactggagagcctgcgggagctggccggcaaggaaaacctggaataccctagcgtgaccctgccacctcagcctcacaccaaggagggcgttgatgcctacaacgaagtgatcgcccgggtgcgaatgtgggtgaacctgaacctgtggcagaagctgaagctaagcagagatgatgccaagcctctgctgagactgaagggattcccttcctttcctctggtcgagagacaggccaacgaagtggactggtgggacatggtgtgtaacgtgaagaagctgatcaacgagaaaaaggaggatggcaaggtgttttggcagaatctggctggctacaagagacaggaagccctgagaccatacctgagcagcgaggaagatcggaagaagggaaagaaattcgctcggtaccagctgggcgacctgctgctgcacctggaaaagaagcacggcgaggactggggaaaggtgtacgacgaggcctgggagcggattgacaagaaagtggaaggcctgagcaagcacatcaagctggaagaggaacggagaagcgaggacgcccagagcaaggccgccctgaccgactggctgcgggctaaggccagcttcgtgatcgagggcctgaaggaggccgacaaggacgagttctgcagatgcgagctgaagctgcagaagtggtacggggacctgcggggaaagcccttcgccatcgaagccgagaacagcatcctggacatcagcggcttcagcaagcagtacaactgtgccttcatctggcagaaggacggcgtgaagaagctgaacctgtacctgatcatcaactacttcaagggcggcaagctgcggttcaagaagatcaaacctgaagccttcgaagccaacagattctacaccgtgatcaacaaaaagagcggcgagatcgtgcccatggaggtgaacttcaacttcgacgaccccaacctgatcatcctgcctctggcctttggcaagagacagggcagagaattcatctggaacgacctgctgtccctggaaaccggcagcctgaagctggccaacggaagagtgatcgagaagacactgtacaacagaagaacccggcaggatgagcctgccctgttcgtggccctgaccttcgagcggcgggaggtcctggactcctccaatatcaaaccaatgaacctgatcggcgtggcaagaggcgaaaacatccccgccgtgatcgccctgaccgaccccgagggctgcccactgagccggtttaaggatagcctgggaaacccaacccacatcctgagaatcggcgagagctataaggagaagcagcggaccatccaggccaagaaggaggtggagcagcggagagccggcggctacagccggaagtacgccagcaaagccaagaatctggcagacgatatggtgagaaacaccgctagagatctgctgtactacgccgtgacccaggatgccatgctgatcttcgccaacctgagccggggcttcggccggcagggcaagcggaccttcatggccgagagacagtacacacggatggaggactggctgaccgccaagctggcctacgagggcctgagcaagacctacctgtccaagacactggcccagtacacctccaagacatgcagcaactgtgggtttaccatcaccagcgccgactacgacagggtgctggagaagctgaagaagacagcaacaggctggatgaccacaattaacggcaaggagctgaaggtggagggccagattacctactacaacagatacaagagacagaacgtagtcaaggacctgtccgtcgagctggatagactgagcgaagaatctgtgaacaacgacatctcctcctggacaaagggcagaagcggagaagctctgagcctcctgaagaaaagattctcccatagacccgtgcaggagaagttcgtgtgcctgaactgcggcttcgagacacacgcagccgagcaagccgccctgaacatcgccagatcctggctgttcctgcggagccaggagtacaagaaataccagacaaacaagacaaccggcaacaccgataagagagccttcgtcgagacctggcagtccttttaccggaagaagcttaaggaggtgtggaaacctgccgtgcggtctggcggatctggcggaggctccaccagccccaagaaaaagagaaaagtctaagctgccttctgcggggcttgccttctggccatgcccttcttctctcccttgcacctgtacctcttggtctttgaataaagcctgagtaggaaggctagcaaaaaaaaaaaaaaaaaaaaaaaaaaaaaaaaaaaaaaaaaaaaaaaaaaaaaaaaaaaaaaaaaaaaaaaaaaaaaaaagcccagccggctccccaacctctaccgaggagggcacctctgagtccgccacccccgagagcggccctggcacctccaccgagcccagcgagggcagcgcacccggcagccctgccggcagccccacctccacagaggagggaaccagcaccgagcccagcgaaggcagcgccccaggcaccagcaccgagcctagtgagcaggagattaaacggatcaacaagatcagaagaagacttgtgaaagacagcaacaccaagaaggccggcaagacaggccccatgaaaaccctgctggttagagtgatgacacccgatctgagagagcggctggaaaacctgagaaagaagcctgaaaatatcccccagcccatcagcaatacatctagagccaacctgaataagctgctgaccgattacaccgaaatgaagaaggcgatcctgcatgtgtactgggaagagttccagaaggaccctgtgggcctgatgagccgggtggcccagcctgccagcaagaagatcgatcagaacaagctgaaacctgagatggacgagaagggcaacctgaccaccgccggctttgcctgctctcagtgtggccagcccctgttcgtgtacaagctggagcaggtgtctgagaagggcaaggcttacaccaactacttcggacggtgcaatgtggccgagcacgaaaagctgatcctgctggcccagctgaagcccgagaaggatagcgacgaagccgtgacatatagcctgggaaagtttgggcagagggccctggatttctacagcattcatgtgaccaaggagtccacccaccccgtgaagcccctggcccagatcgccggaaacagatacgcctccggacctgtgggaaaggccctgagcgacgcatgtatgggcacaatcgcctccttcctgtctaagtaccaggacatcatcatcgaacaccagaaggtggtgaagggcaaccagaagagactggagagcctgcgggagctggccggcaaggaaaacctggaataccctagcgtgaccctgccacctcagcctcacaccaaggagggcgttgatgcctacaacgaagtgatcgcccgggtgcgaatgtgggtgaacctgaacctgtggcagaagctgaagctaagcagagatgatgccaagcctctgctgagactgaagggattcccttcctttcctctggtcgagagacaggccaacgaagtggactggtgggacatggtgtgtaacgtgaagaagctgatcaacgagaaaaaggaggatggcaaggtgttttggcagaatctggctggctacaagagacaggaagccctgagaccatacctgagcagcgaggaagatcggaagaagggaaagaaattcgctcggtaccagctgggcgacctgctgctgcacctggaaaagaagcacggcgaggactggggaaaggtgtacgacgaggcctgggagcggattgacaagaaagtggaaggcctgagcaagcacatcaagctggaagaggaacggagaagcgaggacgcccagagcaaggccgccctgaccgactggctgcgggctaaggccagcttcgtgatcgagggcctgaaggaggccgacaaggacgagttctgcagatgcgagctgaagctgcagaagtggtacggggacctgcggggaaagcccttcgccatcgaagccgagaacagcatcctggacatcagcggcttcagcaagcagtacaactgtgccttcatctggcagaaggacggcgtgaagaagctgaacctgtacctgatcatcaactacttcaagggcggcaagctgcggttcaagaagatcaaacctgaagccttcgaagccaacagattctacaccgtgatcaacaaaaagagcggcgagatcgtgcccatggaggtgaacttcaacttcgacgaccccaacctgatcatcctgcctctggcctttggcaagagacagggcagagaattcatctggaacgacctgctgtccctggaaaccggcagcctgaagctggccaacggaagagtgatcgagaagacactgtacaacagaagaacccggcaggatgagcctgccctgttcgtggccctgaccttcgagcggcgggaggtcctggactcctccaatatcaaaccaatgaacctgatcggcgtggcaagaggcgaaaacatccccgccgtgatcgccctgaccgaccccgagggctgcccactgagccggtttaaggatagcctgggaaacccaacccacatcctgagaatcggcgagagctataaggagaagcagcggaccatccaggccaagaaggaggtggagcagcggagagccggcggctacagccggaagtacgccagcaaagccaagaatctggcagacgatatggtgagaaacaccgctagagatctgctgtactacgccgtgacccaggatgccatgctgatcttcgccaacctgagccggggcttcggccggcagggcaagcggaccttcatggccgagagacagtacacacggatggaggactggctgaccgccaagctggcctacgagggcctgagcaagacctacctgtccaagacactggcccagtacacctccaagacatgcagcaactgtgggtttaccatcaccagcgccgactacgacagggtgctggagaagctgaagaagacagcaacaggctggatgaccacaattaacggcaaggagctgaaggtggagggccagattacctactacaacagatacaagagacagaacgtagtcaaggacctgtccgtcgagctggatagactgagcgaagaatctgtgaacaacgacatctcctcctggacaaagggcagaagcggagaagctctgagcctcctgaagaaaagattctcccatagacccgtgcaggagaagttcgtgtgcctgaactgcggcttcgagacacacgcagccgagcaagccgccctgaacatcgccagatcctggctgttcctgcggagccaggagtacaagaaataccagacaaacaagacaaccggcaacaccgataagagagccttcgtcgagacctggcagtccttttaccggaagaagcttaaggaggtgtggaaacctgccgtgcggtctggcggatctggcggaggctccaccagccccaagaaaaagagaaaagtctaagctgccttctgcggggcttgccttctggccatgcccttcttctctcccttgcacctgtacctcttggtctttgaataaagcctgagtaggaaggctagcaaaaaaaaaaaaaaaaaaaaaaaaaaaaaaaaaaaaaaaaaaaaaaaaaaaaaaaaaaaaaaaaaaaaaaaaaaaaaaaa

SEQ ID NO: 10197 - RNA, 8787 nt, synthetic construct
  source 1..8787: mol_type = other RNA
aggaaataagagagaaaagaagagtaagaagaaatataagagccaccatggcccctaagaagaagcgtaaagtgagccggatgaaccacgaccaggagttcgacccccctaaggtgtaccctcccgtccccgccgagaagagaaagcccatccgggtcctgagcctgttcgatggcatcgccaccggtctgctggtgctgaaggacctgggcatccaggtggataggtacattgcctccgaggtgtgcgaggactccatcaccgtgggaatggtgcgtcatcagggcaagatcatgtacgtgggcgacgtgcggagcgtgacacagaagcatatccaggagtggggccctttcgacctggtgatcggcggcagcccttgcaatgacctgagcatcgtgaacccagcccggaagggcctgtacgagggaaccggcagactgttcttcgagttttacagactgctgcacgacgcccggcctaaggaaggcgacgaccggcccttcttttggctgttcgagaatgtggtggccatgggagtcagcgacaagcgggatattagccggttcctggagagcaaccccgtgatgatcgatgccaaggaagtgagcgccgcccaccgggccagatacttctggggcaatctgcctggcatgaacagacccctggccagcaccgtgaacgacaagctggagctgcaggagtgcctggagcacggccggatcgccaagttcagcaaggtgagaaccatcaccacccgaagcaacagcatcaaacaaggcaaggaccagcactttcctgtgttcatgaacgagaaggaggacatcctgtggtgtaccgagatggagagagtgttcgggttcccagtccactacacagatgtcagcaacatgtctagactggccagacagagactgctgggaagaagctggtccgtccctgtgatcagacacctgttcgcccctctgaaggagtacttcgcctgcgtgagcagcggcaacagcaacgccaacagccggggccccagcttctctagcggcctggtgccactgtccctgagagggagccacatgggccccatggagatctacaaaaccgtgagcgcctggaagcggcagcctgtgcgcgtgctgagcctgtttcggaatatcgataaagtcctgaaaagcctgggattcctggagagcggctctggctccggcggtggcaccctgaagtacgtggaggatgtgacaaacgtggtcagacgggatgtggagaagtggggccccttcgatctggtgtacggcagcacccaacccctgggcagctcttgtgaccggtgccctggctggtacatgtttcagttccaccggatcctgcagtacgccctgccgagacaggagtcccagcggccattcttttggattttcatggacaacttgctgctgaccgaggatgaccaggaaactaccactcggttcctgcagaccgaagccgtgaccctgcaggacgtgagaggccgggactaccagaacgccatgcgggtgtggtccaacatccctggactgaaaagcaagcacgcacctctgacccctaaagaagaggagtacctgcaggcccaggtgcggagcagaagcaagctggacgcccctaaggtggatctgctggtgaagaattgcctcctgcccctgagagagtacttcaagtatttcagccagaatagtctgcccctgggaggcagcggcggcggcatgatcaacgcccaggagctgctgaccctggaggacgtgaccgtggagttcacctgggaggagtggcagctgctggaccccttccagaaggacctgtacagggacgtgaccctggagatctacagcaacctggtgagcatgggctaccaggtgagcaagcccgacgccctgagcaagctggagcagggcgaggagccctggaccatggaggacgagaggcacagcaggatctgccccggcaccggcggcccaagcagcggcgcccctcctcccagcggcggcaggcggcccaagcagcggcgcccctcctcccagcggcggcagcccagccggctccccaacctctaccgaggagggcacctctgagtccgccacccccgagagcggccctggcacctccaccgagcccagcgagggcagcgcacccggcagccctgccggcagccccacctccacagaggagggaaccagcaccgagcccagcgaaggcagcgccccaggcaccagcaccgagcctagtgagcaggagattaaacggatcaacaagatcagaagaagacttgtgaaagacagcaacaccaagaaggccggcaagacaggccccatgaaaaccctgctggttagagtgatgacacccgatctgagagagcggctggaaaacctgagaaagaagcctgaaaatatcccccagcccatcagcaatacatctagagccaacctgaataagctgctgaccgattacaccgaaatgaagaaggcgatcctgcatgtgtactgggaagagttccagaaggaccctgtgggcctgatgagccgggtggcccagcctgccagcaagaagatcgatcagaacaagctgaaacctgagatggacgagaagggcaacctgaccaccgccggctttgcctgctctcagtgtggccagcccctgttcgtgtacaagctggagcaggtgtctgagaagggcaaggcttacaccaactacttcggacggtgcaatgtggccgagcacgaaaagctgatcctgctggcccagctgaagcccgagaaggatagcgacgaagccgtgacatatagcctgggaaagtttgggcagagggccctggatttctacagcattcatgtgaccaaggagtccacccaccccgtgaagcccctggcccagatcgccggaaacagatacgcctccggacctgtgggaaaggccctgagcgacgcatgtatgggcacaatcgcctccttcctgtctaagtaccaggacatcatcatcgaacaccagaaggtggtgaagggcaaccagaagagactggagagcctgcgggagctggccggcaaggaaaacctggaataccctagcgtgaccctgccacctcagcctcacaccaaggagggcgttgatgcctacaacgaagtgatcgcccgggtgcgaatgtgggtgaacctgaacctgtggcagaagctgaagctaagcagagatgatgccaagcctctgctgagactgaagggattcccttcctttcctctggtcgagagacaggccaacgaagtggactggtgggacatggtgtgtaacgtgaagaagctgatcaacgagaaaaaggaggatggcaaggtgttttggcagaatctggctggctacaagagacaggaagccctgagaccatacctgagcagcgaggaagatcggaagaagggaaagaaattcgctcggtaccagctgggcgacctgctgctgcacctggaaaagaagcacggcgaggactggggaaaggtgtacgacgaggcctgggagcggattgacaagaaagtggaaggcctgagcaagcacatcaagctggaagaggaacggagaagcgaggacgcccagagcaaggccgccctgaccgactggctgcgggctaaggccagcttcgtgatcgagggcctgaaggaggccgacaaggacgagttctgcagatgcgagctgaagctgcagaagtggtacggggacctgcggggaaagcccttcgccatcgaagccgagaacagcatcctggacatcagcggcttcagcaagcagtacaactgtgccttcatctggcagaaggacggcgtgaagaagctgaacctgtacctgatcatcaactacttcaagggcggcaagctgcggttcaagaagatcaaacctgaagccttcgaagccaacagattctacaccgtgatcaacaaaaagagcggcgagatcgtgcccatggaggtgaacttcaacttcgacgaccccaacctgatcatcctgcctctggcctttggcaagagacagggcagagaattcatctggaacgacctgctgtccctggaaaccggcagcctgaagctggccaacggaagagtgatcgagaagacactgtacaacagaagaacccggcaggatgagcctgccctgttcgtggccctgaccttcgagcggcgggaggtcctggactcctccaatatcaaaccaatgaacctgatcggcgtggcaagaggcgaaaacatccccgccgtgatcgccctgaccgaccccgagggctgcccactgagccggtttaaggatagcctgggaaacccaacccacatcctgagaatcggcgagagctataaggagaagcagcggaccatccaggccaagaaggaggtggagcagcggagagccggcggctacagccggaagtacgccagcaaagccaagaatctggcagacgatatggtgagaaacaccgctagagatctgctgtactacgccgtgacccaggatgccatgctgatcttcgccaacctgagccggggcttcggccggcagggcaagcggaccttcatggccgagagacagtacacacggatggaggactggctgaccgccaagctggcctacgagggcctgagcaagacctacctgtccaagacactggcccagtacacctccaagacatgcagcaactgtgggtttaccatcaccagcgccgactacgacagggtgctggagaagctgaagaagacagcaacaggctggatgaccacaattaacggcaaggagctgaaggtggagggccagattacctactacaacagatacaagagacagaacgtagtcaaggacctgtccgtcgagctggatagactgagcgaagaatctgtgaacaacgacatctcctcctggacaaagggcagaagcggagaagctctgagcctcctgaagaaaagattctcccatagacccgtgcaggagaagttcgtgtgcctgaactgcggcttcgagacacacgcagccgagcaagccgccctgaacatcgccagatcctggctgttcctgcggagccaggagtacaagaaataccagacaaacaagacaaccggcaacaccgataagagagccttcgtcgagacctggcagtccttttaccggaagaagcttaaggaggtgtggaaacctgccgtgcggtctggcggatctggcggaggctccaccagccccaagaaaaagagaaaagtctaagctgccttctgcggggcttgccttctggccatgcccttcttctctcccttgcacctgtacctcttggtctttgaataaagcctgagtaggaaggctagcaaaaaaaaaaaaaaaaaaaaaaaaaaaaaaaaaaaaaaaaaaaaaaaaaaaaaaaaaaaaaaaaaaaaaaaaaaaaaaaagcccagccggctccccaacctctaccgaggagggcacctctgagtccgccacccccgagagcggccctggcacctccaccgagcccagcgagggcagcgcacccggcagccctgccggcagccccacctccacagaggagggaaccagcaccgagcccagcgaaggcagcgccccaggcaccagcaccgagcctagtgagcaggagattaaacggatcaacaagatcagaagaagacttgtgaaagacagcaacaccaagaaggccggcaagacaggccccatgaaaaccctgctggttagagtgatgacacccgatctgagagagcggctggaaaacctgagaaagaagcctgaaaatatcccccagcccatcagcaatacatctagagccaacctgaataagctgctgaccgattacaccgaaatgaagaaggcgatcctgcatgtgtactgggaagagttccagaaggaccctgtgggcctgatgagccgggtggcccagcctgccagcaagaagatcgatcagaacaagctgaaacctgagatggacgagaagggcaacctgaccaccgccggctttgcctgctctcagtgtggccagcccctgttcgtgtacaagctggagcaggtgtctgagaagggcaaggcttacaccaactacttcggacggtgcaatgtggccgagcacgaaaagctgatcctgctggcccagctgaagcccgagaaggatagcgacgaagccgtgacatatagcctgggaaagtttgggcagagggccctggatttctacagcattcatgtgaccaaggagtccacccaccccgtgaagcccctggcccagatcgccggaaacagatacgcctccggacctgtgggaaaggccctgagcgacgcatgtatgggcacaatcgcctccttcctgtctaagtaccaggacatcatcatcgaacaccagaaggtggtgaagggcaaccagaagagactggagagcctgcgggagctggccggcaaggaaaacctggaataccctagcgtgaccctgccacctcagcctcacaccaaggagggcgttgatgcctacaacgaagtgatcgcccgggtgcgaatgtgggtgaacctgaacctgtggcagaagctgaagctaagcagagatgatgccaagcctctgctgagactgaagggattcccttcctttcctctggtcgagagacaggccaacgaagtggactggtgggacatggtgtgtaacgtgaagaagctgatcaacgagaaaaaggaggatggcaaggtgttttggcagaatctggctggctacaagagacaggaagccctgagaccatacctgagcagcgaggaagatcggaagaagggaaagaaattcgctcggtaccagctgggcgacctgctgctgcacctggaaaagaagcacggcgaggactggggaaaggtgtacgacgaggcctgggagcggattgacaagaaagtggaaggcctgagcaagcacatcaagctggaagaggaacggagaagcgaggacgcccagagcaaggccgccctgaccgactggctgcgggctaaggccagcttcgtgatcgagggcctgaaggaggccgacaaggacgagttctgcagatgcgagctgaagctgcagaagtggtacggggacctgcggggaaagcccttcgccatcgaagccgagaacagcatcctggacatcagcggcttcagcaagcagtacaactgtgccttcatctggcagaaggacggcgtgaagaagctgaacctgtacctgatcatcaactacttcaagggcggcaagctgcggttcaagaagatcaaacctgaagccttcgaagccaacagattctacaccgtgatcaacaaaaagagcggcgagatcgtgcccatggaggtgaacttcaacttcgacgaccccaacctgatcatcctgcctctggcctttggcaagagacagggcagagaattcatctggaacgacctgctgtccctggaaaccggcagcctgaagctggccaacggaagagtgatcgagaagacactgtacaacagaagaacccggcaggatgagcctgccctgttcgtggccctgaccttcgagcggcgggaggtcctggactcctccaatatcaaaccaatgaacctgatcggcgtggcaagaggcgaaaacatccccgccgtgatcgccctgaccgaccccgagggctgcccactgagccggtttaaggatagcctgggaaacccaacccacatcctgagaatcggcgagagctataaggagaagcagcggaccatccaggccaagaaggaggtggagcagcggagagccggcggctacagccggaagtacgccagcaaagccaagaatctggcagacgatatggtgagaaacaccgctagagatctgctgtactacgccgtgacccaggatgccatgctgatcttcgccaacctgagccggggcttcggccggcagggcaagcggaccttcatggccgagagacagtacacacggatggaggactggctgaccgccaagctggcctacgagggcctgagcaagacctacctgtccaagacactggcccagtacacctccaagacatgcagcaactgtgggtttaccatcaccagcgccgactacgacagggtgctggagaagctgaagaagacagcaacaggctggatgaccacaattaacggcaaggagctgaaggtggagggccagattacctactacaacagatacaagagacagaacgtagtcaaggacctgtccgtcgagctggatagactgagcgaagaatctgtgaacaacgacatctcctcctggacaaagggcagaagcggagaagctctgagcctcctgaagaaaagattctcccatagacccgtgcaggagaagttcgtgtgcctgaactgcggcttcgagacacacgcagccgagcaagccgccctgaacatcgccagatcctggctgttcctgcggagccaggagtacaagaaataccagacaaacaagacaaccggcaacaccgataagagagccttcgtcgagacctggcagtccttttaccggaagaagcttaaggaggtgtggaaacctgccgtgcggtctggcggatctggcggaggctccaccagccccaagaaaaagagaaaagtctaagctgccttctgcggggcttgccttctggccatgcccttcttctctcccttgcacctgtacctcttggtctttgaataaagcctgagtaggaaggctagcaaaaaaaaaaaaaaaaaaaaaaaaaaaaaaaaaaaaaaaaaaaaaaaaaaaaaaaaaaaaaaaaaaaaaaaaaaaaaaaa

SEQ ID NO: 10198 - RNA, 8787 nt, synthetic construct
  source 1..8787: mol_type = other RNA
aggaaataagagagaaaagaagagtaagaagaaatataagagccaccatggcccctaagaagaagcgtaaagtgagccggatgaaccacgaccaggagttcgacccccctaaggtgtaccctcccgtccccgccgagaagagaaagcccatccgggtcctgagcctgttcgatggcatcgccaccggtctgctggtgctgaaggacctgggcatccaggtggataggtacattgcctccgaggtgtgcgaggactccatcaccgtgggaatggtgcgtcatcagggcaagatcatgtacgtgggcgacgtgcggagcgtgacacagaagcatatccaggagtggggccctttcgacctggtgatcggcggcagcccttgcaatgacctgagcatcgtgaacccagcccggaagggcctgtacgagggaaccggcagactgttcttcgagttttacagactgctgcacgacgcccggcctaaggaaggcgacgaccggcccttcttttggctgttcgagaatgtggtggccatgggagtcagcgacaagcgggatattagccggttcctggagagcaaccccgtgatgatcgatgccaaggaagtgagcgccgcccaccgggccagatacttctggggcaatctgcctggcatgaacagacccctggccagcaccgtgaacgacaagctggagctgcaggagtgcctggagcacggccggatcgccaagttcagcaaggtgagaaccatcaccacccgaagcaacagcatcaaacaaggcaaggaccagcactttcctgtgttcatgaacgagaaggaggacatcctgtggtgtaccgagatggagagagtgttcgggttcccagtccactacacagatgtcagcaacatgtctagactggccagacagagactgctgggaagaagctggtccgtccctgtgatcagacacctgttcgcccctctgaaggagtacttcgcctgcgtgagcagcggcaacagcaacgccaacagccggggccccagcttctctagcggcctggtgccactgtccctgagagggagccacatgggccccatggagatctacaaaaccgtgagcgcctggaagcggcagcctgtgcgcgtgctgagcctgtttcggaatatcgataaagtcctgaaaagcctgggattcctggagagcggctctggctccggcggtggcaccctgaagtacgtggaggatgtgacaaacgtggtcagacgggatgtggagaagtggggccccttcgatctggtgtacggcagcacccaacccctgggcagctcttgtgaccggtgccctggctggtacatgtttcagttccaccggatcctgcagtacgccctgccgagacaggagtcccagcggccattcttttggattttcatggacaacttgctgctgaccgaggatgaccaggaaactaccactcggttcctgcagaccgaagccgtgaccctgcaggacgtgagaggccgggactaccagaacgccatgcgggtgtggtccaacatccctggactgaaaagcaagcacgcacctctgacccctaaagaagaggagtacctgcaggcccaggtgcggagcagaagcaagctggacgcccctaaggtggatctgctggtgaagaattgcctcctgcccctgagagagtacttcaagtatttcagccagaatagtctgcccctgggaggcagcggcggcggcccccagggcctggtgaccttcagggacgtggccgtggacttcaccagggaggagtggaggctgctgagccccaggcagaaggagctgtacaaggaggtgatgctggagaacgccggcaacctgctgagcctgggcctgcccgtgcccagggaggacgtgatcagctacttcgagcagaaggacgtgccctggatgctggagcagaaggccctgaggagcttctgccccggcggccccgtgaagggcggcccaagcagcggcgcccctcctcccagcggcggcaggcggcccaagcagcggcgcccctcctcccagcggcggcagcccagccggctccccaacctctaccgaggagggcacctctgagtccgccacccccgagagcggccctggcacctccaccgagcccagcgagggcagcgcacccggcagccctgccggcagccccacctccacagaggagggaaccagcaccgagcccagcgaaggcagcgccccaggcaccagcaccgagcctagtgagcaggagattaaacggatcaacaagatcagaagaagacttgtgaaagacagcaacaccaagaaggccggcaagacaggccccatgaaaaccctgctggttagagtgatgacacccgatctgagagagcggctggaaaacctgagaaagaagcctgaaaatatcccccagcccatcagcaatacatctagagccaacctgaataagctgctgaccgattacaccgaaatgaagaaggcgatcctgcatgtgtactgggaagagttccagaaggaccctgtgggcctgatgagccgggtggcccagcctgccagcaagaagatcgatcagaacaagctgaaacctgagatggacgagaagggcaacctgaccaccgccggctttgcctgctctcagtgtggccagcccctgttcgtgtacaagctggagcaggtgtctgagaagggcaaggcttacaccaactacttcggacggtgcaatgtggccgagcacgaaaagctgatcctgctggcccagctgaagcccgagaaggatagcgacgaagccgtgacatatagcctgggaaagtttgggcagagggccctggatttctacagcattcatgtgaccaaggagtccacccaccccgtgaagcccctggcccagatcgccggaaacagatacgcctccggacctgtgggaaaggccctgagcgacgcatgtatgggcacaatcgcctccttcctgtctaagtaccaggacatcatcatcgaacaccagaaggtggtgaagggcaaccagaagagactggagagcctgcgggagctggccggcaaggaaaacctggaataccctagcgtgaccctgccacctcagcctcacaccaaggagggcgttgatgcctacaacgaagtgatcgcccgggtgcgaatgtgggtgaacctgaacctgtggcagaagctgaagctaagcagagatgatgccaagcctctgctgagactgaagggattcccttcctttcctctggtcgagagacaggccaacgaagtggactggtgggacatggtgtgtaacgtgaagaagctgatcaacgagaaaaaggaggatggcaaggtgttttggcagaatctggctggctacaagagacaggaagccctgagaccatacctgagcagcgaggaagatcggaagaagggaaagaaattcgctcggtaccagctgggcgacctgctgctgcacctggaaaagaagcacggcgaggactggggaaaggtgtacgacgaggcctgggagcggattgacaagaaagtggaaggcctgagcaagcacatcaagctggaagaggaacggagaagcgaggacgcccagagcaaggccgccctgaccgactggctgcgggctaaggccagcttcgtgatcgagggcctgaaggaggccgacaaggacgagttctgcagatgcgagctgaagctgcagaagtggtacggggacctgcggggaaagcccttcgccatcgaagccgagaacagcatcctggacatcagcggcttcagcaagcagtacaactgtgccttcatctggcagaaggacggcgtgaagaagctgaacctgtacctgatcatcaactacttcaagggcggcaagctgcggttcaagaagatcaaacctgaagccttcgaagccaacagattctacaccgtgatcaacaaaaagagcggcgagatcgtgcccatggaggtgaacttcaacttcgacgaccccaacctgatcatcctgcctctggcctttggcaagagacagggcagagaattcatctggaacgacctgctgtccctggaaaccggcagcctgaagctggccaacggaagagtgatcgagaagacactgtacaacagaagaacccggcaggatgagcctgccctgttcgtggccctgaccttcgagcggcgggaggtcctggactcctccaatatcaaaccaatgaacctgatcggcgtggcaagaggcgaaaacatccccgccgtgatcgccctgaccgaccccgagggctgcccactgagccggtttaaggatagcctgggaaacccaacccacatcctgagaatcggcgagagctataaggagaagcagcggaccatccaggccaagaaggaggtggagcagcggagagccggcggctacagccggaagtacgccagcaaagccaagaatctggcagacgatatggtgagaaacaccgctagagatctgctgtactacgccgtgacccaggatgccatgctgatcttcgccaacctgagccggggcttcggccggcagggcaagcggaccttcatggccgagagacagtacacacggatggaggactggctgaccgccaagctggcctacgagggcctgagcaagacctacctgtccaagacactggcccagtacacctccaagacatgcagcaactgtgggtttaccatcaccagcgccgactacgacagggtgctggagaagctgaagaagacagcaacaggctggatgaccacaattaacggcaaggagctgaaggtggagggccagattacctactacaacagatacaagagacagaacgtagtcaaggacctgtccgtcgagctggatagactgagcgaagaatctgtgaacaacgacatctcctcctggacaaagggcagaagcggagaagctctgagcctcctgaagaaaagattctcccatagacccgtgcaggagaagttcgtgtgcctgaactgcggcttcgagacacacgcagccgagcaagccgccctgaacatcgccagatcctggctgttcctgcggagccaggagtacaagaaataccagacaaacaagacaaccggcaacaccgataagagagccttcgtcgagacctggcagtccttttaccggaagaagcttaaggaggtgtggaaacctgccgtgcggtctggcggatctggcggaggctccaccagccccaagaaaaagagaaaagtctaagctgccttctgcggggcttgccttctggccatgcccttcttctctcccttgcacctgtacctcttggtctttgaataaagcctgagtaggaaggctagcaaaaaaaaaaaaaaaaaaaaaaaaaaaaaaaaaaaaaaaaaaaaaaaaaaaaaaaaaaaaaaaaaaaaaaaaaaaaaaaagcccagccggctccccaacctctaccgaggagggcacctctgagtccgccacccccgagagcggccctggcacctccaccgagcccagcgagggcagcgcacccggcagccctgccggcagccccacctccacagaggagggaaccagcaccgagcccagcgaaggcagcgccccaggcaccagcaccgagcctagtgagcaggagattaaacggatcaacaagatcagaagaagacttgtgaaagacagcaacaccaagaaggccggcaagacaggccccatgaaaaccctgctggttagagtgatgacacccgatctgagagagcggctggaaaacctgagaaagaagcctgaaaatatcccccagcccatcagcaatacatctagagccaacctgaataagctgctgaccgattacaccgaaatgaagaaggcgatcctgcatgtgtactgggaagagttccagaaggaccctgtgggcctgatgagccgggtggcccagcctgccagcaagaagatcgatcagaacaagctgaaacctgagatggacgagaagggcaacctgaccaccgccggctttgcctgctctcagtgtggccagcccctgttcgtgtacaagctggagcaggtgtctgagaagggcaaggcttacaccaactacttcggacggtgcaatgtggccgagcacgaaaagctgatcctgctggcccagctgaagcccgagaaggatagcgacgaagccgtgacatatagcctgggaaagtttgggcagagggccctggatttctacagcattcatgtgaccaaggagtccacccaccccgtgaagcccctggcccagatcgccggaaacagatacgcctccggacctgtgggaaaggccctgagcgacgcatgtatgggcacaatcgcctccttcctgtctaagtaccaggacatcatcatcgaacaccagaaggtggtgaagggcaaccagaagagactggagagcctgcgggagctggccggcaaggaaaacctggaataccctagcgtgaccctgccacctcagcctcacaccaaggagggcgttgatgcctacaacgaagtgatcgcccgggtgcgaatgtgggtgaacctgaacctgtggcagaagctgaagctaagcagagatgatgccaagcctctgctgagactgaagggattcccttcctttcctctggtcgagagacaggccaacgaagtggactggtgggacatggtgtgtaacgtgaagaagctgatcaacgagaaaaaggaggatggcaaggtgttttggcagaatctggctggctacaagagacaggaagccctgagaccatacctgagcagcgaggaagatcggaagaagggaaagaaattcgctcggtaccagctgggcgacctgctgctgcacctggaaaagaagcacggcgaggactggggaaaggtgtacgacgaggcctgggagcggattgacaagaaagtggaaggcctgagcaagcacatcaagctggaagaggaacggagaagcgaggacgcccagagcaaggccgccctgaccgactggctgcgggctaaggccagcttcgtgatcgagggcctgaaggaggccgacaaggacgagttctgcagatgcgagctgaagctgcagaagtggtacggggacctgcggggaaagcccttcgccatcgaagccgagaacagcatcctggacatcagcggcttcagcaagcagtacaactgtgccttcatctggcagaaggacggcgtgaagaagctgaacctgtacctgatcatcaactacttcaagggcggcaagctgcggttcaagaagatcaaacctgaagccttcgaagccaacagattctacaccgtgatcaacaaaaagagcggcgagatcgtgcccatggaggtgaacttcaacttcgacgaccccaacctgatcatcctgcctctggcctttggcaagagacagggcagagaattcatctggaacgacctgctgtccctggaaaccggcagcctgaagctggccaacggaagagtgatcgagaagacactgtacaacagaagaacccggcaggatgagcctgccctgttcgtggccctgaccttcgagcggcgggaggtcctggactcctccaatatcaaaccaatgaacctgatcggcgtggcaagaggcgaaaacatccccgccgtgatcgccctgaccgaccccgagggctgcccactgagccggtttaaggatagcctgggaaacccaacccacatcctgagaatcggcgagagctataaggagaagcagcggaccatccaggccaagaaggaggtggagcagcggagagccggcggctacagccggaagtacgccagcaaagccaagaatctggcagacgatatggtgagaaacaccgctagagatctgctgtactacgccgtgacccaggatgccatgctgatcttcgccaacctgagccggggcttcggccggcagggcaagcggaccttcatggccgagagacagtacacacggatggaggactggctgaccgccaagctggcctacgagggcctgagcaagacctacctgtccaagacactggcccagtacacctccaagacatgcagcaactgtgggtttaccatcaccagcgccgactacgacagggtgctggagaagctgaagaagacagcaacaggctggatgaccacaattaacggcaaggagctgaaggtggagggccagattacctactacaacagatacaagagacagaacgtagtcaaggacctgtccgtcgagctggatagactgagcgaagaatctgtgaacaacgacatctcctcctggacaaagggcagaagcggagaagctctgagcctcctgaagaaaagattctcccatagacccgtgcaggagaagttcgtgtgcctgaactgcggcttcgagacacacgcagccgagcaagccgccctgaacatcgccagatcctggctgttcctgcggagccaggagtacaagaaataccagacaaacaagacaaccggcaacaccgataagagagccttcgtcgagacctggcagtccttttaccggaagaagcttaaggaggtgtggaaacctgccgtgcggtctggcggatctggcggaggctccaccagccccaagaaaaagagaaaagtctaagctgccttctgcggggcttgccttctggccatgcccttcttctctcccttgcacctgtacctcttggtctttgaataaagcctgagtaggaaggctagcaaaaaaaaaaaaaaaaaaaaaaaaaaaaaaaaaaaaaaaaaaaaaaaaaaaaaaaaaaaaaaaaaaaaaaaaaaaaaaaa

SEQ ID NO: 10199 - RNA, 8787 nt, synthetic construct
  source 1..8787: mol_type = other RNA
aggaaataagagagaaaagaagagtaagaagaaatataagagccaccatggcccctaagaagaagcgtaaagtgagccggatgaaccacgaccaggagttcgacccccctaaggtgtaccctcccgtccccgccgagaagagaaagcccatccgggtcctgagcctgttcgatggcatcgccaccggtctgctggtgctgaaggacctgggcatccaggtggataggtacattgcctccgaggtgtgcgaggactccatcaccgtgggaatggtgcgtcatcagggcaagatcatgtacgtgggcgacgtgcggagcgtgacacagaagcatatccaggagtggggccctttcgacctggtgatcggcggcagcccttgcaatgacctgagcatcgtgaacccagcccggaagggcctgtacgagggaaccggcagactgttcttcgagttttacagactgctgcacgacgcccggcctaaggaaggcgacgaccggcccttcttttggctgttcgagaatgtggtggccatgggagtcagcgacaagcgggatattagccggttcctggagagcaaccccgtgatgatcgatgccaaggaagtgagcgccgcccaccgggccagatacttctggggcaatctgcctggcatgaacagacccctggccagcaccgtgaacgacaagctggagctgcaggagtgcctggagcacggccggatcgccaagttcagcaaggtgagaaccatcaccacccgaagcaacagcatcaaacaaggcaaggaccagcactttcctgtgttcatgaacgagaaggaggacatcctgtggtgtaccgagatggagagagtgttcgggttcccagtccactacacagatgtcagcaacatgtctagactggccagacagagactgctgggaagaagctggtccgtccctgtgatcagacacctgttcgcccctctgaaggagtacttcgcctgcgtgagcagcggcaacagcaacgccaacagccggggccccagcttctctagcggcctggtgccactgtccctgagagggagccacatgggccccatggagatctacaaaaccgtgagcgcctggaagcggcagcctgtgcgcgtgctgagcctgtttcggaatatcgataaagtcctgaaaagcctgggattcctggagagcggctctggctccggcggtggcaccctgaagtacgtggaggatgtgacaaacgtggtcagacgggatgtggagaagtggggccccttcgatctggtgtacggcagcacccaacccctgggcagctcttgtgaccggtgccctggctggtacatgtttcagttccaccggatcctgcagtacgccctgccgagacaggagtcccagcggccattcttttggattttcatggacaacttgctgctgaccgaggatgaccaggaaactaccactcggttcctgcagaccgaagccgtgaccctgcaggacgtgagaggccgggactaccagaacgccatgcgggtgtggtccaacatccctggactgaaaagcaagcacgcacctctgacccctaaagaagaggagtacctgcaggcccaggtgcggagcagaagcaagctggacgcccctaaggtggatctgctggtgaagaattgcctcctgcccctgagagagtacttcaagtatttcagccagaatagtctgcccctgggaggcagcggcggcggcatgttccagaccgcctggaggcaggagcccgtgaccttcgaggacgtggccgtgtacttcacccagaacgagtgggccagcctggacagcgtgcagagggccctgtacagggaggtgatgctggagaactacgccaacgtggccagcctggccttccccttcaccacccccgtgctggtgagccagctggagcagggcgagctgccctggggcctggacccctgggagcccatgggcagggagggcggcccaagcagcggcgcccctcctcccagcggcggcaggcggcccaagcagcggcgcccctcctcccagcggcggcagcccagccggctccccaacctctaccgaggagggcacctctgagtccgccacccccgagagcggccctggcacctccaccgagcccagcgagggcagcgcacccggcagccctgccggcagccccacctccacagaggagggaaccagcaccgagcccagcgaaggcagcgccccaggcaccagcaccgagcctagtgagcaggagattaaacggatcaacaagatcagaagaagacttgtgaaagacagcaacaccaagaaggccggcaagacaggccccatgaaaaccctgctggttagagtgatgacacccgatctgagagagcggctggaaaacctgagaaagaagcctgaaaatatcccccagcccatcagcaatacatctagagccaacctgaataagctgctgaccgattacaccgaaatgaagaaggcgatcctgcatgtgtactgggaagagttccagaaggaccctgtgggcctgatgagccgggtggcccagcctgccagcaagaagatcgatcagaacaagctgaaacctgagatggacgagaagggcaacctgaccaccgccggctttgcctgctctcagtgtggccagcccctgttcgtgtacaagctggagcaggtgtctgagaagggcaaggcttacaccaactacttcggacggtgcaatgtggccgagcacgaaaagctgatcctgctggcccagctgaagcccgagaaggatagcgacgaagccgtgacatatagcctgggaaagtttgggcagagggccctggatttctacagcattcatgtgaccaaggagtccacccaccccgtgaagcccctggcccagatcgccggaaacagatacgcctccggacctgtgggaaaggccctgagcgacgcatgtatgggcacaatcgcctccttcctgtctaagtaccaggacatcatcatcgaacaccagaaggtggtgaagggcaaccagaagagactggagagcctgcgggagctggccggcaaggaaaacctggaataccctagcgtgaccctgccacctcagcctcacaccaaggagggcgttgatgcctacaacgaagtgatcgcccgggtgcgaatgtgggtgaacctgaacctgtggcagaagctgaagctaagcagagatgatgccaagcctctgctgagactgaagggattcccttcctttcctctggtcgagagacaggccaacgaagtggactggtgggacatggtgtgtaacgtgaagaagctgatcaacgagaaaaaggaggatggcaaggtgttttggcagaatctggctggctacaagagacaggaagccctgagaccatacctgagcagcgaggaagatcggaagaagggaaagaaattcgctcggtaccagctgggcgacctgctgctgcacctggaaaagaagcacggcgaggactggggaaaggtgtacgacgaggcctgggagcggattgacaagaaagtggaaggcctgagcaagcacatcaagctggaagaggaacggagaagcgaggacgcccagagcaaggccgccctgaccgactggctgcgggctaaggccagcttcgtgatcgagggcctgaaggaggccgacaaggacgagttctgcagatgcgagctgaagctgcagaagtggtacggggacctgcggggaaagcccttcgccatcgaagccgagaacagcatcctggacatcagcggcttcagcaagcagtacaactgtgccttcatctggcagaaggacggcgtgaagaagctgaacctgtacctgatcatcaactacttcaagggcggcaagctgcggttcaagaagatcaaacctgaagccttcgaagccaacagattctacaccgtgatcaacaaaaagagcggcgagatcgtgcccatggaggtgaacttcaacttcgacgaccccaacctgatcatcctgcctctggcctttggcaagagacagggcagagaattcatctggaacgacctgctgtccctggaaaccggcagcctgaagctggccaacggaagagtgatcgagaagacactgtacaacagaagaacccggcaggatgagcctgccctgttcgtggccctgaccttcgagcggcgggaggtcctggactcctccaatatcaaaccaatgaacctgatcggcgtggcaagaggcgaaaacatccccgccgtgatcgccctgaccgaccccgagggctgcccactgagccggtttaaggatagcctgggaaacccaacccacatcctgagaatcggcgagagctataaggagaagcagcggaccatccaggccaagaaggaggtggagcagcggagagccggcggctacagccggaagtacgccagcaaagccaagaatctggcagacgatatggtgagaaacaccgctagagatctgctgtactacgccgtgacccaggatgccatgctgatcttcgccaacctgagccggggcttcggccggcagggcaagcggaccttcatggccgagagacagtacacacggatggaggactggctgaccgccaagctggcctacgagggcctgagcaagacctacctgtccaagacactggcccagtacacctccaagacatgcagcaactgtgggtttaccatcaccagcgccgactacgacagggtgctggagaagctgaagaagacagcaacaggctggatgaccacaattaacggcaaggagctgaaggtggagggccagattacctactacaacagatacaagagacagaacgtagtcaaggacctgtccgtcgagctggatagactgagcgaagaatctgtgaacaacgacatctcctcctggacaaagggcagaagcggagaagctctgagcctcctgaagaaaagattctcccatagacccgtgcaggagaagttcgtgtgcctgaactgcggcttcgagacacacgcagccgagcaagccgccctgaacatcgccagatcctggctgttcctgcggagccaggagtacaagaaataccagacaaacaagacaaccggcaacaccgataagagagccttcgtcgagacctggcagtccttttaccggaagaagcttaaggaggtgtggaaacctgccgtgcggtctggcggatctggcggaggctccaccagccccaagaaaaagagaaaagtctaagctgccttctgcggggcttgccttctggccatgcccttcttctctcccttgcacctgtacctcttggtctttgaataaagcctgagtaggaaggctagcaaaaaaaaaaaaaaaaaaaaaaaaaaaaaaaaaaaaaaaaaaaaaaaaaaaaaaaaaaaaaaaaaaaaaaaaaaaaaaaagcccagccggctccccaacctctaccgaggagggcacctctgagtccgccacccccgagagcggccctggcacctccaccgagcccagcgagggcagcgcacccggcagccctgccggcagccccacctccacagaggagggaaccagcaccgagcccagcgaaggcagcgccccaggcaccagcaccgagcctagtgagcaggagattaaacggatcaacaagatcagaagaagacttgtgaaagacagcaacaccaagaaggccggcaagacaggccccatgaaaaccctgctggttagagtgatgacacccgatctgagagagcggctggaaaacctgagaaagaagcctgaaaatatcccccagcccatcagcaatacatctagagccaacctgaataagctgctgaccgattacaccgaaatgaagaaggcgatcctgcatgtgtactgggaagagttccagaaggaccctgtgggcctgatgagccgggtggcccagcctgccagcaagaagatcgatcagaacaagctgaaacctgagatggacgagaagggcaacctgaccaccgccggctttgcctgctctcagtgtggccagcccctgttcgtgtacaagctggagcaggtgtctgagaagggcaaggcttacaccaactacttcggacggtgcaatgtggccgagcacgaaaagctgatcctgctggcccagctgaagcccgagaaggatagcgacgaagccgtgacatatagcctgggaaagtttgggcagagggccctggatttctacagcattcatgtgaccaaggagtccacccaccccgtgaagcccctggcccagatcgccggaaacagatacgcctccggacctgtgggaaaggccctgagcgacgcatgtatgggcacaatcgcctccttcctgtctaagtaccaggacatcatcatcgaacaccagaaggtggtgaagggcaaccagaagagactggagagcctgcgggagctggccggcaaggaaaacctggaataccctagcgtgaccctgccacctcagcctcacaccaaggagggcgttgatgcctacaacgaagtgatcgcccgggtgcgaatgtgggtgaacctgaacctgtggcagaagctgaagctaagcagagatgatgccaagcctctgctgagactgaagggattcccttcctttcctctggtcgagagacaggccaacgaagtggactggtgggacatggtgtgtaacgtgaagaagctgatcaacgagaaaaaggaggatggcaaggtgttttggcagaatctggctggctacaagagacaggaagccctgagaccatacctgagcagcgaggaagatcggaagaagggaaagaaattcgctcggtaccagctgggcgacctgctgctgcacctggaaaagaagcacggcgaggactggggaaaggtgtacgacgaggcctgggagcggattgacaagaaagtggaaggcctgagcaagcacatcaagctggaagaggaacggagaagcgaggacgcccagagcaaggccgccctgaccgactggctgcgggctaaggccagcttcgtgatcgagggcctgaaggaggccgacaaggacgagttctgcagatgcgagctgaagctgcagaagtggtacggggacctgcggggaaagcccttcgccatcgaagccgagaacagcatcctggacatcagcggcttcagcaagcagtacaactgtgccttcatctggcagaaggacggcgtgaagaagctgaacctgtacctgatcatcaactacttcaagggcggcaagctgcggttcaagaagatcaaacctgaagccttcgaagccaacagattctacaccgtgatcaacaaaaagagcggcgagatcgtgcccatggaggtgaacttcaacttcgacgaccccaacctgatcatcctgcctctggcctttggcaagagacagggcagagaattcatctggaacgacctgctgtccctggaaaccggcagcctgaagctggccaacggaagagtgatcgagaagacactgtacaacagaagaacccggcaggatgagcctgccctgttcgtggccctgaccttcgagcggcgggaggtcctggactcctccaatatcaaaccaatgaacctgatcggcgtggcaagaggcgaaaacatccccgccgtgatcgccctgaccgaccccgagggctgcccactgagccggtttaaggatagcctgggaaacccaacccacatcctgagaatcggcgagagctataaggagaagcagcggaccatccaggccaagaaggaggtggagcagcggagagccggcggctacagccggaagtacgccagcaaagccaagaatctggcagacgatatggtgagaaacaccgctagagatctgctgtactacgccgtgacccaggatgccatgctgatcttcgccaacctgagccggggcttcggccggcagggcaagcggaccttcatggccgagagacagtacacacggatggaggactggctgaccgccaagctggcctacgagggcctgagcaagacctacctgtccaagacactggcccagtacacctccaagacatgcagcaactgtgggtttaccatcaccagcgccgactacgacagggtgctggagaagctgaagaagacagcaacaggctggatgaccacaattaacggcaaggagctgaaggtggagggccagattacctactacaacagatacaagagacagaacgtagtcaaggacctgtccgtcgagctggatagactgagcgaagaatctgtgaacaacgacatctcctcctggacaaagggcagaagcggagaagctctgagcctcctgaagaaaagattctcccatagacccgtgcaggagaagttcgtgtgcctgaactgcggcttcgagacacacgcagccgagcaagccgccctgaacatcgccagatcctggctgttcctgcggagccaggagtacaagaaataccagacaaacaagacaaccggcaacaccgataagagagccttcgtcgagacctggcagtccttttaccggaagaagcttaaggaggtgtggaaacctgccgtgcggtctggcggatctggcggaggctccaccagccccaagaaaaagagaaaagtctaagctgccttctgcggggcttgccttctggccatgcccttcttctctcccttgcacctgtacctcttggtctttgaataaagcctgagtaggaaggctagcaaaaaaaaaaaaaaaaaaaaaaaaaaaaaaaaaaaaaaaaaaaaaaaaaaaaaaaaaaaaaaaaaaaaaaaaaaaaaaaa

SEQ ID NO: 10200 - RNA, 8787 nt, synthetic construct
  source 1..8787: mol_type = other RNA
aggaaataagagagaaaagaagagtaagaagaaatataagagccaccatggcccctaagaagaagcgtaaagtgagccggatgaaccacgaccaggagttcgacccccctaaggtgtaccctcccgtccccgccgagaagagaaagcccatccgggtcctgagcctgttcgatggcatcgccaccggtctgctggtgctgaaggacctgggcatccaggtggataggtacattgcctccgaggtgtgcgaggactccatcaccgtgggaatggtgcgtcatcagggcaagatcatgtacgtgggcgacgtgcggagcgtgacacagaagcatatccaggagtggggccctttcgacctggtgatcggcggcagcccttgcaatgacctgagcatcgtgaacccagcccggaagggcctgtacgagggaaccggcagactgttcttcgagttttacagactgctgcacgacgcccggcctaaggaaggcgacgaccggcccttcttttggctgttcgagaatgtggtggccatgggagtcagcgacaagcgggatattagccggttcctggagagcaaccccgtgatgatcgatgccaaggaagtgagcgccgcccaccgggccagatacttctggggcaatctgcctggcatgaacagacccctggccagcaccgtgaacgacaagctggagctgcaggagtgcctggagcacggccggatcgccaagttcagcaaggtgagaaccatcaccacccgaagcaacagcatcaaacaaggcaaggaccagcactttcctgtgttcatgaacgagaaggaggacatcctgtggtgtaccgagatggagagagtgttcgggttcccagtccactacacagatgtcagcaacatgtctagactggccagacagagactgctgggaagaagctggtccgtccctgtgatcagacacctgttcgcccctctgaaggagtacttcgcctgcgtgagcagcggcaacagcaacgccaacagccggggccccagcttctctagcggcctggtgccactgtccctgagagggagccacatgggccccatggagatctacaaaaccgtgagcgcctggaagcggcagcctgtgcgcgtgctgagcctgtttcggaatatcgataaagtcctgaaaagcctgggattcctggagagcggctctggctccggcggtggcaccctgaagtacgtggaggatgtgacaaacgtggtcagacgggatgtggagaagtggggccccttcgatctggtgtacggcagcacccaacccctgggcagctcttgtgaccggtgccctggctggtacatgtttcagttccaccggatcctgcagtacgccctgccgagacaggagtcccagcggccattcttttggattttcatggacaacttgctgctgaccgaggatgaccaggaaactaccactcggttcctgcagaccgaagccgtgaccctgcaggacgtgagaggccgggactaccagaacgccatgcgggtgtggtccaacatccctggactgaaaagcaagcacgcacctctgacccctaaagaagaggagtacctgcaggcccaggtgcggagcagaagcaagctggacgcccctaaggtggatctgctggtgaagaattgcctcctgcccctgagagagtacttcaagtatttcagccagaatagtctgcccctgggaggcagcggcggcggcatgttccaggtgaccttcagcgacgtggccatcgacttcagccacgaggagtggggctggctggacagcgcccagagggacctgtacaaggacgtgatggtgcagaactacgagaacctggtgagcctgggcctgagcatccccaagcccaacgtgatcgccctgctggaggagggcaaggacccctggatggtggagaggaagctgagcaccgactgggacagcaggtgggagaacaaggagggcggcccaagcagcggcgcccctcctcccagcggcggcaggcggcccaagcagcggcgcccctcctcccagcggcggcagcccagccggctccccaacctctaccgaggagggcacctctgagtccgccacccccgagagcggccctggcacctccaccgagcccagcgagggcagcgcacccggcagccctgccggcagccccacctccacagaggagggaaccagcaccgagcccagcgaaggcagcgccccaggcaccagcaccgagcctagtgagcaggagattaaacggatcaacaagatcagaagaagacttgtgaaagacagcaacaccaagaaggccggcaagacaggccccatgaaaaccctgctggttagagtgatgacacccgatctgagagagcggctggaaaacctgagaaagaagcctgaaaatatcccccagcccatcagcaatacatctagagccaacctgaataagctgctgaccgattacaccgaaatgaagaaggcgatcctgcatgtgtactgggaagagttccagaaggaccctgtgggcctgatgagccgggtggcccagcctgccagcaagaagatcgatcagaacaagctgaaacctgagatggacgagaagggcaacctgaccaccgccggctttgcctgctctcagtgtggccagcccctgttcgtgtacaagctggagcaggtgtctgagaagggcaaggcttacaccaactacttcggacggtgcaatgtggccgagcacgaaaagctgatcctgctggcccagctgaagcccgagaaggatagcgacgaagccgtgacatatagcctgggaaagtttgggcagagggccctggatttctacagcattcatgtgaccaaggagtccacccaccccgtgaagcccctggcccagatcgccggaaacagatacgcctccggacctgtgggaaaggccctgagcgacgcatgtatgggcacaatcgcctccttcctgtctaagtaccaggacatcatcatcgaacaccagaaggtggtgaagggcaaccagaagagactggagagcctgcgggagctggccggcaaggaaaacctggaataccctagcgtgaccctgccacctcagcctcacaccaaggagggcgttgatgcctacaacgaagtgatcgcccgggtgcgaatgtgggtgaacctgaacctgtggcagaagctgaagctaagcagagatgatgccaagcctctgctgagactgaagggattcccttcctttcctctggtcgagagacaggccaacgaagtggactggtgggacatggtgtgtaacgtgaagaagctgatcaacgagaaaaaggaggatggcaaggtgttttggcagaatctggctggctacaagagacaggaagccctgagaccatacctgagcagcgaggaagatcggaagaagggaaagaaattcgctcggtaccagctgggcgacctgctgctgcacctggaaaagaagcacggcgaggactggggaaaggtgtacgacgaggcctgggagcggattgacaagaaagtggaaggcctgagcaagcacatcaagctggaagaggaacggagaagcgaggacgcccagagcaaggccgccctgaccgactggctgcgggctaaggccagcttcgtgatcgagggcctgaaggaggccgacaaggacgagttctgcagatgcgagctgaagctgcagaagtggtacggggacctgcggggaaagcccttcgccatcgaagccgagaacagcatcctggacatcagcggcttcagcaagcagtacaactgtgccttcatctggcagaaggacggcgtgaagaagctgaacctgtacctgatcatcaactacttcaagggcggcaagctgcggttcaagaagatcaaacctgaagccttcgaagccaacagattctacaccgtgatcaacaaaaagagcggcgagatcgtgcccatggaggtgaacttcaacttcgacgaccccaacctgatcatcctgcctctggcctttggcaagagacagggcagagaattcatctggaacgacctgctgtccctggaaaccggcagcctgaagctggccaacggaagagtgatcgagaagacactgtacaacagaagaacccggcaggatgagcctgccctgttcgtggccctgaccttcgagcggcgggaggtcctggactcctccaatatcaaaccaatgaacctgatcggcgtggcaagaggcgaaaacatccccgccgtgatcgccctgaccgaccccgagggctgcccactgagccggtttaaggatagcctgggaaacccaacccacatcctgagaatcggcgagagctataaggagaagcagcggaccatccaggccaagaaggaggtggagcagcggagagccggcggctacagccggaagtacgccagcaaagccaagaatctggcagacgatatggtgagaaacaccgctagagatctgctgtactacgccgtgacccaggatgccatgctgatcttcgccaacctgagccggggcttcggccggcagggcaagcggaccttcatggccgagagacagtacacacggatggaggactggctgaccgccaagctggcctacgagggcctgagcaagacctacctgtccaagacactggcccagtacacctccaagacatgcagcaactgtgggtttaccatcaccagcgccgactacgacagggtgctggagaagctgaagaagacagcaacaggctggatgaccacaattaacggcaaggagctgaaggtggagggccagattacctactacaacagatacaagagacagaacgtagtcaaggacctgtccgtcgagctggatagactgagcgaagaatctgtgaacaacgacatctcctcctggacaaagggcagaagcggagaagctctgagcctcctgaagaaaagattctcccatagacccgtgcaggagaagttcgtgtgcctgaactgcggcttcgagacacacgcagccgagcaagccgccctgaacatcgccagatcctggctgttcctgcggagccaggagtacaagaaataccagacaaacaagacaaccggcaacaccgataagagagccttcgtcgagacctggcagtccttttaccggaagaagcttaaggaggtgtggaaacctgccgtgcggtctggcggatctggcggaggctccaccagccccaagaaaaagagaaaagtctaagctgccttctgcggggcttgccttctggccatgcccttcttctctcccttgcacctgtacctcttggtctttgaataaagcctgagtaggaaggctagcaaaaaaaaaaaaaaaaaaaaaaaaaaaaaaaaaaaaaaaaaaaaaaaaaaaaaaaaaaaaaaaaaaaaaaaaaaaaaaaagcccagccggctccccaacctctaccgaggagggcacctctgagtccgccacccccgagagcggccctggcacctccaccgagcccagcgagggcagcgcacccggcagccctgccggcagccccacctccacagaggagggaaccagcaccgagcccagcgaaggcagcgccccaggcaccagcaccgagcctagtgagcaggagattaaacggatcaacaagatcagaagaagacttgtgaaagacagcaacaccaagaaggccggcaagacaggccccatgaaaaccctgctggttagagtgatgacacccgatctgagagagcggctggaaaacctgagaaagaagcctgaaaatatcccccagcccatcagcaatacatctagagccaacctgaataagctgctgaccgattacaccgaaatgaagaaggcgatcctgcatgtgtactgggaagagttccagaaggaccctgtgggcctgatgagccgggtggcccagcctgccagcaagaagatcgatcagaacaagctgaaacctgagatggacgagaagggcaacctgaccaccgccggctttgcctgctctcagtgtggccagcccctgttcgtgtacaagctggagcaggtgtctgagaagggcaaggcttacaccaactacttcggacggtgcaatgtggccgagcacgaaaagctgatcctgctggcccagctgaagcccgagaaggatagcgacgaagccgtgacatatagcctgggaaagtttgggcagagggccctggatttctacagcattcatgtgaccaaggagtccacccaccccgtgaagcccctggcccagatcgccggaaacagatacgcctccggacctgtgggaaaggccctgagcgacgcatgtatgggcacaatcgcctccttcctgtctaagtaccaggacatcatcatcgaacaccagaaggtggtgaagggcaaccagaagagactggagagcctgcgggagctggccggcaaggaaaacctggaataccctagcgtgaccctgccacctcagcctcacaccaaggagggcgttgatgcctacaacgaagtgatcgcccgggtgcgaatgtgggtgaacctgaacctgtggcagaagctgaagctaagcagagatgatgccaagcctctgctgagactgaagggattcccttcctttcctctggtcgagagacaggccaacgaagtggactggtgggacatggtgtgtaacgtgaagaagctgatcaacgagaaaaaggaggatggcaaggtgttttggcagaatctggctggctacaagagacaggaagccctgagaccatacctgagcagcgaggaagatcggaagaagggaaagaaattcgctcggtaccagctgggcgacctgctgctgcacctggaaaagaagcacggcgaggactggggaaaggtgtacgacgaggcctgggagcggattgacaagaaagtggaaggcctgagcaagcacatcaagctggaagaggaacggagaagcgaggacgcccagagcaaggccgccctgaccgactggctgcgggctaaggccagcttcgtgatcgagggcctgaaggaggccgacaaggacgagttctgcagatgcgagctgaagctgcagaagtggtacggggacctgcggggaaagcccttcgccatcgaagccgagaacagcatcctggacatcagcggcttcagcaagcagtacaactgtgccttcatctggcagaaggacggcgtgaagaagctgaacctgtacctgatcatcaactacttcaagggcggcaagctgcggttcaagaagatcaaacctgaagccttcgaagccaacagattctacaccgtgatcaacaaaaagagcggcgagatcgtgcccatggaggtgaacttcaacttcgacgaccccaacctgatcatcctgcctctggcctttggcaagagacagggcagagaattcatctggaacgacctgctgtccctggaaaccggcagcctgaagctggccaacggaagagtgatcgagaagacactgtacaacagaagaacccggcaggatgagcctgccctgttcgtggccctgaccttcgagcggcgggaggtcctggactcctccaatatcaaaccaatgaacctgatcggcgtggcaagaggcgaaaacatccccgccgtgatcgccctgaccgaccccgagggctgcccactgagccggtttaaggatagcctgggaaacccaacccacatcctgagaatcggcgagagctataaggagaagcagcggaccatccaggccaagaaggaggtggagcagcggagagccggcggctacagccggaagtacgccagcaaagccaagaatctggcagacgatatggtgagaaacaccgctagagatctgctgtactacgccgtgacccaggatgccatgctgatcttcgccaacctgagccggggcttcggccggcagggcaagcggaccttcatggccgagagacagtacacacggatggaggactggctgaccgccaagctggcctacgagggcctgagcaagacctacctgtccaagacactggcccagtacacctccaagacatgcagcaactgtgggtttaccatcaccagcgccgactacgacagggtgctggagaagctgaagaagacagcaacaggctggatgaccacaattaacggcaaggagctgaaggtggagggccagattacctactacaacagatacaagagacagaacgtagtcaaggacctgtccgtcgagctggatagactgagcgaagaatctgtgaacaacgacatctcctcctggacaaagggcagaagcggagaagctctgagcctcctgaagaaaagattctcccatagacccgtgcaggagaagttcgtgtgcctgaactgcggcttcgagacacacgcagccgagcaagccgccctgaacatcgccagatcctggctgttcctgcggagccaggagtacaagaaataccagacaaacaagacaaccggcaacaccgataagagagccttcgtcgagacctggcagtccttttaccggaagaagcttaaggaggtgtggaaacctgccgtgcggtctggcggatctggcggaggctccaccagccccaagaaaaagagaaaagtctaagctgccttctgcggggcttgccttctggccatgcccttcttctctcccttgcacctgtacctcttggtctttgaataaagcctgagtaggaaggctagcaaaaaaaaaaaaaaaaaaaaaaaaaaaaaaaaaaaaaaaaaaaaaaaaaaaaaaaaaaaaaaaaaaaaaaaaaaaaaaaa

SEQ ID NO: 10201 - RNA, 8787 nt, synthetic construct
  source 1..8787: mol_type = other RNA
aggaaataagagagaaaagaagagtaagaagaaatataagagccaccatggcccctaagaagaagcgtaaagtgagccggatgaaccacgaccaggagttcgacccccctaaggtgtaccctcccgtccccgccgagaagagaaagcccatccgggtcctgagcctgttcgatggcatcgccaccggtctgctggtgctgaaggacctgggcatccaggtggataggtacattgcctccgaggtgtgcgaggactccatcaccgtgggaatggtgcgtcatcagggcaagatcatgtacgtgggcgacgtgcggagcgtgacacagaagcatatccaggagtggggccctttcgacctggtgatcggcggcagcccttgcaatgacctgagcatcgtgaacccagcccggaagggcctgtacgagggaaccggcagactgttcttcgagttttacagactgctgcacgacgcccggcctaaggaaggcgacgaccggcccttcttttggctgttcgagaatgtggtggccatgggagtcagcgacaagcgggatattagccggttcctggagagcaaccccgtgatgatcgatgccaaggaagtgagcgccgcccaccgggccagatacttctggggcaatctgcctggcatgaacagacccctggccagcaccgtgaacgacaagctggagctgcaggagtgcctggagcacggccggatcgccaagttcagcaaggtgagaaccatcaccacccgaagcaacagcatcaaacaaggcaaggaccagcactttcctgtgttcatgaacgagaaggaggacatcctgtggtgtaccgagatggagagagtgttcgggttcccagtccactacacagatgtcagcaacatgtctagactggccagacagagactgctgggaagaagctggtccgtccctgtgatcagacacctgttcgcccctctgaaggagtacttcgcctgcgtgagcagcggcaacagcaacgccaacagccggggccccagcttctctagcggcctggtgccactgtccctgagagggagccacatgggccccatggagatctacaaaaccgtgagcgcctggaagcggcagcctgtgcgcgtgctgagcctgtttcggaatatcgataaagtcctgaaaagcctgggattcctggagagcggctctggctccggcggtggcaccctgaagtacgtggaggatgtgacaaacgtggtcagacgggatgtggagaagtggggccccttcgatctggtgtacggcagcacccaacccctgggcagctcttgtgaccggtgccctggctggtacatgtttcagttccaccggatcctgcagtacgccctgccgagacaggagtcccagcggccattcttttggattttcatggacaacttgctgctgaccgaggatgaccaggaaactaccactcggttcctgcagaccgaagccgtgaccctgcaggacgtgagaggccgggactaccagaacgccatgcgggtgtggtccaacatccctggactgaaaagcaagcacgcacctctgacccctaaagaagaggagtacctgcaggcccaggtgcggagcagaagcaagctggacgcccctaaggtggatctgctggtgaagaattgcctcctgcccctgagagagtacttcaagtatttcagccagaatagtctgcccctgggaggcagcggcggcggcatgatcaccgcccagggccccgtgagcttcagggacgtgaccgtgggcttcacccaggaggagtggcagcacctggaccccgcccagaggaccctgtacagggacgtgatgatcgagaactacagccacctggtgagcgtgggctactgcatccccaagcccgaggtgatcctgaagctggagaagggcgaggagccctggatcagcgaggagaagttccccagccagagccacctggagctgggcggcccaagcagcggcgcccctcctcccagcggcggcaggcggcccaagcagcggcgcccctcctcccagcggcggcagcccagccggctccccaacctctaccgaggagggcacctctgagtccgccacccccgagagcggccctggcacctccaccgagcccagcgagggcagcgcacccggcagccctgccggcagccccacctccacagaggagggaaccagcaccgagcccagcgaaggcagcgccccaggcaccagcaccgagcctagtgagcaggagattaaacggatcaacaagatcagaagaagacttgtgaaagacagcaacaccaagaaggccggcaagacaggccccatgaaaaccctgctggttagagtgatgacacccgatctgagagagcggctggaaaacctgagaaagaagcctgaaaatatcccccagcccatcagcaatacatctagagccaacctgaataagctgctgaccgattacaccgaaatgaagaaggcgatcctgcatgtgtactgggaagagttccagaaggaccctgtgggcctgatgagccgggtggcccagcctgccagcaagaagatcgatcagaacaagctgaaacctgagatggacgagaagggcaacctgaccaccgccggctttgcctgctctcagtgtggccagcccctgttcgtgtacaagctggagcaggtgtctgagaagggcaaggcttacaccaactacttcggacggtgcaatgtggccgagcacgaaaagctgatcctgctggcccagctgaagcccgagaaggatagcgacgaagccgtgacatatagcctgggaaagtttgggcagagggccctggatttctacagcattcatgtgaccaaggagtccacccaccccgtgaagcccctggcccagatcgccggaaacagatacgcctccggacctgtgggaaaggccctgagcgacgcatgtatgggcacaatcgcctccttcctgtctaagtaccaggacatcatcatcgaacaccagaaggtggtgaagggcaaccagaagagactggagagcctgcgggagctggccggcaaggaaaacctggaataccctagcgtgaccctgccacctcagcctcacaccaaggagggcgttgatgcctacaacgaagtgatcgcccgggtgcgaatgtgggtgaacctgaacctgtggcagaagctgaagctaagcagagatgatgccaagcctctgctgagactgaagggattcccttcctttcctctggtcgagagacaggccaacgaagtggactggtgggacatggtgtgtaacgtgaagaagctgatcaacgagaaaaaggaggatggcaaggtgttttggcagaatctggctggctacaagagacaggaagccctgagaccatacctgagcagcgaggaagatcggaagaagggaaagaaattcgctcggtaccagctgggcgacctgctgctgcacctggaaaagaagcacggcgaggactggggaaaggtgtacgacgaggcctgggagcggattgacaagaaagtggaaggcctgagcaagcacatcaagctggaagaggaacggagaagcgaggacgcccagagcaaggccgccctgaccgactggctgcgggctaaggccagcttcgtgatcgagggcctgaaggaggccgacaaggacgagttctgcagatgcgagctgaagctgcagaagtggtacggggacctgcggggaaagcccttcgccatcgaagccgagaacagcatcctggacatcagcggcttcagcaagcagtacaactgtgccttcatctggcagaaggacggcgtgaagaagctgaacctgtacctgatcatcaactacttcaagggcggcaagctgcggttcaagaagatcaaacctgaagccttcgaagccaacagattctacaccgtgatcaacaaaaagagcggcgagatcgtgcccatggaggtgaacttcaacttcgacgaccccaacctgatcatcctgcctctggcctttggcaagagacagggcagagaattcatctggaacgacctgctgtccctggaaaccggcagcctgaagctggccaacggaagagtgatcgagaagacactgtacaacagaagaacccggcaggatgagcctgccctgttcgtggccctgaccttcgagcggcgggaggtcctggactcctccaatatcaaaccaatgaacctgatcggcgtggcaagaggcgaaaacatccccgccgtgatcgccctgaccgaccccgagggctgcccactgagccggtttaaggatagcctgggaaacccaacccacatcctgagaatcggcgagagctataaggagaagcagcggaccatccaggccaagaaggaggtggagcagcggagagccggcggctacagccggaagtacgccagcaaagccaagaatctggcagacgatatggtgagaaacaccgctagagatctgctgtactacgccgtgacccaggatgccatgctgatcttcgccaacctgagccggggcttcggccggcagggcaagcggaccttcatggccgagagacagtacacacggatggaggactggctgaccgccaagctggcctacgagggcctgagcaagacctacctgtccaagacactggcccagtacacctccaagacatgcagcaactgtgggtttaccatcaccagcgccgactacgacagggtgctggagaagctgaagaagacagcaacaggctggatgaccacaattaacggcaaggagctgaaggtggagggccagattacctactacaacagatacaagagacagaacgtagtcaaggacctgtccgtcgagctggatagactgagcgaagaatctgtgaacaacgacatctcctcctggacaaagggcagaagcggagaagctctgagcctcctgaagaaaagattctcccatagacccgtgcaggagaagttcgtgtgcctgaactgcggcttcgagacacacgcagccgagcaagccgccctgaacatcgccagatcctggctgttcctgcggagccaggagtacaagaaataccagacaaacaagacaaccggcaacaccgataagagagccttcgtcgagacctggcagtccttttaccggaagaagcttaaggaggtgtggaaacctgccgtgcggtctggcggatctggcggaggctccaccagccccaagaaaaagagaaaagtctaagctgccttctgcggggcttgccttctggccatgcccttcttctctcccttgcacctgtacctcttggtctttgaataaagcctgagtaggaaggctagcaaaaaaaaaaaaaaaaaaaaaaaaaaaaaaaaaaaaaaaaaaaaaaaaaaaaaaaaaaaaaaaaaaaaaaaaaaaaaaaagcccagccggctccccaacctctaccgaggagggcacctctgagtccgccacccccgagagcggccctggcacctccaccgagcccagcgagggcagcgcacccggcagccctgccggcagccccacctccacagaggagggaaccagcaccgagcccagcgaaggcagcgccccaggcaccagcaccgagcctagtgagcaggagattaaacggatcaacaagatcagaagaagacttgtgaaagacagcaacaccaagaaggccggcaagacaggccccatgaaaaccctgctggttagagtgatgacacccgatctgagagagcggctggaaaacctgagaaagaagcctgaaaatatcccccagcccatcagcaatacatctagagccaacctgaataagctgctgaccgattacaccgaaatgaagaaggcgatcctgcatgtgtactgggaagagttccagaaggaccctgtgggcctgatgagccgggtggcccagcctgccagcaagaagatcgatcagaacaagctgaaacctgagatggacgagaagggcaacctgaccaccgccggctttgcctgctctcagtgtggccagcccctgttcgtgtacaagctggagcaggtgtctgagaagggcaaggcttacaccaactacttcggacggtgcaatgtggccgagcacgaaaagctgatcctgctggcccagctgaagcccgagaaggatagcgacgaagccgtgacatatagcctgggaaagtttgggcagagggccctggatttctacagcattcatgtgaccaaggagtccacccaccccgtgaagcccctggcccagatcgccggaaacagatacgcctccggacctgtgggaaaggccctgagcgacgcatgtatgggcacaatcgcctccttcctgtctaagtaccaggacatcatcatcgaacaccagaaggtggtgaagggcaaccagaagagactggagagcctgcgggagctggccggcaaggaaaacctggaataccctagcgtgaccctgccacctcagcctcacaccaaggagggcgttgatgcctacaacgaagtgatcgcccgggtgcgaatgtgggtgaacctgaacctgtggcagaagctgaagctaagcagagatgatgccaagcctctgctgagactgaagggattcccttcctttcctctggtcgagagacaggccaacgaagtggactggtgggacatggtgtgtaacgtgaagaagctgatcaacgagaaaaaggaggatggcaaggtgttttggcagaatctggctggctacaagagacaggaagccctgagaccatacctgagcagcgaggaagatcggaagaagggaaagaaattcgctcggtaccagctgggcgacctgctgctgcacctggaaaagaagcacggcgaggactggggaaaggtgtacgacgaggcctgggagcggattgacaagaaagtggaaggcctgagcaagcacatcaagctggaagaggaacggagaagcgaggacgcccagagcaaggccgccctgaccgactggctgcgggctaaggccagcttcgtgatcgagggcctgaaggaggccgacaaggacgagttctgcagatgcgagctgaagctgcagaagtggtacggggacctgcggggaaagcccttcgccatcgaagccgagaacagcatcctggacatcagcggcttcagcaagcagtacaactgtgccttcatctggcagaaggacggcgtgaagaagctgaacctgtacctgatcatcaactacttcaagggcggcaagctgcggttcaagaagatcaaacctgaagccttcgaagccaacagattctacaccgtgatcaacaaaaagagcggcgagatcgtgcccatggaggtgaacttcaacttcgacgaccccaacctgatcatcctgcctctggcctttggcaagagacagggcagagaattcatctggaacgacctgctgtccctggaaaccggcagcctgaagctggccaacggaagagtgatcgagaagacactgtacaacagaagaacccggcaggatgagcctgccctgttcgtggccctgaccttcgagcggcgggaggtcctggactcctccaatatcaaaccaatgaacctgatcggcgtggcaagaggcgaaaacatccccgccgtgatcgccctgaccgaccccgagggctgcccactgagccggtttaaggatagcctgggaaacccaacccacatcctgagaatcggcgagagctataaggagaagcagcggaccatccaggccaagaaggaggtggagcagcggagagccggcggctacagccggaagtacgccagcaaagccaagaatctggcagacgatatggtgagaaacaccgctagagatctgctgtactacgccgtgacccaggatgccatgctgatcttcgccaacctgagccggggcttcggccggcagggcaagcggaccttcatggccgagagacagtacacacggatggaggactggctgaccgccaagctggcctacgagggcctgagcaagacctacctgtccaagacactggcccagtacacctccaagacatgcagcaactgtgggtttaccatcaccagcgccgactacgacagggtgctggagaagctgaagaagacagcaacaggctggatgaccacaattaacggcaaggagctgaaggtggagggccagattacctactacaacagatacaagagacagaacgtagtcaaggacctgtccgtcgagctggatagactgagcgaagaatctgtgaacaacgacatctcctcctggacaaagggcagaagcggagaagctctgagcctcctgaagaaaagattctcccatagacccgtgcaggagaagttcgtgtgcctgaactgcggcttcgagacacacgcagccgagcaagccgccctgaacatcgccagatcctggctgttcctgcggagccaggagtacaagaaataccagacaaacaagacaaccggcaacaccgataagagagccttcgtcgagacctggcagtccttttaccggaagaagcttaaggaggtgtggaaacctgccgtgcggtctggcggatctggcggaggctccaccagccccaagaaaaagagaaaagtctaagctgccttctgcggggcttgccttctggccatgcccttcttctctcccttgcacctgtacctcttggtctttgaataaagcctgagtaggaaggctagcaaaaaaaaaaaaaaaaaaaaaaaaaaaaaaaaaaaaaaaaaaaaaaaaaaaaaaaaaaaaaaaaaaaaaaaaaaaaaaaa

SEQ ID NO: 10202 - RNA, 8787 nt, synthetic construct
  source 1..8787: mol_type = other RNA
aggaaataagagagaaaagaagagtaagaagaaatataagagccaccatggcccctaagaagaagcgtaaagtgagccggatgaaccacgaccaggagttcgacccccctaaggtgtaccctcccgtccccgccgagaagagaaagcccatccgggtcctgagcctgttcgatggcatcgccaccggtctgctggtgctgaaggacctgggcatccaggtggataggtacattgcctccgaggtgtgcgaggactccatcaccgtgggaatggtgcgtcatcagggcaagatcatgtacgtgggcgacgtgcggagcgtgacacagaagcatatccaggagtggggccctttcgacctggtgatcggcggcagcccttgcaatgacctgagcatcgtgaacccagcccggaagggcctgtacgagggaaccggcagactgttcttcgagttttacagactgctgcacgacgcccggcctaaggaaggcgacgaccggcccttcttttggctgttcgagaatgtggtggccatgggagtcagcgacaagcgggatattagccggttcctggagagcaaccccgtgatgatcgatgccaaggaagtgagcgccgcccaccgggccagatacttctggggcaatctgcctggcatgaacagacccctggccagcaccgtgaacgacaagctggagctgcaggagtgcctggagcacggccggatcgccaagttcagcaaggtgagaaccatcaccacccgaagcaacagcatcaaacaaggcaaggaccagcactttcctgtgttcatgaacgagaaggaggacatcctgtggtgtaccgagatggagagagtgttcgggttcccagtccactacacagatgtcagcaacatgtctagactggccagacagagactgctgggaagaagctggtccgtccctgtgatcagacacctgttcgcccctctgaaggagtacttcgcctgcgtgagcagcggcaacagcaacgccaacagccggggccccagcttctctagcggcctggtgccactgtccctgagagggagccacatgggccccatggagatctacaaaaccgtgagcgcctggaagcggcagcctgtgcgcgtgctgagcctgtttcggaatatcgataaagtcctgaaaagcctgggattcctggagagcggctctggctccggcggtggcaccctgaagtacgtggaggatgtgacaaacgtggtcagacgggatgtggagaagtggggccccttcgatctggtgtacggcagcacccaacccctgggcagctcttgtgaccggtgccctggctggtacatgtttcagttccaccggatcctgcagtacgccctgccgagacaggagtcccagcggccattcttttggattttcatggacaacttgctgctgaccgaggatgaccaggaaactaccactcggttcctgcagaccgaagccgtgaccctgcaggacgtgagaggccgggactaccagaacgccatgcgggtgtggtccaacatccctggactgaaaagcaagcacgcacctctgacccctaaagaagaggagtacctgcaggcccaggtgcggagcagaagcaagctggacgcccctaaggtggatctgctggtgaagaattgcctcctgcccctgagagagtacttcaagtatttcagccagaatagtctgcccctgggaggcagcggcggcggcccccaggacctgatgaccttcgaggacgtggccgtggagttcacctggtgggagtggggccagctggaccccgcccagaaggacctgtacagggaggtgatgctggagaacttcaagaacctggccagcctgggcttccccgtgagcaagccctacatgatctgccagctggaggagggcgaggagccctgcatcctggagagggagatcagcaccggcgtgcacagcgactgggagaggaggggcggcccaagcagcggcgcccctcctcccagcggcggcaggcggcccaagcagcggcgcccctcctcccagcggcggcagcccagccggctccccaacctctaccgaggagggcacctctgagtccgccacccccgagagcggccctggcacctccaccgagcccagcgagggcagcgcacccggcagccctgccggcagccccacctccacagaggagggaaccagcaccgagcccagcgaaggcagcgccccaggcaccagcaccgagcctagtgagcaggagattaaacggatcaacaagatcagaagaagacttgtgaaagacagcaacaccaagaaggccggcaagacaggccccatgaaaaccctgctggttagagtgatgacacccgatctgagagagcggctggaaaacctgagaaagaagcctgaaaatatcccccagcccatcagcaatacatctagagccaacctgaataagctgctgaccgattacaccgaaatgaagaaggcgatcctgcatgtgtactgggaagagttccagaaggaccctgtgggcctgatgagccgggtggcccagcctgccagcaagaagatcgatcagaacaagctgaaacctgagatggacgagaagggcaacctgaccaccgccggctttgcctgctctcagtgtggccagcccctgttcgtgtacaagctggagcaggtgtctgagaagggcaaggcttacaccaactacttcggacggtgcaatgtggccgagcacgaaaagctgatcctgctggcccagctgaagcccgagaaggatagcgacgaagccgtgacatatagcctgggaaagtttgggcagagggccctggatttctacagcattcatgtgaccaaggagtccacccaccccgtgaagcccctggcccagatcgccggaaacagatacgcctccggacctgtgggaaaggccctgagcgacgcatgtatgggcacaatcgcctccttcctgtctaagtaccaggacatcatcatcgaacaccagaaggtggtgaagggcaaccagaagagactggagagcctgcgggagctggccggcaaggaaaacctggaataccctagcgtgaccctgccacctcagcctcacaccaaggagggcgttgatgcctacaacgaagtgatcgcccgggtgcgaatgtgggtgaacctgaacctgtggcagaagctgaagctaagcagagatgatgccaagcctctgctgagactgaagggattcccttcctttcctctggtcgagagacaggccaacgaagtggactggtgggacatggtgtgtaacgtgaagaagctgatcaacgagaaaaaggaggatggcaaggtgttttggcagaatctggctggctacaagagacaggaagccctgagaccatacctgagcagcgaggaagatcggaagaagggaaagaaattcgctcggtaccagctgggcgacctgctgctgcacctggaaaagaagcacggcgaggactggggaaaggtgtacgacgaggcctgggagcggattgacaagaaagtggaaggcctgagcaagcacatcaagctggaagaggaacggagaagcgaggacgcccagagcaaggccgccctgaccgactggctgcgggctaaggccagcttcgtgatcgagggcctgaaggaggccgacaaggacgagttctgcagatgcgagctgaagctgcagaagtggtacggggacctgcggggaaagcccttcgccatcgaagccgagaacagcatcctggacatcagcggcttcagcaagcagtacaactgtgccttcatctggcagaaggacggcgtgaagaagctgaacctgtacctgatcatcaactacttcaagggcggcaagctgcggttcaagaagatcaaacctgaagccttcgaagccaacagattctacaccgtgatcaacaaaaagagcggcgagatcgtgcccatggaggtgaacttcaacttcgacgaccccaacctgatcatcctgcctctggcctttggcaagagacagggcagagaattcatctggaacgacctgctgtccctggaaaccggcagcctgaagctggccaacggaagagtgatcgagaagacactgtacaacagaagaacccggcaggatgagcctgccctgttcgtggccctgaccttcgagcggcgggaggtcctggactcctccaatatcaaaccaatgaacctgatcggcgtggcaagaggcgaaaacatccccgccgtgatcgccctgaccgaccccgagggctgcccactgagccggtttaaggatagcctgggaaacccaacccacatcctgagaatcggcgagagctataaggagaagcagcggaccatccaggccaagaaggaggtggagcagcggagagccggcggctacagccggaagtacgccagcaaagccaagaatctggcagacgatatggtgagaaacaccgctagagatctgctgtactacgccgtgacccaggatgccatgctgatcttcgccaacctgagccggggcttcggccggcagggcaagcggaccttcatggccgagagacagtacacacggatggaggactggctgaccgccaagctggcctacgagggcctgagcaagacctacctgtccaagacactggcccagtacacctccaagacatgcagcaactgtgggtttaccatcaccagcgccgactacgacagggtgctggagaagctgaagaagacagcaacaggctggatgaccacaattaacggcaaggagctgaaggtggagggccagattacctactacaacagatacaagagacagaacgtagtcaaggacctgtccgtcgagctggatagactgagcgaagaatctgtgaacaacgacatctcctcctggacaaagggcagaagcggagaagctctgagcctcctgaagaaaagattctcccatagacccgtgcaggagaagttcgtgtgcctgaactgcggcttcgagacacacgcagccgagcaagccgccctgaacatcgccagatcctggctgttcctgcggagccaggagtacaagaaataccagacaaacaagacaaccggcaacaccgataagagagccttcgtcgagacctggcagtccttttaccggaagaagcttaaggaggtgtggaaacctgccgtgcggtctggcggatctggcggaggctccaccagccccaagaaaaagagaaaagtctaagctgccttctgcggggcttgccttctggccatgcccttcttctctcccttgcacctgtacctcttggtctttgaataaagcctgagtaggaaggctagcaaaaaaaaaaaaaaaaaaaaaaaaaaaaaaaaaaaaaaaaaaaaaaaaaaaaaaaaaaaaaaaaaaaaaaaaaaaaaaaagcccagccggctccccaacctctaccgaggagggcacctctgagtccgccacccccgagagcggccctggcacctccaccgagcccagcgagggcagcgcacccggcagccctgccggcagccccacctccacagaggagggaaccagcaccgagcccagcgaaggcagcgccccaggcaccagcaccgagcctagtgagcaggagattaaacggatcaacaagatcagaagaagacttgtgaaagacagcaacaccaagaaggccggcaagacaggccccatgaaaaccctgctggttagagtgatgacacccgatctgagagagcggctggaaaacctgagaaagaagcctgaaaatatcccccagcccatcagcaatacatctagagccaacctgaataagctgctgaccgattacaccgaaatgaagaaggcgatcctgcatgtgtactgggaagagttccagaaggaccctgtgggcctgatgagccgggtggcccagcctgccagcaagaagatcgatcagaacaagctgaaacctgagatggacgagaagggcaacctgaccaccgccggctttgcctgctctcagtgtggccagcccctgttcgtgtacaagctggagcaggtgtctgagaagggcaaggcttacaccaactacttcggacggtgcaatgtggccgagcacgaaaagctgatcctgctggcccagctgaagcccgagaaggatagcgacgaagccgtgacatatagcctgggaaagtttgggcagagggccctggatttctacagcattcatgtgaccaaggagtccacccaccccgtgaagcccctggcccagatcgccggaaacagatacgcctccggacctgtgggaaaggccctgagcgacgcatgtatgggcacaatcgcctccttcctgtctaagtaccaggacatcatcatcgaacaccagaaggtggtgaagggcaaccagaagagactggagagcctgcgggagctggccggcaaggaaaacctggaataccctagcgtgaccctgccacctcagcctcacaccaaggagggcgttgatgcctacaacgaagtgatcgcccgggtgcgaatgtgggtgaacctgaacctgtggcagaagctgaagctaagcagagatgatgccaagcctctgctgagactgaagggattcccttcctttcctctggtcgagagacaggccaacgaagtggactggtgggacatggtgtgtaacgtgaagaagctgatcaacgagaaaaaggaggatggcaaggtgttttggcagaatctggctggctacaagagacaggaagccctgagaccatacctgagcagcgaggaagatcggaagaagggaaagaaattcgctcggtaccagctgggcgacctgctgctgcacctggaaaagaagcacggcgaggactggggaaaggtgtacgacgaggcctgggagcggattgacaagaaagtggaaggcctgagcaagcacatcaagctggaagaggaacggagaagcgaggacgcccagagcaaggccgccctgaccgactggctgcgggctaaggccagcttcgtgatcgagggcctgaaggaggccgacaaggacgagttctgcagatgcgagctgaagctgcagaagtggtacggggacctgcggggaaagcccttcgccatcgaagccgagaacagcatcctggacatcagcggcttcagcaagcagtacaactgtgccttcatctggcagaaggacggcgtgaagaagctgaacctgtacctgatcatcaactacttcaagggcggcaagctgcggttcaagaagatcaaacctgaagccttcgaagccaacagattctacaccgtgatcaacaaaaagagcggcgagatcgtgcccatggaggtgaacttcaacttcgacgaccccaacctgatcatcctgcctctggcctttggcaagagacagggcagagaattcatctggaacgacctgctgtccctggaaaccggcagcctgaagctggccaacggaagagtgatcgagaagacactgtacaacagaagaacccggcaggatgagcctgccctgttcgtggccctgaccttcgagcggcgggaggtcctggactcctccaatatcaaaccaatgaacctgatcggcgtggcaagaggcgaaaacatccccgccgtgatcgccctgaccgaccccgagggctgcccactgagccggtttaaggatagcctgggaaacccaacccacatcctgagaatcggcgagagctataaggagaagcagcggaccatccaggccaagaaggaggtggagcagcggagagccggcggctacagccggaagtacgccagcaaagccaagaatctggcagacgatatggtgagaaacaccgctagagatctgctgtactacgccgtgacccaggatgccatgctgatcttcgccaacctgagccggggcttcggccggcagggcaagcggaccttcatggccgagagacagtacacacggatggaggactggctgaccgccaagctggcctacgagggcctgagcaagacctacctgtccaagacactggcccagtacacctccaagacatgcagcaactgtgggtttaccatcaccagcgccgactacgacagggtgctggagaagctgaagaagacagcaacaggctggatgaccacaattaacggcaaggagctgaaggtggagggccagattacctactacaacagatacaagagacagaacgtagtcaaggacctgtccgtcgagctggatagactgagcgaagaatctgtgaacaacgacatctcctcctggacaaagggcagaagcggagaagctctgagcctcctgaagaaaagattctcccatagacccgtgcaggagaagttcgtgtgcctgaactgcggcttcgagacacacgcagccgagcaagccgccctgaacatcgccagatcctggctgttcctgcggagccaggagtacaagaaataccagacaaacaagacaaccggcaacaccgataagagagccttcgtcgagacctggcagtccttttaccggaagaagcttaaggaggtgtggaaacctgccgtgcggtctggcggatctggcggaggctccaccagccccaagaaaaagagaaaagtctaagctgccttctgcggggcttgccttctggccatgcccttcttctctcccttgcacctgtacctcttggtctttgaataaagcctgagtaggaaggctagcaaaaaaaaaaaaaaaaaaaaaaaaaaaaaaaaaaaaaaaaaaaaaaaaaaaaaaaaaaaaaaaaaaaaaaaaaaaaaaaa

SEQ ID NO: 10203 - RNA, 8787 nt, synthetic construct
  source 1..8787: mol_type = other RNA
aggaaataagagagaaaagaagagtaagaagaaatataagagccaccatggcccctaagaagaagcgtaaagtgagccggatgaaccacgaccaggagttcgacccccctaaggtgtaccctcccgtccccgccgagaagagaaagcccatccgggtcctgagcctgttcgatggcatcgccaccggtctgctggtgctgaaggacctgggcatccaggtggataggtacattgcctccgaggtgtgcgaggactccatcaccgtgggaatggtgcgtcatcagggcaagatcatgtacgtgggcgacgtgcggagcgtgacacagaagcatatccaggagtggggccctttcgacctggtgatcggcggcagcccttgcaatgacctgagcatcgtgaacccagcccggaagggcctgtacgagggaaccggcagactgttcttcgagttttacagactgctgcacgacgcccggcctaaggaaggcgacgaccggcccttcttttggctgttcgagaatgtggtggccatgggagtcagcgacaagcgggatattagccggttcctggagagcaaccccgtgatgatcgatgccaaggaagtgagcgccgcccaccgggccagatacttctggggcaatctgcctggcatgaacagacccctggccagcaccgtgaacgacaagctggagctgcaggagtgcctggagcacggccggatcgccaagttcagcaaggtgagaaccatcaccacccgaagcaacagcatcaaacaaggcaaggaccagcactttcctgtgttcatgaacgagaaggaggacatcctgtggtgtaccgagatggagagagtgttcgggttcccagtccactacacagatgtcagcaacatgtctagactggccagacagagactgctgggaagaagctggtccgtccctgtgatcagacacctgttcgcccctctgaaggagtacttcgcctgcgtgagcagcggcaacagcaacgccaacagccggggccccagcttctctagcggcctggtgccactgtccctgagagggagccacatgggccccatggagatctacaaaaccgtgagcgcctggaagcggcagcctgtgcgcgtgctgagcctgtttcggaatatcgataaagtcctgaaaagcctgggattcctggagagcggctctggctccggcggtggcaccctgaagtacgtggaggatgtgacaaacgtggtcagacgggatgtggagaagtggggccccttcgatctggtgtacggcagcacccaacccctgggcagctcttgtgaccggtgccctggctggtacatgtttcagttccaccggatcctgcagtacgccctgccgagacaggagtcccagcggccattcttttggattttcatggacaacttgctgctgaccgaggatgaccaggaaactaccactcggttcctgcagaccgaagccgtgaccctgcaggacgtgagaggccgggactaccagaacgccatgcgggtgtggtccaacatccctggactgaaaagcaagcacgcacctctgacccctaaagaagaggagtacctgcaggcccaggtgcggagcagaagcaagctggacgcccctaaggtggatctgctggtgaagaattgcctcctgcccctgagagagtacttcaagtatttcagccagaatagtctgcccctgggaggcagcggcggcggcatggtgaccttcgaggacgtggccgtgcacttcaccaagaccgagtggaccggcctgagccccgcccagagggccctgtacaggagcgtgatgctggagaacttcggcaacctgaccgccctgggctaccccgtgcccaagcccgccctgatcagcctgctggagggcggcgacatggcctggggcctggaggcccaggacgaccccctggccgagaggaccaagaacatctgcaagggcgtgggcggcccaagcagcggcgcccctcctcccagcggcggcaggcggcccaagcagcggcgcccctcctcccagcggcggcagcccagccggctccccaacctctaccgaggagggcacctctgagtccgccacccccgagagcggccctggcacctccaccgagcccagcgagggcagcgcacccggcagccctgccggcagccccacctccacagaggagggaaccagcaccgagcccagcgaaggcagcgccccaggcaccagcaccgagcctagtgagcaggagattaaacggatcaacaagatcagaagaagacttgtgaaagacagcaacaccaagaaggccggcaagacaggccccatgaaaaccctgctggttagagtgatgacacccgatctgagagagcggctggaaaacctgagaaagaagcctgaaaatatcccccagcccatcagcaatacatctagagccaacctgaataagctgctgaccgattacaccgaaatgaagaaggcgatcctgcatgtgtactgggaagagttccagaaggaccctgtgggcctgatgagccgggtggcccagcctgccagcaagaagatcgatcagaacaagctgaaacctgagatggacgagaagggcaacctgaccaccgccggctttgcctgctctcagtgtggccagcccctgttcgtgtacaagctggagcaggtgtctgagaagggcaaggcttacaccaactacttcggacggtgcaatgtggccgagcacgaaaagctgatcctgctggcccagctgaagcccgagaaggatagcgacgaagccgtgacatatagcctgggaaagtttgggcagagggccctggatttctacagcattcatgtgaccaaggagtccacccaccccgtgaagcccctggcccagatcgccggaaacagatacgcctccggacctgtgggaaaggccctgagcgacgcatgtatgggcacaatcgcctccttcctgtctaagtaccaggacatcatcatcgaacaccagaaggtggtgaagggcaaccagaagagactggagagcctgcgggagctggccggcaaggaaaacctggaataccctagcgtgaccctgccacctcagcctcacaccaaggagggcgttgatgcctacaacgaagtgatcgcccgggtgcgaatgtgggtgaacctgaacctgtggcagaagctgaagctaagcagagatgatgccaagcctctgctgagactgaagggattcccttcctttcctctggtcgagagacaggccaacgaagtggactggtgggacatggtgtgtaacgtgaagaagctgatcaacgagaaaaaggaggatggcaaggtgttttggcagaatctggctggctacaagagacaggaagccctgagaccatacctgagcagcgaggaagatcggaagaagggaaagaaattcgctcggtaccagctgggcgacctgctgctgcacctggaaaagaagcacggcgaggactggggaaaggtgtacgacgaggcctgggagcggattgacaagaaagtggaaggcctgagcaagcacatcaagctggaagaggaacggagaagcgaggacgcccagagcaaggccgccctgaccgactggctgcgggctaaggccagcttcgtgatcgagggcctgaaggaggccgacaaggacgagttctgcagatgcgagctgaagctgcagaagtggtacggggacctgcggggaaagcccttcgccatcgaagccgagaacagcatcctggacatcagcggcttcagcaagcagtacaactgtgccttcatctggcagaaggacggcgtgaagaagctgaacctgtacctgatcatcaactacttcaagggcggcaagctgcggttcaagaagatcaaacctgaagccttcgaagccaacagattctacaccgtgatcaacaaaaagagcggcgagatcgtgcccatggaggtgaacttcaacttcgacgaccccaacctgatcatcctgcctctggcctttggcaagagacagggcagagaattcatctggaacgacctgctgtccctggaaaccggcagcctgaagctggccaacggaagagtgatcgagaagacactgtacaacagaagaacccggcaggatgagcctgccctgttcgtggccctgaccttcgagcggcgggaggtcctggactcctccaatatcaaaccaatgaacctgatcggcgtggcaagaggcgaaaacatccccgccgtgatcgccctgaccgaccccgagggctgcccactgagccggtttaaggatagcctgggaaacccaacccacatcctgagaatcggcgagagctataaggagaagcagcggaccatccaggccaagaaggaggtggagcagcggagagccggcggctacagccggaagtacgccagcaaagccaagaatctggcagacgatatggtgagaaacaccgctagagatctgctgtactacgccgtgacccaggatgccatgctgatcttcgccaacctgagccggggcttcggccggcagggcaagcggaccttcatggccgagagacagtacacacggatggaggactggctgaccgccaagctggcctacgagggcctgagcaagacctacctgtccaagacactggcccagtacacctccaagacatgcagcaactgtgggtttaccatcaccagcgccgactacgacagggtgctggagaagctgaagaagacagcaacaggctggatgaccacaattaacggcaaggagctgaaggtggagggccagattacctactacaacagatacaagagacagaacgtagtcaaggacctgtccgtcgagctggatagactgagcgaagaatctgtgaacaacgacatctcctcctggacaaagggcagaagcggagaagctctgagcctcctgaagaaaagattctcccatagacccgtgcaggagaagttcgtgtgcctgaactgcggcttcgagacacacgcagccgagcaagccgccctgaacatcgccagatcctggctgttcctgcggagccaggagtacaagaaataccagacaaacaagacaaccggcaacaccgataagagagccttcgtcgagacctggcagtccttttaccggaagaagcttaaggaggtgtggaaacctgccgtgcggtctggcggatctggcggaggctccaccagccccaagaaaaagagaaaagtctaagctgccttctgcggggcttgccttctggccatgcccttcttctctcccttgcacctgtacctcttggtctttgaataaagcctgagtaggaaggctagcaaaaaaaaaaaaaaaaaaaaaaaaaaaaaaaaaaaaaaaaaaaaaaaaaaaaaaaaaaaaaaaaaaaaaaaaaaaaaaaagcccagccggctccccaacctctaccgaggagggcacctctgagtccgccacccccgagagcggccctggcacctccaccgagcccagcgagggcagcgcacccggcagccctgccggcagccccacctccacagaggagggaaccagcaccgagcccagcgaaggcagcgccccaggcaccagcaccgagcctagtgagcaggagattaaacggatcaacaagatcagaagaagacttgtgaaagacagcaacaccaagaaggccggcaagacaggccccatgaaaaccctgctggttagagtgatgacacccgatctgagagagcggctggaaaacctgagaaagaagcctgaaaatatcccccagcccatcagcaatacatctagagccaacctgaataagctgctgaccgattacaccgaaatgaagaaggcgatcctgcatgtgtactgggaagagttccagaaggaccctgtgggcctgatgagccgggtggcccagcctgccagcaagaagatcgatcagaacaagctgaaacctgagatggacgagaagggcaacctgaccaccgccggctttgcctgctctcagtgtggccagcccctgttcgtgtacaagctggagcaggtgtctgagaagggcaaggcttacaccaactacttcggacggtgcaatgtggccgagcacgaaaagctgatcctgctggcccagctgaagcccgagaaggatagcgacgaagccgtgacatatagcctgggaaagtttgggcagagggccctggatttctacagcattcatgtgaccaaggagtccacccaccccgtgaagcccctggcccagatcgccggaaacagatacgcctccggacctgtgggaaaggccctgagcgacgcatgtatgggcacaatcgcctccttcctgtctaagtaccaggacatcatcatcgaacaccagaaggtggtgaagggcaaccagaagagactggagagcctgcgggagctggccggcaaggaaaacctggaataccctagcgtgaccctgccacctcagcctcacaccaaggagggcgttgatgcctacaacgaagtgatcgcccgggtgcgaatgtgggtgaacctgaacctgtggcagaagctgaagctaagcagagatgatgccaagcctctgctgagactgaagggattcccttcctttcctctggtcgagagacaggccaacgaagtggactggtgggacatggtgtgtaacgtgaagaagctgatcaacgagaaaaaggaggatggcaaggtgttttggcagaatctggctggctacaagagacaggaagccctgagaccatacctgagcagcgaggaagatcggaagaagggaaagaaattcgctcggtaccagctgggcgacctgctgctgcacctggaaaagaagcacggcgaggactggggaaaggtgtacgacgaggcctgggagcggattgacaagaaagtggaaggcctgagcaagcacatcaagctggaagaggaacggagaagcgaggacgcccagagcaaggccgccctgaccgactggctgcgggctaaggccagcttcgtgatcgagggcctgaaggaggccgacaaggacgagttctgcagatgcgagctgaagctgcagaagtggtacggggacctgcggggaaagcccttcgccatcgaagccgagaacagcatcctggacatcagcggcttcagcaagcagtacaactgtgccttcatctggcagaaggacggcgtgaagaagctgaacctgtacctgatcatcaactacttcaagggcggcaagctgcggttcaagaagatcaaacctgaagccttcgaagccaacagattctacaccgtgatcaacaaaaagagcggcgagatcgtgcccatggaggtgaacttcaacttcgacgaccccaacctgatcatcctgcctctggcctttggcaagagacagggcagagaattcatctggaacgacctgctgtccctggaaaccggcagcctgaagctggccaacggaagagtgatcgagaagacactgtacaacagaagaacccggcaggatgagcctgccctgttcgtggccctgaccttcgagcggcgggaggtcctggactcctccaatatcaaaccaatgaacctgatcggcgtggcaagaggcgaaaacatccccgccgtgatcgccctgaccgaccccgagggctgcccactgagccggtttaaggatagcctgggaaacccaacccacatcctgagaatcggcgagagctataaggagaagcagcggaccatccaggccaagaaggaggtggagcagcggagagccggcggctacagccggaagtacgccagcaaagccaagaatctggcagacgatatggtgagaaacaccgctagagatctgctgtactacgccgtgacccaggatgccatgctgatcttcgccaacctgagccggggcttcggccggcagggcaagcggaccttcatggccgagagacagtacacacggatggaggactggctgaccgccaagctggcctacgagggcctgagcaagacctacctgtccaagacactggcccagtacacctccaagacatgcagcaactgtgggtttaccatcaccagcgccgactacgacagggtgctggagaagctgaagaagacagcaacaggctggatgaccacaattaacggcaaggagctgaaggtggagggccagattacctactacaacagatacaagagacagaacgtagtcaaggacctgtccgtcgagctggatagactgagcgaagaatctgtgaacaacgacatctcctcctggacaaagggcagaagcggagaagctctgagcctcctgaagaaaagattctcccatagacccgtgcaggagaagttcgtgtgcctgaactgcggcttcgagacacacgcagccgagcaagccgccctgaacatcgccagatcctggctgttcctgcggagccaggagtacaagaaataccagacaaacaagacaaccggcaacaccgataagagagccttcgtcgagacctggcagtccttttaccggaagaagcttaaggaggtgtggaaacctgccgtgcggtctggcggatctggcggaggctccaccagccccaagaaaaagagaaaagtctaagctgccttctgcggggcttgccttctggccatgcccttcttctctcccttgcacctgtacctcttggtctttgaataaagcctgagtaggaaggctagcaaaaaaaaaaaaaaaaaaaaaaaaaaaaaaaaaaaaaaaaaaaaaaaaaaaaaaaaaaaaaaaaaaaaaaaaaaaaaaaa

SEQ ID NO: 10204 - RNA, 8787 nt, synthetic construct
  source 1..8787: mol_type = other RNA
aggaaataagagagaaaagaagagtaagaagaaatataagagccaccatggcccctaagaagaagcgtaaagtgagccggatgaaccacgaccaggagttcgacccccctaaggtgtaccctcccgtccccgccgagaagagaaagcccatccgggtcctgagcctgttcgatggcatcgccaccggtctgctggtgctgaaggacctgggcatccaggtggataggtacattgcctccgaggtgtgcgaggactccatcaccgtgggaatggtgcgtcatcagggcaagatcatgtacgtgggcgacgtgcggagcgtgacacagaagcatatccaggagtggggccctttcgacctggtgatcggcggcagcccttgcaatgacctgagcatcgtgaacccagcccggaagggcctgtacgagggaaccggcagactgttcttcgagttttacagactgctgcacgacgcccggcctaaggaaggcgacgaccggcccttcttttggctgttcgagaatgtggtggccatgggagtcagcgacaagcgggatattagccggttcctggagagcaaccccgtgatgatcgatgccaaggaagtgagcgccgcccaccgggccagatacttctggggcaatctgcctggcatgaacagacccctggccagcaccgtgaacgacaagctggagctgcaggagtgcctggagcacggccggatcgccaagttcagcaaggtgagaaccatcaccacccgaagcaacagcatcaaacaaggcaaggaccagcactttcctgtgttcatgaacgagaaggaggacatcctgtggtgtaccgagatggagagagtgttcgggttcccagtccactacacagatgtcagcaacatgtctagactggccagacagagactgctgggaagaagctggtccgtccctgtgatcagacacctgttcgcccctctgaaggagtacttcgcctgcgtgagcagcggcaacagcaacgccaacagccggggccccagcttctctagcggcctggtgccactgtccctgagagggagccacatgggccccatggagatctacaaaaccgtgagcgcctggaagcggcagcctgtgcgcgtgctgagcctgtttcggaatatcgataaagtcctgaaaagcctgggattcctggagagcggctctggctccggcggtggcaccctgaagtacgtggaggatgtgacaaacgtggtcagacgggatgtggagaagtggggccccttcgatctggtgtacggcagcacccaacccctgggcagctcttgtgaccggtgccctggctggtacatgtttcagttccaccggatcctgcagtacgccctgccgagacaggagtcccagcggccattcttttggattttcatggacaacttgctgctgaccgaggatgaccaggaaactaccactcggttcctgcagaccgaagccgtgaccctgcaggacgtgagaggccgggactaccagaacgccatgcgggtgtggtccaacatccctggactgaaaagcaagcacgcacctctgacccctaaagaagaggagtacctgcaggcccaggtgcggagcagaagcaagctggacgcccctaaggtggatctgctggtgaagaattgcctcctgcccctgagagagtacttcaagtatttcagccagaatagtctgcccctgggaggcagcggcggcggccccgcccagggccccggcaaggccaggcccagcaggaagaggggcaggaggcccagggccctgaagttcgtggacgtggccgtgtacttcagccccgaggagtggggctgcctgaggcccgcccagagggccctgtacagggacgtgatgagggagacctacggccacctgggcgccctgggctgcgccggccccaagcccgccctgatcagctggctggagaggaacaccgacgactgggagggcggcccaagcagcggcgcccctcctcccagcggcggcaggcggcccaagcagcggcgcccctcctcccagcggcggcagcccagccggctccccaacctctaccgaggagggcacctctgagtccgccacccccgagagcggccctggcacctccaccgagcccagcgagggcagcgcacccggcagccctgccggcagccccacctccacagaggagggaaccagcaccgagcccagcgaaggcagcgccccaggcaccagcaccgagcctagtgagcaggagattaaacggatcaacaagatcagaagaagacttgtgaaagacagcaacaccaagaaggccggcaagacaggccccatgaaaaccctgctggttagagtgatgacacccgatctgagagagcggctggaaaacctgagaaagaagcctgaaaatatcccccagcccatcagcaatacatctagagccaacctgaataagctgctgaccgattacaccgaaatgaagaaggcgatcctgcatgtgtactgggaagagttccagaaggaccctgtgggcctgatgagccgggtggcccagcctgccagcaagaagatcgatcagaacaagctgaaacctgagatggacgagaagggcaacctgaccaccgccggctttgcctgctctcagtgtggccagcccctgttcgtgtacaagctggagcaggtgtctgagaagggcaaggcttacaccaactacttcggacggtgcaatgtggccgagcacgaaaagctgatcctgctggcccagctgaagcccgagaaggatagcgacgaagccgtgacatatagcctgggaaagtttgggcagagggccctggatttctacagcattcatgtgaccaaggagtccacccaccccgtgaagcccctggcccagatcgccggaaacagatacgcctccggacctgtgggaaaggccctgagcgacgcatgtatgggcacaatcgcctccttcctgtctaagtaccaggacatcatcatcgaacaccagaaggtggtgaagggcaaccagaagagactggagagcctgcgggagctggccggcaaggaaaacctggaataccctagcgtgaccctgccacctcagcctcacaccaaggagggcgttgatgcctacaacgaagtgatcgcccgggtgcgaatgtgggtgaacctgaacctgtggcagaagctgaagctaagcagagatgatgccaagcctctgctgagactgaagggattcccttcctttcctctggtcgagagacaggccaacgaagtggactggtgggacatggtgtgtaacgtgaagaagctgatcaacgagaaaaaggaggatggcaaggtgttttggcagaatctggctggctacaagagacaggaagccctgagaccatacctgagcagcgaggaagatcggaagaagggaaagaaattcgctcggtaccagctgggcgacctgctgctgcacctggaaaagaagcacggcgaggactggggaaaggtgtacgacgaggcctgggagcggattgacaagaaagtggaaggcctgagcaagcacatcaagctggaagaggaacggagaagcgaggacgcccagagcaaggccgccctgaccgactggctgcgggctaaggccagcttcgtgatcgagggcctgaaggaggccgacaaggacgagttctgcagatgcgagctgaagctgcagaagtggtacggggacctgcggggaaagcccttcgccatcgaagccgagaacagcatcctggacatcagcggcttcagcaagcagtacaactgtgccttcatctggcagaaggacggcgtgaagaagctgaacctgtacctgatcatcaactacttcaagggcggcaagctgcggttcaagaagatcaaacctgaagccttcgaagccaacagattctacaccgtgatcaacaaaaagagcggcgagatcgtgcccatggaggtgaacttcaacttcgacgaccccaacctgatcatcctgcctctggcctttggcaagagacagggcagagaattcatctggaacgacctgctgtccctggaaaccggcagcctgaagctggccaacggaagagtgatcgagaagacactgtacaacagaagaacccggcaggatgagcctgccctgttcgtggccctgaccttcgagcggcgggaggtcctggactcctccaatatcaaaccaatgaacctgatcggcgtggcaagaggcgaaaacatccccgccgtgatcgccctgaccgaccccgagggctgcccactgagccggtttaaggatagcctgggaaacccaacccacatcctgagaatcggcgagagctataaggagaagcagcggaccatccaggccaagaaggaggtggagcagcggagagccggcggctacagccggaagtacgccagcaaagccaagaatctggcagacgatatggtgagaaacaccgctagagatctgctgtactacgccgtgacccaggatgccatgctgatcttcgccaacctgagccggggcttcggccggcagggcaagcggaccttcatggccgagagacagtacacacggatggaggactggctgaccgccaagctggcctacgagggcctgagcaagacctacctgtccaagacactggcccagtacacctccaagacatgcagcaactgtgggtttaccatcaccagcgccgactacgacagggtgctggagaagctgaagaagacagcaacaggctggatgaccacaattaacggcaaggagctgaaggtggagggccagattacctactacaacagatacaagagacagaacgtagtcaaggacctgtccgtcgagctggatagactgagcgaagaatctgtgaacaacgacatctcctcctggacaaagggcagaagcggagaagctctgagcctcctgaagaaaagattctcccatagacccgtgcaggagaagttcgtgtgcctgaactgcggcttcgagacacacgcagccgagcaagccgccctgaacatcgccagatcctggctgttcctgcggagccaggagtacaagaaataccagacaaacaagacaaccggcaacaccgataagagagccttcgtcgagacctggcagtccttttaccggaagaagcttaaggaggtgtggaaacctgccgtgcggtctggcggatctggcggaggctccaccagccccaagaaaaagagaaaagtctaagctgccttctgcggggcttgccttctggccatgcccttcttctctcccttgcacctgtacctcttggtctttgaataaagcctgagtaggaaggctagcaaaaaaaaaaaaaaaaaaaaaaaaaaaaaaaaaaaaaaaaaaaaaaaaaaaaaaaaaaaaaaaaaaaaaaaaaaaaaaaagcccagccggctccccaacctctaccgaggagggcacctctgagtccgccacccccgagagcggccctggcacctccaccgagcccagcgagggcagcgcacccggcagccctgccggcagccccacctccacagaggagggaaccagcaccgagcccagcgaaggcagcgccccaggcaccagcaccgagcctagtgagcaggagattaaacggatcaacaagatcagaagaagacttgtgaaagacagcaacaccaagaaggccggcaagacaggccccatgaaaaccctgctggttagagtgatgacacccgatctgagagagcggctggaaaacctgagaaagaagcctgaaaatatcccccagcccatcagcaatacatctagagccaacctgaataagctgctgaccgattacaccgaaatgaagaaggcgatcctgcatgtgtactgggaagagttccagaaggaccctgtgggcctgatgagccgggtggcccagcctgccagcaagaagatcgatcagaacaagctgaaacctgagatggacgagaagggcaacctgaccaccgccggctttgcctgctctcagtgtggccagcccctgttcgtgtacaagctggagcaggtgtctgagaagggcaaggcttacaccaactacttcggacggtgcaatgtggccgagcacgaaaagctgatcctgctggcccagctgaagcccgagaaggatagcgacgaagccgtgacatatagcctgggaaagtttgggcagagggccctggatttctacagcattcatgtgaccaaggagtccacccaccccgtgaagcccctggcccagatcgccggaaacagatacgcctccggacctgtgggaaaggccctgagcgacgcatgtatgggcacaatcgcctccttcctgtctaagtaccaggacatcatcatcgaacaccagaaggtggtgaagggcaaccagaagagactggagagcctgcgggagctggccggcaaggaaaacctggaataccctagcgtgaccctgccacctcagcctcacaccaaggagggcgttgatgcctacaacgaagtgatcgcccgggtgcgaatgtgggtgaacctgaacctgtggcagaagctgaagctaagcagagatgatgccaagcctctgctgagactgaagggattcccttcctttcctctggtcgagagacaggccaacgaagtggactggtgggacatggtgtgtaacgtgaagaagctgatcaacgagaaaaaggaggatggcaaggtgttttggcagaatctggctggctacaagagacaggaagccctgagaccatacctgagcagcgaggaagatcggaagaagggaaagaaattcgctcggtaccagctgggcgacctgctgctgcacctggaaaagaagcacggcgaggactggggaaaggtgtacgacgaggcctgggagcggattgacaagaaagtggaaggcctgagcaagcacatcaagctggaagaggaacggagaagcgaggacgcccagagcaaggccgccctgaccgactggctgcgggctaaggccagcttcgtgatcgagggcctgaaggaggccgacaaggacgagttctgcagatgcgagctgaagctgcagaagtggtacggggacctgcggggaaagcccttcgccatcgaagccgagaacagcatcctggacatcagcggcttcagcaagcagtacaactgtgccttcatctggcagaaggacggcgtgaagaagctgaacctgtacctgatcatcaactacttcaagggcggcaagctgcggttcaagaagatcaaacctgaagccttcgaagccaacagattctacaccgtgatcaacaaaaagagcggcgagatcgtgcccatggaggtgaacttcaacttcgacgaccccaacctgatcatcctgcctctggcctttggcaagagacagggcagagaattcatctggaacgacctgctgtccctggaaaccggcagcctgaagctggccaacggaagagtgatcgagaagacactgtacaacagaagaacccggcaggatgagcctgccctgttcgtggccctgaccttcgagcggcgggaggtcctggactcctccaatatcaaaccaatgaacctgatcggcgtggcaagaggcgaaaacatccccgccgtgatcgccctgaccgaccccgagggctgcccactgagccggtttaaggatagcctgggaaacccaacccacatcctgagaatcggcgagagctataaggagaagcagcggaccatccaggccaagaaggaggtggagcagcggagagccggcggctacagccggaagtacgccagcaaagccaagaatctggcagacgatatggtgagaaacaccgctagagatctgctgtactacgccgtgacccaggatgccatgctgatcttcgccaacctgagccggggcttcggccggcagggcaagcggaccttcatggccgagagacagtacacacggatggaggactggctgaccgccaagctggcctacgagggcctgagcaagacctacctgtccaagacactggcccagtacacctccaagacatgcagcaactgtgggtttaccatcaccagcgccgactacgacagggtgctggagaagctgaagaagacagcaacaggctggatgaccacaattaacggcaaggagctgaaggtggagggccagattacctactacaacagatacaagagacagaacgtagtcaaggacctgtccgtcgagctggatagactgagcgaagaatctgtgaacaacgacatctcctcctggacaaagggcagaagcggagaagctctgagcctcctgaagaaaagattctcccatagacccgtgcaggagaagttcgtgtgcctgaactgcggcttcgagacacacgcagccgagcaagccgccctgaacatcgccagatcctggctgttcctgcggagccaggagtacaagaaataccagacaaacaagacaaccggcaacaccgataagagagccttcgtcgagacctggcagtccttttaccggaagaagcttaaggaggtgtggaaacctgccgtgcggtctggcggatctggcggaggctccaccagccccaagaaaaagagaaaagtctaagctgccttctgcggggcttgccttctggccatgcccttcttctctcccttgcacctgtacctcttggtctttgaataaagcctgagtaggaaggctagcaaaaaaaaaaaaaaaaaaaaaaaaaaaaaaaaaaaaaaaaaaaaaaaaaaaaaaaaaaaaaaaaaaaaaaaaaaaaaaaa

SEQ ID NO: 10205 - RNA, 8787 nt, synthetic construct
  source 1..8787: mol_type = other RNA
aggaaataagagagaaaagaagagtaagaagaaatataagagccaccatggcccctaagaagaagcgtaaagtgagccggatgaaccacgaccaggagttcgacccccctaaggtgtaccctcccgtccccgccgagaagagaaagcccatccgggtcctgagcctgttcgatggcatcgccaccggtctgctggtgctgaaggacctgggcatccaggtggataggtacattgcctccgaggtgtgcgaggactccatcaccgtgggaatggtgcgtcatcagggcaagatcatgtacgtgggcgacgtgcggagcgtgacacagaagcatatccaggagtggggccctttcgacctggtgatcggcggcagcccttgcaatgacctgagcatcgtgaacccagcccggaagggcctgtacgagggaaccggcagactgttcttcgagttttacagactgctgcacgacgcccggcctaaggaaggcgacgaccggcccttcttttggctgttcgagaatgtggtggccatgggagtcagcgacaagcgggatattagccggttcctggagagcaaccccgtgatgatcgatgccaaggaagtgagcgccgcccaccgggccagatacttctggggcaatctgcctggcatgaacagacccctggccagcaccgtgaacgacaagctggagctgcaggagtgcctggagcacggccggatcgccaagttcagcaaggtgagaaccatcaccacccgaagcaacagcatcaaacaaggcaaggaccagcactttcctgtgttcatgaacgagaaggaggacatcctgtggtgtaccgagatggagagagtgttcgggttcccagtccactacacagatgtcagcaacatgtctagactggccagacagagactgctgggaagaagctggtccgtccctgtgatcagacacctgttcgcccctctgaaggagtacttcgcctgcgtgagcagcggcaacagcaacgccaacagccggggccccagcttctctagcggcctggtgccactgtccctgagagggagccacatgggccccatggagatctacaaaaccgtgagcgcctggaagcggcagcctgtgcgcgtgctgagcctgtttcggaatatcgataaagtcctgaaaagcctgggattcctggagagcggctctggctccggcggtggcaccctgaagtacgtggaggatgtgacaaacgtggtcagacgggatgtggagaagtggggccccttcgatctggtgtacggcagcacccaacccctgggcagctcttgtgaccggtgccctggctggtacatgtttcagttccaccggatcctgcagtacgccctgccgagacaggagtcccagcggccattcttttggattttcatggacaacttgctgctgaccgaggatgaccaggaaactaccactcggttcctgcagaccgaagccgtgaccctgcaggacgtgagaggccgggactaccagaacgccatgcgggtgtggtccaacatccctggactgaaaagcaagcacgcacctctgacccctaaagaagaggagtacctgcaggcccaggtgcggagcagaagcaagctggacgcccctaaggtggatctgctggtgaagaattgcctcctgcccctgagagagtacttcaagtatttcagccagaatagtctgcccctgggaggcagcggcggcggcttccaggtgctggtgagcttcgaggaggtggccgtgctgctgagccaggaggagtggggccacctgggccccgcccagaagaggctgtacagggacgtgatgctggagacctacggcaacctggtgagcctgggcctgcagggcagcaagcccgacgtgatcagcaagctggagcagggcgaggagccctggaccccccacagccccaggatcgagggcagctggatcaggaggaggaggcccggcggcccaagcagcggcgcccctcctcccagcggcggcaggcggcccaagcagcggcgcccctcctcccagcggcggcagcccagccggctccccaacctctaccgaggagggcacctctgagtccgccacccccgagagcggccctggcacctccaccgagcccagcgagggcagcgcacccggcagccctgccggcagccccacctccacagaggagggaaccagcaccgagcccagcgaaggcagcgccccaggcaccagcaccgagcctagtgagcaggagattaaacggatcaacaagatcagaagaagacttgtgaaagacagcaacaccaagaaggccggcaagacaggccccatgaaaaccctgctggttagagtgatgacacccgatctgagagagcggctggaaaacctgagaaagaagcctgaaaatatcccccagcccatcagcaatacatctagagccaacctgaataagctgctgaccgattacaccgaaatgaagaaggcgatcctgcatgtgtactgggaagagttccagaaggaccctgtgggcctgatgagccgggtggcccagcctgccagcaagaagatcgatcagaacaagctgaaacctgagatggacgagaagggcaacctgaccaccgccggctttgcctgctctcagtgtggccagcccctgttcgtgtacaagctggagcaggtgtctgagaagggcaaggcttacaccaactacttcggacggtgcaatgtggccgagcacgaaaagctgatcctgctggcccagctgaagcccgagaaggatagcgacgaagccgtgacatatagcctgggaaagtttgggcagagggccctggatttctacagcattcatgtgaccaaggagtccacccaccccgtgaagcccctggcccagatcgccggaaacagatacgcctccggacctgtgggaaaggccctgagcgacgcatgtatgggcacaatcgcctccttcctgtctaagtaccaggacatcatcatcgaacaccagaaggtggtgaagggcaaccagaagagactggagagcctgcgggagctggccggcaaggaaaacctggaataccctagcgtgaccctgccacctcagcctcacaccaaggagggcgttgatgcctacaacgaagtgatcgcccgggtgcgaatgtgggtgaacctgaacctgtggcagaagctgaagctaagcagagatgatgccaagcctctgctgagactgaagggattcccttcctttcctctggtcgagagacaggccaacgaagtggactggtgggacatggtgtgtaacgtgaagaagctgatcaacgagaaaaaggaggatggcaaggtgttttggcagaatctggctggctacaagagacaggaagccctgagaccatacctgagcagcgaggaagatcggaagaagggaaagaaattcgctcggtaccagctgggcgacctgctgctgcacctggaaaagaagcacggcgaggactggggaaaggtgtacgacgaggcctgggagcggattgacaagaaagtggaaggcctgagcaagcacatcaagctggaagaggaacggagaagcgaggacgcccagagcaaggccgccctgaccgactggctgcgggctaaggccagcttcgtgatcgagggcctgaaggaggccgacaaggacgagttctgcagatgcgagctgaagctgcagaagtggtacggggacctgcggggaaagcccttcgccatcgaagccgagaacagcatcctggacatcagcggcttcagcaagcagtacaactgtgccttcatctggcagaaggacggcgtgaagaagctgaacctgtacctgatcatcaactacttcaagggcggcaagctgcggttcaagaagatcaaacctgaagccttcgaagccaacagattctacaccgtgatcaacaaaaagagcggcgagatcgtgcccatggaggtgaacttcaacttcgacgaccccaacctgatcatcctgcctctggcctttggcaagagacagggcagagaattcatctggaacgacctgctgtccctggaaaccggcagcctgaagctggccaacggaagagtgatcgagaagacactgtacaacagaagaacccggcaggatgagcctgccctgttcgtggccctgaccttcgagcggcgggaggtcctggactcctccaatatcaaaccaatgaacctgatcggcgtggcaagaggcgaaaacatccccgccgtgatcgccctgaccgaccccgagggctgcccactgagccggtttaaggatagcctgggaaacccaacccacatcctgagaatcggcgagagctataaggagaagcagcggaccatccaggccaagaaggaggtggagcagcggagagccggcggctacagccggaagtacgccagcaaagccaagaatctggcagacgatatggtgagaaacaccgctagagatctgctgtactacgccgtgacccaggatgccatgctgatcttcgccaacctgagccggggcttcggccggcagggcaagcggaccttcatggccgagagacagtacacacggatggaggactggctgaccgccaagctggcctacgagggcctgagcaagacctacctgtccaagacactggcccagtacacctccaagacatgcagcaactgtgggtttaccatcaccagcgccgactacgacagggtgctggagaagctgaagaagacagcaacaggctggatgaccacaattaacggcaaggagctgaaggtggagggccagattacctactacaacagatacaagagacagaacgtagtcaaggacctgtccgtcgagctggatagactgagcgaagaatctgtgaacaacgacatctcctcctggacaaagggcagaagcggagaagctctgagcctcctgaagaaaagattctcccatagacccgtgcaggagaagttcgtgtgcctgaactgcggcttcgagacacacgcagccgagcaagccgccctgaacatcgccagatcctggctgttcctgcggagccaggagtacaagaaataccagacaaacaagacaaccggcaacaccgataagagagccttcgtcgagacctggcagtccttttaccggaagaagcttaaggaggtgtggaaacctgccgtgcggtctggcggatctggcggaggctccaccagccccaagaaaaagagaaaagtctaagctgccttctgcggggcttgccttctggccatgcccttcttctctcccttgcacctgtacctcttggtctttgaataaagcctgagtaggaaggctagcaaaaaaaaaaaaaaaaaaaaaaaaaaaaaaaaaaaaaaaaaaaaaaaaaaaaaaaaaaaaaaaaaaaaaaaaaaaaaaaagcccagccggctccccaacctctaccgaggagggcacctctgagtccgccacccccgagagcggccctggcacctccaccgagcccagcgagggcagcgcacccggcagccctgccggcagccccacctccacagaggagggaaccagcaccgagcccagcgaaggcagcgccccaggcaccagcaccgagcctagtgagcaggagattaaacggatcaacaagatcagaagaagacttgtgaaagacagcaacaccaagaaggccggcaagacaggccccatgaaaaccctgctggttagagtgatgacacccgatctgagagagcggctggaaaacctgagaaagaagcctgaaaatatcccccagcccatcagcaatacatctagagccaacctgaataagctgctgaccgattacaccgaaatgaagaaggcgatcctgcatgtgtactgggaagagttccagaaggaccctgtgggcctgatgagccgggtggcccagcctgccagcaagaagatcgatcagaacaagctgaaacctgagatggacgagaagggcaacctgaccaccgccggctttgcctgctctcagtgtggccagcccctgttcgtgtacaagctggagcaggtgtctgagaagggcaaggcttacaccaactacttcggacggtgcaatgtggccgagcacgaaaagctgatcctgctggcccagctgaagcccgagaaggatagcgacgaagccgtgacatatagcctgggaaagtttgggcagagggccctggatttctacagcattcatgtgaccaaggagtccacccaccccgtgaagcccctggcccagatcgccggaaacagatacgcctccggacctgtgggaaaggccctgagcgacgcatgtatgggcacaatcgcctccttcctgtctaagtaccaggacatcatcatcgaacaccagaaggtggtgaagggcaaccagaagagactggagagcctgcgggagctggccggcaaggaaaacctggaataccctagcgtgaccctgccacctcagcctcacaccaaggagggcgttgatgcctacaacgaagtgatcgcccgggtgcgaatgtgggtgaacctgaacctgtggcagaagctgaagctaagcagagatgatgccaagcctctgctgagactgaagggattcccttcctttcctctggtcgagagacaggccaacgaagtggactggtgggacatggtgtgtaacgtgaagaagctgatcaacgagaaaaaggaggatggcaaggtgttttggcagaatctggctggctacaagagacaggaagccctgagaccatacctgagcagcgaggaagatcggaagaagggaaagaaattcgctcggtaccagctgggcgacctgctgctgcacctggaaaagaagcacggcgaggactggggaaaggtgtacgacgaggcctgggagcggattgacaagaaagtggaaggcctgagcaagcacatcaagctggaagaggaacggagaagcgaggacgcccagagcaaggccgccctgaccgactggctgcgggctaaggccagcttcgtgatcgagggcctgaaggaggccgacaaggacgagttctgcagatgcgagctgaagctgcagaagtggtacggggacctgcggggaaagcccttcgccatcgaagccgagaacagcatcctggacatcagcggcttcagcaagcagtacaactgtgccttcatctggcagaaggacggcgtgaagaagctgaacctgtacctgatcatcaactacttcaagggcggcaagctgcggttcaagaagatcaaacctgaagccttcgaagccaacagattctacaccgtgatcaacaaaaagagcggcgagatcgtgcccatggaggtgaacttcaacttcgacgaccccaacctgatcatcctgcctctggcctttggcaagagacagggcagagaattcatctggaacgacctgctgtccctggaaaccggcagcctgaagctggccaacggaagagtgatcgagaagacactgtacaacagaagaacccggcaggatgagcctgccctgttcgtggccctgaccttcgagcggcgggaggtcctggactcctccaatatcaaaccaatgaacctgatcggcgtggcaagaggcgaaaacatccccgccgtgatcgccctgaccgaccccgagggctgcccactgagccggtttaaggatagcctgggaaacccaacccacatcctgagaatcggcgagagctataaggagaagcagcggaccatccaggccaagaaggaggtggagcagcggagagccggcggctacagccggaagtacgccagcaaagccaagaatctggcagacgatatggtgagaaacaccgctagagatctgctgtactacgccgtgacccaggatgccatgctgatcttcgccaacctgagccggggcttcggccggcagggcaagcggaccttcatggccgagagacagtacacacggatggaggactggctgaccgccaagctggcctacgagggcctgagcaagacctacctgtccaagacactggcccagtacacctccaagacatgcagcaactgtgggtttaccatcaccagcgccgactacgacagggtgctggagaagctgaagaagacagcaacaggctggatgaccacaattaacggcaaggagctgaaggtggagggccagattacctactacaacagatacaagagacagaacgtagtcaaggacctgtccgtcgagctggatagactgagcgaagaatctgtgaacaacgacatctcctcctggacaaagggcagaagcggagaagctctgagcctcctgaagaaaagattctcccatagacccgtgcaggagaagttcgtgtgcctgaactgcggcttcgagacacacgcagccgagcaagccgccctgaacatcgccagatcctggctgttcctgcggagccaggagtacaagaaataccagacaaacaagacaaccggcaacaccgataagagagccttcgtcgagacctggcagtccttttaccggaagaagcttaaggaggtgtggaaacctgccgtgcggtctggcggatctggcggaggctccaccagccccaagaaaaagagaaaagtctaagctgccttctgcggggcttgccttctggccatgcccttcttctctcccttgcacctgtacctcttggtctttgaataaagcctgagtaggaaggctagcaaaaaaaaaaaaaaaaaaaaaaaaaaaaaaaaaaaaaaaaaaaaaaaaaaaaaaaaaaaaaaaaaaaaaaaaaaaaaaaa

SEQ ID NO: 10206 - RNA, 8787 nt, synthetic construct
  source 1..8787: mol_type = other RNA
aggaaataagagagaaaagaagagtaagaagaaatataagagccaccatggcccctaagaagaagcgtaaagtgagccggatgaaccacgaccaggagttcgacccccctaaggtgtaccctcccgtccccgccgagaagagaaagcccatccgggtcctgagcctgttcgatggcatcgccaccggtctgctggtgctgaaggacctgggcatccaggtggataggtacattgcctccgaggtgtgcgaggactccatcaccgtgggaatggtgcgtcatcagggcaagatcatgtacgtgggcgacgtgcggagcgtgacacagaagcatatccaggagtggggccctttcgacctggtgatcggcggcagcccttgcaatgacctgagcatcgtgaacccagcccggaagggcctgtacgagggaaccggcagactgttcttcgagttttacagactgctgcacgacgcccggcctaaggaaggcgacgaccggcccttcttttggctgttcgagaatgtggtggccatgggagtcagcgacaagcgggatattagccggttcctggagagcaaccccgtgatgatcgatgccaaggaagtgagcgccgcccaccgggccagatacttctggggcaatctgcctggcatgaacagacccctggccagcaccgtgaacgacaagctggagctgcaggagtgcctggagcacggccggatcgccaagttcagcaaggtgagaaccatcaccacccgaagcaacagcatcaaacaaggcaaggaccagcactttcctgtgttcatgaacgagaaggaggacatcctgtggtgtaccgagatggagagagtgttcgggttcccagtccactacacagatgtcagcaacatgtctagactggccagacagagactgctgggaagaagctggtccgtccctgtgatcagacacctgttcgcccctctgaaggagtacttcgcctgcgtgagcagcggcaacagcaacgccaacagccggggccccagcttctctagcggcctggtgccactgtccctgagagggagccacatgggccccatggagatctacaaaaccgtgagcgcctggaagcggcagcctgtgcgcgtgctgagcctgtttcggaatatcgataaagtcctgaaaagcctgggattcctggagagcggctctggctccggcggtggcaccctgaagtacgtggaggatgtgacaaacgtggtcagacgggatgtggagaagtggggccccttcgatctggtgtacggcagcacccaacccctgggcagctcttgtgaccggtgccctggctggtacatgtttcagttccaccggatcctgcagtacgccctgccgagacaggagtcccagcggccattcttttggattttcatggacaacttgctgctgaccgaggatgaccaggaaactaccactcggttcctgcagaccgaagccgtgaccctgcaggacgtgagaggccgggactaccagaacgccatgcgggtgtggtccaacatccctggactgaaaagcaagcacgcacctctgacccctaaagaagaggagtacctgcaggcccaggtgcggagcagaagcaagctggacgcccctaaggtggatctgctggtgaagaattgcctcctgcccctgagagagtacttcaagtatttcagccagaatagtctgcccctgggaggcagcggcggcggcatccaggagcccgtgaccttcaaggacgtggccgtggacttcacccaggaggagtggggccagctggacagcgtgcagaggaccctgtacagggacgtgatgctggagacctacggccacctgctgagcgtgggcaaccacatcgccaagcccgaggtgatcagcctgctggagcagggcgaggagccctggagcgtggagcaggcctacccccagagcacctgccccgagtggatgaggaacggcggcccaagcagcggcgcccctcctcccagcggcggcaggcggcccaagcagcggcgcccctcctcccagcggcggcagcccagccggctccccaacctctaccgaggagggcacctctgagtccgccacccccgagagcggccctggcacctccaccgagcccagcgagggcagcgcacccggcagccctgccggcagccccacctccacagaggagggaaccagcaccgagcccagcgaaggcagcgccccaggcaccagcaccgagcctagtgagcaggagattaaacggatcaacaagatcagaagaagacttgtgaaagacagcaacaccaagaaggccggcaagacaggccccatgaaaaccctgctggttagagtgatgacacccgatctgagagagcggctggaaaacctgagaaagaagcctgaaaatatcccccagcccatcagcaatacatctagagccaacctgaataagctgctgaccgattacaccgaaatgaagaaggcgatcctgcatgtgtactgggaagagttccagaaggaccctgtgggcctgatgagccgggtggcccagcctgccagcaagaagatcgatcagaacaagctgaaacctgagatggacgagaagggcaacctgaccaccgccggctttgcctgctctcagtgtggccagcccctgttcgtgtacaagctggagcaggtgtctgagaagggcaaggcttacaccaactacttcggacggtgcaatgtggccgagcacgaaaagctgatcctgctggcccagctgaagcccgagaaggatagcgacgaagccgtgacatatagcctgggaaagtttgggcagagggccctggatttctacagcattcatgtgaccaaggagtccacccaccccgtgaagcccctggcccagatcgccggaaacagatacgcctccggacctgtgggaaaggccctgagcgacgcatgtatgggcacaatcgcctccttcctgtctaagtaccaggacatcatcatcgaacaccagaaggtggtgaagggcaaccagaagagactggagagcctgcgggagctggccggcaaggaaaacctggaataccctagcgtgaccctgccacctcagcctcacaccaaggagggcgttgatgcctacaacgaagtgatcgcccgggtgcgaatgtgggtgaacctgaacctgtggcagaagctgaagctaagcagagatgatgccaagcctctgctgagactgaagggattcccttcctttcctctggtcgagagacaggccaacgaagtggactggtgggacatggtgtgtaacgtgaagaagctgatcaacgagaaaaaggaggatggcaaggtgttttggcagaatctggctggctacaagagacaggaagccctgagaccatacctgagcagcgaggaagatcggaagaagggaaagaaattcgctcggtaccagctgggcgacctgctgctgcacctggaaaagaagcacggcgaggactggggaaaggtgtacgacgaggcctgggagcggattgacaagaaagtggaaggcctgagcaagcacatcaagctggaagaggaacggagaagcgaggacgcccagagcaaggccgccctgaccgactggctgcgggctaaggccagcttcgtgatcgagggcctgaaggaggccgacaaggacgagttctgcagatgcgagctgaagctgcagaagtggtacggggacctgcggggaaagcccttcgccatcgaagccgagaacagcatcctggacatcagcggcttcagcaagcagtacaactgtgccttcatctggcagaaggacggcgtgaagaagctgaacctgtacctgatcatcaactacttcaagggcggcaagctgcggttcaagaagatcaaacctgaagccttcgaagccaacagattctacaccgtgatcaacaaaaagagcggcgagatcgtgcccatggaggtgaacttcaacttcgacgaccccaacctgatcatcctgcctctggcctttggcaagagacagggcagagaattcatctggaacgacctgctgtccctggaaaccggcagcctgaagctggccaacggaagagtgatcgagaagacactgtacaacagaagaacccggcaggatgagcctgccctgttcgtggccctgaccttcgagcggcgggaggtcctggactcctccaatatcaaaccaatgaacctgatcggcgtggcaagaggcgaaaacatccccgccgtgatcgccctgaccgaccccgagggctgcccactgagccggtttaaggatagcctgggaaacccaacccacatcctgagaatcggcgagagctataaggagaagcagcggaccatccaggccaagaaggaggtggagcagcggagagccggcggctacagccggaagtacgccagcaaagccaagaatctggcagacgatatggtgagaaacaccgctagagatctgctgtactacgccgtgacccaggatgccatgctgatcttcgccaacctgagccggggcttcggccggcagggcaagcggaccttcatggccgagagacagtacacacggatggaggactggctgaccgccaagctggcctacgagggcctgagcaagacctacctgtccaagacactggcccagtacacctccaagacatgcagcaactgtgggtttaccatcaccagcgccgactacgacagggtgctggagaagctgaagaagacagcaacaggctggatgaccacaattaacggcaaggagctgaaggtggagggccagattacctactacaacagatacaagagacagaacgtagtcaaggacctgtccgtcgagctggatagactgagcgaagaatctgtgaacaacgacatctcctcctggacaaagggcagaagcggagaagctctgagcctcctgaagaaaagattctcccatagacccgtgcaggagaagttcgtgtgcctgaactgcggcttcgagacacacgcagccgagcaagccgccctgaacatcgccagatcctggctgttcctgcggagccaggagtacaagaaataccagacaaacaagacaaccggcaacaccgataagagagccttcgtcgagacctggcagtccttttaccggaagaagcttaaggaggtgtggaaacctgccgtgcggtctggcggatctggcggaggctccaccagccccaagaaaaagagaaaagtctaagctgccttctgcggggcttgccttctggccatgcccttcttctctcccttgcacctgtacctcttggtctttgaataaagcctgagtaggaaggctagcaaaaaaaaaaaaaaaaaaaaaaaaaaaaaaaaaaaaaaaaaaaaaaaaaaaaaaaaaaaaaaaaaaaaaaaaaaaaaaaagcccagccggctccccaacctctaccgaggagggcacctctgagtccgccacccccgagagcggccctggcacctccaccgagcccagcgagggcagcgcacccggcagccctgccggcagccccacctccacagaggagggaaccagcaccgagcccagcgaaggcagcgccccaggcaccagcaccgagcctagtgagcaggagattaaacggatcaacaagatcagaagaagacttgtgaaagacagcaacaccaagaaggccggcaagacaggccccatgaaaaccctgctggttagagtgatgacacccgatctgagagagcggctggaaaacctgagaaagaagcctgaaaatatcccccagcccatcagcaatacatctagagccaacctgaataagctgctgaccgattacaccgaaatgaagaaggcgatcctgcatgtgtactgggaagagttccagaaggaccctgtgggcctgatgagccgggtggcccagcctgccagcaagaagatcgatcagaacaagctgaaacctgagatggacgagaagggcaacctgaccaccgccggctttgcctgctctcagtgtggccagcccctgttcgtgtacaagctggagcaggtgtctgagaagggcaaggcttacaccaactacttcggacggtgcaatgtggccgagcacgaaaagctgatcctgctggcccagctgaagcccgagaaggatagcgacgaagccgtgacatatagcctgggaaagtttgggcagagggccctggatttctacagcattcatgtgaccaaggagtccacccaccccgtgaagcccctggcccagatcgccggaaacagatacgcctccggacctgtgggaaaggccctgagcgacgcatgtatgggcacaatcgcctccttcctgtctaagtaccaggacatcatcatcgaacaccagaaggtggtgaagggcaaccagaagagactggagagcctgcgggagctggccggcaaggaaaacctggaataccctagcgtgaccctgccacctcagcctcacaccaaggagggcgttgatgcctacaacgaagtgatcgcccgggtgcgaatgtgggtgaacctgaacctgtggcagaagctgaagctaagcagagatgatgccaagcctctgctgagactgaagggattcccttcctttcctctggtcgagagacaggccaacgaagtggactggtgggacatggtgtgtaacgtgaagaagctgatcaacgagaaaaaggaggatggcaaggtgttttggcagaatctggctggctacaagagacaggaagccctgagaccatacctgagcagcgaggaagatcggaagaagggaaagaaattcgctcggtaccagctgggcgacctgctgctgcacctggaaaagaagcacggcgaggactggggaaaggtgtacgacgaggcctgggagcggattgacaagaaagtggaaggcctgagcaagcacatcaagctggaagaggaacggagaagcgaggacgcccagagcaaggccgccctgaccgactggctgcgggctaaggccagcttcgtgatcgagggcctgaaggaggccgacaaggacgagttctgcagatgcgagctgaagctgcagaagtggtacggggacctgcggggaaagcccttcgccatcgaagccgagaacagcatcctggacatcagcggcttcagcaagcagtacaactgtgccttcatctggcagaaggacggcgtgaagaagctgaacctgtacctgatcatcaactacttcaagggcggcaagctgcggttcaagaagatcaaacctgaagccttcgaagccaacagattctacaccgtgatcaacaaaaagagcggcgagatcgtgcccatggaggtgaacttcaacttcgacgaccccaacctgatcatcctgcctctggcctttggcaagagacagggcagagaattcatctggaacgacctgctgtccctggaaaccggcagcctgaagctggccaacggaagagtgatcgagaagacactgtacaacagaagaacccggcaggatgagcctgccctgttcgtggccctgaccttcgagcggcgggaggtcctggactcctccaatatcaaaccaatgaacctgatcggcgtggcaagaggcgaaaacatccccgccgtgatcgccctgaccgaccccgagggctgcccactgagccggtttaaggatagcctgggaaacccaacccacatcctgagaatcggcgagagctataaggagaagcagcggaccatccaggccaagaaggaggtggagcagcggagagccggcggctacagccggaagtacgccagcaaagccaagaatctggcagacgatatggtgagaaacaccgctagagatctgctgtactacgccgtgacccaggatgccatgctgatcttcgccaacctgagccggggcttcggccggcagggcaagcggaccttcatggccgagagacagtacacacggatggaggactggctgaccgccaagctggcctacgagggcctgagcaagacctacctgtccaagacactggcccagtacacctccaagacatgcagcaactgtgggtttaccatcaccagcgccgactacgacagggtgctggagaagctgaagaagacagcaacaggctggatgaccacaattaacggcaaggagctgaaggtggagggccagattacctactacaacagatacaagagacagaacgtagtcaaggacctgtccgtcgagctggatagactgagcgaagaatctgtgaacaacgacatctcctcctggacaaagggcagaagcggagaagctctgagcctcctgaagaaaagattctcccatagacccgtgcaggagaagttcgtgtgcctgaactgcggcttcgagacacacgcagccgagcaagccgccctgaacatcgccagatcctggctgttcctgcggagccaggagtacaagaaataccagacaaacaagacaaccggcaacaccgataagagagccttcgtcgagacctggcagtccttttaccggaagaagcttaaggaggtgtggaaacctgccgtgcggtctggcggatctggcggaggctccaccagccccaagaaaaagagaaaagtctaagctgccttctgcggggcttgccttctggccatgcccttcttctctcccttgcacctgtacctcttggtctttgaataaagcctgagtaggaaggctagcaaaaaaaaaaaaaaaaaaaaaaaaaaaaaaaaaaaaaaaaaaaaaaaaaaaaaaaaaaaaaaaaaaaaaaaaaaaaaaaa

SEQ ID NO: 10207 - RNA, 8787 nt, synthetic construct
  source 1..8787: mol_type = other RNA
aggaaataagagagaaaagaagagtaagaagaaatataagagccaccatggcccctaagaagaagcgtaaagtgagccggatgaaccacgaccaggagttcgacccccctaaggtgtaccctcccgtccccgccgagaagagaaagcccatccgggtcctgagcctgttcgatggcatcgccaccggtctgctggtgctgaaggacctgggcatccaggtggataggtacattgcctccgaggtgtgcgaggactccatcaccgtgggaatggtgcgtcatcagggcaagatcatgtacgtgggcgacgtgcggagcgtgacacagaagcatatccaggagtggggccctttcgacctggtgatcggcggcagcccttgcaatgacctgagcatcgtgaacccagcccggaagggcctgtacgagggaaccggcagactgttcttcgagttttacagactgctgcacgacgcccggcctaaggaaggcgacgaccggcccttcttttggctgttcgagaatgtggtggccatgggagtcagcgacaagcgggatattagccggttcctggagagcaaccccgtgatgatcgatgccaaggaagtgagcgccgcccaccgggccagatacttctggggcaatctgcctggcatgaacagacccctggccagcaccgtgaacgacaagctggagctgcaggagtgcctggagcacggccggatcgccaagttcagcaaggtgagaaccatcaccacccgaagcaacagcatcaaacaaggcaaggaccagcactttcctgtgttcatgaacgagaaggaggacatcctgtggtgtaccgagatggagagagtgttcgggttcccagtccactacacagatgtcagcaacatgtctagactggccagacagagactgctgggaagaagctggtccgtccctgtgatcagacacctgttcgcccctctgaaggagtacttcgcctgcgtgagcagcggcaacagcaacgccaacagccggggccccagcttctctagcggcctggtgccactgtccctgagagggagccacatgggccccatggagatctacaaaaccgtgagcgcctggaagcggcagcctgtgcgcgtgctgagcctgtttcggaatatcgataaagtcctgaaaagcctgggattcctggagagcggctctggctccggcggtggcaccctgaagtacgtggaggatgtgacaaacgtggtcagacgggatgtggagaagtggggccccttcgatctggtgtacggcagcacccaacccctgggcagctcttgtgaccggtgccctggctggtacatgtttcagttccaccggatcctgcagtacgccctgccgagacaggagtcccagcggccattcttttggattttcatggacaacttgctgctgaccgaggatgaccaggaaactaccactcggttcctgcagaccgaagccgtgaccctgcaggacgtgagaggccgggactaccagaacgccatgcgggtgtggtccaacatccctggactgaaaagcaagcacgcacctctgacccctaaagaagaggagtacctgcaggcccaggtgcggagcagaagcaagctggacgcccctaaggtggatctgctggtgaagaattgcctcctgcccctgagagagtacttcaagtatttcagccagaatagtctgcccctgggaggcagcggcggcggccacaagaagagcatggtgttcagcgacgtgagcctggacttcagccaggaggagtgggagtgcctgggccccgcccagaaggacctgtacagggacgtgatgctggagaactacagccacctgctgagcgtggccggcctgcacatccccaagccccaggtgatcagcctgctggagcagggcaaggagccctggatgatcggcaaggagctgaccaggggcctgtgcagcgccctggagagcggcggcccaagcagcggcgcccctcctcccagcggcggcaggcggcccaagcagcggcgcccctcctcccagcggcggcagcccagccggctccccaacctctaccgaggagggcacctctgagtccgccacccccgagagcggccctggcacctccaccgagcccagcgagggcagcgcacccggcagccctgccggcagccccacctccacagaggagggaaccagcaccgagcccagcgaaggcagcgccccaggcaccagcaccgagcctagtgagcaggagattaaacggatcaacaagatcagaagaagacttgtgaaagacagcaacaccaagaaggccggcaagacaggccccatgaaaaccctgctggttagagtgatgacacccgatctgagagagcggctggaaaacctgagaaagaagcctgaaaatatcccccagcccatcagcaatacatctagagccaacctgaataagctgctgaccgattacaccgaaatgaagaaggcgatcctgcatgtgtactgggaagagttccagaaggaccctgtgggcctgatgagccgggtggcccagcctgccagcaagaagatcgatcagaacaagctgaaacctgagatggacgagaagggcaacctgaccaccgccggctttgcctgctctcagtgtggccagcccctgttcgtgtacaagctggagcaggtgtctgagaagggcaaggcttacaccaactacttcggacggtgcaatgtggccgagcacgaaaagctgatcctgctggcccagctgaagcccgagaaggatagcgacgaagccgtgacatatagcctgggaaagtttgggcagagggccctggatttctacagcattcatgtgaccaaggagtccacccaccccgtgaagcccctggcccagatcgccggaaacagatacgcctccggacctgtgggaaaggccctgagcgacgcatgtatgggcacaatcgcctccttcctgtctaagtaccaggacatcatcatcgaacaccagaaggtggtgaagggcaaccagaagagactggagagcctgcgggagctggccggcaaggaaaacctggaataccctagcgtgaccctgccacctcagcctcacaccaaggagggcgttgatgcctacaacgaagtgatcgcccgggtgcgaatgtgggtgaacctgaacctgtggcagaagctgaagctaagcagagatgatgccaagcctctgctgagactgaagggattcccttcctttcctctggtcgagagacaggccaacgaagtggactggtgggacatggtgtgtaacgtgaagaagctgatcaacgagaaaaaggaggatggcaaggtgttttggcagaatctggctggctacaagagacaggaagccctgagaccatacctgagcagcgaggaagatcggaagaagggaaagaaattcgctcggtaccagctgggcgacctgctgctgcacctggaaaagaagcacggcgaggactggggaaaggtgtacgacgaggcctgggagcggattgacaagaaagtggaaggcctgagcaagcacatcaagctggaagaggaacggagaagcgaggacgcccagagcaaggccgccctgaccgactggctgcgggctaaggccagcttcgtgatcgagggcctgaaggaggccgacaaggacgagttctgcagatgcgagctgaagctgcagaagtggtacggggacctgcggggaaagcccttcgccatcgaagccgagaacagcatcctggacatcagcggcttcagcaagcagtacaactgtgccttcatctggcagaaggacggcgtgaagaagctgaacctgtacctgatcatcaactacttcaagggcggcaagctgcggttcaagaagatcaaacctgaagccttcgaagccaacagattctacaccgtgatcaacaaaaagagcggcgagatcgtgcccatggaggtgaacttcaacttcgacgaccccaacctgatcatcctgcctctggcctttggcaagagacagggcagagaattcatctggaacgacctgctgtccctggaaaccggcagcctgaagctggccaacggaagagtgatcgagaagacactgtacaacagaagaacccggcaggatgagcctgccctgttcgtggccctgaccttcgagcggcgggaggtcctggactcctccaatatcaaaccaatgaacctgatcggcgtggcaagaggcgaaaacatccccgccgtgatcgccctgaccgaccccgagggctgcccactgagccggtttaaggatagcctgggaaacccaacccacatcctgagaatcggcgagagctataaggagaagcagcggaccatccaggccaagaaggaggtggagcagcggagagccggcggctacagccggaagtacgccagcaaagccaagaatctggcagacgatatggtgagaaacaccgctagagatctgctgtactacgccgtgacccaggatgccatgctgatcttcgccaacctgagccggggcttcggccggcagggcaagcggaccttcatggccgagagacagtacacacggatggaggactggctgaccgccaagctggcctacgagggcctgagcaagacctacctgtccaagacactggcccagtacacctccaagacatgcagcaactgtgggtttaccatcaccagcgccgactacgacagggtgctggagaagctgaagaagacagcaacaggctggatgaccacaattaacggcaaggagctgaaggtggagggccagattacctactacaacagatacaagagacagaacgtagtcaaggacctgtccgtcgagctggatagactgagcgaagaatctgtgaacaacgacatctcctcctggacaaagggcagaagcggagaagctctgagcctcctgaagaaaagattctcccatagacccgtgcaggagaagttcgtgtgcctgaactgcggcttcgagacacacgcagccgagcaagccgccctgaacatcgccagatcctggctgttcctgcggagccaggagtacaagaaataccagacaaacaagacaaccggcaacaccgataagagagccttcgtcgagacctggcagtccttttaccggaagaagcttaaggaggtgtggaaacctgccgtgcggtctggcggatctggcggaggctccaccagccccaagaaaaagagaaaagtctaagctgccttctgcggggcttgccttctggccatgcccttcttctctcccttgcacctgtacctcttggtctttgaataaagcctgagtaggaaggctagcaaaaaaaaaaaaaaaaaaaaaaaaaaaaaaaaaaaaaaaaaaaaaaaaaaaaaaaaaaaaaaaaaaaaaaaaaaaaaaaagcccagccggctccccaacctctaccgaggagggcacctctgagtccgccacccccgagagcggccctggcacctccaccgagcccagcgagggcagcgcacccggcagccctgccggcagccccacctccacagaggagggaaccagcaccgagcccagcgaaggcagcgccccaggcaccagcaccgagcctagtgagcaggagattaaacggatcaacaagatcagaagaagacttgtgaaagacagcaacaccaagaaggccggcaagacaggccccatgaaaaccctgctggttagagtgatgacacccgatctgagagagcggctggaaaacctgagaaagaagcctgaaaatatcccccagcccatcagcaatacatctagagccaacctgaataagctgctgaccgattacaccgaaatgaagaaggcgatcctgcatgtgtactgggaagagttccagaaggaccctgtgggcctgatgagccgggtggcccagcctgccagcaagaagatcgatcagaacaagctgaaacctgagatggacgagaagggcaacctgaccaccgccggctttgcctgctctcagtgtggccagcccctgttcgtgtacaagctggagcaggtgtctgagaagggcaaggcttacaccaactacttcggacggtgcaatgtggccgagcacgaaaagctgatcctgctggcccagctgaagcccgagaaggatagcgacgaagccgtgacatatagcctgggaaagtttgggcagagggccctggatttctacagcattcatgtgaccaaggagtccacccaccccgtgaagcccctggcccagatcgccggaaacagatacgcctccggacctgtgggaaaggccctgagcgacgcatgtatgggcacaatcgcctccttcctgtctaagtaccaggacatcatcatcgaacaccagaaggtggtgaagggcaaccagaagagactggagagcctgcgggagctggccggcaaggaaaacctggaataccctagcgtgaccctgccacctcagcctcacaccaaggagggcgttgatgcctacaacgaagtgatcgcccgggtgcgaatgtgggtgaacctgaacctgtggcagaagctgaagctaagcagagatgatgccaagcctctgctgagactgaagggattcccttcctttcctctggtcgagagacaggccaacgaagtggactggtgggacatggtgtgtaacgtgaagaagctgatcaacgagaaaaaggaggatggcaaggtgttttggcagaatctggctggctacaagagacaggaagccctgagaccatacctgagcagcgaggaagatcggaagaagggaaagaaattcgctcggtaccagctgggcgacctgctgctgcacctggaaaagaagcacggcgaggactggggaaaggtgtacgacgaggcctgggagcggattgacaagaaagtggaaggcctgagcaagcacatcaagctggaagaggaacggagaagcgaggacgcccagagcaaggccgccctgaccgactggctgcgggctaaggccagcttcgtgatcgagggcctgaaggaggccgacaaggacgagttctgcagatgcgagctgaagctgcagaagtggtacggggacctgcggggaaagcccttcgccatcgaagccgagaacagcatcctggacatcagcggcttcagcaagcagtacaactgtgccttcatctggcagaaggacggcgtgaagaagctgaacctgtacctgatcatcaactacttcaagggcggcaagctgcggttcaagaagatcaaacctgaagccttcgaagccaacagattctacaccgtgatcaacaaaaagagcggcgagatcgtgcccatggaggtgaacttcaacttcgacgaccccaacctgatcatcctgcctctggcctttggcaagagacagggcagagaattcatctggaacgacctgctgtccctggaaaccggcagcctgaagctggccaacggaagagtgatcgagaagacactgtacaacagaagaacccggcaggatgagcctgccctgttcgtggccctgaccttcgagcggcgggaggtcctggactcctccaatatcaaaccaatgaacctgatcggcgtggcaagaggcgaaaacatccccgccgtgatcgccctgaccgaccccgagggctgcccactgagccggtttaaggatagcctgggaaacccaacccacatcctgagaatcggcgagagctataaggagaagcagcggaccatccaggccaagaaggaggtggagcagcggagagccggcggctacagccggaagtacgccagcaaagccaagaatctggcagacgatatggtgagaaacaccgctagagatctgctgtactacgccgtgacccaggatgccatgctgatcttcgccaacctgagccggggcttcggccggcagggcaagcggaccttcatggccgagagacagtacacacggatggaggactggctgaccgccaagctggcctacgagggcctgagcaagacctacctgtccaagacactggcccagtacacctccaagacatgcagcaactgtgggtttaccatcaccagcgccgactacgacagggtgctggagaagctgaagaagacagcaacaggctggatgaccacaattaacggcaaggagctgaaggtggagggccagattacctactacaacagatacaagagacagaacgtagtcaaggacctgtccgtcgagctggatagactgagcgaagaatctgtgaacaacgacatctcctcctggacaaagggcagaagcggagaagctctgagcctcctgaagaaaagattctcccatagacccgtgcaggagaagttcgtgtgcctgaactgcggcttcgagacacacgcagccgagcaagccgccctgaacatcgccagatcctggctgttcctgcggagccaggagtacaagaaataccagacaaacaagacaaccggcaacaccgataagagagccttcgtcgagacctggcagtccttttaccggaagaagcttaaggaggtgtggaaacctgccgtgcggtctggcggatctggcggaggctccaccagccccaagaaaaagagaaaagtctaagctgccttctgcggggcttgccttctggccatgcccttcttctctcccttgcacctgtacctcttggtctttgaataaagcctgagtaggaaggctagcaaaaaaaaaaaaaaaaaaaaaaaaaaaaaaaaaaaaaaaaaaaaaaaaaaaaaaaaaaaaaaaaaaaaaaaaaaaaaaaa

SEQ ID NO: 10208 - RNA, 8787 nt, synthetic construct
  source 1..8787: mol_type = other RNA
aggaaataagagagaaaagaagagtaagaagaaatataagagccaccatggcccctaagaagaagcgtaaagtgagccggatgaaccacgaccaggagttcgacccccctaaggtgtaccctcccgtccccgccgagaagagaaagcccatccgggtcctgagcctgttcgatggcatcgccaccggtctgctggtgctgaaggacctgggcatccaggtggataggtacattgcctccgaggtgtgcgaggactccatcaccgtgggaatggtgcgtcatcagggcaagatcatgtacgtgggcgacgtgcggagcgtgacacagaagcatatccaggagtggggccctttcgacctggtgatcggcggcagcccttgcaatgacctgagcatcgtgaacccagcccggaagggcctgtacgagggaaccggcagactgttcttcgagttttacagactgctgcacgacgcccggcctaaggaaggcgacgaccggcccttcttttggctgttcgagaatgtggtggccatgggagtcagcgacaagcgggatattagccggttcctggagagcaaccccgtgatgatcgatgccaaggaagtgagcgccgcccaccgggccagatacttctggggcaatctgcctggcatgaacagacccctggccagcaccgtgaacgacaagctggagctgcaggagtgcctggagcacggccggatcgccaagttcagcaaggtgagaaccatcaccacccgaagcaacagcatcaaacaaggcaaggaccagcactttcctgtgttcatgaacgagaaggaggacatcctgtggtgtaccgagatggagagagtgttcgggttcccagtccactacacagatgtcagcaacatgtctagactggccagacagagactgctgggaagaagctggtccgtccctgtgatcagacacctgttcgcccctctgaaggagtacttcgcctgcgtgagcagcggcaacagcaacgccaacagccggggccccagcttctctagcggcctggtgccactgtccctgagagggagccacatgggccccatggagatctacaaaaccgtgagcgcctggaagcggcagcctgtgcgcgtgctgagcctgtttcggaatatcgataaagtcctgaaaagcctgggattcctggagagcggctctggctccggcggtggcaccctgaagtacgtggaggatgtgacaaacgtggtcagacgggatgtggagaagtggggccccttcgatctggtgtacggcagcacccaacccctgggcagctcttgtgaccggtgccctggctggtacatgtttcagttccaccggatcctgcagtacgccctgccgagacaggagtcccagcggccattcttttggattttcatggacaacttgctgctgaccgaggatgaccaggaaactaccactcggttcctgcagaccgaagccgtgaccctgcaggacgtgagaggccgggactaccagaacgccatgcgggtgtggtccaacatccctggactgaaaagcaagcacgcacctctgacccctaaagaagaggagtacctgcaggcccaggtgcggagcagaagcaagctggacgcccctaaggtggatctgctggtgaagaattgcctcctgcccctgagagagtacttcaagtatttcagccagaatagtctgcccctgggaggcagcggcggcggcttccagatccccgtgaccttcgaggaggtggccgtgtacttcacccagggccagggcgccctgctggaccccgcccagagggccctgtacagggacgtgatgcaggagaactacgagaccgtgaccagcctgggcttccccatccccaagcccgacctgatcgccaggctggagaggggcgaggagccctgggtgctggacctgcaggccagcgacgagagcgtgagcctgaggggcacctgcggcggcccaagcagcggcgcccctcctcccagcggcggcaggcggcccaagcagcggcgcccctcctcccagcggcggcagcccagccggctccccaacctctaccgaggagggcacctctgagtccgccacccccgagagcggccctggcacctccaccgagcccagcgagggcagcgcacccggcagccctgccggcagccccacctccacagaggagggaaccagcaccgagcccagcgaaggcagcgccccaggcaccagcaccgagcctagtgagcaggagattaaacggatcaacaagatcagaagaagacttgtgaaagacagcaacaccaagaaggccggcaagacaggccccatgaaaaccctgctggttagagtgatgacacccgatctgagagagcggctggaaaacctgagaaagaagcctgaaaatatcccccagcccatcagcaatacatctagagccaacctgaataagctgctgaccgattacaccgaaatgaagaaggcgatcctgcatgtgtactgggaagagttccagaaggaccctgtgggcctgatgagccgggtggcccagcctgccagcaagaagatcgatcagaacaagctgaaacctgagatggacgagaagggcaacctgaccaccgccggctttgcctgctctcagtgtggccagcccctgttcgtgtacaagctggagcaggtgtctgagaagggcaaggcttacaccaactacttcggacggtgcaatgtggccgagcacgaaaagctgatcctgctggcccagctgaagcccgagaaggatagcgacgaagccgtgacatatagcctgggaaagtttgggcagagggccctggatttctacagcattcatgtgaccaaggagtccacccaccccgtgaagcccctggcccagatcgccggaaacagatacgcctccggacctgtgggaaaggccctgagcgacgcatgtatgggcacaatcgcctccttcctgtctaagtaccaggacatcatcatcgaacaccagaaggtggtgaagggcaaccagaagagactggagagcctgcgggagctggccggcaaggaaaacctggaataccctagcgtgaccctgccacctcagcctcacaccaaggagggcgttgatgcctacaacgaagtgatcgcccgggtgcgaatgtgggtgaacctgaacctgtggcagaagctgaagctaagcagagatgatgccaagcctctgctgagactgaagggattcccttcctttcctctggtcgagagacaggccaacgaagtggactggtgggacatggtgtgtaacgtgaagaagctgatcaacgagaaaaaggaggatggcaaggtgttttggcagaatctggctggctacaagagacaggaagccctgagaccatacctgagcagcgaggaagatcggaagaagggaaagaaattcgctcggtaccagctgggcgacctgctgctgcacctggaaaagaagcacggcgaggactggggaaaggtgtacgacgaggcctgggagcggattgacaagaaagtggaaggcctgagcaagcacatcaagctggaagaggaacggagaagcgaggacgcccagagcaaggccgccctgaccgactggctgcgggctaaggccagcttcgtgatcgagggcctgaaggaggccgacaaggacgagttctgcagatgcgagctgaagctgcagaagtggtacggggacctgcggggaaagcccttcgccatcgaagccgagaacagcatcctggacatcagcggcttcagcaagcagtacaactgtgccttcatctggcagaaggacggcgtgaagaagctgaacctgtacctgatcatcaactacttcaagggcggcaagctgcggttcaagaagatcaaacctgaagccttcgaagccaacagattctacaccgtgatcaacaaaaagagcggcgagatcgtgcccatggaggtgaacttcaacttcgacgaccccaacctgatcatcctgcctctggcctttggcaagagacagggcagagaattcatctggaacgacctgctgtccctggaaaccggcagcctgaagctggccaacggaagagtgatcgagaagacactgtacaacagaagaacccggcaggatgagcctgccctgttcgtggccctgaccttcgagcggcgggaggtcctggactcctccaatatcaaaccaatgaacctgatcggcgtggcaagaggcgaaaacatccccgccgtgatcgccctgaccgaccccgagggctgcccactgagccggtttaaggatagcctgggaaacccaacccacatcctgagaatcggcgagagctataaggagaagcagcggaccatccaggccaagaaggaggtggagcagcggagagccggcggctacagccggaagtacgccagcaaagccaagaatctggcagacgatatggtgagaaacaccgctagagatctgctgtactacgccgtgacccaggatgccatgctgatcttcgccaacctgagccggggcttcggccggcagggcaagcggaccttcatggccgagagacagtacacacggatggaggactggctgaccgccaagctggcctacgagggcctgagcaagacctacctgtccaagacactggcccagtacacctccaagacatgcagcaactgtgggtttaccatcaccagcgccgactacgacagggtgctggagaagctgaagaagacagcaacaggctggatgaccacaattaacggcaaggagctgaaggtggagggccagattacctactacaacagatacaagagacagaacgtagtcaaggacctgtccgtcgagctggatagactgagcgaagaatctgtgaacaacgacatctcctcctggacaaagggcagaagcggagaagctctgagcctcctgaagaaaagattctcccatagacccgtgcaggagaagttcgtgtgcctgaactgcggcttcgagacacacgcagccgagcaagccgccctgaacatcgccagatcctggctgttcctgcggagccaggagtacaagaaataccagacaaacaagacaaccggcaacaccgataagagagccttcgtcgagacctggcagtccttttaccggaagaagcttaaggaggtgtggaaacctgccgtgcggtctggcggatctggcggaggctccaccagccccaagaaaaagagaaaagtctaagctgccttctgcggggcttgccttctggccatgcccttcttctctcccttgcacctgtacctcttggtctttgaataaagcctgagtaggaaggctagcaaaaaaaaaaaaaaaaaaaaaaaaaaaaaaaaaaaaaaaaaaaaaaaaaaaaaaaaaaaaaaaaaaaaaaaaaaaaaaaagcccagccggctccccaacctctaccgaggagggcacctctgagtccgccacccccgagagcggccctggcacctccaccgagcccagcgagggcagcgcacccggcagccctgccggcagccccacctccacagaggagggaaccagcaccgagcccagcgaaggcagcgccccaggcaccagcaccgagcctagtgagcaggagattaaacggatcaacaagatcagaagaagacttgtgaaagacagcaacaccaagaaggccggcaagacaggccccatgaaaaccctgctggttagagtgatgacacccgatctgagagagcggctggaaaacctgagaaagaagcctgaaaatatcccccagcccatcagcaatacatctagagccaacctgaataagctgctgaccgattacaccgaaatgaagaaggcgatcctgcatgtgtactgggaagagttccagaaggaccctgtgggcctgatgagccgggtggcccagcctgccagcaagaagatcgatcagaacaagctgaaacctgagatggacgagaagggcaacctgaccaccgccggctttgcctgctctcagtgtggccagcccctgttcgtgtacaagctggagcaggtgtctgagaagggcaaggcttacaccaactacttcggacggtgcaatgtggccgagcacgaaaagctgatcctgctggcccagctgaagcccgagaaggatagcgacgaagccgtgacatatagcctgggaaagtttgggcagagggccctggatttctacagcattcatgtgaccaaggagtccacccaccccgtgaagcccctggcccagatcgccggaaacagatacgcctccggacctgtgggaaaggccctgagcgacgcatgtatgggcacaatcgcctccttcctgtctaagtaccaggacatcatcatcgaacaccagaaggtggtgaagggcaaccagaagagactggagagcctgcgggagctggccggcaaggaaaacctggaataccctagcgtgaccctgccacctcagcctcacaccaaggagggcgttgatgcctacaacgaagtgatcgcccgggtgcgaatgtgggtgaacctgaacctgtggcagaagctgaagctaagcagagatgatgccaagcctctgctgagactgaagggattcccttcctttcctctggtcgagagacaggccaacgaagtggactggtgggacatggtgtgtaacgtgaagaagctgatcaacgagaaaaaggaggatggcaaggtgttttggcagaatctggctggctacaagagacaggaagccctgagaccatacctgagcagcgaggaagatcggaagaagggaaagaaattcgctcggtaccagctgggcgacctgctgctgcacctggaaaagaagcacggcgaggactggggaaaggtgtacgacgaggcctgggagcggattgacaagaaagtggaaggcctgagcaagcacatcaagctggaagaggaacggagaagcgaggacgcccagagcaaggccgccctgaccgactggctgcgggctaaggccagcttcgtgatcgagggcctgaaggaggccgacaaggacgagttctgcagatgcgagctgaagctgcagaagtggtacggggacctgcggggaaagcccttcgccatcgaagccgagaacagcatcctggacatcagcggcttcagcaagcagtacaactgtgccttcatctggcagaaggacggcgtgaagaagctgaacctgtacctgatcatcaactacttcaagggcggcaagctgcggttcaagaagatcaaacctgaagccttcgaagccaacagattctacaccgtgatcaacaaaaagagcggcgagatcgtgcccatggaggtgaacttcaacttcgacgaccccaacctgatcatcctgcctctggcctttggcaagagacagggcagagaattcatctggaacgacctgctgtccctggaaaccggcagcctgaagctggccaacggaagagtgatcgagaagacactgtacaacagaagaacccggcaggatgagcctgccctgttcgtggccctgaccttcgagcggcgggaggtcctggactcctccaatatcaaaccaatgaacctgatcggcgtggcaagaggcgaaaacatccccgccgtgatcgccctgaccgaccccgagggctgcccactgagccggtttaaggatagcctgggaaacccaacccacatcctgagaatcggcgagagctataaggagaagcagcggaccatccaggccaagaaggaggtggagcagcggagagccggcggctacagccggaagtacgccagcaaagccaagaatctggcagacgatatggtgagaaacaccgctagagatctgctgtactacgccgtgacccaggatgccatgctgatcttcgccaacctgagccggggcttcggccggcagggcaagcggaccttcatggccgagagacagtacacacggatggaggactggctgaccgccaagctggcctacgagggcctgagcaagacctacctgtccaagacactggcccagtacacctccaagacatgcagcaactgtgggtttaccatcaccagcgccgactacgacagggtgctggagaagctgaagaagacagcaacaggctggatgaccacaattaacggcaaggagctgaaggtggagggccagattacctactacaacagatacaagagacagaacgtagtcaaggacctgtccgtcgagctggatagactgagcgaagaatctgtgaacaacgacatctcctcctggacaaagggcagaagcggagaagctctgagcctcctgaagaaaagattctcccatagacccgtgcaggagaagttcgtgtgcctgaactgcggcttcgagacacacgcagccgagcaagccgccctgaacatcgccagatcctggctgttcctgcggagccaggagtacaagaaataccagacaaacaagacaaccggcaacaccgataagagagccttcgtcgagacctggcagtccttttaccggaagaagcttaaggaggtgtggaaacctgccgtgcggtctggcggatctggcggaggctccaccagccccaagaaaaagagaaaagtctaagctgccttctgcggggcttgccttctggccatgcccttcttctctcccttgcacctgtacctcttggtctttgaataaagcctgagtaggaaggctagcaaaaaaaaaaaaaaaaaaaaaaaaaaaaaaaaaaaaaaaaaaaaaaaaaaaaaaaaaaaaaaaaaaaaaaaaaaaaaaaa

SEQ ID NO: 10209 - RNA, 8787 nt, synthetic construct
  source 1..8787: mol_type = other RNA
aggaaataagagagaaaagaagagtaagaagaaatataagagccaccatggcccctaagaagaagcgtaaagtgagccggatgaaccacgaccaggagttcgacccccctaaggtgtaccctcccgtccccgccgagaagagaaagcccatccgggtcctgagcctgttcgatggcatcgccaccggtctgctggtgctgaaggacctgggcatccaggtggataggtacattgcctccgaggtgtgcgaggactccatcaccgtgggaatggtgcgtcatcagggcaagatcatgtacgtgggcgacgtgcggagcgtgacacagaagcatatccaggagtggggccctttcgacctggtgatcggcggcagcccttgcaatgacctgagcatcgtgaacccagcccggaagggcctgtacgagggaaccggcagactgttcttcgagttttacagactgctgcacgacgcccggcctaaggaaggcgacgaccggcccttcttttggctgttcgagaatgtggtggccatgggagtcagcgacaagcgggatattagccggttcctggagagcaaccccgtgatgatcgatgccaaggaagtgagcgccgcccaccgggccagatacttctggggcaatctgcctggcatgaacagacccctggccagcaccgtgaacgacaagctggagctgcaggagtgcctggagcacggccggatcgccaagttcagcaaggtgagaaccatcaccacccgaagcaacagcatcaaacaaggcaaggaccagcactttcctgtgttcatgaacgagaaggaggacatcctgtggtgtaccgagatggagagagtgttcgggttcccagtccactacacagatgtcagcaacatgtctagactggccagacagagactgctgggaagaagctggtccgtccctgtgatcagacacctgttcgcccctctgaaggagtacttcgcctgcgtgagcagcggcaacagcaacgccaacagccggggccccagcttctctagcggcctggtgccactgtccctgagagggagccacatgggccccatggagatctacaaaaccgtgagcgcctggaagcggcagcctgtgcgcgtgctgagcctgtttcggaatatcgataaagtcctgaaaagcctgggattcctggagagcggctctggctccggcggtggcaccctgaagtacgtggaggatgtgacaaacgtggtcagacgggatgtggagaagtggggccccttcgatctggtgtacggcagcacccaacccctgggcagctcttgtgaccggtgccctggctggtacatgtttcagttccaccggatcctgcagtacgccctgccgagacaggagtcccagcggccattcttttggattttcatggacaacttgctgctgaccgaggatgaccaggaaactaccactcggttcctgcagaccgaagccgtgaccctgcaggacgtgagaggccgggactaccagaacgccatgcgggtgtggtccaacatccctggactgaaaagcaagcacgcacctctgacccctaaagaagaggagtacctgcaggcccaggtgcggagcagaagcaagctggacgcccctaaggtggatctgctggtgaagaattgcctcctgcccctgagagagtacttcaagtatttcagccagaatagtctgcccctgggaggcagcggcggcggcatggccgtggacctgctgcccgcccaggagagcatgaccttcagggacgtggccgtgttcttcagccaggacgagtggctgcacctggacagcgcccagagggccctgtacagggaggtgatgctggagaactacagcaccctggtgagcctgggcatccccttcagcatgcccaaggtgatccaccagctgcagcagggccaggacccctgcatggtggagggcgaggtgcccagcgacatcggcggcccaagcagcggcgcccctcctcccagcggcggcaggcggcccaagcagcggcgcccctcctcccagcggcggcagcccagccggctccccaacctctaccgaggagggcacctctgagtccgccacccccgagagcggccctggcacctccaccgagcccagcgagggcagcgcacccggcagccctgccggcagccccacctccacagaggagggaaccagcaccgagcccagcgaaggcagcgccccaggcaccagcaccgagcctagtgagcaggagattaaacggatcaacaagatcagaagaagacttgtgaaagacagcaacaccaagaaggccggcaagacaggccccatgaaaaccctgctggttagagtgatgacacccgatctgagagagcggctggaaaacctgagaaagaagcctgaaaatatcccccagcccatcagcaatacatctagagccaacctgaataagctgctgaccgattacaccgaaatgaagaaggcgatcctgcatgtgtactgggaagagttccagaaggaccctgtgggcctgatgagccgggtggcccagcctgccagcaagaagatcgatcagaacaagctgaaacctgagatggacgagaagggcaacctgaccaccgccggctttgcctgctctcagtgtggccagcccctgttcgtgtacaagctggagcaggtgtctgagaagggcaaggcttacaccaactacttcggacggtgcaatgtggccgagcacgaaaagctgatcctgctggcccagctgaagcccgagaaggatagcgacgaagccgtgacatatagcctgggaaagtttgggcagagggccctggatttctacagcattcatgtgaccaaggagtccacccaccccgtgaagcccctggcccagatcgccggaaacagatacgcctccggacctgtgggaaaggccctgagcgacgcatgtatgggcacaatcgcctccttcctgtctaagtaccaggacatcatcatcgaacaccagaaggtggtgaagggcaaccagaagagactggagagcctgcgggagctggccggcaaggaaaacctggaataccctagcgtgaccctgccacctcagcctcacaccaaggagggcgttgatgcctacaacgaagtgatcgcccgggtgcgaatgtgggtgaacctgaacctgtggcagaagctgaagctaagcagagatgatgccaagcctctgctgagactgaagggattcccttcctttcctctggtcgagagacaggccaacgaagtggactggtgggacatggtgtgtaacgtgaagaagctgatcaacgagaaaaaggaggatggcaaggtgttttggcagaatctggctggctacaagagacaggaagccctgagaccatacctgagcagcgaggaagatcggaagaagggaaagaaattcgctcggtaccagctgggcgacctgctgctgcacctggaaaagaagcacggcgaggactggggaaaggtgtacgacgaggcctgggagcggattgacaagaaagtggaaggcctgagcaagcacatcaagctggaagaggaacggagaagcgaggacgcccagagcaaggccgccctgaccgactggctgcgggctaaggccagcttcgtgatcgagggcctgaaggaggccgacaaggacgagttctgcagatgcgagctgaagctgcagaagtggtacggggacctgcggggaaagcccttcgccatcgaagccgagaacagcatcctggacatcagcggcttcagcaagcagtacaactgtgccttcatctggcagaaggacggcgtgaagaagctgaacctgtacctgatcatcaactacttcaagggcggcaagctgcggttcaagaagatcaaacctgaagccttcgaagccaacagattctacaccgtgatcaacaaaaagagcggcgagatcgtgcccatggaggtgaacttcaacttcgacgaccccaacctgatcatcctgcctctggcctttggcaagagacagggcagagaattcatctggaacgacctgctgtccctggaaaccggcagcctgaagctggccaacggaagagtgatcgagaagacactgtacaacagaagaacccggcaggatgagcctgccctgttcgtggccctgaccttcgagcggcgggaggtcctggactcctccaatatcaaaccaatgaacctgatcggcgtggcaagaggcgaaaacatccccgccgtgatcgccctgaccgaccccgagggctgcccactgagccggtttaaggatagcctgggaaacccaacccacatcctgagaatcggcgagagctataaggagaagcagcggaccatccaggccaagaaggaggtggagcagcggagagccggcggctacagccggaagtacgccagcaaagccaagaatctggcagacgatatggtgagaaacaccgctagagatctgctgtactacgccgtgacccaggatgccatgctgatcttcgccaacctgagccggggcttcggccggcagggcaagcggaccttcatggccgagagacagtacacacggatggaggactggctgaccgccaagctggcctacgagggcctgagcaagacctacctgtccaagacactggcccagtacacctccaagacatgcagcaactgtgggtttaccatcaccagcgccgactacgacagggtgctggagaagctgaagaagacagcaacaggctggatgaccacaattaacggcaaggagctgaaggtggagggccagattacctactacaacagatacaagagacagaacgtagtcaaggacctgtccgtcgagctggatagactgagcgaagaatctgtgaacaacgacatctcctcctggacaaagggcagaagcggagaagctctgagcctcctgaagaaaagattctcccatagacccgtgcaggagaagttcgtgtgcctgaactgcggcttcgagacacacgcagccgagcaagccgccctgaacatcgccagatcctggctgttcctgcggagccaggagtacaagaaataccagacaaacaagacaaccggcaacaccgataagagagccttcgtcgagacctggcagtccttttaccggaagaagcttaaggaggtgtggaaacctgccgtgcggtctggcggatctggcggaggctccaccagccccaagaaaaagagaaaagtctaagctgccttctgcggggcttgccttctggccatgcccttcttctctcccttgcacctgtacctcttggtctttgaataaagcctgagtaggaaggctagcaaaaaaaaaaaaaaaaaaaaaaaaaaaaaaaaaaaaaaaaaaaaaaaaaaaaaaaaaaaaaaaaaaaaaaaaaaaaaaaagcccagccggctccccaacctctaccgaggagggcacctctgagtccgccacccccgagagcggccctggcacctccaccgagcccagcgagggcagcgcacccggcagccctgccggcagccccacctccacagaggagggaaccagcaccgagcccagcgaaggcagcgccccaggcaccagcaccgagcctagtgagcaggagattaaacggatcaacaagatcagaagaagacttgtgaaagacagcaacaccaagaaggccggcaagacaggccccatgaaaaccctgctggttagagtgatgacacccgatctgagagagcggctggaaaacctgagaaagaagcctgaaaatatcccccagcccatcagcaatacatctagagccaacctgaataagctgctgaccgattacaccgaaatgaagaaggcgatcctgcatgtgtactgggaagagttccagaaggaccctgtgggcctgatgagccgggtggcccagcctgccagcaagaagatcgatcagaacaagctgaaacctgagatggacgagaagggcaacctgaccaccgccggctttgcctgctctcagtgtggccagcccctgttcgtgtacaagctggagcaggtgtctgagaagggcaaggcttacaccaactacttcggacggtgcaatgtggccgagcacgaaaagctgatcctgctggcccagctgaagcccgagaaggatagcgacgaagccgtgacatatagcctgggaaagtttgggcagagggccctggatttctacagcattcatgtgaccaaggagtccacccaccccgtgaagcccctggcccagatcgccggaaacagatacgcctccggacctgtgggaaaggccctgagcgacgcatgtatgggcacaatcgcctccttcctgtctaagtaccaggacatcatcatcgaacaccagaaggtggtgaagggcaaccagaagagactggagagcctgcgggagctggccggcaaggaaaacctggaataccctagcgtgaccctgccacctcagcctcacaccaaggagggcgttgatgcctacaacgaagtgatcgcccgggtgcgaatgtgggtgaacctgaacctgtggcagaagctgaagctaagcagagatgatgccaagcctctgctgagactgaagggattcccttcctttcctctggtcgagagacaggccaacgaagtggactggtgggacatggtgtgtaacgtgaagaagctgatcaacgagaaaaaggaggatggcaaggtgttttggcagaatctggctggctacaagagacaggaagccctgagaccatacctgagcagcgaggaagatcggaagaagggaaagaaattcgctcggtaccagctgggcgacctgctgctgcacctggaaaagaagcacggcgaggactggggaaaggtgtacgacgaggcctgggagcggattgacaagaaagtggaaggcctgagcaagcacatcaagctggaagaggaacggagaagcgaggacgcccagagcaaggccgccctgaccgactggctgcgggctaaggccagcttcgtgatcgagggcctgaaggaggccgacaaggacgagttctgcagatgcgagctgaagctgcagaagtggtacggggacctgcggggaaagcccttcgccatcgaagccgagaacagcatcctggacatcagcggcttcagcaagcagtacaactgtgccttcatctggcagaaggacggcgtgaagaagctgaacctgtacctgatcatcaactacttcaagggcggcaagctgcggttcaagaagatcaaacctgaagccttcgaagccaacagattctacaccgtgatcaacaaaaagagcggcgagatcgtgcccatggaggtgaacttcaacttcgacgaccccaacctgatcatcctgcctctggcctttggcaagagacagggcagagaattcatctggaacgacctgctgtccctggaaaccggcagcctgaagctggccaacggaagagtgatcgagaagacactgtacaacagaagaacccggcaggatgagcctgccctgttcgtggccctgaccttcgagcggcgggaggtcctggactcctccaatatcaaaccaatgaacctgatcggcgtggcaagaggcgaaaacatccccgccgtgatcgccctgaccgaccccgagggctgcccactgagccggtttaaggatagcctgggaaacccaacccacatcctgagaatcggcgagagctataaggagaagcagcggaccatccaggccaagaaggaggtggagcagcggagagccggcggctacagccggaagtacgccagcaaagccaagaatctggcagacgatatggtgagaaacaccgctagagatctgctgtactacgccgtgacccaggatgccatgctgatcttcgccaacctgagccggggcttcggccggcagggcaagcggaccttcatggccgagagacagtacacacggatggaggactggctgaccgccaagctggcctacgagggcctgagcaagacctacctgtccaagacactggcccagtacacctccaagacatgcagcaactgtgggtttaccatcaccagcgccgactacgacagggtgctggagaagctgaagaagacagcaacaggctggatgaccacaattaacggcaaggagctgaaggtggagggccagattacctactacaacagatacaagagacagaacgtagtcaaggacctgtccgtcgagctggatagactgagcgaagaatctgtgaacaacgacatctcctcctggacaaagggcagaagcggagaagctctgagcctcctgaagaaaagattctcccatagacccgtgcaggagaagttcgtgtgcctgaactgcggcttcgagacacacgcagccgagcaagccgccctgaacatcgccagatcctggctgttcctgcggagccaggagtacaagaaataccagacaaacaagacaaccggcaacaccgataagagagccttcgtcgagacctggcagtccttttaccggaagaagcttaaggaggtgtggaaacctgccgtgcggtctggcggatctggcggaggctccaccagccccaagaaaaagagaaaagtctaagctgccttctgcggggcttgccttctggccatgcccttcttctctcccttgcacctgtacctcttggtctttgaataaagcctgagtaggaaggctagcaaaaaaaaaaaaaaaaaaaaaaaaaaaaaaaaaaaaaaaaaaaaaaaaaaaaaaaaaaaaaaaaaaaaaaaaaaaaaaaa

SEQ ID NO: 10210 - RNA, 8787 nt, synthetic construct
  source 1..8787: mol_type = other RNA
aggaaataagagagaaaagaagagtaagaagaaatataagagccaccatggcccctaagaagaagcgtaaagtgagccggatgaaccacgaccaggagttcgacccccctaaggtgtaccctcccgtccccgccgagaagagaaagcccatccgggtcctgagcctgttcgatggcatcgccaccggtctgctggtgctgaaggacctgggcatccaggtggataggtacattgcctccgaggtgtgcgaggactccatcaccgtgggaatggtgcgtcatcagggcaagatcatgtacgtgggcgacgtgcggagcgtgacacagaagcatatccaggagtggggccctttcgacctggtgatcggcggcagcccttgcaatgacctgagcatcgtgaacccagcccggaagggcctgtacgagggaaccggcagactgttcttcgagttttacagactgctgcacgacgcccggcctaaggaaggcgacgaccggcccttcttttggctgttcgagaatgtggtggccatgggagtcagcgacaagcgggatattagccggttcctggagagcaaccccgtgatgatcgatgccaaggaagtgagcgccgcccaccgggccagatacttctggggcaatctgcctggcatgaacagacccctggccagcaccgtgaacgacaagctggagctgcaggagtgcctggagcacggccggatcgccaagttcagcaaggtgagaaccatcaccacccgaagcaacagcatcaaacaaggcaaggaccagcactttcctgtgttcatgaacgagaaggaggacatcctgtggtgtaccgagatggagagagtgttcgggttcccagtccactacacagatgtcagcaacatgtctagactggccagacagagactgctgggaagaagctggtccgtccctgtgatcagacacctgttcgcccctctgaaggagtacttcgcctgcgtgagcagcggcaacagcaacgccaacagccggggccccagcttctctagcggcctggtgccactgtccctgagagggagccacatgggccccatggagatctacaaaaccgtgagcgcctggaagcggcagcctgtgcgcgtgctgagcctgtttcggaatatcgataaagtcctgaaaagcctgggattcctggagagcggctctggctccggcggtggcaccctgaagtacgtggaggatgtgacaaacgtggtcagacgggatgtggagaagtggggccccttcgatctggtgtacggcagcacccaacccctgggcagctcttgtgaccggtgccctggctggtacatgtttcagttccaccggatcctgcagtacgccctgccgagacaggagtcccagcggccattcttttggattttcatggacaacttgctgctgaccgaggatgaccaggaaactaccactcggttcctgcagaccgaagccgtgaccctgcaggacgtgagaggccgggactaccagaacgccatgcgggtgtggtccaacatccctggactgaaaagcaagcacgcacctctgacccctaaagaagaggagtacctgcaggcccaggtgcggagcagaagcaagctggacgcccctaaggtggatctgctggtgaagaattgcctcctgcccctgagagagtacttcaagtatttcagccagaatagtctgcccctgggaggcagcggcggcggcaagcccctggccgtgaggttcgccgacgtggccgtgtacttcagccccgaggagtggggctgcctgaggcccgcccagagggccctgtacagggacgtgatgcaggagacctacggccacctgggcgccctgggcttccccggccccaagcccgccctgatcagctggatggagcaggagagcgaggcctggagccccgccgcccaggaccccgaggagggcgagagcctgggcggcgccctgggcggcccaagcagcggcgcccctcctcccagcggcggcaggcggcccaagcagcggcgcccctcctcccagcggcggcagcccagccggctccccaacctctaccgaggagggcacctctgagtccgccacccccgagagcggccctggcacctccaccgagcccagcgagggcagcgcacccggcagccctgccggcagccccacctccacagaggagggaaccagcaccgagcccagcgaaggcagcgccccaggcaccagcaccgagcctagtgagcaggagattaaacggatcaacaagatcagaagaagacttgtgaaagacagcaacaccaagaaggccggcaagacaggccccatgaaaaccctgctggttagagtgatgacacccgatctgagagagcggctggaaaacctgagaaagaagcctgaaaatatcccccagcccatcagcaatacatctagagccaacctgaataagctgctgaccgattacaccgaaatgaagaaggcgatcctgcatgtgtactgggaagagttccagaaggaccctgtgggcctgatgagccgggtggcccagcctgccagcaagaagatcgatcagaacaagctgaaacctgagatggacgagaagggcaacctgaccaccgccggctttgcctgctctcagtgtggccagcccctgttcgtgtacaagctggagcaggtgtctgagaagggcaaggcttacaccaactacttcggacggtgcaatgtggccgagcacgaaaagctgatcctgctggcccagctgaagcccgagaaggatagcgacgaagccgtgacatatagcctgggaaagtttgggcagagggccctggatttctacagcattcatgtgaccaaggagtccacccaccccgtgaagcccctggcccagatcgccggaaacagatacgcctccggacctgtgggaaaggccctgagcgacgcatgtatgggcacaatcgcctccttcctgtctaagtaccaggacatcatcatcgaacaccagaaggtggtgaagggcaaccagaagagactggagagcctgcgggagctggccggcaaggaaaacctggaataccctagcgtgaccctgccacctcagcctcacaccaaggagggcgttgatgcctacaacgaagtgatcgcccgggtgcgaatgtgggtgaacctgaacctgtggcagaagctgaagctaagcagagatgatgccaagcctctgctgagactgaagggattcccttcctttcctctggtcgagagacaggccaacgaagtggactggtgggacatggtgtgtaacgtgaagaagctgatcaacgagaaaaaggaggatggcaaggtgttttggcagaatctggctggctacaagagacaggaagccctgagaccatacctgagcagcgaggaagatcggaagaagggaaagaaattcgctcggtaccagctgggcgacctgctgctgcacctggaaaagaagcacggcgaggactggggaaaggtgtacgacgaggcctgggagcggattgacaagaaagtggaaggcctgagcaagcacatcaagctggaagaggaacggagaagcgaggacgcccagagcaaggccgccctgaccgactggctgcgggctaaggccagcttcgtgatcgagggcctgaaggaggccgacaaggacgagttctgcagatgcgagctgaagctgcagaagtggtacggggacctgcggggaaagcccttcgccatcgaagccgagaacagcatcctggacatcagcggcttcagcaagcagtacaactgtgccttcatctggcagaaggacggcgtgaagaagctgaacctgtacctgatcatcaactacttcaagggcggcaagctgcggttcaagaagatcaaacctgaagccttcgaagccaacagattctacaccgtgatcaacaaaaagagcggcgagatcgtgcccatggaggtgaacttcaacttcgacgaccccaacctgatcatcctgcctctggcctttggcaagagacagggcagagaattcatctggaacgacctgctgtccctggaaaccggcagcctgaagctggccaacggaagagtgatcgagaagacactgtacaacagaagaacccggcaggatgagcctgccctgttcgtggccctgaccttcgagcggcgggaggtcctggactcctccaatatcaaaccaatgaacctgatcggcgtggcaagaggcgaaaacatccccgccgtgatcgccctgaccgaccccgagggctgcccactgagccggtttaaggatagcctgggaaacccaacccacatcctgagaatcggcgagagctataaggagaagcagcggaccatccaggccaagaaggaggtggagcagcggagagccggcggctacagccggaagtacgccagcaaagccaagaatctggcagacgatatggtgagaaacaccgctagagatctgctgtactacgccgtgacccaggatgccatgctgatcttcgccaacctgagccggggcttcggccggcagggcaagcggaccttcatggccgagagacagtacacacggatggaggactggctgaccgccaagctggcctacgagggcctgagcaagacctacctgtccaagacactggcccagtacacctccaagacatgcagcaactgtgggtttaccatcaccagcgccgactacgacagggtgctggagaagctgaagaagacagcaacaggctggatgaccacaattaacggcaaggagctgaaggtggagggccagattacctactacaacagatacaagagacagaacgtagtcaaggacctgtccgtcgagctggatagactgagcgaagaatctgtgaacaacgacatctcctcctggacaaagggcagaagcggagaagctctgagcctcctgaagaaaagattctcccatagacccgtgcaggagaagttcgtgtgcctgaactgcggcttcgagacacacgcagccgagcaagccgccctgaacatcgccagatcctggctgttcctgcggagccaggagtacaagaaataccagacaaacaagacaaccggcaacaccgataagagagccttcgtcgagacctggcagtccttttaccggaagaagcttaaggaggtgtggaaacctgccgtgcggtctggcggatctggcggaggctccaccagccccaagaaaaagagaaaagtctaagctgccttctgcggggcttgccttctggccatgcccttcttctctcccttgcacctgtacctcttggtctttgaataaagcctgagtaggaaggctagcaaaaaaaaaaaaaaaaaaaaaaaaaaaaaaaaaaaaaaaaaaaaaaaaaaaaaaaaaaaaaaaaaaaaaaaaaaaaaaaagcccagccggctccccaacctctaccgaggagggcacctctgagtccgccacccccgagagcggccctggcacctccaccgagcccagcgagggcagcgcacccggcagccctgccggcagccccacctccacagaggagggaaccagcaccgagcccagcgaaggcagcgccccaggcaccagcaccgagcctagtgagcaggagattaaacggatcaacaagatcagaagaagacttgtgaaagacagcaacaccaagaaggccggcaagacaggccccatgaaaaccctgctggttagagtgatgacacccgatctgagagagcggctggaaaacctgagaaagaagcctgaaaatatcccccagcccatcagcaatacatctagagccaacctgaataagctgctgaccgattacaccgaaatgaagaaggcgatcctgcatgtgtactgggaagagttccagaaggaccctgtgggcctgatgagccgggtggcccagcctgccagcaagaagatcgatcagaacaagctgaaacctgagatggacgagaagggcaacctgaccaccgccggctttgcctgctctcagtgtggccagcccctgttcgtgtacaagctggagcaggtgtctgagaagggcaaggcttacaccaactacttcggacggtgcaatgtggccgagcacgaaaagctgatcctgctggcccagctgaagcccgagaaggatagcgacgaagccgtgacatatagcctgggaaagtttgggcagagggccctggatttctacagcattcatgtgaccaaggagtccacccaccccgtgaagcccctggcccagatcgccggaaacagatacgcctccggacctgtgggaaaggccctgagcgacgcatgtatgggcacaatcgcctccttcctgtctaagtaccaggacatcatcatcgaacaccagaaggtggtgaagggcaaccagaagagactggagagcctgcgggagctggccggcaaggaaaacctggaataccctagcgtgaccctgccacctcagcctcacaccaaggagggcgttgatgcctacaacgaagtgatcgcccgggtgcgaatgtgggtgaacctgaacctgtggcagaagctgaagctaagcagagatgatgccaagcctctgctgagactgaagggattcccttcctttcctctggtcgagagacaggccaacgaagtggactggtgggacatggtgtgtaacgtgaagaagctgatcaacgagaaaaaggaggatggcaaggtgttttggcagaatctggctggctacaagagacaggaagccctgagaccatacctgagcagcgaggaagatcggaagaagggaaagaaattcgctcggtaccagctgggcgacctgctgctgcacctggaaaagaagcacggcgaggactggggaaaggtgtacgacgaggcctgggagcggattgacaagaaagtggaaggcctgagcaagcacatcaagctggaagaggaacggagaagcgaggacgcccagagcaaggccgccctgaccgactggctgcgggctaaggccagcttcgtgatcgagggcctgaaggaggccgacaaggacgagttctgcagatgcgagctgaagctgcagaagtggtacggggacctgcggggaaagcccttcgccatcgaagccgagaacagcatcctggacatcagcggcttcagcaagcagtacaactgtgccttcatctggcagaaggacggcgtgaagaagctgaacctgtacctgatcatcaactacttcaagggcggcaagctgcggttcaagaagatcaaacctgaagccttcgaagccaacagattctacaccgtgatcaacaaaaagagcggcgagatcgtgcccatggaggtgaacttcaacttcgacgaccccaacctgatcatcctgcctctggcctttggcaagagacagggcagagaattcatctggaacgacctgctgtccctggaaaccggcagcctgaagctggccaacggaagagtgatcgagaagacactgtacaacagaagaacccggcaggatgagcctgccctgttcgtggccctgaccttcgagcggcgggaggtcctggactcctccaatatcaaaccaatgaacctgatcggcgtggcaagaggcgaaaacatccccgccgtgatcgccctgaccgaccccgagggctgcccactgagccggtttaaggatagcctgggaaacccaacccacatcctgagaatcggcgagagctataaggagaagcagcggaccatccaggccaagaaggaggtggagcagcggagagccggcggctacagccggaagtacgccagcaaagccaagaatctggcagacgatatggtgagaaacaccgctagagatctgctgtactacgccgtgacccaggatgccatgctgatcttcgccaacctgagccggggcttcggccggcagggcaagcggaccttcatggccgagagacagtacacacggatggaggactggctgaccgccaagctggcctacgagggcctgagcaagacctacctgtccaagacactggcccagtacacctccaagacatgcagcaactgtgggtttaccatcaccagcgccgactacgacagggtgctggagaagctgaagaagacagcaacaggctggatgaccacaattaacggcaaggagctgaaggtggagggccagattacctactacaacagatacaagagacagaacgtagtcaaggacctgtccgtcgagctggatagactgagcgaagaatctgtgaacaacgacatctcctcctggacaaagggcagaagcggagaagctctgagcctcctgaagaaaagattctcccatagacccgtgcaggagaagttcgtgtgcctgaactgcggcttcgagacacacgcagccgagcaagccgccctgaacatcgccagatcctggctgttcctgcggagccaggagtacaagaaataccagacaaacaagacaaccggcaacaccgataagagagccttcgtcgagacctggcagtccttttaccggaagaagcttaaggaggtgtggaaacctgccgtgcggtctggcggatctggcggaggctccaccagccccaagaaaaagagaaaagtctaagctgccttctgcggggcttgccttctggccatgcccttcttctctcccttgcacctgtacctcttggtctttgaataaagcctgagtaggaaggctagcaaaaaaaaaaaaaaaaaaaaaaaaaaaaaaaaaaaaaaaaaaaaaaaaaaaaaaaaaaaaaaaaaaaaaaaaaaaaaaaa

SEQ ID NO: 10211 - RNA, 8787 nt, synthetic construct
  source 1..8787: mol_type = other RNA
aggaaataagagagaaaagaagagtaagaagaaatataagagccaccatggcccctaagaagaagcgtaaagtgagccggatgaaccacgaccaggagttcgacccccctaaggtgtaccctcccgtccccgccgagaagagaaagcccatccgggtcctgagcctgttcgatggcatcgccaccggtctgctggtgctgaaggacctgggcatccaggtggataggtacattgcctccgaggtgtgcgaggactccatcaccgtgggaatggtgcgtcatcagggcaagatcatgtacgtgggcgacgtgcggagcgtgacacagaagcatatccaggagtggggccctttcgacctggtgatcggcggcagcccttgcaatgacctgagcatcgtgaacccagcccggaagggcctgtacgagggaaccggcagactgttcttcgagttttacagactgctgcacgacgcccggcctaaggaaggcgacgaccggcccttcttttggctgttcgagaatgtggtggccatgggagtcagcgacaagcgggatattagccggttcctggagagcaaccccgtgatgatcgatgccaaggaagtgagcgccgcccaccgggccagatacttctggggcaatctgcctggcatgaacagacccctggccagcaccgtgaacgacaagctggagctgcaggagtgcctggagcacggccggatcgccaagttcagcaaggtgagaaccatcaccacccgaagcaacagcatcaaacaaggcaaggaccagcactttcctgtgttcatgaacgagaaggaggacatcctgtggtgtaccgagatggagagagtgttcgggttcccagtccactacacagatgtcagcaacatgtctagactggccagacagagactgctgggaagaagctggtccgtccctgtgatcagacacctgttcgcccctctgaaggagtacttcgcctgcgtgagcagcggcaacagcaacgccaacagccggggccccagcttctctagcggcctggtgccactgtccctgagagggagccacatgggccccatggagatctacaaaaccgtgagcgcctggaagcggcagcctgtgcgcgtgctgagcctgtttcggaatatcgataaagtcctgaaaagcctgggattcctggagagcggctctggctccggcggtggcaccctgaagtacgtggaggatgtgacaaacgtggtcagacgggatgtggagaagtggggccccttcgatctggtgtacggcagcacccaacccctgggcagctcttgtgaccggtgccctggctggtacatgtttcagttccaccggatcctgcagtacgccctgccgagacaggagtcccagcggccattcttttggattttcatggacaacttgctgctgaccgaggatgaccaggaaactaccactcggttcctgcagaccgaagccgtgaccctgcaggacgtgagaggccgggactaccagaacgccatgcgggtgtggtccaacatccctggactgaaaagcaagcacgcacctctgacccctaaagaagaggagtacctgcaggcccaggtgcggagcagaagcaagctggacgcccctaaggtggatctgctggtgaagaattgcctcctgcccctgagagagtacttcaagtatttcagccagaatagtctgcccctgggaggcagcggcggcggcatggcccacttccagggcagcgtgaccttcgaggacgtggccatcgccttcagccagcaggagtgggagagcctggacagcagccagaggggcctgtacagggacgtgatgctggagaactacaggaacctggtgagcatggccggccacagcctgagcaagccccacgtgatcgccctgctggagaggtggaaggagcccaaggtgaccgagaggaaggacggcaggaggtggtgcaccgacggcggcccaagcagcggcgcccctcctcccagcggcggcaggcggcccaagcagcggcgcccctcctcccagcggcggcagcccagccggctccccaacctctaccgaggagggcacctctgagtccgccacccccgagagcggccctggcacctccaccgagcccagcgagggcagcgcacccggcagccctgccggcagccccacctccacagaggagggaaccagcaccgagcccagcgaaggcagcgccccaggcaccagcaccgagcctagtgagcaggagattaaacggatcaacaagatcagaagaagacttgtgaaagacagcaacaccaagaaggccggcaagacaggccccatgaaaaccctgctggttagagtgatgacacccgatctgagagagcggctggaaaacctgagaaagaagcctgaaaatatcccccagcccatcagcaatacatctagagccaacctgaataagctgctgaccgattacaccgaaatgaagaaggcgatcctgcatgtgtactgggaagagttccagaaggaccctgtgggcctgatgagccgggtggcccagcctgccagcaagaagatcgatcagaacaagctgaaacctgagatggacgagaagggcaacctgaccaccgccggctttgcctgctctcagtgtggccagcccctgttcgtgtacaagctggagcaggtgtctgagaagggcaaggcttacaccaactacttcggacggtgcaatgtggccgagcacgaaaagctgatcctgctggcccagctgaagcccgagaaggatagcgacgaagccgtgacatatagcctgggaaagtttgggcagagggccctggatttctacagcattcatgtgaccaaggagtccacccaccccgtgaagcccctggcccagatcgccggaaacagatacgcctccggacctgtgggaaaggccctgagcgacgcatgtatgggcacaatcgcctccttcctgtctaagtaccaggacatcatcatcgaacaccagaaggtggtgaagggcaaccagaagagactggagagcctgcgggagctggccggcaaggaaaacctggaataccctagcgtgaccctgccacctcagcctcacaccaaggagggcgttgatgcctacaacgaagtgatcgcccgggtgcgaatgtgggtgaacctgaacctgtggcagaagctgaagctaagcagagatgatgccaagcctctgctgagactgaagggattcccttcctttcctctggtcgagagacaggccaacgaagtggactggtgggacatggtgtgtaacgtgaagaagctgatcaacgagaaaaaggaggatggcaaggtgttttggcagaatctggctggctacaagagacaggaagccctgagaccatacctgagcagcgaggaagatcggaagaagggaaagaaattcgctcggtaccagctgggcgacctgctgctgcacctggaaaagaagcacggcgaggactggggaaaggtgtacgacgaggcctgggagcggattgacaagaaagtggaaggcctgagcaagcacatcaagctggaagaggaacggagaagcgaggacgcccagagcaaggccgccctgaccgactggctgcgggctaaggccagcttcgtgatcgagggcctgaaggaggccgacaaggacgagttctgcagatgcgagctgaagctgcagaagtggtacggggacctgcggggaaagcccttcgccatcgaagccgagaacagcatcctggacatcagcggcttcagcaagcagtacaactgtgccttcatctggcagaaggacggcgtgaagaagctgaacctgtacctgatcatcaactacttcaagggcggcaagctgcggttcaagaagatcaaacctgaagccttcgaagccaacagattctacaccgtgatcaacaaaaagagcggcgagatcgtgcccatggaggtgaacttcaacttcgacgaccccaacctgatcatcctgcctctggcctttggcaagagacagggcagagaattcatctggaacgacctgctgtccctggaaaccggcagcctgaagctggccaacggaagagtgatcgagaagacactgtacaacagaagaacccggcaggatgagcctgccctgttcgtggccctgaccttcgagcggcgggaggtcctggactcctccaatatcaaaccaatgaacctgatcggcgtggcaagaggcgaaaacatccccgccgtgatcgccctgaccgaccccgagggctgcccactgagccggtttaaggatagcctgggaaacccaacccacatcctgagaatcggcgagagctataaggagaagcagcggaccatccaggccaagaaggaggtggagcagcggagagccggcggctacagccggaagtacgccagcaaagccaagaatctggcagacgatatggtgagaaacaccgctagagatctgctgtactacgccgtgacccaggatgccatgctgatcttcgccaacctgagccggggcttcggccggcagggcaagcggaccttcatggccgagagacagtacacacggatggaggactggctgaccgccaagctggcctacgagggcctgagcaagacctacctgtccaagacactggcccagtacacctccaagacatgcagcaactgtgggtttaccatcaccagcgccgactacgacagggtgctggagaagctgaagaagacagcaacaggctggatgaccacaattaacggcaaggagctgaaggtggagggccagattacctactacaacagatacaagagacagaacgtagtcaaggacctgtccgtcgagctggatagactgagcgaagaatctgtgaacaacgacatctcctcctggacaaagggcagaagcggagaagctctgagcctcctgaagaaaagattctcccatagacccgtgcaggagaagttcgtgtgcctgaactgcggcttcgagacacacgcagccgagcaagccgccctgaacatcgccagatcctggctgttcctgcggagccaggagtacaagaaataccagacaaacaagacaaccggcaacaccgataagagagccttcgtcgagacctggcagtccttttaccggaagaagcttaaggaggtgtggaaacctgccgtgcggtctggcggatctggcggaggctccaccagccccaagaaaaagagaaaagtctaagctgccttctgcggggcttgccttctggccatgcccttcttctctcccttgcacctgtacctcttggtctttgaataaagcctgagtaggaaggctagcaaaaaaaaaaaaaaaaaaaaaaaaaaaaaaaaaaaaaaaaaaaaaaaaaaaaaaaaaaaaaaaaaaaaaaaaaaaaaaaagcccagccggctccccaacctctaccgaggagggcacctctgagtccgccacccccgagagcggccctggcacctccaccgagcccagcgagggcagcgcacccggcagccctgccggcagccccacctccacagaggagggaaccagcaccgagcccagcgaaggcagcgccccaggcaccagcaccgagcctagtgagcaggagattaaacggatcaacaagatcagaagaagacttgtgaaagacagcaacaccaagaaggccggcaagacaggccccatgaaaaccctgctggttagagtgatgacacccgatctgagagagcggctggaaaacctgagaaagaagcctgaaaatatcccccagcccatcagcaatacatctagagccaacctgaataagctgctgaccgattacaccgaaatgaagaaggcgatcctgcatgtgtactgggaagagttccagaaggaccctgtgggcctgatgagccgggtggcccagcctgccagcaagaagatcgatcagaacaagctgaaacctgagatggacgagaagggcaacctgaccaccgccggctttgcctgctctcagtgtggccagcccctgttcgtgtacaagctggagcaggtgtctgagaagggcaaggcttacaccaactacttcggacggtgcaatgtggccgagcacgaaaagctgatcctgctggcccagctgaagcccgagaaggatagcgacgaagccgtgacatatagcctgggaaagtttgggcagagggccctggatttctacagcattcatgtgaccaaggagtccacccaccccgtgaagcccctggcccagatcgccggaaacagatacgcctccggacctgtgggaaaggccctgagcgacgcatgtatgggcacaatcgcctccttcctgtctaagtaccaggacatcatcatcgaacaccagaaggtggtgaagggcaaccagaagagactggagagcctgcgggagctggccggcaaggaaaacctggaataccctagcgtgaccctgccacctcagcctcacaccaaggagggcgttgatgcctacaacgaagtgatcgcccgggtgcgaatgtgggtgaacctgaacctgtggcagaagctgaagctaagcagagatgatgccaagcctctgctgagactgaagggattcccttcctttcctctggtcgagagacaggccaacgaagtggactggtgggacatggtgtgtaacgtgaagaagctgatcaacgagaaaaaggaggatggcaaggtgttttggcagaatctggctggctacaagagacaggaagccctgagaccatacctgagcagcgaggaagatcggaagaagggaaagaaattcgctcggtaccagctgggcgacctgctgctgcacctggaaaagaagcacggcgaggactggggaaaggtgtacgacgaggcctgggagcggattgacaagaaagtggaaggcctgagcaagcacatcaagctggaagaggaacggagaagcgaggacgcccagagcaaggccgccctgaccgactggctgcgggctaaggccagcttcgtgatcgagggcctgaaggaggccgacaaggacgagttctgcagatgcgagctgaagctgcagaagtggtacggggacctgcggggaaagcccttcgccatcgaagccgagaacagcatcctggacatcagcggcttcagcaagcagtacaactgtgccttcatctggcagaaggacggcgtgaagaagctgaacctgtacctgatcatcaactacttcaagggcggcaagctgcggttcaagaagatcaaacctgaagccttcgaagccaacagattctacaccgtgatcaacaaaaagagcggcgagatcgtgcccatggaggtgaacttcaacttcgacgaccccaacctgatcatcctgcctctggcctttggcaagagacagggcagagaattcatctggaacgacctgctgtccctggaaaccggcagcctgaagctggccaacggaagagtgatcgagaagacactgtacaacagaagaacccggcaggatgagcctgccctgttcgtggccctgaccttcgagcggcgggaggtcctggactcctccaatatcaaaccaatgaacctgatcggcgtggcaagaggcgaaaacatccccgccgtgatcgccctgaccgaccccgagggctgcccactgagccggtttaaggatagcctgggaaacccaacccacatcctgagaatcggcgagagctataaggagaagcagcggaccatccaggccaagaaggaggtggagcagcggagagccggcggctacagccggaagtacgccagcaaagccaagaatctggcagacgatatggtgagaaacaccgctagagatctgctgtactacgccgtgacccaggatgccatgctgatcttcgccaacctgagccggggcttcggccggcagggcaagcggaccttcatggccgagagacagtacacacggatggaggactggctgaccgccaagctggcctacgagggcctgagcaagacctacctgtccaagacactggcccagtacacctccaagacatgcagcaactgtgggtttaccatcaccagcgccgactacgacagggtgctggagaagctgaagaagacagcaacaggctggatgaccacaattaacggcaaggagctgaaggtggagggccagattacctactacaacagatacaagagacagaacgtagtcaaggacctgtccgtcgagctggatagactgagcgaagaatctgtgaacaacgacatctcctcctggacaaagggcagaagcggagaagctctgagcctcctgaagaaaagattctcccatagacccgtgcaggagaagttcgtgtgcctgaactgcggcttcgagacacacgcagccgagcaagccgccctgaacatcgccagatcctggctgttcctgcggagccaggagtacaagaaataccagacaaacaagacaaccggcaacaccgataagagagccttcgtcgagacctggcagtccttttaccggaagaagcttaaggaggtgtggaaacctgccgtgcggtctggcggatctggcggaggctccaccagccccaagaaaaagagaaaagtctaagctgccttctgcggggcttgccttctggccatgcccttcttctctcccttgcacctgtacctcttggtctttgaataaagcctgagtaggaaggctagcaaaaaaaaaaaaaaaaaaaaaaaaaaaaaaaaaaaaaaaaaaaaaaaaaaaaaaaaaaaaaaaaaaaaaaaaaaaaaaaa

SEQ ID NO: 10212 - RNA, 8787 nt, synthetic construct
  source 1..8787: mol_type = other RNA
aggaaataagagagaaaagaagagtaagaagaaatataagagccaccatggcccctaagaagaagcgtaaagtgagccggatgaaccacgaccaggagttcgacccccctaaggtgtaccctcccgtccccgccgagaagagaaagcccatccgggtcctgagcctgttcgatggcatcgccaccggtctgctggtgctgaaggacctgggcatccaggtggataggtacattgcctccgaggtgtgcgaggactccatcaccgtgggaatggtgcgtcatcagggcaagatcatgtacgtgggcgacgtgcggagcgtgacacagaagcatatccaggagtggggccctttcgacctggtgatcggcggcagcccttgcaatgacctgagcatcgtgaacccagcccggaagggcctgtacgagggaaccggcagactgttcttcgagttttacagactgctgcacgacgcccggcctaaggaaggcgacgaccggcccttcttttggctgttcgagaatgtggtggccatgggagtcagcgacaagcgggatattagccggttcctggagagcaaccccgtgatgatcgatgccaaggaagtgagcgccgcccaccgggccagatacttctggggcaatctgcctggcatgaacagacccctggccagcaccgtgaacgacaagctggagctgcaggagtgcctggagcacggccggatcgccaagttcagcaaggtgagaaccatcaccacccgaagcaacagcatcaaacaaggcaaggaccagcactttcctgtgttcatgaacgagaaggaggacatcctgtggtgtaccgagatggagagagtgttcgggttcccagtccactacacagatgtcagcaacatgtctagactggccagacagagactgctgggaagaagctggtccgtccctgtgatcagacacctgttcgcccctctgaaggagtacttcgcctgcgtgagcagcggcaacagcaacgccaacagccggggccccagcttctctagcggcctggtgccactgtccctgagagggagccacatgggccccatggagatctacaaaaccgtgagcgcctggaagcggcagcctgtgcgcgtgctgagcctgtttcggaatatcgataaagtcctgaaaagcctgggattcctggagagcggctctggctccggcggtggcaccctgaagtacgtggaggatgtgacaaacgtggtcagacgggatgtggagaagtggggccccttcgatctggtgtacggcagcacccaacccctgggcagctcttgtgaccggtgccctggctggtacatgtttcagttccaccggatcctgcagtacgccctgccgagacaggagtcccagcggccattcttttggattttcatggacaacttgctgctgaccgaggatgaccaggaaactaccactcggttcctgcagaccgaagccgtgaccctgcaggacgtgagaggccgggactaccagaacgccatgcgggtgtggtccaacatccctggactgaaaagcaagcacgcacctctgacccctaaagaagaggagtacctgcaggcccaggtgcggagcagaagcaagctggacgcccctaaggtggatctgctggtgaagaattgcctcctgcccctgagagagtacttcaagtatttcagccagaatagtctgcccctgggaggcagcggcggcggcagccagggcctggtgaccttcggcgacgtggccatcgacttcagccaggaggagtgggagtggctgagccccatccagaggaacctgtacaggaaggtgatgctggagaactacaggaacctggccagcctgggcctgtgcgtgagcaagcccgacgtgatcagcctgctggagcagggcaaggagccctggaccgtgaagaggaggatgaccagggccaggtgccccgacacccagcacctgggcggcccaagcagcggcgcccctcctcccagcggcggcaggcggcccaagcagcggcgcccctcctcccagcggcggcagcccagccggctccccaacctctaccgaggagggcacctctgagtccgccacccccgagagcggccctggcacctccaccgagcccagcgagggcagcgcacccggcagccctgccggcagccccacctccacagaggagggaaccagcaccgagcccagcgaaggcagcgccccaggcaccagcaccgagcctagtgagcaggagattaaacggatcaacaagatcagaagaagacttgtgaaagacagcaacaccaagaaggccggcaagacaggccccatgaaaaccctgctggttagagtgatgacacccgatctgagagagcggctggaaaacctgagaaagaagcctgaaaatatcccccagcccatcagcaatacatctagagccaacctgaataagctgctgaccgattacaccgaaatgaagaaggcgatcctgcatgtgtactgggaagagttccagaaggaccctgtgggcctgatgagccgggtggcccagcctgccagcaagaagatcgatcagaacaagctgaaacctgagatggacgagaagggcaacctgaccaccgccggctttgcctgctctcagtgtggccagcccctgttcgtgtacaagctggagcaggtgtctgagaagggcaaggcttacaccaactacttcggacggtgcaatgtggccgagcacgaaaagctgatcctgctggcccagctgaagcccgagaaggatagcgacgaagccgtgacatatagcctgggaaagtttgggcagagggccctggatttctacagcattcatgtgaccaaggagtccacccaccccgtgaagcccctggcccagatcgccggaaacagatacgcctccggacctgtgggaaaggccctgagcgacgcatgtatgggcacaatcgcctccttcctgtctaagtaccaggacatcatcatcgaacaccagaaggtggtgaagggcaaccagaagagactggagagcctgcgggagctggccggcaaggaaaacctggaataccctagcgtgaccctgccacctcagcctcacaccaaggagggcgttgatgcctacaacgaagtgatcgcccgggtgcgaatgtgggtgaacctgaacctgtggcagaagctgaagctaagcagagatgatgccaagcctctgctgagactgaagggattcccttcctttcctctggtcgagagacaggccaacgaagtggactggtgggacatggtgtgtaacgtgaagaagctgatcaacgagaaaaaggaggatggcaaggtgttttggcagaatctggctggctacaagagacaggaagccctgagaccatacctgagcagcgaggaagatcggaagaagggaaagaaattcgctcggtaccagctgggcgacctgctgctgcacctggaaaagaagcacggcgaggactggggaaaggtgtacgacgaggcctgggagcggattgacaagaaagtggaaggcctgagcaagcacatcaagctggaagaggaacggagaagcgaggacgcccagagcaaggccgccctgaccgactggctgcgggctaaggccagcttcgtgatcgagggcctgaaggaggccgacaaggacgagttctgcagatgcgagctgaagctgcagaagtggtacggggacctgcggggaaagcccttcgccatcgaagccgagaacagcatcctggacatcagcggcttcagcaagcagtacaactgtgccttcatctggcagaaggacggcgtgaagaagctgaacctgtacctgatcatcaactacttcaagggcggcaagctgcggttcaagaagatcaaacctgaagccttcgaagccaacagattctacaccgtgatcaacaaaaagagcggcgagatcgtgcccatggaggtgaacttcaacttcgacgaccccaacctgatcatcctgcctctggcctttggcaagagacagggcagagaattcatctggaacgacctgctgtccctggaaaccggcagcctgaagctggccaacggaagagtgatcgagaagacactgtacaacagaagaacccggcaggatgagcctgccctgttcgtggccctgaccttcgagcggcgggaggtcctggactcctccaatatcaaaccaatgaacctgatcggcgtggcaagaggcgaaaacatccccgccgtgatcgccctgaccgaccccgagggctgcccactgagccggtttaaggatagcctgggaaacccaacccacatcctgagaatcggcgagagctataaggagaagcagcggaccatccaggccaagaaggaggtggagcagcggagagccggcggctacagccggaagtacgccagcaaagccaagaatctggcagacgatatggtgagaaacaccgctagagatctgctgtactacgccgtgacccaggatgccatgctgatcttcgccaacctgagccggggcttcggccggcagggcaagcggaccttcatggccgagagacagtacacacggatggaggactggctgaccgccaagctggcctacgagggcctgagcaagacctacctgtccaagacactggcccagtacacctccaagacatgcagcaactgtgggtttaccatcaccagcgccgactacgacagggtgctggagaagctgaagaagacagcaacaggctggatgaccacaattaacggcaaggagctgaaggtggagggccagattacctactacaacagatacaagagacagaacgtagtcaaggacctgtccgtcgagctggatagactgagcgaagaatctgtgaacaacgacatctcctcctggacaaagggcagaagcggagaagctctgagcctcctgaagaaaagattctcccatagacccgtgcaggagaagttcgtgtgcctgaactgcggcttcgagacacacgcagccgagcaagccgccctgaacatcgccagatcctggctgttcctgcggagccaggagtacaagaaataccagacaaacaagacaaccggcaacaccgataagagagccttcgtcgagacctggcagtccttttaccggaagaagcttaaggaggtgtggaaacctgccgtgcggtctggcggatctggcggaggctccaccagccccaagaaaaagagaaaagtctaagctgccttctgcggggcttgccttctggccatgcccttcttctctcccttgcacctgtacctcttggtctttgaataaagcctgagtaggaaggctagcaaaaaaaaaaaaaaaaaaaaaaaaaaaaaaaaaaaaaaaaaaaaaaaaaaaaaaaaaaaaaaaaaaaaaaaaaaaaaaaagcccagccggctccccaacctctaccgaggagggcacctctgagtccgccacccccgagagcggccctggcacctccaccgagcccagcgagggcagcgcacccggcagccctgccggcagccccacctccacagaggagggaaccagcaccgagcccagcgaaggcagcgccccaggcaccagcaccgagcctagtgagcaggagattaaacggatcaacaagatcagaagaagacttgtgaaagacagcaacaccaagaaggccggcaagacaggccccatgaaaaccctgctggttagagtgatgacacccgatctgagagagcggctggaaaacctgagaaagaagcctgaaaatatcccccagcccatcagcaatacatctagagccaacctgaataagctgctgaccgattacaccgaaatgaagaaggcgatcctgcatgtgtactgggaagagttccagaaggaccctgtgggcctgatgagccgggtggcccagcctgccagcaagaagatcgatcagaacaagctgaaacctgagatggacgagaagggcaacctgaccaccgccggctttgcctgctctcagtgtggccagcccctgttcgtgtacaagctggagcaggtgtctgagaagggcaaggcttacaccaactacttcggacggtgcaatgtggccgagcacgaaaagctgatcctgctggcccagctgaagcccgagaaggatagcgacgaagccgtgacatatagcctgggaaagtttgggcagagggccctggatttctacagcattcatgtgaccaaggagtccacccaccccgtgaagcccctggcccagatcgccggaaacagatacgcctccggacctgtgggaaaggccctgagcgacgcatgtatgggcacaatcgcctccttcctgtctaagtaccaggacatcatcatcgaacaccagaaggtggtgaagggcaaccagaagagactggagagcctgcgggagctggccggcaaggaaaacctggaataccctagcgtgaccctgccacctcagcctcacaccaaggagggcgttgatgcctacaacgaagtgatcgcccgggtgcgaatgtgggtgaacctgaacctgtggcagaagctgaagctaagcagagatgatgccaagcctctgctgagactgaagggattcccttcctttcctctggtcgagagacaggccaacgaagtggactggtgggacatggtgtgtaacgtgaagaagctgatcaacgagaaaaaggaggatggcaaggtgttttggcagaatctggctggctacaagagacaggaagccctgagaccatacctgagcagcgaggaagatcggaagaagggaaagaaattcgctcggtaccagctgggcgacctgctgctgcacctggaaaagaagcacggcgaggactggggaaaggtgtacgacgaggcctgggagcggattgacaagaaagtggaaggcctgagcaagcacatcaagctggaagaggaacggagaagcgaggacgcccagagcaaggccgccctgaccgactggctgcgggctaaggccagcttcgtgatcgagggcctgaaggaggccgacaaggacgagttctgcagatgcgagctgaagctgcagaagtggtacggggacctgcggggaaagcccttcgccatcgaagccgagaacagcatcctggacatcagcggcttcagcaagcagtacaactgtgccttcatctggcagaaggacggcgtgaagaagctgaacctgtacctgatcatcaactacttcaagggcggcaagctgcggttcaagaagatcaaacctgaagccttcgaagccaacagattctacaccgtgatcaacaaaaagagcggcgagatcgtgcccatggaggtgaacttcaacttcgacgaccccaacctgatcatcctgcctctggcctttggcaagagacagggcagagaattcatctggaacgacctgctgtccctggaaaccggcagcctgaagctggccaacggaagagtgatcgagaagacactgtacaacagaagaacccggcaggatgagcctgccctgttcgtggccctgaccttcgagcggcgggaggtcctggactcctccaatatcaaaccaatgaacctgatcggcgtggcaagaggcgaaaacatccccgccgtgatcgccctgaccgaccccgagggctgcccactgagccggtttaaggatagcctgggaaacccaacccacatcctgagaatcggcgagagctataaggagaagcagcggaccatccaggccaagaaggaggtggagcagcggagagccggcggctacagccggaagtacgccagcaaagccaagaatctggcagacgatatggtgagaaacaccgctagagatctgctgtactacgccgtgacccaggatgccatgctgatcttcgccaacctgagccggggcttcggccggcagggcaagcggaccttcatggccgagagacagtacacacggatggaggactggctgaccgccaagctggcctacgagggcctgagcaagacctacctgtccaagacactggcccagtacacctccaagacatgcagcaactgtgggtttaccatcaccagcgccgactacgacagggtgctggagaagctgaagaagacagcaacaggctggatgaccacaattaacggcaaggagctgaaggtggagggccagattacctactacaacagatacaagagacagaacgtagtcaaggacctgtccgtcgagctggatagactgagcgaagaatctgtgaacaacgacatctcctcctggacaaagggcagaagcggagaagctctgagcctcctgaagaaaagattctcccatagacccgtgcaggagaagttcgtgtgcctgaactgcggcttcgagacacacgcagccgagcaagccgccctgaacatcgccagatcctggctgttcctgcggagccaggagtacaagaaataccagacaaacaagacaaccggcaacaccgataagagagccttcgtcgagacctggcagtccttttaccggaagaagcttaaggaggtgtggaaacctgccgtgcggtctggcggatctggcggaggctccaccagccccaagaaaaagagaaaagtctaagctgccttctgcggggcttgccttctggccatgcccttcttctctcccttgcacctgtacctcttggtctttgaataaagcctgagtaggaaggctagcaaaaaaaaaaaaaaaaaaaaaaaaaaaaaaaaaaaaaaaaaaaaaaaaaaaaaaaaaaaaaaaaaaaaaaaaaaaaaaaa

SEQ ID NO: 10213 - RNA, 8787 nt, synthetic construct
  source 1..8787: mol_type = other RNA
aggaaataagagagaaaagaagagtaagaagaaatataagagccaccatggcccctaagaagaagcgtaaagtgagccggatgaaccacgaccaggagttcgacccccctaaggtgtaccctcccgtccccgccgagaagagaaagcccatccgggtcctgagcctgttcgatggcatcgccaccggtctgctggtgctgaaggacctgggcatccaggtggataggtacattgcctccgaggtgtgcgaggactccatcaccgtgggaatggtgcgtcatcagggcaagatcatgtacgtgggcgacgtgcggagcgtgacacagaagcatatccaggagtggggccctttcgacctggtgatcggcggcagcccttgcaatgacctgagcatcgtgaacccagcccggaagggcctgtacgagggaaccggcagactgttcttcgagttttacagactgctgcacgacgcccggcctaaggaaggcgacgaccggcccttcttttggctgttcgagaatgtggtggccatgggagtcagcgacaagcgggatattagccggttcctggagagcaaccccgtgatgatcgatgccaaggaagtgagcgccgcccaccgggccagatacttctggggcaatctgcctggcatgaacagacccctggccagcaccgtgaacgacaagctggagctgcaggagtgcctggagcacggccggatcgccaagttcagcaaggtgagaaccatcaccacccgaagcaacagcatcaaacaaggcaaggaccagcactttcctgtgttcatgaacgagaaggaggacatcctgtggtgtaccgagatggagagagtgttcgggttcccagtccactacacagatgtcagcaacatgtctagactggccagacagagactgctgggaagaagctggtccgtccctgtgatcagacacctgttcgcccctctgaaggagtacttcgcctgcgtgagcagcggcaacagcaacgccaacagccggggccccagcttctctagcggcctggtgccactgtccctgagagggagccacatgggccccatggagatctacaaaaccgtgagcgcctggaagcggcagcctgtgcgcgtgctgagcctgtttcggaatatcgataaagtcctgaaaagcctgggattcctggagagcggctctggctccggcggtggcaccctgaagtacgtggaggatgtgacaaacgtggtcagacgggatgtggagaagtggggccccttcgatctggtgtacggcagcacccaacccctgggcagctcttgtgaccggtgccctggctggtacatgtttcagttccaccggatcctgcagtacgccctgccgagacaggagtcccagcggccattcttttggattttcatggacaacttgctgctgaccgaggatgaccaggaaactaccactcggttcctgcagaccgaagccgtgaccctgcaggacgtgagaggccgggactaccagaacgccatgcgggtgtggtccaacatccctggactgaaaagcaagcacgcacctctgacccctaaagaagaggagtacctgcaggcccaggtgcggagcagaagcaagctggacgcccctaaggtggatctgctggtgaagaattgcctcctgcccctgagagagtacttcaagtatttcagccagaatagtctgcccctgggaggcagcggcggcggccccagcgtgcccgtgaccttcagggacgtgttcgtgcagttcagcagggacgagtgggccctgctggacgacgagcagaaggagctgcaccagagcgtgatgcagagcaactacgagatgctgatgagcctgtactgcgacctggccaagcccgaggtgagcctgcagatggagaggggcgagccctgcctgcccgccgagcccgacctgcagggcaccgccgtgagcctgaaccccgccgccggcggcccaagcagcggcgcccctcctcccagcggcggcaggcggcccaagcagcggcgcccctcctcccagcggcggcagcccagccggctccccaacctctaccgaggagggcacctctgagtccgccacccccgagagcggccctggcacctccaccgagcccagcgagggcagcgcacccggcagccctgccggcagccccacctccacagaggagggaaccagcaccgagcccagcgaaggcagcgccccaggcaccagcaccgagcctagtgagcaggagattaaacggatcaacaagatcagaagaagacttgtgaaagacagcaacaccaagaaggccggcaagacaggccccatgaaaaccctgctggttagagtgatgacacccgatctgagagagcggctggaaaacctgagaaagaagcctgaaaatatcccccagcccatcagcaatacatctagagccaacctgaataagctgctgaccgattacaccgaaatgaagaaggcgatcctgcatgtgtactgggaagagttccagaaggaccctgtgggcctgatgagccgggtggcccagcctgccagcaagaagatcgatcagaacaagctgaaacctgagatggacgagaagggcaacctgaccaccgccggctttgcctgctctcagtgtggccagcccctgttcgtgtacaagctggagcaggtgtctgagaagggcaaggcttacaccaactacttcggacggtgcaatgtggccgagcacgaaaagctgatcctgctggcccagctgaagcccgagaaggatagcgacgaagccgtgacatatagcctgggaaagtttgggcagagggccctggatttctacagcattcatgtgaccaaggagtccacccaccccgtgaagcccctggcccagatcgccggaaacagatacgcctccggacctgtgggaaaggccctgagcgacgcatgtatgggcacaatcgcctccttcctgtctaagtaccaggacatcatcatcgaacaccagaaggtggtgaagggcaaccagaagagactggagagcctgcgggagctggccggcaaggaaaacctggaataccctagcgtgaccctgccacctcagcctcacaccaaggagggcgttgatgcctacaacgaagtgatcgcccgggtgcgaatgtgggtgaacctgaacctgtggcagaagctgaagctaagcagagatgatgccaagcctctgctgagactgaagggattcccttcctttcctctggtcgagagacaggccaacgaagtggactggtgggacatggtgtgtaacgtgaagaagctgatcaacgagaaaaaggaggatggcaaggtgttttggcagaatctggctggctacaagagacaggaagccctgagaccatacctgagcagcgaggaagatcggaagaagggaaagaaattcgctcggtaccagctgggcgacctgctgctgcacctggaaaagaagcacggcgaggactggggaaaggtgtacgacgaggcctgggagcggattgacaagaaagtggaaggcctgagcaagcacatcaagctggaagaggaacggagaagcgaggacgcccagagcaaggccgccctgaccgactggctgcgggctaaggccagcttcgtgatcgagggcctgaaggaggccgacaaggacgagttctgcagatgcgagctgaagctgcagaagtggtacggggacctgcggggaaagcccttcgccatcgaagccgagaacagcatcctggacatcagcggcttcagcaagcagtacaactgtgccttcatctggcagaaggacggcgtgaagaagctgaacctgtacctgatcatcaactacttcaagggcggcaagctgcggttcaagaagatcaaacctgaagccttcgaagccaacagattctacaccgtgatcaacaaaaagagcggcgagatcgtgcccatggaggtgaacttcaacttcgacgaccccaacctgatcatcctgcctctggcctttggcaagagacagggcagagaattcatctggaacgacctgctgtccctggaaaccggcagcctgaagctggccaacggaagagtgatcgagaagacactgtacaacagaagaacccggcaggatgagcctgccctgttcgtggccctgaccttcgagcggcgggaggtcctggactcctccaatatcaaaccaatgaacctgatcggcgtggcaagaggcgaaaacatccccgccgtgatcgccctgaccgaccccgagggctgcccactgagccggtttaaggatagcctgggaaacccaacccacatcctgagaatcggcgagagctataaggagaagcagcggaccatccaggccaagaaggaggtggagcagcggagagccggcggctacagccggaagtacgccagcaaagccaagaatctggcagacgatatggtgagaaacaccgctagagatctgctgtactacgccgtgacccaggatgccatgctgatcttcgccaacctgagccggggcttcggccggcagggcaagcggaccttcatggccgagagacagtacacacggatggaggactggctgaccgccaagctggcctacgagggcctgagcaagacctacctgtccaagacactggcccagtacacctccaagacatgcagcaactgtgggtttaccatcaccagcgccgactacgacagggtgctggagaagctgaagaagacagcaacaggctggatgaccacaattaacggcaaggagctgaaggtggagggccagattacctactacaacagatacaagagacagaacgtagtcaaggacctgtccgtcgagctggatagactgagcgaagaatctgtgaacaacgacatctcctcctggacaaagggcagaagcggagaagctctgagcctcctgaagaaaagattctcccatagacccgtgcaggagaagttcgtgtgcctgaactgcggcttcgagacacacgcagccgagcaagccgccctgaacatcgccagatcctggctgttcctgcggagccaggagtacaagaaataccagacaaacaagacaaccggcaacaccgataagagagccttcgtcgagacctggcagtccttttaccggaagaagcttaaggaggtgtggaaacctgccgtgcggtctggcggatctggcggaggctccaccagccccaagaaaaagagaaaagtctaagctgccttctgcggggcttgccttctggccatgcccttcttctctcccttgcacctgtacctcttggtctttgaataaagcctgagtaggaaggctagcaaaaaaaaaaaaaaaaaaaaaaaaaaaaaaaaaaaaaaaaaaaaaaaaaaaaaaaaaaaaaaaaaaaaaaaaaaaaaaaagcccagccggctccccaacctctaccgaggagggcacctctgagtccgccacccccgagagcggccctggcacctccaccgagcccagcgagggcagcgcacccggcagccctgccggcagccccacctccacagaggagggaaccagcaccgagcccagcgaaggcagcgccccaggcaccagcaccgagcctagtgagcaggagattaaacggatcaacaagatcagaagaagacttgtgaaagacagcaacaccaagaaggccggcaagacaggccccatgaaaaccctgctggttagagtgatgacacccgatctgagagagcggctggaaaacctgagaaagaagcctgaaaatatcccccagcccatcagcaatacatctagagccaacctgaataagctgctgaccgattacaccgaaatgaagaaggcgatcctgcatgtgtactgggaagagttccagaaggaccctgtgggcctgatgagccgggtggcccagcctgccagcaagaagatcgatcagaacaagctgaaacctgagatggacgagaagggcaacctgaccaccgccggctttgcctgctctcagtgtggccagcccctgttcgtgtacaagctggagcaggtgtctgagaagggcaaggcttacaccaactacttcggacggtgcaatgtggccgagcacgaaaagctgatcctgctggcccagctgaagcccgagaaggatagcgacgaagccgtgacatatagcctgggaaagtttgggcagagggccctggatttctacagcattcatgtgaccaaggagtccacccaccccgtgaagcccctggcccagatcgccggaaacagatacgcctccggacctgtgggaaaggccctgagcgacgcatgtatgggcacaatcgcctccttcctgtctaagtaccaggacatcatcatcgaacaccagaaggtggtgaagggcaaccagaagagactggagagcctgcgggagctggccggcaaggaaaacctggaataccctagcgtgaccctgccacctcagcctcacaccaaggagggcgttgatgcctacaacgaagtgatcgcccgggtgcgaatgtgggtgaacctgaacctgtggcagaagctgaagctaagcagagatgatgccaagcctctgctgagactgaagggattcccttcctttcctctggtcgagagacaggccaacgaagtggactggtgggacatggtgtgtaacgtgaagaagctgatcaacgagaaaaaggaggatggcaaggtgttttggcagaatctggctggctacaagagacaggaagccctgagaccatacctgagcagcgaggaagatcggaagaagggaaagaaattcgctcggtaccagctgggcgacctgctgctgcacctggaaaagaagcacggcgaggactggggaaaggtgtacgacgaggcctgggagcggattgacaagaaagtggaaggcctgagcaagcacatcaagctggaagaggaacggagaagcgaggacgcccagagcaaggccgccctgaccgactggctgcgggctaaggccagcttcgtgatcgagggcctgaaggaggccgacaaggacgagttctgcagatgcgagctgaagctgcagaagtggtacggggacctgcggggaaagcccttcgccatcgaagccgagaacagcatcctggacatcagcggcttcagcaagcagtacaactgtgccttcatctggcagaaggacggcgtgaagaagctgaacctgtacctgatcatcaactacttcaagggcggcaagctgcggttcaagaagatcaaacctgaagccttcgaagccaacagattctacaccgtgatcaacaaaaagagcggcgagatcgtgcccatggaggtgaacttcaacttcgacgaccccaacctgatcatcctgcctctggcctttggcaagagacagggcagagaattcatctggaacgacctgctgtccctggaaaccggcagcctgaagctggccaacggaagagtgatcgagaagacactgtacaacagaagaacccggcaggatgagcctgccctgttcgtggccctgaccttcgagcggcgggaggtcctggactcctccaatatcaaaccaatgaacctgatcggcgtggcaagaggcgaaaacatccccgccgtgatcgccctgaccgaccccgagggctgcccactgagccggtttaaggatagcctgggaaacccaacccacatcctgagaatcggcgagagctataaggagaagcagcggaccatccaggccaagaaggaggtggagcagcggagagccggcggctacagccggaagtacgccagcaaagccaagaatctggcagacgatatggtgagaaacaccgctagagatctgctgtactacgccgtgacccaggatgccatgctgatcttcgccaacctgagccggggcttcggccggcagggcaagcggaccttcatggccgagagacagtacacacggatggaggactggctgaccgccaagctggcctacgagggcctgagcaagacctacctgtccaagacactggcccagtacacctccaagacatgcagcaactgtgggtttaccatcaccagcgccgactacgacagggtgctggagaagctgaagaagacagcaacaggctggatgaccacaattaacggcaaggagctgaaggtggagggccagattacctactacaacagatacaagagacagaacgtagtcaaggacctgtccgtcgagctggatagactgagcgaagaatctgtgaacaacgacatctcctcctggacaaagggcagaagcggagaagctctgagcctcctgaagaaaagattctcccatagacccgtgcaggagaagttcgtgtgcctgaactgcggcttcgagacacacgcagccgagcaagccgccctgaacatcgccagatcctggctgttcctgcggagccaggagtacaagaaataccagacaaacaagacaaccggcaacaccgataagagagccttcgtcgagacctggcagtccttttaccggaagaagcttaaggaggtgtggaaacctgccgtgcggtctggcggatctggcggaggctccaccagccccaagaaaaagagaaaagtctaagctgccttctgcggggcttgccttctggccatgcccttcttctctcccttgcacctgtacctcttggtctttgaataaagcctgagtaggaaggctagcaaaaaaaaaaaaaaaaaaaaaaaaaaaaaaaaaaaaaaaaaaaaaaaaaaaaaaaaaaaaaaaaaaaaaaaaaaaaaaaa

SEQ ID NO: 10214 - RNA, 8787 nt, synthetic construct
  source 1..8787: mol_type = other RNA
aggaaataagagagaaaagaagagtaagaagaaatataagagccaccatggcccctaagaagaagcgtaaagtgagccggatgaaccacgaccaggagttcgacccccctaaggtgtaccctcccgtccccgccgagaagagaaagcccatccgggtcctgagcctgttcgatggcatcgccaccggtctgctggtgctgaaggacctgggcatccaggtggataggtacattgcctccgaggtgtgcgaggactccatcaccgtgggaatggtgcgtcatcagggcaagatcatgtacgtgggcgacgtgcggagcgtgacacagaagcatatccaggagtggggccctttcgacctggtgatcggcggcagcccttgcaatgacctgagcatcgtgaacccagcccggaagggcctgtacgagggaaccggcagactgttcttcgagttttacagactgctgcacgacgcccggcctaaggaaggcgacgaccggcccttcttttggctgttcgagaatgtggtggccatgggagtcagcgacaagcgggatattagccggttcctggagagcaaccccgtgatgatcgatgccaaggaagtgagcgccgcccaccgggccagatacttctggggcaatctgcctggcatgaacagacccctggccagcaccgtgaacgacaagctggagctgcaggagtgcctggagcacggccggatcgccaagttcagcaaggtgagaaccatcaccacccgaagcaacagcatcaaacaaggcaaggaccagcactttcctgtgttcatgaacgagaaggaggacatcctgtggtgtaccgagatggagagagtgttcgggttcccagtccactacacagatgtcagcaacatgtctagactggccagacagagactgctgggaagaagctggtccgtccctgtgatcagacacctgttcgcccctctgaaggagtacttcgcctgcgtgagcagcggcaacagcaacgccaacagccggggccccagcttctctagcggcctggtgccactgtccctgagagggagccacatgggccccatggagatctacaaaaccgtgagcgcctggaagcggcagcctgtgcgcgtgctgagcctgtttcggaatatcgataaagtcctgaaaagcctgggattcctggagagcggctctggctccggcggtggcaccctgaagtacgtggaggatgtgacaaacgtggtcagacgggatgtggagaagtggggccccttcgatctggtgtacggcagcacccaacccctgggcagctcttgtgaccggtgccctggctggtacatgtttcagttccaccggatcctgcagtacgccctgccgagacaggagtcccagcggccattcttttggattttcatggacaacttgctgctgaccgaggatgaccaggaaactaccactcggttcctgcagaccgaagccgtgaccctgcaggacgtgagaggccgggactaccagaacgccatgcgggtgtggtccaacatccctggactgaaaagcaagcacgcacctctgacccctaaagaagaggagtacctgcaggcccaggtgcggagcagaagcaagctggacgcccctaaggtggatctgctggtgaagaattgcctcctgcccctgagagagtacttcaagtatttcagccagaatagtctgcccctgggaggcagcggcggcggcttccaggagagcgtgaccttcgaggacgtggccatctacttcagcgagaacgagtggaccggcctggcccccgcccagagggccctgtacagggacgtgatgctggagaactacggcgccgtggccagcctggccgccttccccttccccaagcccgccctgatcttccagctggagcagggcgaggccccctggagcagcgccccccagggcgccctggacggcgagggccccaggggcatcggcggcccaagcagcggcgcccctcctcccagcggcggcaggcggcccaagcagcggcgcccctcctcccagcggcggcagcccagccggctccccaacctctaccgaggagggcacctctgagtccgccacccccgagagcggccctggcacctccaccgagcccagcgagggcagcgcacccggcagccctgccggcagccccacctccacagaggagggaaccagcaccgagcccagcgaaggcagcgccccaggcaccagcaccgagcctagtgagcaggagattaaacggatcaacaagatcagaagaagacttgtgaaagacagcaacaccaagaaggccggcaagacaggccccatgaaaaccctgctggttagagtgatgacacccgatctgagagagcggctggaaaacctgagaaagaagcctgaaaatatcccccagcccatcagcaatacatctagagccaacctgaataagctgctgaccgattacaccgaaatgaagaaggcgatcctgcatgtgtactgggaagagttccagaaggaccctgtgggcctgatgagccgggtggcccagcctgccagcaagaagatcgatcagaacaagctgaaacctgagatggacgagaagggcaacctgaccaccgccggctttgcctgctctcagtgtggccagcccctgttcgtgtacaagctggagcaggtgtctgagaagggcaaggcttacaccaactacttcggacggtgcaatgtggccgagcacgaaaagctgatcctgctggcccagctgaagcccgagaaggatagcgacgaagccgtgacatatagcctgggaaagtttgggcagagggccctggatttctacagcattcatgtgaccaaggagtccacccaccccgtgaagcccctggcccagatcgccggaaacagatacgcctccggacctgtgggaaaggccctgagcgacgcatgtatgggcacaatcgcctccttcctgtctaagtaccaggacatcatcatcgaacaccagaaggtggtgaagggcaaccagaagagactggagagcctgcgggagctggccggcaaggaaaacctggaataccctagcgtgaccctgccacctcagcctcacaccaaggagggcgttgatgcctacaacgaagtgatcgcccgggtgcgaatgtgggtgaacctgaacctgtggcagaagctgaagctaagcagagatgatgccaagcctctgctgagactgaagggattcccttcctttcctctggtcgagagacaggccaacgaagtggactggtgggacatggtgtgtaacgtgaagaagctgatcaacgagaaaaaggaggatggcaaggtgttttggcagaatctggctggctacaagagacaggaagccctgagaccatacctgagcagcgaggaagatcggaagaagggaaagaaattcgctcggtaccagctgggcgacctgctgctgcacctggaaaagaagcacggcgaggactggggaaaggtgtacgacgaggcctgggagcggattgacaagaaagtggaaggcctgagcaagcacatcaagctggaagaggaacggagaagcgaggacgcccagagcaaggccgccctgaccgactggctgcgggctaaggccagcttcgtgatcgagggcctgaaggaggccgacaaggacgagttctgcagatgcgagctgaagctgcagaagtggtacggggacctgcggggaaagcccttcgccatcgaagccgagaacagcatcctggacatcagcggcttcagcaagcagtacaactgtgccttcatctggcagaaggacggcgtgaagaagctgaacctgtacctgatcatcaactacttcaagggcggcaagctgcggttcaagaagatcaaacctgaagccttcgaagccaacagattctacaccgtgatcaacaaaaagagcggcgagatcgtgcccatggaggtgaacttcaacttcgacgaccccaacctgatcatcctgcctctggcctttggcaagagacagggcagagaattcatctggaacgacctgctgtccctggaaaccggcagcctgaagctggccaacggaagagtgatcgagaagacactgtacaacagaagaacccggcaggatgagcctgccctgttcgtggccctgaccttcgagcggcgggaggtcctggactcctccaatatcaaaccaatgaacctgatcggcgtggcaagaggcgaaaacatccccgccgtgatcgccctgaccgaccccgagggctgcccactgagccggtttaaggatagcctgggaaacccaacccacatcctgagaatcggcgagagctataaggagaagcagcggaccatccaggccaagaaggaggtggagcagcggagagccggcggctacagccggaagtacgccagcaaagccaagaatctggcagacgatatggtgagaaacaccgctagagatctgctgtactacgccgtgacccaggatgccatgctgatcttcgccaacctgagccggggcttcggccggcagggcaagcggaccttcatggccgagagacagtacacacggatggaggactggctgaccgccaagctggcctacgagggcctgagcaagacctacctgtccaagacactggcccagtacacctccaagacatgcagcaactgtgggtttaccatcaccagcgccgactacgacagggtgctggagaagctgaagaagacagcaacaggctggatgaccacaattaacggcaaggagctgaaggtggagggccagattacctactacaacagatacaagagacagaacgtagtcaaggacctgtccgtcgagctggatagactgagcgaagaatctgtgaacaacgacatctcctcctggacaaagggcagaagcggagaagctctgagcctcctgaagaaaagattctcccatagacccgtgcaggagaagttcgtgtgcctgaactgcggcttcgagacacacgcagccgagcaagccgccctgaacatcgccagatcctggctgttcctgcggagccaggagtacaagaaataccagacaaacaagacaaccggcaacaccgataagagagccttcgtcgagacctggcagtccttttaccggaagaagcttaaggaggtgtggaaacctgccgtgcggtctggcggatctggcggaggctccaccagccccaagaaaaagagaaaagtctaagctgccttctgcggggcttgccttctggccatgcccttcttctctcccttgcacctgtacctcttggtctttgaataaagcctgagtaggaaggctagcaaaaaaaaaaaaaaaaaaaaaaaaaaaaaaaaaaaaaaaaaaaaaaaaaaaaaaaaaaaaaaaaaaaaaaaaaaaaaaaagcccagccggctccccaacctctaccgaggagggcacctctgagtccgccacccccgagagcggccctggcacctccaccgagcccagcgagggcagcgcacccggcagccctgccggcagccccacctccacagaggagggaaccagcaccgagcccagcgaaggcagcgccccaggcaccagcaccgagcctagtgagcaggagattaaacggatcaacaagatcagaagaagacttgtgaaagacagcaacaccaagaaggccggcaagacaggccccatgaaaaccctgctggttagagtgatgacacccgatctgagagagcggctggaaaacctgagaaagaagcctgaaaatatcccccagcccatcagcaatacatctagagccaacctgaataagctgctgaccgattacaccgaaatgaagaaggcgatcctgcatgtgtactgggaagagttccagaaggaccctgtgggcctgatgagccgggtggcccagcctgccagcaagaagatcgatcagaacaagctgaaacctgagatggacgagaagggcaacctgaccaccgccggctttgcctgctctcagtgtggccagcccctgttcgtgtacaagctggagcaggtgtctgagaagggcaaggcttacaccaactacttcggacggtgcaatgtggccgagcacgaaaagctgatcctgctggcccagctgaagcccgagaaggatagcgacgaagccgtgacatatagcctgggaaagtttgggcagagggccctggatttctacagcattcatgtgaccaaggagtccacccaccccgtgaagcccctggcccagatcgccggaaacagatacgcctccggacctgtgggaaaggccctgagcgacgcatgtatgggcacaatcgcctccttcctgtctaagtaccaggacatcatcatcgaacaccagaaggtggtgaagggcaaccagaagagactggagagcctgcgggagctggccggcaaggaaaacctggaataccctagcgtgaccctgccacctcagcctcacaccaaggagggcgttgatgcctacaacgaagtgatcgcccgggtgcgaatgtgggtgaacctgaacctgtggcagaagctgaagctaagcagagatgatgccaagcctctgctgagactgaagggattcccttcctttcctctggtcgagagacaggccaacgaagtggactggtgggacatggtgtgtaacgtgaagaagctgatcaacgagaaaaaggaggatggcaaggtgttttggcagaatctggctggctacaagagacaggaagccctgagaccatacctgagcagcgaggaagatcggaagaagggaaagaaattcgctcggtaccagctgggcgacctgctgctgcacctggaaaagaagcacggcgaggactggggaaaggtgtacgacgaggcctgggagcggattgacaagaaagtggaaggcctgagcaagcacatcaagctggaagaggaacggagaagcgaggacgcccagagcaaggccgccctgaccgactggctgcgggctaaggccagcttcgtgatcgagggcctgaaggaggccgacaaggacgagttctgcagatgcgagctgaagctgcagaagtggtacggggacctgcggggaaagcccttcgccatcgaagccgagaacagcatcctggacatcagcggcttcagcaagcagtacaactgtgccttcatctggcagaaggacggcgtgaagaagctgaacctgtacctgatcatcaactacttcaagggcggcaagctgcggttcaagaagatcaaacctgaagccttcgaagccaacagattctacaccgtgatcaacaaaaagagcggcgagatcgtgcccatggaggtgaacttcaacttcgacgaccccaacctgatcatcctgcctctggcctttggcaagagacagggcagagaattcatctggaacgacctgctgtccctggaaaccggcagcctgaagctggccaacggaagagtgatcgagaagacactgtacaacagaagaacccggcaggatgagcctgccctgttcgtggccctgaccttcgagcggcgggaggtcctggactcctccaatatcaaaccaatgaacctgatcggcgtggcaagaggcgaaaacatccccgccgtgatcgccctgaccgaccccgagggctgcccactgagccggtttaaggatagcctgggaaacccaacccacatcctgagaatcggcgagagctataaggagaagcagcggaccatccaggccaagaaggaggtggagcagcggagagccggcggctacagccggaagtacgccagcaaagccaagaatctggcagacgatatggtgagaaacaccgctagagatctgctgtactacgccgtgacccaggatgccatgctgatcttcgccaacctgagccggggcttcggccggcagggcaagcggaccttcatggccgagagacagtacacacggatggaggactggctgaccgccaagctggcctacgagggcctgagcaagacctacctgtccaagacactggcccagtacacctccaagacatgcagcaactgtgggtttaccatcaccagcgccgactacgacagggtgctggagaagctgaagaagacagcaacaggctggatgaccacaattaacggcaaggagctgaaggtggagggccagattacctactacaacagatacaagagacagaacgtagtcaaggacctgtccgtcgagctggatagactgagcgaagaatctgtgaacaacgacatctcctcctggacaaagggcagaagcggagaagctctgagcctcctgaagaaaagattctcccatagacccgtgcaggagaagttcgtgtgcctgaactgcggcttcgagacacacgcagccgagcaagccgccctgaacatcgccagatcctggctgttcctgcggagccaggagtacaagaaataccagacaaacaagacaaccggcaacaccgataagagagccttcgtcgagacctggcagtccttttaccggaagaagcttaaggaggtgtggaaacctgccgtgcggtctggcggatctggcggaggctccaccagccccaagaaaaagagaaaagtctaagctgccttctgcggggcttgccttctggccatgcccttcttctctcccttgcacctgtacctcttggtctttgaataaagcctgagtaggaaggctagcaaaaaaaaaaaaaaaaaaaaaaaaaaaaaaaaaaaaaaaaaaaaaaaaaaaaaaaaaaaaaaaaaaaaaaaaaaaaaaaa

SEQ ID NO: 10215 - RNA, 8787 nt, synthetic construct
  source 1..8787: mol_type = other RNA
aggaaataagagagaaaagaagagtaagaagaaatataagagccaccatggcccctaagaagaagcgtaaagtgagccggatgaaccacgaccaggagttcgacccccctaaggtgtaccctcccgtccccgccgagaagagaaagcccatccgggtcctgagcctgttcgatggcatcgccaccggtctgctggtgctgaaggacctgggcatccaggtggataggtacattgcctccgaggtgtgcgaggactccatcaccgtgggaatggtgcgtcatcagggcaagatcatgtacgtgggcgacgtgcggagcgtgacacagaagcatatccaggagtggggccctttcgacctggtgatcggcggcagcccttgcaatgacctgagcatcgtgaacccagcccggaagggcctgtacgagggaaccggcagactgttcttcgagttttacagactgctgcacgacgcccggcctaaggaaggcgacgaccggcccttcttttggctgttcgagaatgtggtggccatgggagtcagcgacaagcgggatattagccggttcctggagagcaaccccgtgatgatcgatgccaaggaagtgagcgccgcccaccgggccagatacttctggggcaatctgcctggcatgaacagacccctggccagcaccgtgaacgacaagctggagctgcaggagtgcctggagcacggccggatcgccaagttcagcaaggtgagaaccatcaccacccgaagcaacagcatcaaacaaggcaaggaccagcactttcctgtgttcatgaacgagaaggaggacatcctgtggtgtaccgagatggagagagtgttcgggttcccagtccactacacagatgtcagcaacatgtctagactggccagacagagactgctgggaagaagctggtccgtccctgtgatcagacacctgttcgcccctctgaaggagtacttcgcctgcgtgagcagcggcaacagcaacgccaacagccggggccccagcttctctagcggcctggtgccactgtccctgagagggagccacatgggccccatggagatctacaaaaccgtgagcgcctggaagcggcagcctgtgcgcgtgctgagcctgtttcggaatatcgataaagtcctgaaaagcctgggattcctggagagcggctctggctccggcggtggcaccctgaagtacgtggaggatgtgacaaacgtggtcagacgggatgtggagaagtggggccccttcgatctggtgtacggcagcacccaacccctgggcagctcttgtgaccggtgccctggctggtacatgtttcagttccaccggatcctgcagtacgccctgccgagacaggagtcccagcggccattcttttggattttcatggacaacttgctgctgaccgaggatgaccaggaaactaccactcggttcctgcagaccgaagccgtgaccctgcaggacgtgagaggccgggactaccagaacgccatgcgggtgtggtccaacatccctggactgaaaagcaagcacgcacctctgacccctaaagaagaggagtacctgcaggcccaggtgcggagcagaagcaagctggacgcccctaaggtggatctgctggtgaagaattgcctcctgcccctgagagagtacttcaagtatttcagccagaatagtctgcccctgggaggcagcggcggcggcatgggccccctgaccatcagggacgtgaccgtggagttcagcctggaggagtggcactgcctggacaccgcccagcagaacctgtacagggacgtgatgctggagaactacaggaacctggtgttcctgggcatcgccgtgagcaagcccgacctgatcacctgcctggagcagggcaaggagccctgcaacatgaagaggcacgagatggtggccaagccccccgtgatgtgcagccacatcggcggcccaagcagcggcgcccctcctcccagcggcggcaggcggcccaagcagcggcgcccctcctcccagcggcggcagcccagccggctccccaacctctaccgaggagggcacctctgagtccgccacccccgagagcggccctggcacctccaccgagcccagcgagggcagcgcacccggcagccctgccggcagccccacctccacagaggagggaaccagcaccgagcccagcgaaggcagcgccccaggcaccagcaccgagcctagtgagcaggagattaaacggatcaacaagatcagaagaagacttgtgaaagacagcaacaccaagaaggccggcaagacaggccccatgaaaaccctgctggttagagtgatgacacccgatctgagagagcggctggaaaacctgagaaagaagcctgaaaatatcccccagcccatcagcaatacatctagagccaacctgaataagctgctgaccgattacaccgaaatgaagaaggcgatcctgcatgtgtactgggaagagttccagaaggaccctgtgggcctgatgagccgggtggcccagcctgccagcaagaagatcgatcagaacaagctgaaacctgagatggacgagaagggcaacctgaccaccgccggctttgcctgctctcagtgtggccagcccctgttcgtgtacaagctggagcaggtgtctgagaagggcaaggcttacaccaactacttcggacggtgcaatgtggccgagcacgaaaagctgatcctgctggcccagctgaagcccgagaaggatagcgacgaagccgtgacatatagcctgggaaagtttgggcagagggccctggatttctacagcattcatgtgaccaaggagtccacccaccccgtgaagcccctggcccagatcgccggaaacagatacgcctccggacctgtgggaaaggccctgagcgacgcatgtatgggcacaatcgcctccttcctgtctaagtaccaggacatcatcatcgaacaccagaaggtggtgaagggcaaccagaagagactggagagcctgcgggagctggccggcaaggaaaacctggaataccctagcgtgaccctgccacctcagcctcacaccaaggagggcgttgatgcctacaacgaagtgatcgcccgggtgcgaatgtgggtgaacctgaacctgtggcagaagctgaagctaagcagagatgatgccaagcctctgctgagactgaagggattcccttcctttcctctggtcgagagacaggccaacgaagtggactggtgggacatggtgtgtaacgtgaagaagctgatcaacgagaaaaaggaggatggcaaggtgttttggcagaatctggctggctacaagagacaggaagccctgagaccatacctgagcagcgaggaagatcggaagaagggaaagaaattcgctcggtaccagctgggcgacctgctgctgcacctggaaaagaagcacggcgaggactggggaaaggtgtacgacgaggcctgggagcggattgacaagaaagtggaaggcctgagcaagcacatcaagctggaagaggaacggagaagcgaggacgcccagagcaaggccgccctgaccgactggctgcgggctaaggccagcttcgtgatcgagggcctgaaggaggccgacaaggacgagttctgcagatgcgagctgaagctgcagaagtggtacggggacctgcggggaaagcccttcgccatcgaagccgagaacagcatcctggacatcagcggcttcagcaagcagtacaactgtgccttcatctggcagaaggacggcgtgaagaagctgaacctgtacctgatcatcaactacttcaagggcggcaagctgcggttcaagaagatcaaacctgaagccttcgaagccaacagattctacaccgtgatcaacaaaaagagcggcgagatcgtgcccatggaggtgaacttcaacttcgacgaccccaacctgatcatcctgcctctggcctttggcaagagacagggcagagaattcatctggaacgacctgctgtccctggaaaccggcagcctgaagctggccaacggaagagtgatcgagaagacactgtacaacagaagaacccggcaggatgagcctgccctgttcgtggccctgaccttcgagcggcgggaggtcctggactcctccaatatcaaaccaatgaacctgatcggcgtggcaagaggcgaaaacatccccgccgtgatcgccctgaccgaccccgagggctgcccactgagccggtttaaggatagcctgggaaacccaacccacatcctgagaatcggcgagagctataaggagaagcagcggaccatccaggccaagaaggaggtggagcagcggagagccggcggctacagccggaagtacgccagcaaagccaagaatctggcagacgatatggtgagaaacaccgctagagatctgctgtactacgccgtgacccaggatgccatgctgatcttcgccaacctgagccggggcttcggccggcagggcaagcggaccttcatggccgagagacagtacacacggatggaggactggctgaccgccaagctggcctacgagggcctgagcaagacctacctgtccaagacactggcccagtacacctccaagacatgcagcaactgtgggtttaccatcaccagcgccgactacgacagggtgctggagaagctgaagaagacagcaacaggctggatgaccacaattaacggcaaggagctgaaggtggagggccagattacctactacaacagatacaagagacagaacgtagtcaaggacctgtccgtcgagctggatagactgagcgaagaatctgtgaacaacgacatctcctcctggacaaagggcagaagcggagaagctctgagcctcctgaagaaaagattctcccatagacccgtgcaggagaagttcgtgtgcctgaactgcggcttcgagacacacgcagccgagcaagccgccctgaacatcgccagatcctggctgttcctgcggagccaggagtacaagaaataccagacaaacaagacaaccggcaacaccgataagagagccttcgtcgagacctggcagtccttttaccggaagaagcttaaggaggtgtggaaacctgccgtgcggtctggcggatctggcggaggctccaccagccccaagaaaaagagaaaagtctaagctgccttctgcggggcttgccttctggccatgcccttcttctctcccttgcacctgtacctcttggtctttgaataaagcctgagtaggaaggctagcaaaaaaaaaaaaaaaaaaaaaaaaaaaaaaaaaaaaaaaaaaaaaaaaaaaaaaaaaaaaaaaaaaaaaaaaaaaaaaaagcccagccggctccccaacctctaccgaggagggcacctctgagtccgccacccccgagagcggccctggcacctccaccgagcccagcgagggcagcgcacccggcagccctgccggcagccccacctccacagaggagggaaccagcaccgagcccagcgaaggcagcgccccaggcaccagcaccgagcctagtgagcaggagattaaacggatcaacaagatcagaagaagacttgtgaaagacagcaacaccaagaaggccggcaagacaggccccatgaaaaccctgctggttagagtgatgacacccgatctgagagagcggctggaaaacctgagaaagaagcctgaaaatatcccccagcccatcagcaatacatctagagccaacctgaataagctgctgaccgattacaccgaaatgaagaaggcgatcctgcatgtgtactgggaagagttccagaaggaccctgtgggcctgatgagccgggtggcccagcctgccagcaagaagatcgatcagaacaagctgaaacctgagatggacgagaagggcaacctgaccaccgccggctttgcctgctctcagtgtggccagcccctgttcgtgtacaagctggagcaggtgtctgagaagggcaaggcttacaccaactacttcggacggtgcaatgtggccgagcacgaaaagctgatcctgctggcccagctgaagcccgagaaggatagcgacgaagccgtgacatatagcctgggaaagtttgggcagagggccctggatttctacagcattcatgtgaccaaggagtccacccaccccgtgaagcccctggcccagatcgccggaaacagatacgcctccggacctgtgggaaaggccctgagcgacgcatgtatgggcacaatcgcctccttcctgtctaagtaccaggacatcatcatcgaacaccagaaggtggtgaagggcaaccagaagagactggagagcctgcgggagctggccggcaaggaaaacctggaataccctagcgtgaccctgccacctcagcctcacaccaaggagggcgttgatgcctacaacgaagtgatcgcccgggtgcgaatgtgggtgaacctgaacctgtggcagaagctgaagctaagcagagatgatgccaagcctctgctgagactgaagggattcccttcctttcctctggtcgagagacaggccaacgaagtggactggtgggacatggtgtgtaacgtgaagaagctgatcaacgagaaaaaggaggatggcaaggtgttttggcagaatctggctggctacaagagacaggaagccctgagaccatacctgagcagcgaggaagatcggaagaagggaaagaaattcgctcggtaccagctgggcgacctgctgctgcacctggaaaagaagcacggcgaggactggggaaaggtgtacgacgaggcctgggagcggattgacaagaaagtggaaggcctgagcaagcacatcaagctggaagaggaacggagaagcgaggacgcccagagcaaggccgccctgaccgactggctgcgggctaaggccagcttcgtgatcgagggcctgaaggaggccgacaaggacgagttctgcagatgcgagctgaagctgcagaagtggtacggggacctgcggggaaagcccttcgccatcgaagccgagaacagcatcctggacatcagcggcttcagcaagcagtacaactgtgccttcatctggcagaaggacggcgtgaagaagctgaacctgtacctgatcatcaactacttcaagggcggcaagctgcggttcaagaagatcaaacctgaagccttcgaagccaacagattctacaccgtgatcaacaaaaagagcggcgagatcgtgcccatggaggtgaacttcaacttcgacgaccccaacctgatcatcctgcctctggcctttggcaagagacagggcagagaattcatctggaacgacctgctgtccctggaaaccggcagcctgaagctggccaacggaagagtgatcgagaagacactgtacaacagaagaacccggcaggatgagcctgccctgttcgtggccctgaccttcgagcggcgggaggtcctggactcctccaatatcaaaccaatgaacctgatcggcgtggcaagaggcgaaaacatccccgccgtgatcgccctgaccgaccccgagggctgcccactgagccggtttaaggatagcctgggaaacccaacccacatcctgagaatcggcgagagctataaggagaagcagcggaccatccaggccaagaaggaggtggagcagcggagagccggcggctacagccggaagtacgccagcaaagccaagaatctggcagacgatatggtgagaaacaccgctagagatctgctgtactacgccgtgacccaggatgccatgctgatcttcgccaacctgagccggggcttcggccggcagggcaagcggaccttcatggccgagagacagtacacacggatggaggactggctgaccgccaagctggcctacgagggcctgagcaagacctacctgtccaagacactggcccagtacacctccaagacatgcagcaactgtgggtttaccatcaccagcgccgactacgacagggtgctggagaagctgaagaagacagcaacaggctggatgaccacaattaacggcaaggagctgaaggtggagggccagattacctactacaacagatacaagagacagaacgtagtcaaggacctgtccgtcgagctggatagactgagcgaagaatctgtgaacaacgacatctcctcctggacaaagggcagaagcggagaagctctgagcctcctgaagaaaagattctcccatagacccgtgcaggagaagttcgtgtgcctgaactgcggcttcgagacacacgcagccgagcaagccgccctgaacatcgccagatcctggctgttcctgcggagccaggagtacaagaaataccagacaaacaagacaaccggcaacaccgataagagagccttcgtcgagacctggcagtccttttaccggaagaagcttaaggaggtgtggaaacctgccgtgcggtctggcggatctggcggaggctccaccagccccaagaaaaagagaaaagtctaagctgccttctgcggggcttgccttctggccatgcccttcttctctcccttgcacctgtacctcttggtctttgaataaagcctgagtaggaaggctagcaaaaaaaaaaaaaaaaaaaaaaaaaaaaaaaaaaaaaaaaaaaaaaaaaaaaaaaaaaaaaaaaaaaaaaaaaaaaaaaa

SEQ ID NO: 10216 - RNA, 8787 nt, synthetic construct
  source 1..8787: mol_type = other RNA
aggaaataagagagaaaagaagagtaagaagaaatataagagccaccatggcccctaagaagaagcgtaaagtgagccggatgaaccacgaccaggagttcgacccccctaaggtgtaccctcccgtccccgccgagaagagaaagcccatccgggtcctgagcctgttcgatggcatcgccaccggtctgctggtgctgaaggacctgggcatccaggtggataggtacattgcctccgaggtgtgcgaggactccatcaccgtgggaatggtgcgtcatcagggcaagatcatgtacgtgggcgacgtgcggagcgtgacacagaagcatatccaggagtggggccctttcgacctggtgatcggcggcagcccttgcaatgacctgagcatcgtgaacccagcccggaagggcctgtacgagggaaccggcagactgttcttcgagttttacagactgctgcacgacgcccggcctaaggaaggcgacgaccggcccttcttttggctgttcgagaatgtggtggccatgggagtcagcgacaagcgggatattagccggttcctggagagcaaccccgtgatgatcgatgccaaggaagtgagcgccgcccaccgggccagatacttctggggcaatctgcctggcatgaacagacccctggccagcaccgtgaacgacaagctggagctgcaggagtgcctggagcacggccggatcgccaagttcagcaaggtgagaaccatcaccacccgaagcaacagcatcaaacaaggcaaggaccagcactttcctgtgttcatgaacgagaaggaggacatcctgtggtgtaccgagatggagagagtgttcgggttcccagtccactacacagatgtcagcaacatgtctagactggccagacagagactgctgggaagaagctggtccgtccctgtgatcagacacctgttcgcccctctgaaggagtacttcgcctgcgtgagcagcggcaacagcaacgccaacagccggggccccagcttctctagcggcctggtgccactgtccctgagagggagccacatgggccccatggagatctacaaaaccgtgagcgcctggaagcggcagcctgtgcgcgtgctgagcctgtttcggaatatcgataaagtcctgaaaagcctgggattcctggagagcggctctggctccggcggtggcaccctgaagtacgtggaggatgtgacaaacgtggtcagacgggatgtggagaagtggggccccttcgatctggtgtacggcagcacccaacccctgggcagctcttgtgaccggtgccctggctggtacatgtttcagttccaccggatcctgcagtacgccctgccgagacaggagtcccagcggccattcttttggattttcatggacaacttgctgctgaccgaggatgaccaggaaactaccactcggttcctgcagaccgaagccgtgaccctgcaggacgtgagaggccgggactaccagaacgccatgcgggtgtggtccaacatccctggactgaaaagcaagcacgcacctctgacccctaaagaagaggagtacctgcaggcccaggtgcggagcagaagcaagctggacgcccctaaggtggatctgctggtgaagaattgcctcctgcccctgagagagtacttcaagtatttcagccagaatagtctgcccctgggaggcagcggcggcggccagccccaggaggccatgaccttcaaggacgtggaggtgaccttcagccaggacgagtggggcagcctggacagcgcccagaggaacctgtacagggacgtgatgctggagaactacaggaacatggtgagcctggtgggccccttcaccaagcccgccctgatcagctggctggaggccagggagccctggggcctgaacgtgcaggccgcccagcccaagggcaaccccggcgccgcccccggcggcccaagcagcggcgcccctcctcccagcggcggcaggcggcccaagcagcggcgcccctcctcccagcggcggcagcccagccggctccccaacctctaccgaggagggcacctctgagtccgccacccccgagagcggccctggcacctccaccgagcccagcgagggcagcgcacccggcagccctgccggcagccccacctccacagaggagggaaccagcaccgagcccagcgaaggcagcgccccaggcaccagcaccgagcctagtgagcaggagattaaacggatcaacaagatcagaagaagacttgtgaaagacagcaacaccaagaaggccggcaagacaggccccatgaaaaccctgctggttagagtgatgacacccgatctgagagagcggctggaaaacctgagaaagaagcctgaaaatatcccccagcccatcagcaatacatctagagccaacctgaataagctgctgaccgattacaccgaaatgaagaaggcgatcctgcatgtgtactgggaagagttccagaaggaccctgtgggcctgatgagccgggtggcccagcctgccagcaagaagatcgatcagaacaagctgaaacctgagatggacgagaagggcaacctgaccaccgccggctttgcctgctctcagtgtggccagcccctgttcgtgtacaagctggagcaggtgtctgagaagggcaaggcttacaccaactacttcggacggtgcaatgtggccgagcacgaaaagctgatcctgctggcccagctgaagcccgagaaggatagcgacgaagccgtgacatatagcctgggaaagtttgggcagagggccctggatttctacagcattcatgtgaccaaggagtccacccaccccgtgaagcccctggcccagatcgccggaaacagatacgcctccggacctgtgggaaaggccctgagcgacgcatgtatgggcacaatcgcctccttcctgtctaagtaccaggacatcatcatcgaacaccagaaggtggtgaagggcaaccagaagagactggagagcctgcgggagctggccggcaaggaaaacctggaataccctagcgtgaccctgccacctcagcctcacaccaaggagggcgttgatgcctacaacgaagtgatcgcccgggtgcgaatgtgggtgaacctgaacctgtggcagaagctgaagctaagcagagatgatgccaagcctctgctgagactgaagggattcccttcctttcctctggtcgagagacaggccaacgaagtggactggtgggacatggtgtgtaacgtgaagaagctgatcaacgagaaaaaggaggatggcaaggtgttttggcagaatctggctggctacaagagacaggaagccctgagaccatacctgagcagcgaggaagatcggaagaagggaaagaaattcgctcggtaccagctgggcgacctgctgctgcacctggaaaagaagcacggcgaggactggggaaaggtgtacgacgaggcctgggagcggattgacaagaaagtggaaggcctgagcaagcacatcaagctggaagaggaacggagaagcgaggacgcccagagcaaggccgccctgaccgactggctgcgggctaaggccagcttcgtgatcgagggcctgaaggaggccgacaaggacgagttctgcagatgcgagctgaagctgcagaagtggtacggggacctgcggggaaagcccttcgccatcgaagccgagaacagcatcctggacatcagcggcttcagcaagcagtacaactgtgccttcatctggcagaaggacggcgtgaagaagctgaacctgtacctgatcatcaactacttcaagggcggcaagctgcggttcaagaagatcaaacctgaagccttcgaagccaacagattctacaccgtgatcaacaaaaagagcggcgagatcgtgcccatggaggtgaacttcaacttcgacgaccccaacctgatcatcctgcctctggcctttggcaagagacagggcagagaattcatctggaacgacctgctgtccctggaaaccggcagcctgaagctggccaacggaagagtgatcgagaagacactgtacaacagaagaacccggcaggatgagcctgccctgttcgtggccctgaccttcgagcggcgggaggtcctggactcctccaatatcaaaccaatgaacctgatcggcgtggcaagaggcgaaaacatccccgccgtgatcgccctgaccgaccccgagggctgcccactgagccggtttaaggatagcctgggaaacccaacccacatcctgagaatcggcgagagctataaggagaagcagcggaccatccaggccaagaaggaggtggagcagcggagagccggcggctacagccggaagtacgccagcaaagccaagaatctggcagacgatatggtgagaaacaccgctagagatctgctgtactacgccgtgacccaggatgccatgctgatcttcgccaacctgagccggggcttcggccggcagggcaagcggaccttcatggccgagagacagtacacacggatggaggactggctgaccgccaagctggcctacgagggcctgagcaagacctacctgtccaagacactggcccagtacacctccaagacatgcagcaactgtgggtttaccatcaccagcgccgactacgacagggtgctggagaagctgaagaagacagcaacaggctggatgaccacaattaacggcaaggagctgaaggtggagggccagattacctactacaacagatacaagagacagaacgtagtcaaggacctgtccgtcgagctggatagactgagcgaagaatctgtgaacaacgacatctcctcctggacaaagggcagaagcggagaagctctgagcctcctgaagaaaagattctcccatagacccgtgcaggagaagttcgtgtgcctgaactgcggcttcgagacacacgcagccgagcaagccgccctgaacatcgccagatcctggctgttcctgcggagccaggagtacaagaaataccagacaaacaagacaaccggcaacaccgataagagagccttcgtcgagacctggcagtccttttaccggaagaagcttaaggaggtgtggaaacctgccgtgcggtctggcggatctggcggaggctccaccagccccaagaaaaagagaaaagtctaagctgccttctgcggggcttgccttctggccatgcccttcttctctcccttgcacctgtacctcttggtctttgaataaagcctgagtaggaaggctagcaaaaaaaaaaaaaaaaaaaaaaaaaaaaaaaaaaaaaaaaaaaaaaaaaaaaaaaaaaaaaaaaaaaaaaaaaaaaaaaagcccagccggctccccaacctctaccgaggagggcacctctgagtccgccacccccgagagcggccctggcacctccaccgagcccagcgagggcagcgcacccggcagccctgccggcagccccacctccacagaggagggaaccagcaccgagcccagcgaaggcagcgccccaggcaccagcaccgagcctagtgagcaggagattaaacggatcaacaagatcagaagaagacttgtgaaagacagcaacaccaagaaggccggcaagacaggccccatgaaaaccctgctggttagagtgatgacacccgatctgagagagcggctggaaaacctgagaaagaagcctgaaaatatcccccagcccatcagcaatacatctagagccaacctgaataagctgctgaccgattacaccgaaatgaagaaggcgatcctgcatgtgtactgggaagagttccagaaggaccctgtgggcctgatgagccgggtggcccagcctgccagcaagaagatcgatcagaacaagctgaaacctgagatggacgagaagggcaacctgaccaccgccggctttgcctgctctcagtgtggccagcccctgttcgtgtacaagctggagcaggtgtctgagaagggcaaggcttacaccaactacttcggacggtgcaatgtggccgagcacgaaaagctgatcctgctggcccagctgaagcccgagaaggatagcgacgaagccgtgacatatagcctgggaaagtttgggcagagggccctggatttctacagcattcatgtgaccaaggagtccacccaccccgtgaagcccctggcccagatcgccggaaacagatacgcctccggacctgtgggaaaggccctgagcgacgcatgtatgggcacaatcgcctccttcctgtctaagtaccaggacatcatcatcgaacaccagaaggtggtgaagggcaaccagaagagactggagagcctgcgggagctggccggcaaggaaaacctggaataccctagcgtgaccctgccacctcagcctcacaccaaggagggcgttgatgcctacaacgaagtgatcgcccgggtgcgaatgtgggtgaacctgaacctgtggcagaagctgaagctaagcagagatgatgccaagcctctgctgagactgaagggattcccttcctttcctctggtcgagagacaggccaacgaagtggactggtgggacatggtgtgtaacgtgaagaagctgatcaacgagaaaaaggaggatggcaaggtgttttggcagaatctggctggctacaagagacaggaagccctgagaccatacctgagcagcgaggaagatcggaagaagggaaagaaattcgctcggtaccagctgggcgacctgctgctgcacctggaaaagaagcacggcgaggactggggaaaggtgtacgacgaggcctgggagcggattgacaagaaagtggaaggcctgagcaagcacatcaagctggaagaggaacggagaagcgaggacgcccagagcaaggccgccctgaccgactggctgcgggctaaggccagcttcgtgatcgagggcctgaaggaggccgacaaggacgagttctgcagatgcgagctgaagctgcagaagtggtacggggacctgcggggaaagcccttcgccatcgaagccgagaacagcatcctggacatcagcggcttcagcaagcagtacaactgtgccttcatctggcagaaggacggcgtgaagaagctgaacctgtacctgatcatcaactacttcaagggcggcaagctgcggttcaagaagatcaaacctgaagccttcgaagccaacagattctacaccgtgatcaacaaaaagagcggcgagatcgtgcccatggaggtgaacttcaacttcgacgaccccaacctgatcatcctgcctctggcctttggcaagagacagggcagagaattcatctggaacgacctgctgtccctggaaaccggcagcctgaagctggccaacggaagagtgatcgagaagacactgtacaacagaagaacccggcaggatgagcctgccctgttcgtggccctgaccttcgagcggcgggaggtcctggactcctccaatatcaaaccaatgaacctgatcggcgtggcaagaggcgaaaacatccccgccgtgatcgccctgaccgaccccgagggctgcccactgagccggtttaaggatagcctgggaaacccaacccacatcctgagaatcggcgagagctataaggagaagcagcggaccatccaggccaagaaggaggtggagcagcggagagccggcggctacagccggaagtacgccagcaaagccaagaatctggcagacgatatggtgagaaacaccgctagagatctgctgtactacgccgtgacccaggatgccatgctgatcttcgccaacctgagccggggcttcggccggcagggcaagcggaccttcatggccgagagacagtacacacggatggaggactggctgaccgccaagctggcctacgagggcctgagcaagacctacctgtccaagacactggcccagtacacctccaagacatgcagcaactgtgggtttaccatcaccagcgccgactacgacagggtgctggagaagctgaagaagacagcaacaggctggatgaccacaattaacggcaaggagctgaaggtggagggccagattacctactacaacagatacaagagacagaacgtagtcaaggacctgtccgtcgagctggatagactgagcgaagaatctgtgaacaacgacatctcctcctggacaaagggcagaagcggagaagctctgagcctcctgaagaaaagattctcccatagacccgtgcaggagaagttcgtgtgcctgaactgcggcttcgagacacacgcagccgagcaagccgccctgaacatcgccagatcctggctgttcctgcggagccaggagtacaagaaataccagacaaacaagacaaccggcaacaccgataagagagccttcgtcgagacctggcagtccttttaccggaagaagcttaaggaggtgtggaaacctgccgtgcggtctggcggatctggcggaggctccaccagccccaagaaaaagagaaaagtctaagctgccttctgcggggcttgccttctggccatgcccttcttctctcccttgcacctgtacctcttggtctttgaataaagcctgagtaggaaggctagcaaaaaaaaaaaaaaaaaaaaaaaaaaaaaaaaaaaaaaaaaaaaaaaaaaaaaaaaaaaaaaaaaaaaaaaaaaaaaaaa

SEQ ID NO: 10217 - RNA, 8787 nt, synthetic construct
  source 1..8787: mol_type = other RNA
aggaaataagagagaaaagaagagtaagaagaaatataagagccaccatggcccctaagaagaagcgtaaagtgagccggatgaaccacgaccaggagttcgacccccctaaggtgtaccctcccgtccccgccgagaagagaaagcccatccgggtcctgagcctgttcgatggcatcgccaccggtctgctggtgctgaaggacctgggcatccaggtggataggtacattgcctccgaggtgtgcgaggactccatcaccgtgggaatggtgcgtcatcagggcaagatcatgtacgtgggcgacgtgcggagcgtgacacagaagcatatccaggagtggggccctttcgacctggtgatcggcggcagcccttgcaatgacctgagcatcgtgaacccagcccggaagggcctgtacgagggaaccggcagactgttcttcgagttttacagactgctgcacgacgcccggcctaaggaaggcgacgaccggcccttcttttggctgttcgagaatgtggtggccatgggagtcagcgacaagcgggatattagccggttcctggagagcaaccccgtgatgatcgatgccaaggaagtgagcgccgcccaccgggccagatacttctggggcaatctgcctggcatgaacagacccctggccagcaccgtgaacgacaagctggagctgcaggagtgcctggagcacggccggatcgccaagttcagcaaggtgagaaccatcaccacccgaagcaacagcatcaaacaaggcaaggaccagcactttcctgtgttcatgaacgagaaggaggacatcctgtggtgtaccgagatggagagagtgttcgggttcccagtccactacacagatgtcagcaacatgtctagactggccagacagagactgctgggaagaagctggtccgtccctgtgatcagacacctgttcgcccctctgaaggagtacttcgcctgcgtgagcagcggcaacagcaacgccaacagccggggccccagcttctctagcggcctggtgccactgtccctgagagggagccacatgggccccatggagatctacaaaaccgtgagcgcctggaagcggcagcctgtgcgcgtgctgagcctgtttcggaatatcgataaagtcctgaaaagcctgggattcctggagagcggctctggctccggcggtggcaccctgaagtacgtggaggatgtgacaaacgtggtcagacgggatgtggagaagtggggccccttcgatctggtgtacggcagcacccaacccctgggcagctcttgtgaccggtgccctggctggtacatgtttcagttccaccggatcctgcagtacgccctgccgagacaggagtcccagcggccattcttttggattttcatggacaacttgctgctgaccgaggatgaccaggaaactaccactcggttcctgcagaccgaagccgtgaccctgcaggacgtgagaggccgggactaccagaacgccatgcgggtgtggtccaacatccctggactgaaaagcaagcacgcacctctgacccctaaagaagaggagtacctgcaggcccaggtgcggagcagaagcaagctggacgcccctaaggtggatctgctggtgaagaattgcctcctgcccctgagagagtacttcaagtatttcagccagaatagtctgcccctgggaggcagcggcggcggcatgaacagcgaggtgatcgtggaccccatccagggccaggtgaacttcgaggacgtgttcgtgtacttcagccaggaggagtgggtgctgctggacgaggcccagaggctgctgtacagggacgtgatgctggagaacttcgccctgatggccagcctgggccacaccagcttcatgagccacatcggcgccagcctggtgatgggcagcgagccctgggtgcccgactgggtggacatgatcggcggcccaagcagcggcgcccctcctcccagcggcggcaggcggcccaagcagcggcgcccctcctcccagcggcggcagcccagccggctccccaacctctaccgaggagggcacctctgagtccgccacccccgagagcggccctggcacctccaccgagcccagcgagggcagcgcacccggcagccctgccggcagccccacctccacagaggagggaaccagcaccgagcccagcgaaggcagcgccccaggcaccagcaccgagcctagtgagcaggagattaaacggatcaacaagatcagaagaagacttgtgaaagacagcaacaccaagaaggccggcaagacaggccccatgaaaaccctgctggttagagtgatgacacccgatctgagagagcggctggaaaacctgagaaagaagcctgaaaatatcccccagcccatcagcaatacatctagagccaacctgaataagctgctgaccgattacaccgaaatgaagaaggcgatcctgcatgtgtactgggaagagttccagaaggaccctgtgggcctgatgagccgggtggcccagcctgccagcaagaagatcgatcagaacaagctgaaacctgagatggacgagaagggcaacctgaccaccgccggctttgcctgctctcagtgtggccagcccctgttcgtgtacaagctggagcaggtgtctgagaagggcaaggcttacaccaactacttcggacggtgcaatgtggccgagcacgaaaagctgatcctgctggcccagctgaagcccgagaaggatagcgacgaagccgtgacatatagcctgggaaagtttgggcagagggccctggatttctacagcattcatgtgaccaaggagtccacccaccccgtgaagcccctggcccagatcgccggaaacagatacgcctccggacctgtgggaaaggccctgagcgacgcatgtatgggcacaatcgcctccttcctgtctaagtaccaggacatcatcatcgaacaccagaaggtggtgaagggcaaccagaagagactggagagcctgcgggagctggccggcaaggaaaacctggaataccctagcgtgaccctgccacctcagcctcacaccaaggagggcgttgatgcctacaacgaagtgatcgcccgggtgcgaatgtgggtgaacctgaacctgtggcagaagctgaagctaagcagagatgatgccaagcctctgctgagactgaagggattcccttcctttcctctggtcgagagacaggccaacgaagtggactggtgggacatggtgtgtaacgtgaagaagctgatcaacgagaaaaaggaggatggcaaggtgttttggcagaatctggctggctacaagagacaggaagccctgagaccatacctgagcagcgaggaagatcggaagaagggaaagaaattcgctcggtaccagctgggcgacctgctgctgcacctggaaaagaagcacggcgaggactggggaaaggtgtacgacgaggcctgggagcggattgacaagaaagtggaaggcctgagcaagcacatcaagctggaagaggaacggagaagcgaggacgcccagagcaaggccgccctgaccgactggctgcgggctaaggccagcttcgtgatcgagggcctgaaggaggccgacaaggacgagttctgcagatgcgagctgaagctgcagaagtggtacggggacctgcggggaaagcccttcgccatcgaagccgagaacagcatcctggacatcagcggcttcagcaagcagtacaactgtgccttcatctggcagaaggacggcgtgaagaagctgaacctgtacctgatcatcaactacttcaagggcggcaagctgcggttcaagaagatcaaacctgaagccttcgaagccaacagattctacaccgtgatcaacaaaaagagcggcgagatcgtgcccatggaggtgaacttcaacttcgacgaccccaacctgatcatcctgcctctggcctttggcaagagacagggcagagaattcatctggaacgacctgctgtccctggaaaccggcagcctgaagctggccaacggaagagtgatcgagaagacactgtacaacagaagaacccggcaggatgagcctgccctgttcgtggccctgaccttcgagcggcgggaggtcctggactcctccaatatcaaaccaatgaacctgatcggcgtggcaagaggcgaaaacatccccgccgtgatcgccctgaccgaccccgagggctgcccactgagccggtttaaggatagcctgggaaacccaacccacatcctgagaatcggcgagagctataaggagaagcagcggaccatccaggccaagaaggaggtggagcagcggagagccggcggctacagccggaagtacgccagcaaagccaagaatctggcagacgatatggtgagaaacaccgctagagatctgctgtactacgccgtgacccaggatgccatgctgatcttcgccaacctgagccggggcttcggccggcagggcaagcggaccttcatggccgagagacagtacacacggatggaggactggctgaccgccaagctggcctacgagggcctgagcaagacctacctgtccaagacactggcccagtacacctccaagacatgcagcaactgtgggtttaccatcaccagcgccgactacgacagggtgctggagaagctgaagaagacagcaacaggctggatgaccacaattaacggcaaggagctgaaggtggagggccagattacctactacaacagatacaagagacagaacgtagtcaaggacctgtccgtcgagctggatagactgagcgaagaatctgtgaacaacgacatctcctcctggacaaagggcagaagcggagaagctctgagcctcctgaagaaaagattctcccatagacccgtgcaggagaagttcgtgtgcctgaactgcggcttcgagacacacgcagccgagcaagccgccctgaacatcgccagatcctggctgttcctgcggagccaggagtacaagaaataccagacaaacaagacaaccggcaacaccgataagagagccttcgtcgagacctggcagtccttttaccggaagaagcttaaggaggtgtggaaacctgccgtgcggtctggcggatctggcggaggctccaccagccccaagaaaaagagaaaagtctaagctgccttctgcggggcttgccttctggccatgcccttcttctctcccttgcacctgtacctcttggtctttgaataaagcctgagtaggaaggctagcaaaaaaaaaaaaaaaaaaaaaaaaaaaaaaaaaaaaaaaaaaaaaaaaaaaaaaaaaaaaaaaaaaaaaaaaaaaaaaaagcccagccggctccccaacctctaccgaggagggcacctctgagtccgccacccccgagagcggccctggcacctccaccgagcccagcgagggcagcgcacccggcagccctgccggcagccccacctccacagaggagggaaccagcaccgagcccagcgaaggcagcgccccaggcaccagcaccgagcctagtgagcaggagattaaacggatcaacaagatcagaagaagacttgtgaaagacagcaacaccaagaaggccggcaagacaggccccatgaaaaccctgctggttagagtgatgacacccgatctgagagagcggctggaaaacctgagaaagaagcctgaaaatatcccccagcccatcagcaatacatctagagccaacctgaataagctgctgaccgattacaccgaaatgaagaaggcgatcctgcatgtgtactgggaagagttccagaaggaccctgtgggcctgatgagccgggtggcccagcctgccagcaagaagatcgatcagaacaagctgaaacctgagatggacgagaagggcaacctgaccaccgccggctttgcctgctctcagtgtggccagcccctgttcgtgtacaagctggagcaggtgtctgagaagggcaaggcttacaccaactacttcggacggtgcaatgtggccgagcacgaaaagctgatcctgctggcccagctgaagcccgagaaggatagcgacgaagccgtgacatatagcctgggaaagtttgggcagagggccctggatttctacagcattcatgtgaccaaggagtccacccaccccgtgaagcccctggcccagatcgccggaaacagatacgcctccggacctgtgggaaaggccctgagcgacgcatgtatgggcacaatcgcctccttcctgtctaagtaccaggacatcatcatcgaacaccagaaggtggtgaagggcaaccagaagagactggagagcctgcgggagctggccggcaaggaaaacctggaataccctagcgtgaccctgccacctcagcctcacaccaaggagggcgttgatgcctacaacgaagtgatcgcccgggtgcgaatgtgggtgaacctgaacctgtggcagaagctgaagctaagcagagatgatgccaagcctctgctgagactgaagggattcccttcctttcctctggtcgagagacaggccaacgaagtggactggtgggacatggtgtgtaacgtgaagaagctgatcaacgagaaaaaggaggatggcaaggtgttttggcagaatctggctggctacaagagacaggaagccctgagaccatacctgagcagcgaggaagatcggaagaagggaaagaaattcgctcggtaccagctgggcgacctgctgctgcacctggaaaagaagcacggcgaggactggggaaaggtgtacgacgaggcctgggagcggattgacaagaaagtggaaggcctgagcaagcacatcaagctggaagaggaacggagaagcgaggacgcccagagcaaggccgccctgaccgactggctgcgggctaaggccagcttcgtgatcgagggcctgaaggaggccgacaaggacgagttctgcagatgcgagctgaagctgcagaagtggtacggggacctgcggggaaagcccttcgccatcgaagccgagaacagcatcctggacatcagcggcttcagcaagcagtacaactgtgccttcatctggcagaaggacggcgtgaagaagctgaacctgtacctgatcatcaactacttcaagggcggcaagctgcggttcaagaagatcaaacctgaagccttcgaagccaacagattctacaccgtgatcaacaaaaagagcggcgagatcgtgcccatggaggtgaacttcaacttcgacgaccccaacctgatcatcctgcctctggcctttggcaagagacagggcagagaattcatctggaacgacctgctgtccctggaaaccggcagcctgaagctggccaacggaagagtgatcgagaagacactgtacaacagaagaacccggcaggatgagcctgccctgttcgtggccctgaccttcgagcggcgggaggtcctggactcctccaatatcaaaccaatgaacctgatcggcgtggcaagaggcgaaaacatccccgccgtgatcgccctgaccgaccccgagggctgcccactgagccggtttaaggatagcctgggaaacccaacccacatcctgagaatcggcgagagctataaggagaagcagcggaccatccaggccaagaaggaggtggagcagcggagagccggcggctacagccggaagtacgccagcaaagccaagaatctggcagacgatatggtgagaaacaccgctagagatctgctgtactacgccgtgacccaggatgccatgctgatcttcgccaacctgagccggggcttcggccggcagggcaagcggaccttcatggccgagagacagtacacacggatggaggactggctgaccgccaagctggcctacgagggcctgagcaagacctacctgtccaagacactggcccagtacacctccaagacatgcagcaactgtgggtttaccatcaccagcgccgactacgacagggtgctggagaagctgaagaagacagcaacaggctggatgaccacaattaacggcaaggagctgaaggtggagggccagattacctactacaacagatacaagagacagaacgtagtcaaggacctgtccgtcgagctggatagactgagcgaagaatctgtgaacaacgacatctcctcctggacaaagggcagaagcggagaagctctgagcctcctgaagaaaagattctcccatagacccgtgcaggagaagttcgtgtgcctgaactgcggcttcgagacacacgcagccgagcaagccgccctgaacatcgccagatcctggctgttcctgcggagccaggagtacaagaaataccagacaaacaagacaaccggcaacaccgataagagagccttcgtcgagacctggcagtccttttaccggaagaagcttaaggaggtgtggaaacctgccgtgcggtctggcggatctggcggaggctccaccagccccaagaaaaagagaaaagtctaagctgccttctgcggggcttgccttctggccatgcccttcttctctcccttgcacctgtacctcttggtctttgaataaagcctgagtaggaaggctagcaaaaaaaaaaaaaaaaaaaaaaaaaaaaaaaaaaaaaaaaaaaaaaaaaaaaaaaaaaaaaaaaaaaaaaaaaaaaaaaa

SEQ ID NO: 10218 - RNA, 8787 nt, synthetic construct
  source 1..8787: mol_type = other RNA
aggaaataagagagaaaagaagagtaagaagaaatataagagccaccatggcccctaagaagaagcgtaaagtgagccggatgaaccacgaccaggagttcgacccccctaaggtgtaccctcccgtccccgccgagaagagaaagcccatccgggtcctgagcctgttcgatggcatcgccaccggtctgctggtgctgaaggacctgggcatccaggtggataggtacattgcctccgaggtgtgcgaggactccatcaccgtgggaatggtgcgtcatcagggcaagatcatgtacgtgggcgacgtgcggagcgtgacacagaagcatatccaggagtggggccctttcgacctggtgatcggcggcagcccttgcaatgacctgagcatcgtgaacccagcccggaagggcctgtacgagggaaccggcagactgttcttcgagttttacagactgctgcacgacgcccggcctaaggaaggcgacgaccggcccttcttttggctgttcgagaatgtggtggccatgggagtcagcgacaagcgggatattagccggttcctggagagcaaccccgtgatgatcgatgccaaggaagtgagcgccgcccaccgggccagatacttctggggcaatctgcctggcatgaacagacccctggccagcaccgtgaacgacaagctggagctgcaggagtgcctggagcacggccggatcgccaagttcagcaaggtgagaaccatcaccacccgaagcaacagcatcaaacaaggcaaggaccagcactttcctgtgttcatgaacgagaaggaggacatcctgtggtgtaccgagatggagagagtgttcgggttcccagtccactacacagatgtcagcaacatgtctagactggccagacagagactgctgggaagaagctggtccgtccctgtgatcagacacctgttcgcccctctgaaggagtacttcgcctgcgtgagcagcggcaacagcaacgccaacagccggggccccagcttctctagcggcctggtgccactgtccctgagagggagccacatgggccccatggagatctacaaaaccgtgagcgcctggaagcggcagcctgtgcgcgtgctgagcctgtttcggaatatcgataaagtcctgaaaagcctgggattcctggagagcggctctggctccggcggtggcaccctgaagtacgtggaggatgtgacaaacgtggtcagacgggatgtggagaagtggggccccttcgatctggtgtacggcagcacccaacccctgggcagctcttgtgaccggtgccctggctggtacatgtttcagttccaccggatcctgcagtacgccctgccgagacaggagtcccagcggccattcttttggattttcatggacaacttgctgctgaccgaggatgaccaggaaactaccactcggttcctgcagaccgaagccgtgaccctgcaggacgtgagaggccgggactaccagaacgccatgcgggtgtggtccaacatccctggactgaaaagcaagcacgcacctctgacccctaaagaagaggagtacctgcaggcccaggtgcggagcagaagcaagctggacgcccctaaggtggatctgctggtgaagaattgcctcctgcccctgagagagtacttcaagtatttcagccagaatagtctgcccctgggaggcagcggcggcggcctgcaggagagcgtgaccttcagggacgtggccgtgttcttcagccaggacgagtggctgaggctggacagcgcccagaggaccctgtacagggaggtgatgctggagaactacggcaccctggtgagcctgggcatccccttcagcacccccaaggtgatctgccagctgcagcagggcgaggacccctgcgtggtggacagggagctgccccaggacgcctggcccggcctgaagacccagggcggcccaagcagcggcgcccctcctcccagcggcggcaggcggcccaagcagcggcgcccctcctcccagcggcggcagcccagccggctccccaacctctaccgaggagggcacctctgagtccgccacccccgagagcggccctggcacctccaccgagcccagcgagggcagcgcacccggcagccctgccggcagccccacctccacagaggagggaaccagcaccgagcccagcgaaggcagcgccccaggcaccagcaccgagcctagtgagcaggagattaaacggatcaacaagatcagaagaagacttgtgaaagacagcaacaccaagaaggccggcaagacaggccccatgaaaaccctgctggttagagtgatgacacccgatctgagagagcggctggaaaacctgagaaagaagcctgaaaatatcccccagcccatcagcaatacatctagagccaacctgaataagctgctgaccgattacaccgaaatgaagaaggcgatcctgcatgtgtactgggaagagttccagaaggaccctgtgggcctgatgagccgggtggcccagcctgccagcaagaagatcgatcagaacaagctgaaacctgagatggacgagaagggcaacctgaccaccgccggctttgcctgctctcagtgtggccagcccctgttcgtgtacaagctggagcaggtgtctgagaagggcaaggcttacaccaactacttcggacggtgcaatgtggccgagcacgaaaagctgatcctgctggcccagctgaagcccgagaaggatagcgacgaagccgtgacatatagcctgggaaagtttgggcagagggccctggatttctacagcattcatgtgaccaaggagtccacccaccccgtgaagcccctggcccagatcgccggaaacagatacgcctccggacctgtgggaaaggccctgagcgacgcatgtatgggcacaatcgcctccttcctgtctaagtaccaggacatcatcatcgaacaccagaaggtggtgaagggcaaccagaagagactggagagcctgcgggagctggccggcaaggaaaacctggaataccctagcgtgaccctgccacctcagcctcacaccaaggagggcgttgatgcctacaacgaagtgatcgcccgggtgcgaatgtgggtgaacctgaacctgtggcagaagctgaagctaagcagagatgatgccaagcctctgctgagactgaagggattcccttcctttcctctggtcgagagacaggccaacgaagtggactggtgggacatggtgtgtaacgtgaagaagctgatcaacgagaaaaaggaggatggcaaggtgttttggcagaatctggctggctacaagagacaggaagccctgagaccatacctgagcagcgaggaagatcggaagaagggaaagaaattcgctcggtaccagctgggcgacctgctgctgcacctggaaaagaagcacggcgaggactggggaaaggtgtacgacgaggcctgggagcggattgacaagaaagtggaaggcctgagcaagcacatcaagctggaagaggaacggagaagcgaggacgcccagagcaaggccgccctgaccgactggctgcgggctaaggccagcttcgtgatcgagggcctgaaggaggccgacaaggacgagttctgcagatgcgagctgaagctgcagaagtggtacggggacctgcggggaaagcccttcgccatcgaagccgagaacagcatcctggacatcagcggcttcagcaagcagtacaactgtgccttcatctggcagaaggacggcgtgaagaagctgaacctgtacctgatcatcaactacttcaagggcggcaagctgcggttcaagaagatcaaacctgaagccttcgaagccaacagattctacaccgtgatcaacaaaaagagcggcgagatcgtgcccatggaggtgaacttcaacttcgacgaccccaacctgatcatcctgcctctggcctttggcaagagacagggcagagaattcatctggaacgacctgctgtccctggaaaccggcagcctgaagctggccaacggaagagtgatcgagaagacactgtacaacagaagaacccggcaggatgagcctgccctgttcgtggccctgaccttcgagcggcgggaggtcctggactcctccaatatcaaaccaatgaacctgatcggcgtggcaagaggcgaaaacatccccgccgtgatcgccctgaccgaccccgagggctgcccactgagccggtttaaggatagcctgggaaacccaacccacatcctgagaatcggcgagagctataaggagaagcagcggaccatccaggccaagaaggaggtggagcagcggagagccggcggctacagccggaagtacgccagcaaagccaagaatctggcagacgatatggtgagaaacaccgctagagatctgctgtactacgccgtgacccaggatgccatgctgatcttcgccaacctgagccggggcttcggccggcagggcaagcggaccttcatggccgagagacagtacacacggatggaggactggctgaccgccaagctggcctacgagggcctgagcaagacctacctgtccaagacactggcccagtacacctccaagacatgcagcaactgtgggtttaccatcaccagcgccgactacgacagggtgctggagaagctgaagaagacagcaacaggctggatgaccacaattaacggcaaggagctgaaggtggagggccagattacctactacaacagatacaagagacagaacgtagtcaaggacctgtccgtcgagctggatagactgagcgaagaatctgtgaacaacgacatctcctcctggacaaagggcagaagcggagaagctctgagcctcctgaagaaaagattctcccatagacccgtgcaggagaagttcgtgtgcctgaactgcggcttcgagacacacgcagccgagcaagccgccctgaacatcgccagatcctggctgttcctgcggagccaggagtacaagaaataccagacaaacaagacaaccggcaacaccgataagagagccttcgtcgagacctggcagtccttttaccggaagaagcttaaggaggtgtggaaacctgccgtgcggtctggcggatctggcggaggctccaccagccccaagaaaaagagaaaagtctaagctgccttctgcggggcttgccttctggccatgcccttcttctctcccttgcacctgtacctcttggtctttgaataaagcctgagtaggaaggctagcaaaaaaaaaaaaaaaaaaaaaaaaaaaaaaaaaaaaaaaaaaaaaaaaaaaaaaaaaaaaaaaaaaaaaaaaaaaaaaaagcccagccggctccccaacctctaccgaggagggcacctctgagtccgccacccccgagagcggccctggcacctccaccgagcccagcgagggcagcgcacccggcagccctgccggcagccccacctccacagaggagggaaccagcaccgagcccagcgaaggcagcgccccaggcaccagcaccgagcctagtgagcaggagattaaacggatcaacaagatcagaagaagacttgtgaaagacagcaacaccaagaaggccggcaagacaggccccatgaaaaccctgctggttagagtgatgacacccgatctgagagagcggctggaaaacctgagaaagaagcctgaaaatatcccccagcccatcagcaatacatctagagccaacctgaataagctgctgaccgattacaccgaaatgaagaaggcgatcctgcatgtgtactgggaagagttccagaaggaccctgtgggcctgatgagccgggtggcccagcctgccagcaagaagatcgatcagaacaagctgaaacctgagatggacgagaagggcaacctgaccaccgccggctttgcctgctctcagtgtggccagcccctgttcgtgtacaagctggagcaggtgtctgagaagggcaaggcttacaccaactacttcggacggtgcaatgtggccgagcacgaaaagctgatcctgctggcccagctgaagcccgagaaggatagcgacgaagccgtgacatatagcctgggaaagtttgggcagagggccctggatttctacagcattcatgtgaccaaggagtccacccaccccgtgaagcccctggcccagatcgccggaaacagatacgcctccggacctgtgggaaaggccctgagcgacgcatgtatgggcacaatcgcctccttcctgtctaagtaccaggacatcatcatcgaacaccagaaggtggtgaagggcaaccagaagagactggagagcctgcgggagctggccggcaaggaaaacctggaataccctagcgtgaccctgccacctcagcctcacaccaaggagggcgttgatgcctacaacgaagtgatcgcccgggtgcgaatgtgggtgaacctgaacctgtggcagaagctgaagctaagcagagatgatgccaagcctctgctgagactgaagggattcccttcctttcctctggtcgagagacaggccaacgaagtggactggtgggacatggtgtgtaacgtgaagaagctgatcaacgagaaaaaggaggatggcaaggtgttttggcagaatctggctggctacaagagacaggaagccctgagaccatacctgagcagcgaggaagatcggaagaagggaaagaaattcgctcggtaccagctgggcgacctgctgctgcacctggaaaagaagcacggcgaggactggggaaaggtgtacgacgaggcctgggagcggattgacaagaaagtggaaggcctgagcaagcacatcaagctggaagaggaacggagaagcgaggacgcccagagcaaggccgccctgaccgactggctgcgggctaaggccagcttcgtgatcgagggcctgaaggaggccgacaaggacgagttctgcagatgcgagctgaagctgcagaagtggtacggggacctgcggggaaagcccttcgccatcgaagccgagaacagcatcctggacatcagcggcttcagcaagcagtacaactgtgccttcatctggcagaaggacggcgtgaagaagctgaacctgtacctgatcatcaactacttcaagggcggcaagctgcggttcaagaagatcaaacctgaagccttcgaagccaacagattctacaccgtgatcaacaaaaagagcggcgagatcgtgcccatggaggtgaacttcaacttcgacgaccccaacctgatcatcctgcctctggcctttggcaagagacagggcagagaattcatctggaacgacctgctgtccctggaaaccggcagcctgaagctggccaacggaagagtgatcgagaagacactgtacaacagaagaacccggcaggatgagcctgccctgttcgtggccctgaccttcgagcggcgggaggtcctggactcctccaatatcaaaccaatgaacctgatcggcgtggcaagaggcgaaaacatccccgccgtgatcgccctgaccgaccccgagggctgcccactgagccggtttaaggatagcctgggaaacccaacccacatcctgagaatcggcgagagctataaggagaagcagcggaccatccaggccaagaaggaggtggagcagcggagagccggcggctacagccggaagtacgccagcaaagccaagaatctggcagacgatatggtgagaaacaccgctagagatctgctgtactacgccgtgacccaggatgccatgctgatcttcgccaacctgagccggggcttcggccggcagggcaagcggaccttcatggccgagagacagtacacacggatggaggactggctgaccgccaagctggcctacgagggcctgagcaagacctacctgtccaagacactggcccagtacacctccaagacatgcagcaactgtgggtttaccatcaccagcgccgactacgacagggtgctggagaagctgaagaagacagcaacaggctggatgaccacaattaacggcaaggagctgaaggtggagggccagattacctactacaacagatacaagagacagaacgtagtcaaggacctgtccgtcgagctggatagactgagcgaagaatctgtgaacaacgacatctcctcctggacaaagggcagaagcggagaagctctgagcctcctgaagaaaagattctcccatagacccgtgcaggagaagttcgtgtgcctgaactgcggcttcgagacacacgcagccgagcaagccgccctgaacatcgccagatcctggctgttcctgcggagccaggagtacaagaaataccagacaaacaagacaaccggcaacaccgataagagagccttcgtcgagacctggcagtccttttaccggaagaagcttaaggaggtgtggaaacctgccgtgcggtctggcggatctggcggaggctccaccagccccaagaaaaagagaaaagtctaagctgccttctgcggggcttgccttctggccatgcccttcttctctcccttgcacctgtacctcttggtctttgaataaagcctgagtaggaaggctagcaaaaaaaaaaaaaaaaaaaaaaaaaaaaaaaaaaaaaaaaaaaaaaaaaaaaaaaaaaaaaaaaaaaaaaaaaaaaaaaa

SEQ ID NO: 10219 - RNA, 8787 nt, synthetic construct
  source 1..8787: mol_type = other RNA
aggaaataagagagaaaagaagagtaagaagaaatataagagccaccatggcccctaagaagaagcgtaaagtgagccggatgaaccacgaccaggagttcgacccccctaaggtgtaccctcccgtccccgccgagaagagaaagcccatccgggtcctgagcctgttcgatggcatcgccaccggtctgctggtgctgaaggacctgggcatccaggtggataggtacattgcctccgaggtgtgcgaggactccatcaccgtgggaatggtgcgtcatcagggcaagatcatgtacgtgggcgacgtgcggagcgtgacacagaagcatatccaggagtggggccctttcgacctggtgatcggcggcagcccttgcaatgacctgagcatcgtgaacccagcccggaagggcctgtacgagggaaccggcagactgttcttcgagttttacagactgctgcacgacgcccggcctaaggaaggcgacgaccggcccttcttttggctgttcgagaatgtggtggccatgggagtcagcgacaagcgggatattagccggttcctggagagcaaccccgtgatgatcgatgccaaggaagtgagcgccgcccaccgggccagatacttctggggcaatctgcctggcatgaacagacccctggccagcaccgtgaacgacaagctggagctgcaggagtgcctggagcacggccggatcgccaagttcagcaaggtgagaaccatcaccacccgaagcaacagcatcaaacaaggcaaggaccagcactttcctgtgttcatgaacgagaaggaggacatcctgtggtgtaccgagatggagagagtgttcgggttcccagtccactacacagatgtcagcaacatgtctagactggccagacagagactgctgggaagaagctggtccgtccctgtgatcagacacctgttcgcccctctgaaggagtacttcgcctgcgtgagcagcggcaacagcaacgccaacagccggggccccagcttctctagcggcctggtgccactgtccctgagagggagccacatgggccccatggagatctacaaaaccgtgagcgcctggaagcggcagcctgtgcgcgtgctgagcctgtttcggaatatcgataaagtcctgaaaagcctgggattcctggagagcggctctggctccggcggtggcaccctgaagtacgtggaggatgtgacaaacgtggtcagacgggatgtggagaagtggggccccttcgatctggtgtacggcagcacccaacccctgggcagctcttgtgaccggtgccctggctggtacatgtttcagttccaccggatcctgcagtacgccctgccgagacaggagtcccagcggccattcttttggattttcatggacaacttgctgctgaccgaggatgaccaggaaactaccactcggttcctgcagaccgaagccgtgaccctgcaggacgtgagaggccgggactaccagaacgccatgcgggtgtggtccaacatccctggactgaaaagcaagcacgcacctctgacccctaaagaagaggagtacctgcaggcccaggtgcggagcagaagcaagctggacgcccctaaggtggatctgctggtgaagaattgcctcctgcccctgagagagtacttcaagtatttcagccagaatagtctgcccctgggaggcagcggcggcggcttccagggcagcatcagcttcaaggacgtgaccgtgggcttcacccaggaggagtggcagcacctggaccccagccagagggccctgtacagggacgtgaccctggagaactacagcaacctggtgagcgtgggctactgcgtgcacaagcccgaggtgatcttcaggctggagcagggcgaggagccctggaggctggaggaggagttccccagccagagcttccccgaggtgtggaccgccggcggcccaagcagcggcgcccctcctcccagcggcggcaggcggcccaagcagcggcgcccctcctcccagcggcggcagcccagccggctccccaacctctaccgaggagggcacctctgagtccgccacccccgagagcggccctggcacctccaccgagcccagcgagggcagcgcacccggcagccctgccggcagccccacctccacagaggagggaaccagcaccgagcccagcgaaggcagcgccccaggcaccagcaccgagcctagtgagcaggagattaaacggatcaacaagatcagaagaagacttgtgaaagacagcaacaccaagaaggccggcaagacaggccccatgaaaaccctgctggttagagtgatgacacccgatctgagagagcggctggaaaacctgagaaagaagcctgaaaatatcccccagcccatcagcaatacatctagagccaacctgaataagctgctgaccgattacaccgaaatgaagaaggcgatcctgcatgtgtactgggaagagttccagaaggaccctgtgggcctgatgagccgggtggcccagcctgccagcaagaagatcgatcagaacaagctgaaacctgagatggacgagaagggcaacctgaccaccgccggctttgcctgctctcagtgtggccagcccctgttcgtgtacaagctggagcaggtgtctgagaagggcaaggcttacaccaactacttcggacggtgcaatgtggccgagcacgaaaagctgatcctgctggcccagctgaagcccgagaaggatagcgacgaagccgtgacatatagcctgggaaagtttgggcagagggccctggatttctacagcattcatgtgaccaaggagtccacccaccccgtgaagcccctggcccagatcgccggaaacagatacgcctccggacctgtgggaaaggccctgagcgacgcatgtatgggcacaatcgcctccttcctgtctaagtaccaggacatcatcatcgaacaccagaaggtggtgaagggcaaccagaagagactggagagcctgcgggagctggccggcaaggaaaacctggaataccctagcgtgaccctgccacctcagcctcacaccaaggagggcgttgatgcctacaacgaagtgatcgcccgggtgcgaatgtgggtgaacctgaacctgtggcagaagctgaagctaagcagagatgatgccaagcctctgctgagactgaagggattcccttcctttcctctggtcgagagacaggccaacgaagtggactggtgggacatggtgtgtaacgtgaagaagctgatcaacgagaaaaaggaggatggcaaggtgttttggcagaatctggctggctacaagagacaggaagccctgagaccatacctgagcagcgaggaagatcggaagaagggaaagaaattcgctcggtaccagctgggcgacctgctgctgcacctggaaaagaagcacggcgaggactggggaaaggtgtacgacgaggcctgggagcggattgacaagaaagtggaaggcctgagcaagcacatcaagctggaagaggaacggagaagcgaggacgcccagagcaaggccgccctgaccgactggctgcgggctaaggccagcttcgtgatcgagggcctgaaggaggccgacaaggacgagttctgcagatgcgagctgaagctgcagaagtggtacggggacctgcggggaaagcccttcgccatcgaagccgagaacagcatcctggacatcagcggcttcagcaagcagtacaactgtgccttcatctggcagaaggacggcgtgaagaagctgaacctgtacctgatcatcaactacttcaagggcggcaagctgcggttcaagaagatcaaacctgaagccttcgaagccaacagattctacaccgtgatcaacaaaaagagcggcgagatcgtgcccatggaggtgaacttcaacttcgacgaccccaacctgatcatcctgcctctggcctttggcaagagacagggcagagaattcatctggaacgacctgctgtccctggaaaccggcagcctgaagctggccaacggaagagtgatcgagaagacactgtacaacagaagaacccggcaggatgagcctgccctgttcgtggccctgaccttcgagcggcgggaggtcctggactcctccaatatcaaaccaatgaacctgatcggcgtggcaagaggcgaaaacatccccgccgtgatcgccctgaccgaccccgagggctgcccactgagccggtttaaggatagcctgggaaacccaacccacatcctgagaatcggcgagagctataaggagaagcagcggaccatccaggccaagaaggaggtggagcagcggagagccggcggctacagccggaagtacgccagcaaagccaagaatctggcagacgatatggtgagaaacaccgctagagatctgctgtactacgccgtgacccaggatgccatgctgatcttcgccaacctgagccggggcttcggccggcagggcaagcggaccttcatggccgagagacagtacacacggatggaggactggctgaccgccaagctggcctacgagggcctgagcaagacctacctgtccaagacactggcccagtacacctccaagacatgcagcaactgtgggtttaccatcaccagcgccgactacgacagggtgctggagaagctgaagaagacagcaacaggctggatgaccacaattaacggcaaggagctgaaggtggagggccagattacctactacaacagatacaagagacagaacgtagtcaaggacctgtccgtcgagctggatagactgagcgaagaatctgtgaacaacgacatctcctcctggacaaagggcagaagcggagaagctctgagcctcctgaagaaaagattctcccatagacccgtgcaggagaagttcgtgtgcctgaactgcggcttcgagacacacgcagccgagcaagccgccctgaacatcgccagatcctggctgttcctgcggagccaggagtacaagaaataccagacaaacaagacaaccggcaacaccgataagagagccttcgtcgagacctggcagtccttttaccggaagaagcttaaggaggtgtggaaacctgccgtgcggtctggcggatctggcggaggctccaccagccccaagaaaaagagaaaagtctaagctgccttctgcggggcttgccttctggccatgcccttcttctctcccttgcacctgtacctcttggtctttgaataaagcctgagtaggaaggctagcaaaaaaaaaaaaaaaaaaaaaaaaaaaaaaaaaaaaaaaaaaaaaaaaaaaaaaaaaaaaaaaaaaaaaaaaaaaaaaaagcccagccggctccccaacctctaccgaggagggcacctctgagtccgccacccccgagagcggccctggcacctccaccgagcccagcgagggcagcgcacccggcagccctgccggcagccccacctccacagaggagggaaccagcaccgagcccagcgaaggcagcgccccaggcaccagcaccgagcctagtgagcaggagattaaacggatcaacaagatcagaagaagacttgtgaaagacagcaacaccaagaaggccggcaagacaggccccatgaaaaccctgctggttagagtgatgacacccgatctgagagagcggctggaaaacctgagaaagaagcctgaaaatatcccccagcccatcagcaatacatctagagccaacctgaataagctgctgaccgattacaccgaaatgaagaaggcgatcctgcatgtgtactgggaagagttccagaaggaccctgtgggcctgatgagccgggtggcccagcctgccagcaagaagatcgatcagaacaagctgaaacctgagatggacgagaagggcaacctgaccaccgccggctttgcctgctctcagtgtggccagcccctgttcgtgtacaagctggagcaggtgtctgagaagggcaaggcttacaccaactacttcggacggtgcaatgtggccgagcacgaaaagctgatcctgctggcccagctgaagcccgagaaggatagcgacgaagccgtgacatatagcctgggaaagtttgggcagagggccctggatttctacagcattcatgtgaccaaggagtccacccaccccgtgaagcccctggcccagatcgccggaaacagatacgcctccggacctgtgggaaaggccctgagcgacgcatgtatgggcacaatcgcctccttcctgtctaagtaccaggacatcatcatcgaacaccagaaggtggtgaagggcaaccagaagagactggagagcctgcgggagctggccggcaaggaaaacctggaataccctagcgtgaccctgccacctcagcctcacaccaaggagggcgttgatgcctacaacgaagtgatcgcccgggtgcgaatgtgggtgaacctgaacctgtggcagaagctgaagctaagcagagatgatgccaagcctctgctgagactgaagggattcccttcctttcctctggtcgagagacaggccaacgaagtggactggtgggacatggtgtgtaacgtgaagaagctgatcaacgagaaaaaggaggatggcaaggtgttttggcagaatctggctggctacaagagacaggaagccctgagaccatacctgagcagcgaggaagatcggaagaagggaaagaaattcgctcggtaccagctgggcgacctgctgctgcacctggaaaagaagcacggcgaggactggggaaaggtgtacgacgaggcctgggagcggattgacaagaaagtggaaggcctgagcaagcacatcaagctggaagaggaacggagaagcgaggacgcccagagcaaggccgccctgaccgactggctgcgggctaaggccagcttcgtgatcgagggcctgaaggaggccgacaaggacgagttctgcagatgcgagctgaagctgcagaagtggtacggggacctgcggggaaagcccttcgccatcgaagccgagaacagcatcctggacatcagcggcttcagcaagcagtacaactgtgccttcatctggcagaaggacggcgtgaagaagctgaacctgtacctgatcatcaactacttcaagggcggcaagctgcggttcaagaagatcaaacctgaagccttcgaagccaacagattctacaccgtgatcaacaaaaagagcggcgagatcgtgcccatggaggtgaacttcaacttcgacgaccccaacctgatcatcctgcctctggcctttggcaagagacagggcagagaattcatctggaacgacctgctgtccctggaaaccggcagcctgaagctggccaacggaagagtgatcgagaagacactgtacaacagaagaacccggcaggatgagcctgccctgttcgtggccctgaccttcgagcggcgggaggtcctggactcctccaatatcaaaccaatgaacctgatcggcgtggcaagaggcgaaaacatccccgccgtgatcgccctgaccgaccccgagggctgcccactgagccggtttaaggatagcctgggaaacccaacccacatcctgagaatcggcgagagctataaggagaagcagcggaccatccaggccaagaaggaggtggagcagcggagagccggcggctacagccggaagtacgccagcaaagccaagaatctggcagacgatatggtgagaaacaccgctagagatctgctgtactacgccgtgacccaggatgccatgctgatcttcgccaacctgagccggggcttcggccggcagggcaagcggaccttcatggccgagagacagtacacacggatggaggactggctgaccgccaagctggcctacgagggcctgagcaagacctacctgtccaagacactggcccagtacacctccaagacatgcagcaactgtgggtttaccatcaccagcgccgactacgacagggtgctggagaagctgaagaagacagcaacaggctggatgaccacaattaacggcaaggagctgaaggtggagggccagattacctactacaacagatacaagagacagaacgtagtcaaggacctgtccgtcgagctggatagactgagcgaagaatctgtgaacaacgacatctcctcctggacaaagggcagaagcggagaagctctgagcctcctgaagaaaagattctcccatagacccgtgcaggagaagttcgtgtgcctgaactgcggcttcgagacacacgcagccgagcaagccgccctgaacatcgccagatcctggctgttcctgcggagccaggagtacaagaaataccagacaaacaagacaaccggcaacaccgataagagagccttcgtcgagacctggcagtccttttaccggaagaagcttaaggaggtgtggaaacctgccgtgcggtctggcggatctggcggaggctccaccagccccaagaaaaagagaaaagtctaagctgccttctgcggggcttgccttctggccatgcccttcttctctcccttgcacctgtacctcttggtctttgaataaagcctgagtaggaaggctagcaaaaaaaaaaaaaaaaaaaaaaaaaaaaaaaaaaaaaaaaaaaaaaaaaaaaaaaaaaaaaaaaaaaaaaaaaaaaaaaa

SEQ ID NO: 10220 - RNA, 8787 nt, synthetic construct
  source 1..8787: mol_type = other RNA
aggaaataagagagaaaagaagagtaagaagaaatataagagccaccatggcccctaagaagaagcgtaaagtgagccggatgaaccacgaccaggagttcgacccccctaaggtgtaccctcccgtccccgccgagaagagaaagcccatccgggtcctgagcctgttcgatggcatcgccaccggtctgctggtgctgaaggacctgggcatccaggtggataggtacattgcctccgaggtgtgcgaggactccatcaccgtgggaatggtgcgtcatcagggcaagatcatgtacgtgggcgacgtgcggagcgtgacacagaagcatatccaggagtggggccctttcgacctggtgatcggcggcagcccttgcaatgacctgagcatcgtgaacccagcccggaagggcctgtacgagggaaccggcagactgttcttcgagttttacagactgctgcacgacgcccggcctaaggaaggcgacgaccggcccttcttttggctgttcgagaatgtggtggccatgggagtcagcgacaagcgggatattagccggttcctggagagcaaccccgtgatgatcgatgccaaggaagtgagcgccgcccaccgggccagatacttctggggcaatctgcctggcatgaacagacccctggccagcaccgtgaacgacaagctggagctgcaggagtgcctggagcacggccggatcgccaagttcagcaaggtgagaaccatcaccacccgaagcaacagcatcaaacaaggcaaggaccagcactttcctgtgttcatgaacgagaaggaggacatcctgtggtgtaccgagatggagagagtgttcgggttcccagtccactacacagatgtcagcaacatgtctagactggccagacagagactgctgggaagaagctggtccgtccctgtgatcagacacctgttcgcccctctgaaggagtacttcgcctgcgtgagcagcggcaacagcaacgccaacagccggggccccagcttctctagcggcctggtgccactgtccctgagagggagccacatgggccccatggagatctacaaaaccgtgagcgcctggaagcggcagcctgtgcgcgtgctgagcctgtttcggaatatcgataaagtcctgaaaagcctgggattcctggagagcggctctggctccggcggtggcaccctgaagtacgtggaggatgtgacaaacgtggtcagacgggatgtggagaagtggggccccttcgatctggtgtacggcagcacccaacccctgggcagctcttgtgaccggtgccctggctggtacatgtttcagttccaccggatcctgcagtacgccctgccgagacaggagtcccagcggccattcttttggattttcatggacaacttgctgctgaccgaggatgaccaggaaactaccactcggttcctgcagaccgaagccgtgaccctgcaggacgtgagaggccgggactaccagaacgccatgcgggtgtggtccaacatccctggactgaaaagcaagcacgcacctctgacccctaaagaagaggagtacctgcaggcccaggtgcggagcagaagcaagctggacgcccctaaggtggatctgctggtgaagaattgcctcctgcccctgagagagtacttcaagtatttcagccagaatagtctgcccctgggaggcagcggcggcggcccccaggagcccgtgaccttcgaggacgtggccgtgtacttcacccagaaccagtgggccagcctggaccccacccagagggccctgtacagggaggtgatgctggagaactacgccagcgtggccagcctggtgttccccttccccaagcccgacctggtgagccagctggagagggaggaggccccctggggccccgacccctgggaggccgaggtgctgaggggcatctgccccggcggcggcggcccaagcagcggcgcccctcctcccagcggcggcaggcggcccaagcagcggcgcccctcctcccagcggcggcagcccagccggctccccaacctctaccgaggagggcacctctgagtccgccacccccgagagcggccctggcacctccaccgagcccagcgagggcagcgcacccggcagccctgccggcagccccacctccacagaggagggaaccagcaccgagcccagcgaaggcagcgccccaggcaccagcaccgagcctagtgagcaggagattaaacggatcaacaagatcagaagaagacttgtgaaagacagcaacaccaagaaggccggcaagacaggccccatgaaaaccctgctggttagagtgatgacacccgatctgagagagcggctggaaaacctgagaaagaagcctgaaaatatcccccagcccatcagcaatacatctagagccaacctgaataagctgctgaccgattacaccgaaatgaagaaggcgatcctgcatgtgtactgggaagagttccagaaggaccctgtgggcctgatgagccgggtggcccagcctgccagcaagaagatcgatcagaacaagctgaaacctgagatggacgagaagggcaacctgaccaccgccggctttgcctgctctcagtgtggccagcccctgttcgtgtacaagctggagcaggtgtctgagaagggcaaggcttacaccaactacttcggacggtgcaatgtggccgagcacgaaaagctgatcctgctggcccagctgaagcccgagaaggatagcgacgaagccgtgacatatagcctgggaaagtttgggcagagggccctggatttctacagcattcatgtgaccaaggagtccacccaccccgtgaagcccctggcccagatcgccggaaacagatacgcctccggacctgtgggaaaggccctgagcgacgcatgtatgggcacaatcgcctccttcctgtctaagtaccaggacatcatcatcgaacaccagaaggtggtgaagggcaaccagaagagactggagagcctgcgggagctggccggcaaggaaaacctggaataccctagcgtgaccctgccacctcagcctcacaccaaggagggcgttgatgcctacaacgaagtgatcgcccgggtgcgaatgtgggtgaacctgaacctgtggcagaagctgaagctaagcagagatgatgccaagcctctgctgagactgaagggattcccttcctttcctctggtcgagagacaggccaacgaagtggactggtgggacatggtgtgtaacgtgaagaagctgatcaacgagaaaaaggaggatggcaaggtgttttggcagaatctggctggctacaagagacaggaagccctgagaccatacctgagcagcgaggaagatcggaagaagggaaagaaattcgctcggtaccagctgggcgacctgctgctgcacctggaaaagaagcacggcgaggactggggaaaggtgtacgacgaggcctgggagcggattgacaagaaagtggaaggcctgagcaagcacatcaagctggaagaggaacggagaagcgaggacgcccagagcaaggccgccctgaccgactggctgcgggctaaggccagcttcgtgatcgagggcctgaaggaggccgacaaggacgagttctgcagatgcgagctgaagctgcagaagtggtacggggacctgcggggaaagcccttcgccatcgaagccgagaacagcatcctggacatcagcggcttcagcaagcagtacaactgtgccttcatctggcagaaggacggcgtgaagaagctgaacctgtacctgatcatcaactacttcaagggcggcaagctgcggttcaagaagatcaaacctgaagccttcgaagccaacagattctacaccgtgatcaacaaaaagagcggcgagatcgtgcccatggaggtgaacttcaacttcgacgaccccaacctgatcatcctgcctctggcctttggcaagagacagggcagagaattcatctggaacgacctgctgtccctggaaaccggcagcctgaagctggccaacggaagagtgatcgagaagacactgtacaacagaagaacccggcaggatgagcctgccctgttcgtggccctgaccttcgagcggcgggaggtcctggactcctccaatatcaaaccaatgaacctgatcggcgtggcaagaggcgaaaacatccccgccgtgatcgccctgaccgaccccgagggctgcccactgagccggtttaaggatagcctgggaaacccaacccacatcctgagaatcggcgagagctataaggagaagcagcggaccatccaggccaagaaggaggtggagcagcggagagccggcggctacagccggaagtacgccagcaaagccaagaatctggcagacgatatggtgagaaacaccgctagagatctgctgtactacgccgtgacccaggatgccatgctgatcttcgccaacctgagccggggcttcggccggcagggcaagcggaccttcatggccgagagacagtacacacggatggaggactggctgaccgccaagctggcctacgagggcctgagcaagacctacctgtccaagacactggcccagtacacctccaagacatgcagcaactgtgggtttaccatcaccagcgccgactacgacagggtgctggagaagctgaagaagacagcaacaggctggatgaccacaattaacggcaaggagctgaaggtggagggccagattacctactacaacagatacaagagacagaacgtagtcaaggacctgtccgtcgagctggatagactgagcgaagaatctgtgaacaacgacatctcctcctggacaaagggcagaagcggagaagctctgagcctcctgaagaaaagattctcccatagacccgtgcaggagaagttcgtgtgcctgaactgcggcttcgagacacacgcagccgagcaagccgccctgaacatcgccagatcctggctgttcctgcggagccaggagtacaagaaataccagacaaacaagacaaccggcaacaccgataagagagccttcgtcgagacctggcagtccttttaccggaagaagcttaaggaggtgtggaaacctgccgtgcggtctggcggatctggcggaggctccaccagccccaagaaaaagagaaaagtctaagctgccttctgcggggcttgccttctggccatgcccttcttctctcccttgcacctgtacctcttggtctttgaataaagcctgagtaggaaggctagcaaaaaaaaaaaaaaaaaaaaaaaaaaaaaaaaaaaaaaaaaaaaaaaaaaaaaaaaaaaaaaaaaaaaaaaaaaaaaaaagcccagccggctccccaacctctaccgaggagggcacctctgagtccgccacccccgagagcggccctggcacctccaccgagcccagcgagggcagcgcacccggcagccctgccggcagccccacctccacagaggagggaaccagcaccgagcccagcgaaggcagcgccccaggcaccagcaccgagcctagtgagcaggagattaaacggatcaacaagatcagaagaagacttgtgaaagacagcaacaccaagaaggccggcaagacaggccccatgaaaaccctgctggttagagtgatgacacccgatctgagagagcggctggaaaacctgagaaagaagcctgaaaatatcccccagcccatcagcaatacatctagagccaacctgaataagctgctgaccgattacaccgaaatgaagaaggcgatcctgcatgtgtactgggaagagttccagaaggaccctgtgggcctgatgagccgggtggcccagcctgccagcaagaagatcgatcagaacaagctgaaacctgagatggacgagaagggcaacctgaccaccgccggctttgcctgctctcagtgtggccagcccctgttcgtgtacaagctggagcaggtgtctgagaagggcaaggcttacaccaactacttcggacggtgcaatgtggccgagcacgaaaagctgatcctgctggcccagctgaagcccgagaaggatagcgacgaagccgtgacatatagcctgggaaagtttgggcagagggccctggatttctacagcattcatgtgaccaaggagtccacccaccccgtgaagcccctggcccagatcgccggaaacagatacgcctccggacctgtgggaaaggccctgagcgacgcatgtatgggcacaatcgcctccttcctgtctaagtaccaggacatcatcatcgaacaccagaaggtggtgaagggcaaccagaagagactggagagcctgcgggagctggccggcaaggaaaacctggaataccctagcgtgaccctgccacctcagcctcacaccaaggagggcgttgatgcctacaacgaagtgatcgcccgggtgcgaatgtgggtgaacctgaacctgtggcagaagctgaagctaagcagagatgatgccaagcctctgctgagactgaagggattcccttcctttcctctggtcgagagacaggccaacgaagtggactggtgggacatggtgtgtaacgtgaagaagctgatcaacgagaaaaaggaggatggcaaggtgttttggcagaatctggctggctacaagagacaggaagccctgagaccatacctgagcagcgaggaagatcggaagaagggaaagaaattcgctcggtaccagctgggcgacctgctgctgcacctggaaaagaagcacggcgaggactggggaaaggtgtacgacgaggcctgggagcggattgacaagaaagtggaaggcctgagcaagcacatcaagctggaagaggaacggagaagcgaggacgcccagagcaaggccgccctgaccgactggctgcgggctaaggccagcttcgtgatcgagggcctgaaggaggccgacaaggacgagttctgcagatgcgagctgaagctgcagaagtggtacggggacctgcggggaaagcccttcgccatcgaagccgagaacagcatcctggacatcagcggcttcagcaagcagtacaactgtgccttcatctggcagaaggacggcgtgaagaagctgaacctgtacctgatcatcaactacttcaagggcggcaagctgcggttcaagaagatcaaacctgaagccttcgaagccaacagattctacaccgtgatcaacaaaaagagcggcgagatcgtgcccatggaggtgaacttcaacttcgacgaccccaacctgatcatcctgcctctggcctttggcaagagacagggcagagaattcatctggaacgacctgctgtccctggaaaccggcagcctgaagctggccaacggaagagtgatcgagaagacactgtacaacagaagaacccggcaggatgagcctgccctgttcgtggccctgaccttcgagcggcgggaggtcctggactcctccaatatcaaaccaatgaacctgatcggcgtggcaagaggcgaaaacatccccgccgtgatcgccctgaccgaccccgagggctgcccactgagccggtttaaggatagcctgggaaacccaacccacatcctgagaatcggcgagagctataaggagaagcagcggaccatccaggccaagaaggaggtggagcagcggagagccggcggctacagccggaagtacgccagcaaagccaagaatctggcagacgatatggtgagaaacaccgctagagatctgctgtactacgccgtgacccaggatgccatgctgatcttcgccaacctgagccggggcttcggccggcagggcaagcggaccttcatggccgagagacagtacacacggatggaggactggctgaccgccaagctggcctacgagggcctgagcaagacctacctgtccaagacactggcccagtacacctccaagacatgcagcaactgtgggtttaccatcaccagcgccgactacgacagggtgctggagaagctgaagaagacagcaacaggctggatgaccacaattaacggcaaggagctgaaggtggagggccagattacctactacaacagatacaagagacagaacgtagtcaaggacctgtccgtcgagctggatagactgagcgaagaatctgtgaacaacgacatctcctcctggacaaagggcagaagcggagaagctctgagcctcctgaagaaaagattctcccatagacccgtgcaggagaagttcgtgtgcctgaactgcggcttcgagacacacgcagccgagcaagccgccctgaacatcgccagatcctggctgttcctgcggagccaggagtacaagaaataccagacaaacaagacaaccggcaacaccgataagagagccttcgtcgagacctggcagtccttttaccggaagaagcttaaggaggtgtggaaacctgccgtgcggtctggcggatctggcggaggctccaccagccccaagaaaaagagaaaagtctaagctgccttctgcggggcttgccttctggccatgcccttcttctctcccttgcacctgtacctcttggtctttgaataaagcctgagtaggaaggctagcaaaaaaaaaaaaaaaaaaaaaaaaaaaaaaaaaaaaaaaaaaaaaaaaaaaaaaaaaaaaaaaaaaaaaaaaaaaaaaaa

SEQ ID NO: 10221 - RNA, 8787 nt, synthetic construct
  source 1..8787: mol_type = other RNA
aggaaataagagagaaaagaagagtaagaagaaatataagagccaccatggcccctaagaagaagcgtaaagtgagccggatgaaccacgaccaggagttcgacccccctaaggtgtaccctcccgtccccgccgagaagagaaagcccatccgggtcctgagcctgttcgatggcatcgccaccggtctgctggtgctgaaggacctgggcatccaggtggataggtacattgcctccgaggtgtgcgaggactccatcaccgtgggaatggtgcgtcatcagggcaagatcatgtacgtgggcgacgtgcggagcgtgacacagaagcatatccaggagtggggccctttcgacctggtgatcggcggcagcccttgcaatgacctgagcatcgtgaacccagcccggaagggcctgtacgagggaaccggcagactgttcttcgagttttacagactgctgcacgacgcccggcctaaggaaggcgacgaccggcccttcttttggctgttcgagaatgtggtggccatgggagtcagcgacaagcgggatattagccggttcctggagagcaaccccgtgatgatcgatgccaaggaagtgagcgccgcccaccgggccagatacttctggggcaatctgcctggcatgaacagacccctggccagcaccgtgaacgacaagctggagctgcaggagtgcctggagcacggccggatcgccaagttcagcaaggtgagaaccatcaccacccgaagcaacagcatcaaacaaggcaaggaccagcactttcctgtgttcatgaacgagaaggaggacatcctgtggtgtaccgagatggagagagtgttcgggttcccagtccactacacagatgtcagcaacatgtctagactggccagacagagactgctgggaagaagctggtccgtccctgtgatcagacacctgttcgcccctctgaaggagtacttcgcctgcgtgagcagcggcaacagcaacgccaacagccggggccccagcttctctagcggcctggtgccactgtccctgagagggagccacatgggccccatggagatctacaaaaccgtgagcgcctggaagcggcagcctgtgcgcgtgctgagcctgtttcggaatatcgataaagtcctgaaaagcctgggattcctggagagcggctctggctccggcggtggcaccctgaagtacgtggaggatgtgacaaacgtggtcagacgggatgtggagaagtggggccccttcgatctggtgtacggcagcacccaacccctgggcagctcttgtgaccggtgccctggctggtacatgtttcagttccaccggatcctgcagtacgccctgccgagacaggagtcccagcggccattcttttggattttcatggacaacttgctgctgaccgaggatgaccaggaaactaccactcggttcctgcagaccgaagccgtgaccctgcaggacgtgagaggccgggactaccagaacgccatgcgggtgtggtccaacatccctggactgaaaagcaagcacgcacctctgacccctaaagaagaggagtacctgcaggcccaggtgcggagcagaagcaagctggacgcccctaaggtggatctgctggtgaagaattgcctcctgcccctgagagagtacttcaagtatttcagccagaatagtctgcccctgggaggcagcggcggcggccccaaggtgcccgtgaccttcgacgacgtggccgtgtacttcagcgagagcgagtggggcaggctggacaagtggcagaaggagctgtacaagcacgtgatgaggggcaactacgagatgctggtgagcctggactacgccatcagcaagcccgacatcctgaccaggatggagaggggcgaggagccctgccccgacggcccctggggccccgaggagggcaaggagagggaggccgccaggggcggcccaagcagcggcgcccctcctcccagcggcggcaggcggcccaagcagcggcgcccctcctcccagcggcggcagcccagccggctccccaacctctaccgaggagggcacctctgagtccgccacccccgagagcggccctggcacctccaccgagcccagcgagggcagcgcacccggcagccctgccggcagccccacctccacagaggagggaaccagcaccgagcccagcgaaggcagcgccccaggcaccagcaccgagcctagtgagcaggagattaaacggatcaacaagatcagaagaagacttgtgaaagacagcaacaccaagaaggccggcaagacaggccccatgaaaaccctgctggttagagtgatgacacccgatctgagagagcggctggaaaacctgagaaagaagcctgaaaatatcccccagcccatcagcaatacatctagagccaacctgaataagctgctgaccgattacaccgaaatgaagaaggcgatcctgcatgtgtactgggaagagttccagaaggaccctgtgggcctgatgagccgggtggcccagcctgccagcaagaagatcgatcagaacaagctgaaacctgagatggacgagaagggcaacctgaccaccgccggctttgcctgctctcagtgtggccagcccctgttcgtgtacaagctggagcaggtgtctgagaagggcaaggcttacaccaactacttcggacggtgcaatgtggccgagcacgaaaagctgatcctgctggcccagctgaagcccgagaaggatagcgacgaagccgtgacatatagcctgggaaagtttgggcagagggccctggatttctacagcattcatgtgaccaaggagtccacccaccccgtgaagcccctggcccagatcgccggaaacagatacgcctccggacctgtgggaaaggccctgagcgacgcatgtatgggcacaatcgcctccttcctgtctaagtaccaggacatcatcatcgaacaccagaaggtggtgaagggcaaccagaagagactggagagcctgcgggagctggccggcaaggaaaacctggaataccctagcgtgaccctgccacctcagcctcacaccaaggagggcgttgatgcctacaacgaagtgatcgcccgggtgcgaatgtgggtgaacctgaacctgtggcagaagctgaagctaagcagagatgatgccaagcctctgctgagactgaagggattcccttcctttcctctggtcgagagacaggccaacgaagtggactggtgggacatggtgtgtaacgtgaagaagctgatcaacgagaaaaaggaggatggcaaggtgttttggcagaatctggctggctacaagagacaggaagccctgagaccatacctgagcagcgaggaagatcggaagaagggaaagaaattcgctcggtaccagctgggcgacctgctgctgcacctggaaaagaagcacggcgaggactggggaaaggtgtacgacgaggcctgggagcggattgacaagaaagtggaaggcctgagcaagcacatcaagctggaagaggaacggagaagcgaggacgcccagagcaaggccgccctgaccgactggctgcgggctaaggccagcttcgtgatcgagggcctgaaggaggccgacaaggacgagttctgcagatgcgagctgaagctgcagaagtggtacggggacctgcggggaaagcccttcgccatcgaagccgagaacagcatcctggacatcagcggcttcagcaagcagtacaactgtgccttcatctggcagaaggacggcgtgaagaagctgaacctgtacctgatcatcaactacttcaagggcggcaagctgcggttcaagaagatcaaacctgaagccttcgaagccaacagattctacaccgtgatcaacaaaaagagcggcgagatcgtgcccatggaggtgaacttcaacttcgacgaccccaacctgatcatcctgcctctggcctttggcaagagacagggcagagaattcatctggaacgacctgctgtccctggaaaccggcagcctgaagctggccaacggaagagtgatcgagaagacactgtacaacagaagaacccggcaggatgagcctgccctgttcgtggccctgaccttcgagcggcgggaggtcctggactcctccaatatcaaaccaatgaacctgatcggcgtggcaagaggcgaaaacatccccgccgtgatcgccctgaccgaccccgagggctgcccactgagccggtttaaggatagcctgggaaacccaacccacatcctgagaatcggcgagagctataaggagaagcagcggaccatccaggccaagaaggaggtggagcagcggagagccggcggctacagccggaagtacgccagcaaagccaagaatctggcagacgatatggtgagaaacaccgctagagatctgctgtactacgccgtgacccaggatgccatgctgatcttcgccaacctgagccggggcttcggccggcagggcaagcggaccttcatggccgagagacagtacacacggatggaggactggctgaccgccaagctggcctacgagggcctgagcaagacctacctgtccaagacactggcccagtacacctccaagacatgcagcaactgtgggtttaccatcaccagcgccgactacgacagggtgctggagaagctgaagaagacagcaacaggctggatgaccacaattaacggcaaggagctgaaggtggagggccagattacctactacaacagatacaagagacagaacgtagtcaaggacctgtccgtcgagctggatagactgagcgaagaatctgtgaacaacgacatctcctcctggacaaagggcagaagcggagaagctctgagcctcctgaagaaaagattctcccatagacccgtgcaggagaagttcgtgtgcctgaactgcggcttcgagacacacgcagccgagcaagccgccctgaacatcgccagatcctggctgttcctgcggagccaggagtacaagaaataccagacaaacaagacaaccggcaacaccgataagagagccttcgtcgagacctggcagtccttttaccggaagaagcttaaggaggtgtggaaacctgccgtgcggtctggcggatctggcggaggctccaccagccccaagaaaaagagaaaagtctaagctgccttctgcggggcttgccttctggccatgcccttcttctctcccttgcacctgtacctcttggtctttgaataaagcctgagtaggaaggctagcaaaaaaaaaaaaaaaaaaaaaaaaaaaaaaaaaaaaaaaaaaaaaaaaaaaaaaaaaaaaaaaaaaaaaaaaaaaaaaaagcccagccggctccccaacctctaccgaggagggcacctctgagtccgccacccccgagagcggccctggcacctccaccgagcccagcgagggcagcgcacccggcagccctgccggcagccccacctccacagaggagggaaccagcaccgagcccagcgaaggcagcgccccaggcaccagcaccgagcctagtgagcaggagattaaacggatcaacaagatcagaagaagacttgtgaaagacagcaacaccaagaaggccggcaagacaggccccatgaaaaccctgctggttagagtgatgacacccgatctgagagagcggctggaaaacctgagaaagaagcctgaaaatatcccccagcccatcagcaatacatctagagccaacctgaataagctgctgaccgattacaccgaaatgaagaaggcgatcctgcatgtgtactgggaagagttccagaaggaccctgtgggcctgatgagccgggtggcccagcctgccagcaagaagatcgatcagaacaagctgaaacctgagatggacgagaagggcaacctgaccaccgccggctttgcctgctctcagtgtggccagcccctgttcgtgtacaagctggagcaggtgtctgagaagggcaaggcttacaccaactacttcggacggtgcaatgtggccgagcacgaaaagctgatcctgctggcccagctgaagcccgagaaggatagcgacgaagccgtgacatatagcctgggaaagtttgggcagagggccctggatttctacagcattcatgtgaccaaggagtccacccaccccgtgaagcccctggcccagatcgccggaaacagatacgcctccggacctgtgggaaaggccctgagcgacgcatgtatgggcacaatcgcctccttcctgtctaagtaccaggacatcatcatcgaacaccagaaggtggtgaagggcaaccagaagagactggagagcctgcgggagctggccggcaaggaaaacctggaataccctagcgtgaccctgccacctcagcctcacaccaaggagggcgttgatgcctacaacgaagtgatcgcccgggtgcgaatgtgggtgaacctgaacctgtggcagaagctgaagctaagcagagatgatgccaagcctctgctgagactgaagggattcccttcctttcctctggtcgagagacaggccaacgaagtggactggtgggacatggtgtgtaacgtgaagaagctgatcaacgagaaaaaggaggatggcaaggtgttttggcagaatctggctggctacaagagacaggaagccctgagaccatacctgagcagcgaggaagatcggaagaagggaaagaaattcgctcggtaccagctgggcgacctgctgctgcacctggaaaagaagcacggcgaggactggggaaaggtgtacgacgaggcctgggagcggattgacaagaaagtggaaggcctgagcaagcacatcaagctggaagaggaacggagaagcgaggacgcccagagcaaggccgccctgaccgactggctgcgggctaaggccagcttcgtgatcgagggcctgaaggaggccgacaaggacgagttctgcagatgcgagctgaagctgcagaagtggtacggggacctgcggggaaagcccttcgccatcgaagccgagaacagcatcctggacatcagcggcttcagcaagcagtacaactgtgccttcatctggcagaaggacggcgtgaagaagctgaacctgtacctgatcatcaactacttcaagggcggcaagctgcggttcaagaagatcaaacctgaagccttcgaagccaacagattctacaccgtgatcaacaaaaagagcggcgagatcgtgcccatggaggtgaacttcaacttcgacgaccccaacctgatcatcctgcctctggcctttggcaagagacagggcagagaattcatctggaacgacctgctgtccctggaaaccggcagcctgaagctggccaacggaagagtgatcgagaagacactgtacaacagaagaacccggcaggatgagcctgccctgttcgtggccctgaccttcgagcggcgggaggtcctggactcctccaatatcaaaccaatgaacctgatcggcgtggcaagaggcgaaaacatccccgccgtgatcgccctgaccgaccccgagggctgcccactgagccggtttaaggatagcctgggaaacccaacccacatcctgagaatcggcgagagctataaggagaagcagcggaccatccaggccaagaaggaggtggagcagcggagagccggcggctacagccggaagtacgccagcaaagccaagaatctggcagacgatatggtgagaaacaccgctagagatctgctgtactacgccgtgacccaggatgccatgctgatcttcgccaacctgagccggggcttcggccggcagggcaagcggaccttcatggccgagagacagtacacacggatggaggactggctgaccgccaagctggcctacgagggcctgagcaagacctacctgtccaagacactggcccagtacacctccaagacatgcagcaactgtgggtttaccatcaccagcgccgactacgacagggtgctggagaagctgaagaagacagcaacaggctggatgaccacaattaacggcaaggagctgaaggtggagggccagattacctactacaacagatacaagagacagaacgtagtcaaggacctgtccgtcgagctggatagactgagcgaagaatctgtgaacaacgacatctcctcctggacaaagggcagaagcggagaagctctgagcctcctgaagaaaagattctcccatagacccgtgcaggagaagttcgtgtgcctgaactgcggcttcgagacacacgcagccgagcaagccgccctgaacatcgccagatcctggctgttcctgcggagccaggagtacaagaaataccagacaaacaagacaaccggcaacaccgataagagagccttcgtcgagacctggcagtccttttaccggaagaagcttaaggaggtgtggaaacctgccgtgcggtctggcggatctggcggaggctccaccagccccaagaaaaagagaaaagtctaagctgccttctgcggggcttgccttctggccatgcccttcttctctcccttgcacctgtacctcttggtctttgaataaagcctgagtaggaaggctagcaaaaaaaaaaaaaaaaaaaaaaaaaaaaaaaaaaaaaaaaaaaaaaaaaaaaaaaaaaaaaaaaaaaaaaaaaaaaaaaa

SEQ ID NO: 10222 - RNA, 8787 nt, synthetic construct
  source 1..8787: mol_type = other RNA
aggaaataagagagaaaagaagagtaagaagaaatataagagccaccatggcccctaagaagaagcgtaaagtgagccggatgaaccacgaccaggagttcgacccccctaaggtgtaccctcccgtccccgccgagaagagaaagcccatccgggtcctgagcctgttcgatggcatcgccaccggtctgctggtgctgaaggacctgggcatccaggtggataggtacattgcctccgaggtgtgcgaggactccatcaccgtgggaatggtgcgtcatcagggcaagatcatgtacgtgggcgacgtgcggagcgtgacacagaagcatatccaggagtggggccctttcgacctggtgatcggcggcagcccttgcaatgacctgagcatcgtgaacccagcccggaagggcctgtacgagggaaccggcagactgttcttcgagttttacagactgctgcacgacgcccggcctaaggaaggcgacgaccggcccttcttttggctgttcgagaatgtggtggccatgggagtcagcgacaagcgggatattagccggttcctggagagcaaccccgtgatgatcgatgccaaggaagtgagcgccgcccaccgggccagatacttctggggcaatctgcctggcatgaacagacccctggccagcaccgtgaacgacaagctggagctgcaggagtgcctggagcacggccggatcgccaagttcagcaaggtgagaaccatcaccacccgaagcaacagcatcaaacaaggcaaggaccagcactttcctgtgttcatgaacgagaaggaggacatcctgtggtgtaccgagatggagagagtgttcgggttcccagtccactacacagatgtcagcaacatgtctagactggccagacagagactgctgggaagaagctggtccgtccctgtgatcagacacctgttcgcccctctgaaggagtacttcgcctgcgtgagcagcggcaacagcaacgccaacagccggggccccagcttctctagcggcctggtgccactgtccctgagagggagccacatgggccccatggagatctacaaaaccgtgagcgcctggaagcggcagcctgtgcgcgtgctgagcctgtttcggaatatcgataaagtcctgaaaagcctgggattcctggagagcggctctggctccggcggtggcaccctgaagtacgtggaggatgtgacaaacgtggtcagacgggatgtggagaagtggggccccttcgatctggtgtacggcagcacccaacccctgggcagctcttgtgaccggtgccctggctggtacatgtttcagttccaccggatcctgcagtacgccctgccgagacaggagtcccagcggccattcttttggattttcatggacaacttgctgctgaccgaggatgaccaggaaactaccactcggttcctgcagaccgaagccgtgaccctgcaggacgtgagaggccgggactaccagaacgccatgcgggtgtggtccaacatccctggactgaaaagcaagcacgcacctctgacccctaaagaagaggagtacctgcaggcccaggtgcggagcagaagcaagctggacgcccctaaggtggatctgctggtgaagaattgcctcctgcccctgagagagtacttcaagtatttcagccagaatagtctgcccctgggaggcagcggcggcggctgcaacatgagcctgagcttcagcgacgtggccgtggacctgagccaggaggagtgggagtgcatgagccccgcccagagggccctgtacagggacgtgatgctggagaactacagcaacctggtgagcctgggctgcagcacccccaagcccgacatgatcaccctgctggagcaggagaaggagccctggatgatcctgagggagggcaccggcagctggttcaccgacctggagagcgagggcggcccaagcagcggcgcccctcctcccagcggcggcaggcggcccaagcagcggcgcccctcctcccagcggcggcagcccagccggctccccaacctctaccgaggagggcacctctgagtccgccacccccgagagcggccctggcacctccaccgagcccagcgagggcagcgcacccggcagccctgccggcagccccacctccacagaggagggaaccagcaccgagcccagcgaaggcagcgccccaggcaccagcaccgagcctagtgagcaggagattaaacggatcaacaagatcagaagaagacttgtgaaagacagcaacaccaagaaggccggcaagacaggccccatgaaaaccctgctggttagagtgatgacacccgatctgagagagcggctggaaaacctgagaaagaagcctgaaaatatcccccagcccatcagcaatacatctagagccaacctgaataagctgctgaccgattacaccgaaatgaagaaggcgatcctgcatgtgtactgggaagagttccagaaggaccctgtgggcctgatgagccgggtggcccagcctgccagcaagaagatcgatcagaacaagctgaaacctgagatggacgagaagggcaacctgaccaccgccggctttgcctgctctcagtgtggccagcccctgttcgtgtacaagctggagcaggtgtctgagaagggcaaggcttacaccaactacttcggacggtgcaatgtggccgagcacgaaaagctgatcctgctggcccagctgaagcccgagaaggatagcgacgaagccgtgacatatagcctgggaaagtttgggcagagggccctggatttctacagcattcatgtgaccaaggagtccacccaccccgtgaagcccctggcccagatcgccggaaacagatacgcctccggacctgtgggaaaggccctgagcgacgcatgtatgggcacaatcgcctccttcctgtctaagtaccaggacatcatcatcgaacaccagaaggtggtgaagggcaaccagaagagactggagagcctgcgggagctggccggcaaggaaaacctggaataccctagcgtgaccctgccacctcagcctcacaccaaggagggcgttgatgcctacaacgaagtgatcgcccgggtgcgaatgtgggtgaacctgaacctgtggcagaagctgaagctaagcagagatgatgccaagcctctgctgagactgaagggattcccttcctttcctctggtcgagagacaggccaacgaagtggactggtgggacatggtgtgtaacgtgaagaagctgatcaacgagaaaaaggaggatggcaaggtgttttggcagaatctggctggctacaagagacaggaagccctgagaccatacctgagcagcgaggaagatcggaagaagggaaagaaattcgctcggtaccagctgggcgacctgctgctgcacctggaaaagaagcacggcgaggactggggaaaggtgtacgacgaggcctgggagcggattgacaagaaagtggaaggcctgagcaagcacatcaagctggaagaggaacggagaagcgaggacgcccagagcaaggccgccctgaccgactggctgcgggctaaggccagcttcgtgatcgagggcctgaaggaggccgacaaggacgagttctgcagatgcgagctgaagctgcagaagtggtacggggacctgcggggaaagcccttcgccatcgaagccgagaacagcatcctggacatcagcggcttcagcaagcagtacaactgtgccttcatctggcagaaggacggcgtgaagaagctgaacctgtacctgatcatcaactacttcaagggcggcaagctgcggttcaagaagatcaaacctgaagccttcgaagccaacagattctacaccgtgatcaacaaaaagagcggcgagatcgtgcccatggaggtgaacttcaacttcgacgaccccaacctgatcatcctgcctctggcctttggcaagagacagggcagagaattcatctggaacgacctgctgtccctggaaaccggcagcctgaagctggccaacggaagagtgatcgagaagacactgtacaacagaagaacccggcaggatgagcctgccctgttcgtggccctgaccttcgagcggcgggaggtcctggactcctccaatatcaaaccaatgaacctgatcggcgtggcaagaggcgaaaacatccccgccgtgatcgccctgaccgaccccgagggctgcccactgagccggtttaaggatagcctgggaaacccaacccacatcctgagaatcggcgagagctataaggagaagcagcggaccatccaggccaagaaggaggtggagcagcggagagccggcggctacagccggaagtacgccagcaaagccaagaatctggcagacgatatggtgagaaacaccgctagagatctgctgtactacgccgtgacccaggatgccatgctgatcttcgccaacctgagccggggcttcggccggcagggcaagcggaccttcatggccgagagacagtacacacggatggaggactggctgaccgccaagctggcctacgagggcctgagcaagacctacctgtccaagacactggcccagtacacctccaagacatgcagcaactgtgggtttaccatcaccagcgccgactacgacagggtgctggagaagctgaagaagacagcaacaggctggatgaccacaattaacggcaaggagctgaaggtggagggccagattacctactacaacagatacaagagacagaacgtagtcaaggacctgtccgtcgagctggatagactgagcgaagaatctgtgaacaacgacatctcctcctggacaaagggcagaagcggagaagctctgagcctcctgaagaaaagattctcccatagacccgtgcaggagaagttcgtgtgcctgaactgcggcttcgagacacacgcagccgagcaagccgccctgaacatcgccagatcctggctgttcctgcggagccaggagtacaagaaataccagacaaacaagacaaccggcaacaccgataagagagccttcgtcgagacctggcagtccttttaccggaagaagcttaaggaggtgtggaaacctgccgtgcggtctggcggatctggcggaggctccaccagccccaagaaaaagagaaaagtctaagctgccttctgcggggcttgccttctggccatgcccttcttctctcccttgcacctgtacctcttggtctttgaataaagcctgagtaggaaggctagcaaaaaaaaaaaaaaaaaaaaaaaaaaaaaaaaaaaaaaaaaaaaaaaaaaaaaaaaaaaaaaaaaaaaaaaaaaaaaaaagcccagccggctccccaacctctaccgaggagggcacctctgagtccgccacccccgagagcggccctggcacctccaccgagcccagcgagggcagcgcacccggcagccctgccggcagccccacctccacagaggagggaaccagcaccgagcccagcgaaggcagcgccccaggcaccagcaccgagcctagtgagcaggagattaaacggatcaacaagatcagaagaagacttgtgaaagacagcaacaccaagaaggccggcaagacaggccccatgaaaaccctgctggttagagtgatgacacccgatctgagagagcggctggaaaacctgagaaagaagcctgaaaatatcccccagcccatcagcaatacatctagagccaacctgaataagctgctgaccgattacaccgaaatgaagaaggcgatcctgcatgtgtactgggaagagttccagaaggaccctgtgggcctgatgagccgggtggcccagcctgccagcaagaagatcgatcagaacaagctgaaacctgagatggacgagaagggcaacctgaccaccgccggctttgcctgctctcagtgtggccagcccctgttcgtgtacaagctggagcaggtgtctgagaagggcaaggcttacaccaactacttcggacggtgcaatgtggccgagcacgaaaagctgatcctgctggcccagctgaagcccgagaaggatagcgacgaagccgtgacatatagcctgggaaagtttgggcagagggccctggatttctacagcattcatgtgaccaaggagtccacccaccccgtgaagcccctggcccagatcgccggaaacagatacgcctccggacctgtgggaaaggccctgagcgacgcatgtatgggcacaatcgcctccttcctgtctaagtaccaggacatcatcatcgaacaccagaaggtggtgaagggcaaccagaagagactggagagcctgcgggagctggccggcaaggaaaacctggaataccctagcgtgaccctgccacctcagcctcacaccaaggagggcgttgatgcctacaacgaagtgatcgcccgggtgcgaatgtgggtgaacctgaacctgtggcagaagctgaagctaagcagagatgatgccaagcctctgctgagactgaagggattcccttcctttcctctggtcgagagacaggccaacgaagtggactggtgggacatggtgtgtaacgtgaagaagctgatcaacgagaaaaaggaggatggcaaggtgttttggcagaatctggctggctacaagagacaggaagccctgagaccatacctgagcagcgaggaagatcggaagaagggaaagaaattcgctcggtaccagctgggcgacctgctgctgcacctggaaaagaagcacggcgaggactggggaaaggtgtacgacgaggcctgggagcggattgacaagaaagtggaaggcctgagcaagcacatcaagctggaagaggaacggagaagcgaggacgcccagagcaaggccgccctgaccgactggctgcgggctaaggccagcttcgtgatcgagggcctgaaggaggccgacaaggacgagttctgcagatgcgagctgaagctgcagaagtggtacggggacctgcggggaaagcccttcgccatcgaagccgagaacagcatcctggacatcagcggcttcagcaagcagtacaactgtgccttcatctggcagaaggacggcgtgaagaagctgaacctgtacctgatcatcaactacttcaagggcggcaagctgcggttcaagaagatcaaacctgaagccttcgaagccaacagattctacaccgtgatcaacaaaaagagcggcgagatcgtgcccatggaggtgaacttcaacttcgacgaccccaacctgatcatcctgcctctggcctttggcaagagacagggcagagaattcatctggaacgacctgctgtccctggaaaccggcagcctgaagctggccaacggaagagtgatcgagaagacactgtacaacagaagaacccggcaggatgagcctgccctgttcgtggccctgaccttcgagcggcgggaggtcctggactcctccaatatcaaaccaatgaacctgatcggcgtggcaagaggcgaaaacatccccgccgtgatcgccctgaccgaccccgagggctgcccactgagccggtttaaggatagcctgggaaacccaacccacatcctgagaatcggcgagagctataaggagaagcagcggaccatccaggccaagaaggaggtggagcagcggagagccggcggctacagccggaagtacgccagcaaagccaagaatctggcagacgatatggtgagaaacaccgctagagatctgctgtactacgccgtgacccaggatgccatgctgatcttcgccaacctgagccggggcttcggccggcagggcaagcggaccttcatggccgagagacagtacacacggatggaggactggctgaccgccaagctggcctacgagggcctgagcaagacctacctgtccaagacactggcccagtacacctccaagacatgcagcaactgtgggtttaccatcaccagcgccgactacgacagggtgctggagaagctgaagaagacagcaacaggctggatgaccacaattaacggcaaggagctgaaggtggagggccagattacctactacaacagatacaagagacagaacgtagtcaaggacctgtccgtcgagctggatagactgagcgaagaatctgtgaacaacgacatctcctcctggacaaagggcagaagcggagaagctctgagcctcctgaagaaaagattctcccatagacccgtgcaggagaagttcgtgtgcctgaactgcggcttcgagacacacgcagccgagcaagccgccctgaacatcgccagatcctggctgttcctgcggagccaggagtacaagaaataccagacaaacaagacaaccggcaacaccgataagagagccttcgtcgagacctggcagtccttttaccggaagaagcttaaggaggtgtggaaacctgccgtgcggtctggcggatctggcggaggctccaccagccccaagaaaaagagaaaagtctaagctgccttctgcggggcttgccttctggccatgcccttcttctctcccttgcacctgtacctcttggtctttgaataaagcctgagtaggaaggctagcaaaaaaaaaaaaaaaaaaaaaaaaaaaaaaaaaaaaaaaaaaaaaaaaaaaaaaaaaaaaaaaaaaaaaaaaaaaaaaaa

SEQ ID NO: 10223 - RNA, 8787 nt, synthetic construct
  source 1..8787: mol_type = other RNA
aggaaataagagagaaaagaagagtaagaagaaatataagagccaccatggcccctaagaagaagcgtaaagtgagccggatgaaccacgaccaggagttcgacccccctaaggtgtaccctcccgtccccgccgagaagagaaagcccatccgggtcctgagcctgttcgatggcatcgccaccggtctgctggtgctgaaggacctgggcatccaggtggataggtacattgcctccgaggtgtgcgaggactccatcaccgtgggaatggtgcgtcatcagggcaagatcatgtacgtgggcgacgtgcggagcgtgacacagaagcatatccaggagtggggccctttcgacctggtgatcggcggcagcccttgcaatgacctgagcatcgtgaacccagcccggaagggcctgtacgagggaaccggcagactgttcttcgagttttacagactgctgcacgacgcccggcctaaggaaggcgacgaccggcccttcttttggctgttcgagaatgtggtggccatgggagtcagcgacaagcgggatattagccggttcctggagagcaaccccgtgatgatcgatgccaaggaagtgagcgccgcccaccgggccagatacttctggggcaatctgcctggcatgaacagacccctggccagcaccgtgaacgacaagctggagctgcaggagtgcctggagcacggccggatcgccaagttcagcaaggtgagaaccatcaccacccgaagcaacagcatcaaacaaggcaaggaccagcactttcctgtgttcatgaacgagaaggaggacatcctgtggtgtaccgagatggagagagtgttcgggttcccagtccactacacagatgtcagcaacatgtctagactggccagacagagactgctgggaagaagctggtccgtccctgtgatcagacacctgttcgcccctctgaaggagtacttcgcctgcgtgagcagcggcaacagcaacgccaacagccggggccccagcttctctagcggcctggtgccactgtccctgagagggagccacatgggccccatggagatctacaaaaccgtgagcgcctggaagcggcagcctgtgcgcgtgctgagcctgtttcggaatatcgataaagtcctgaaaagcctgggattcctggagagcggctctggctccggcggtggcaccctgaagtacgtggaggatgtgacaaacgtggtcagacgggatgtggagaagtggggccccttcgatctggtgtacggcagcacccaacccctgggcagctcttgtgaccggtgccctggctggtacatgtttcagttccaccggatcctgcagtacgccctgccgagacaggagtcccagcggccattcttttggattttcatggacaacttgctgctgaccgaggatgaccaggaaactaccactcggttcctgcagaccgaagccgtgaccctgcaggacgtgagaggccgggactaccagaacgccatgcgggtgtggtccaacatccctggactgaaaagcaagcacgcacctctgacccctaaagaagaggagtacctgcaggcccaggtgcggagcagaagcaagctggacgcccctaaggtggatctgctggtgaagaattgcctcctgcccctgagagagtacttcaagtatttcagccagaatagtctgcccctgggaggcagcggcggcggcgagcccggcgccgtgagcttcgccgacgtggccgtgtacttctgcagggaggagtggggctgcctgaggcccgcccagagggccctgtacagggacgtgatgagggagacctacggccacctgagcgccctgggcatcggcggcaacaagcccgccctgatcagctgggtggaggaggaggccgagctgtggggccccgccgcccaggaccccgaggtggccaagtgccagacccagaccgacggcggcccaagcagcggcgcccctcctcccagcggcggcaggcggcccaagcagcggcgcccctcctcccagcggcggcagcccagccggctccccaacctctaccgaggagggcacctctgagtccgccacccccgagagcggccctggcacctccaccgagcccagcgagggcagcgcacccggcagccctgccggcagccccacctccacagaggagggaaccagcaccgagcccagcgaaggcagcgccccaggcaccagcaccgagcctagtgagcaggagattaaacggatcaacaagatcagaagaagacttgtgaaagacagcaacaccaagaaggccggcaagacaggccccatgaaaaccctgctggttagagtgatgacacccgatctgagagagcggctggaaaacctgagaaagaagcctgaaaatatcccccagcccatcagcaatacatctagagccaacctgaataagctgctgaccgattacaccgaaatgaagaaggcgatcctgcatgtgtactgggaagagttccagaaggaccctgtgggcctgatgagccgggtggcccagcctgccagcaagaagatcgatcagaacaagctgaaacctgagatggacgagaagggcaacctgaccaccgccggctttgcctgctctcagtgtggccagcccctgttcgtgtacaagctggagcaggtgtctgagaagggcaaggcttacaccaactacttcggacggtgcaatgtggccgagcacgaaaagctgatcctgctggcccagctgaagcccgagaaggatagcgacgaagccgtgacatatagcctgggaaagtttgggcagagggccctggatttctacagcattcatgtgaccaaggagtccacccaccccgtgaagcccctggcccagatcgccggaaacagatacgcctccggacctgtgggaaaggccctgagcgacgcatgtatgggcacaatcgcctccttcctgtctaagtaccaggacatcatcatcgaacaccagaaggtggtgaagggcaaccagaagagactggagagcctgcgggagctggccggcaaggaaaacctggaataccctagcgtgaccctgccacctcagcctcacaccaaggagggcgttgatgcctacaacgaagtgatcgcccgggtgcgaatgtgggtgaacctgaacctgtggcagaagctgaagctaagcagagatgatgccaagcctctgctgagactgaagggattcccttcctttcctctggtcgagagacaggccaacgaagtggactggtgggacatggtgtgtaacgtgaagaagctgatcaacgagaaaaaggaggatggcaaggtgttttggcagaatctggctggctacaagagacaggaagccctgagaccatacctgagcagcgaggaagatcggaagaagggaaagaaattcgctcggtaccagctgggcgacctgctgctgcacctggaaaagaagcacggcgaggactggggaaaggtgtacgacgaggcctgggagcggattgacaagaaagtggaaggcctgagcaagcacatcaagctggaagaggaacggagaagcgaggacgcccagagcaaggccgccctgaccgactggctgcgggctaaggccagcttcgtgatcgagggcctgaaggaggccgacaaggacgagttctgcagatgcgagctgaagctgcagaagtggtacggggacctgcggggaaagcccttcgccatcgaagccgagaacagcatcctggacatcagcggcttcagcaagcagtacaactgtgccttcatctggcagaaggacggcgtgaagaagctgaacctgtacctgatcatcaactacttcaagggcggcaagctgcggttcaagaagatcaaacctgaagccttcgaagccaacagattctacaccgtgatcaacaaaaagagcggcgagatcgtgcccatggaggtgaacttcaacttcgacgaccccaacctgatcatcctgcctctggcctttggcaagagacagggcagagaattcatctggaacgacctgctgtccctggaaaccggcagcctgaagctggccaacggaagagtgatcgagaagacactgtacaacagaagaacccggcaggatgagcctgccctgttcgtggccctgaccttcgagcggcgggaggtcctggactcctccaatatcaaaccaatgaacctgatcggcgtggcaagaggcgaaaacatccccgccgtgatcgccctgaccgaccccgagggctgcccactgagccggtttaaggatagcctgggaaacccaacccacatcctgagaatcggcgagagctataaggagaagcagcggaccatccaggccaagaaggaggtggagcagcggagagccggcggctacagccggaagtacgccagcaaagccaagaatctggcagacgatatggtgagaaacaccgctagagatctgctgtactacgccgtgacccaggatgccatgctgatcttcgccaacctgagccggggcttcggccggcagggcaagcggaccttcatggccgagagacagtacacacggatggaggactggctgaccgccaagctggcctacgagggcctgagcaagacctacctgtccaagacactggcccagtacacctccaagacatgcagcaactgtgggtttaccatcaccagcgccgactacgacagggtgctggagaagctgaagaagacagcaacaggctggatgaccacaattaacggcaaggagctgaaggtggagggccagattacctactacaacagatacaagagacagaacgtagtcaaggacctgtccgtcgagctggatagactgagcgaagaatctgtgaacaacgacatctcctcctggacaaagggcagaagcggagaagctctgagcctcctgaagaaaagattctcccatagacccgtgcaggagaagttcgtgtgcctgaactgcggcttcgagacacacgcagccgagcaagccgccctgaacatcgccagatcctggctgttcctgcggagccaggagtacaagaaataccagacaaacaagacaaccggcaacaccgataagagagccttcgtcgagacctggcagtccttttaccggaagaagcttaaggaggtgtggaaacctgccgtgcggtctggcggatctggcggaggctccaccagccccaagaaaaagagaaaagtctaagctgccttctgcggggcttgccttctggccatgcccttcttctctcccttgcacctgtacctcttggtctttgaataaagcctgagtaggaaggctagcaaaaaaaaaaaaaaaaaaaaaaaaaaaaaaaaaaaaaaaaaaaaaaaaaaaaaaaaaaaaaaaaaaaaaaaaaaaaaaaagcccagccggctccccaacctctaccgaggagggcacctctgagtccgccacccccgagagcggccctggcacctccaccgagcccagcgagggcagcgcacccggcagccctgccggcagccccacctccacagaggagggaaccagcaccgagcccagcgaaggcagcgccccaggcaccagcaccgagcctagtgagcaggagattaaacggatcaacaagatcagaagaagacttgtgaaagacagcaacaccaagaaggccggcaagacaggccccatgaaaaccctgctggttagagtgatgacacccgatctgagagagcggctggaaaacctgagaaagaagcctgaaaatatcccccagcccatcagcaatacatctagagccaacctgaataagctgctgaccgattacaccgaaatgaagaaggcgatcctgcatgtgtactgggaagagttccagaaggaccctgtgggcctgatgagccgggtggcccagcctgccagcaagaagatcgatcagaacaagctgaaacctgagatggacgagaagggcaacctgaccaccgccggctttgcctgctctcagtgtggccagcccctgttcgtgtacaagctggagcaggtgtctgagaagggcaaggcttacaccaactacttcggacggtgcaatgtggccgagcacgaaaagctgatcctgctggcccagctgaagcccgagaaggatagcgacgaagccgtgacatatagcctgggaaagtttgggcagagggccctggatttctacagcattcatgtgaccaaggagtccacccaccccgtgaagcccctggcccagatcgccggaaacagatacgcctccggacctgtgggaaaggccctgagcgacgcatgtatgggcacaatcgcctccttcctgtctaagtaccaggacatcatcatcgaacaccagaaggtggtgaagggcaaccagaagagactggagagcctgcgggagctggccggcaaggaaaacctggaataccctagcgtgaccctgccacctcagcctcacaccaaggagggcgttgatgcctacaacgaagtgatcgcccgggtgcgaatgtgggtgaacctgaacctgtggcagaagctgaagctaagcagagatgatgccaagcctctgctgagactgaagggattcccttcctttcctctggtcgagagacaggccaacgaagtggactggtgggacatggtgtgtaacgtgaagaagctgatcaacgagaaaaaggaggatggcaaggtgttttggcagaatctggctggctacaagagacaggaagccctgagaccatacctgagcagcgaggaagatcggaagaagggaaagaaattcgctcggtaccagctgggcgacctgctgctgcacctggaaaagaagcacggcgaggactggggaaaggtgtacgacgaggcctgggagcggattgacaagaaagtggaaggcctgagcaagcacatcaagctggaagaggaacggagaagcgaggacgcccagagcaaggccgccctgaccgactggctgcgggctaaggccagcttcgtgatcgagggcctgaaggaggccgacaaggacgagttctgcagatgcgagctgaagctgcagaagtggtacggggacctgcggggaaagcccttcgccatcgaagccgagaacagcatcctggacatcagcggcttcagcaagcagtacaactgtgccttcatctggcagaaggacggcgtgaagaagctgaacctgtacctgatcatcaactacttcaagggcggcaagctgcggttcaagaagatcaaacctgaagccttcgaagccaacagattctacaccgtgatcaacaaaaagagcggcgagatcgtgcccatggaggtgaacttcaacttcgacgaccccaacctgatcatcctgcctctggcctttggcaagagacagggcagagaattcatctggaacgacctgctgtccctggaaaccggcagcctgaagctggccaacggaagagtgatcgagaagacactgtacaacagaagaacccggcaggatgagcctgccctgttcgtggccctgaccttcgagcggcgggaggtcctggactcctccaatatcaaaccaatgaacctgatcggcgtggcaagaggcgaaaacatccccgccgtgatcgccctgaccgaccccgagggctgcccactgagccggtttaaggatagcctgggaaacccaacccacatcctgagaatcggcgagagctataaggagaagcagcggaccatccaggccaagaaggaggtggagcagcggagagccggcggctacagccggaagtacgccagcaaagccaagaatctggcagacgatatggtgagaaacaccgctagagatctgctgtactacgccgtgacccaggatgccatgctgatcttcgccaacctgagccggggcttcggccggcagggcaagcggaccttcatggccgagagacagtacacacggatggaggactggctgaccgccaagctggcctacgagggcctgagcaagacctacctgtccaagacactggcccagtacacctccaagacatgcagcaactgtgggtttaccatcaccagcgccgactacgacagggtgctggagaagctgaagaagacagcaacaggctggatgaccacaattaacggcaaggagctgaaggtggagggccagattacctactacaacagatacaagagacagaacgtagtcaaggacctgtccgtcgagctggatagactgagcgaagaatctgtgaacaacgacatctcctcctggacaaagggcagaagcggagaagctctgagcctcctgaagaaaagattctcccatagacccgtgcaggagaagttcgtgtgcctgaactgcggcttcgagacacacgcagccgagcaagccgccctgaacatcgccagatcctggctgttcctgcggagccaggagtacaagaaataccagacaaacaagacaaccggcaacaccgataagagagccttcgtcgagacctggcagtccttttaccggaagaagcttaaggaggtgtggaaacctgccgtgcggtctggcggatctggcggaggctccaccagccccaagaaaaagagaaaagtctaagctgccttctgcggggcttgccttctggccatgcccttcttctctcccttgcacctgtacctcttggtctttgaataaagcctgagtaggaaggctagcaaaaaaaaaaaaaaaaaaaaaaaaaaaaaaaaaaaaaaaaaaaaaaaaaaaaaaaaaaaaaaaaaaaaaaaaaaaaaaaa

SEQ ID NO: 10224 - RNA, 8787 nt, synthetic construct
  source 1..8787: mol_type = other RNA
aggaaataagagagaaaagaagagtaagaagaaatataagagccaccatggcccctaagaagaagcgtaaagtgagccggatgaaccacgaccaggagttcgacccccctaaggtgtaccctcccgtccccgccgagaagagaaagcccatccgggtcctgagcctgttcgatggcatcgccaccggtctgctggtgctgaaggacctgggcatccaggtggataggtacattgcctccgaggtgtgcgaggactccatcaccgtgggaatggtgcgtcatcagggcaagatcatgtacgtgggcgacgtgcggagcgtgacacagaagcatatccaggagtggggccctttcgacctggtgatcggcggcagcccttgcaatgacctgagcatcgtgaacccagcccggaagggcctgtacgagggaaccggcagactgttcttcgagttttacagactgctgcacgacgcccggcctaaggaaggcgacgaccggcccttcttttggctgttcgagaatgtggtggccatgggagtcagcgacaagcgggatattagccggttcctggagagcaaccccgtgatgatcgatgccaaggaagtgagcgccgcccaccgggccagatacttctggggcaatctgcctggcatgaacagacccctggccagcaccgtgaacgacaagctggagctgcaggagtgcctggagcacggccggatcgccaagttcagcaaggtgagaaccatcaccacccgaagcaacagcatcaaacaaggcaaggaccagcactttcctgtgttcatgaacgagaaggaggacatcctgtggtgtaccgagatggagagagtgttcgggttcccagtccactacacagatgtcagcaacatgtctagactggccagacagagactgctgggaagaagctggtccgtccctgtgatcagacacctgttcgcccctctgaaggagtacttcgcctgcgtgagcagcggcaacagcaacgccaacagccggggccccagcttctctagcggcctggtgccactgtccctgagagggagccacatgggccccatggagatctacaaaaccgtgagcgcctggaagcggcagcctgtgcgcgtgctgagcctgtttcggaatatcgataaagtcctgaaaagcctgggattcctggagagcggctctggctccggcggtggcaccctgaagtacgtggaggatgtgacaaacgtggtcagacgggatgtggagaagtggggccccttcgatctggtgtacggcagcacccaacccctgggcagctcttgtgaccggtgccctggctggtacatgtttcagttccaccggatcctgcagtacgccctgccgagacaggagtcccagcggccattcttttggattttcatggacaacttgctgctgaccgaggatgaccaggaaactaccactcggttcctgcagaccgaagccgtgaccctgcaggacgtgagaggccgggactaccagaacgccatgcgggtgtggtccaacatccctggactgaaaagcaagcacgcacctctgacccctaaagaagaggagtacctgcaggcccaggtgcggagcagaagcaagctggacgcccctaaggtggatctgctggtgaagaattgcctcctgcccctgagagagtacttcaagtatttcagccagaatagtctgcccctgggaggcagcggcggcggcttcaagggccccgtgaccttcaaggacgtgaccgtggagttcaccaaggaggagtggaagctgctgacccccgcccagaggaccctgtacaaggacgtgatgctggagaactacaaccacctggtgagcgtgggctacagggtgagcaagcccaacctggtgttcaagctgaagcagggcaaggagccctgggtgctggaggtggagttccccaggaggaggtgccccgaggagctgtggaacggcggcccaagcagcggcgcccctcctcccagcggcggcaggcggcccaagcagcggcgcccctcctcccagcggcggcagcccagccggctccccaacctctaccgaggagggcacctctgagtccgccacccccgagagcggccctggcacctccaccgagcccagcgagggcagcgcacccggcagccctgccggcagccccacctccacagaggagggaaccagcaccgagcccagcgaaggcagcgccccaggcaccagcaccgagcctagtgagcaggagattaaacggatcaacaagatcagaagaagacttgtgaaagacagcaacaccaagaaggccggcaagacaggccccatgaaaaccctgctggttagagtgatgacacccgatctgagagagcggctggaaaacctgagaaagaagcctgaaaatatcccccagcccatcagcaatacatctagagccaacctgaataagctgctgaccgattacaccgaaatgaagaaggcgatcctgcatgtgtactgggaagagttccagaaggaccctgtgggcctgatgagccgggtggcccagcctgccagcaagaagatcgatcagaacaagctgaaacctgagatggacgagaagggcaacctgaccaccgccggctttgcctgctctcagtgtggccagcccctgttcgtgtacaagctggagcaggtgtctgagaagggcaaggcttacaccaactacttcggacggtgcaatgtggccgagcacgaaaagctgatcctgctggcccagctgaagcccgagaaggatagcgacgaagccgtgacatatagcctgggaaagtttgggcagagggccctggatttctacagcattcatgtgaccaaggagtccacccaccccgtgaagcccctggcccagatcgccggaaacagatacgcctccggacctgtgggaaaggccctgagcgacgcatgtatgggcacaatcgcctccttcctgtctaagtaccaggacatcatcatcgaacaccagaaggtggtgaagggcaaccagaagagactggagagcctgcgggagctggccggcaaggaaaacctggaataccctagcgtgaccctgccacctcagcctcacaccaaggagggcgttgatgcctacaacgaagtgatcgcccgggtgcgaatgtgggtgaacctgaacctgtggcagaagctgaagctaagcagagatgatgccaagcctctgctgagactgaagggattcccttcctttcctctggtcgagagacaggccaacgaagtggactggtgggacatggtgtgtaacgtgaagaagctgatcaacgagaaaaaggaggatggcaaggtgttttggcagaatctggctggctacaagagacaggaagccctgagaccatacctgagcagcgaggaagatcggaagaagggaaagaaattcgctcggtaccagctgggcgacctgctgctgcacctggaaaagaagcacggcgaggactggggaaaggtgtacgacgaggcctgggagcggattgacaagaaagtggaaggcctgagcaagcacatcaagctggaagaggaacggagaagcgaggacgcccagagcaaggccgccctgaccgactggctgcgggctaaggccagcttcgtgatcgagggcctgaaggaggccgacaaggacgagttctgcagatgcgagctgaagctgcagaagtggtacggggacctgcggggaaagcccttcgccatcgaagccgagaacagcatcctggacatcagcggcttcagcaagcagtacaactgtgccttcatctggcagaaggacggcgtgaagaagctgaacctgtacctgatcatcaactacttcaagggcggcaagctgcggttcaagaagatcaaacctgaagccttcgaagccaacagattctacaccgtgatcaacaaaaagagcggcgagatcgtgcccatggaggtgaacttcaacttcgacgaccccaacctgatcatcctgcctctggcctttggcaagagacagggcagagaattcatctggaacgacctgctgtccctggaaaccggcagcctgaagctggccaacggaagagtgatcgagaagacactgtacaacagaagaacccggcaggatgagcctgccctgttcgtggccctgaccttcgagcggcgggaggtcctggactcctccaatatcaaaccaatgaacctgatcggcgtggcaagaggcgaaaacatccccgccgtgatcgccctgaccgaccccgagggctgcccactgagccggtttaaggatagcctgggaaacccaacccacatcctgagaatcggcgagagctataaggagaagcagcggaccatccaggccaagaaggaggtggagcagcggagagccggcggctacagccggaagtacgccagcaaagccaagaatctggcagacgatatggtgagaaacaccgctagagatctgctgtactacgccgtgacccaggatgccatgctgatcttcgccaacctgagccggggcttcggccggcagggcaagcggaccttcatggccgagagacagtacacacggatggaggactggctgaccgccaagctggcctacgagggcctgagcaagacctacctgtccaagacactggcccagtacacctccaagacatgcagcaactgtgggtttaccatcaccagcgccgactacgacagggtgctggagaagctgaagaagacagcaacaggctggatgaccacaattaacggcaaggagctgaaggtggagggccagattacctactacaacagatacaagagacagaacgtagtcaaggacctgtccgtcgagctggatagactgagcgaagaatctgtgaacaacgacatctcctcctggacaaagggcagaagcggagaagctctgagcctcctgaagaaaagattctcccatagacccgtgcaggagaagttcgtgtgcctgaactgcggcttcgagacacacgcagccgagcaagccgccctgaacatcgccagatcctggctgttcctgcggagccaggagtacaagaaataccagacaaacaagacaaccggcaacaccgataagagagccttcgtcgagacctggcagtccttttaccggaagaagcttaaggaggtgtggaaacctgccgtgcggtctggcggatctggcggaggctccaccagccccaagaaaaagagaaaagtctaagctgccttctgcggggcttgccttctggccatgcccttcttctctcccttgcacctgtacctcttggtctttgaataaagcctgagtaggaaggctagcaaaaaaaaaaaaaaaaaaaaaaaaaaaaaaaaaaaaaaaaaaaaaaaaaaaaaaaaaaaaaaaaaaaaaaaaaaaaaaaagcccagccggctccccaacctctaccgaggagggcacctctgagtccgccacccccgagagcggccctggcacctccaccgagcccagcgagggcagcgcacccggcagccctgccggcagccccacctccacagaggagggaaccagcaccgagcccagcgaaggcagcgccccaggcaccagcaccgagcctagtgagcaggagattaaacggatcaacaagatcagaagaagacttgtgaaagacagcaacaccaagaaggccggcaagacaggccccatgaaaaccctgctggttagagtgatgacacccgatctgagagagcggctggaaaacctgagaaagaagcctgaaaatatcccccagcccatcagcaatacatctagagccaacctgaataagctgctgaccgattacaccgaaatgaagaaggcgatcctgcatgtgtactgggaagagttccagaaggaccctgtgggcctgatgagccgggtggcccagcctgccagcaagaagatcgatcagaacaagctgaaacctgagatggacgagaagggcaacctgaccaccgccggctttgcctgctctcagtgtggccagcccctgttcgtgtacaagctggagcaggtgtctgagaagggcaaggcttacaccaactacttcggacggtgcaatgtggccgagcacgaaaagctgatcctgctggcccagctgaagcccgagaaggatagcgacgaagccgtgacatatagcctgggaaagtttgggcagagggccctggatttctacagcattcatgtgaccaaggagtccacccaccccgtgaagcccctggcccagatcgccggaaacagatacgcctccggacctgtgggaaaggccctgagcgacgcatgtatgggcacaatcgcctccttcctgtctaagtaccaggacatcatcatcgaacaccagaaggtggtgaagggcaaccagaagagactggagagcctgcgggagctggccggcaaggaaaacctggaataccctagcgtgaccctgccacctcagcctcacaccaaggagggcgttgatgcctacaacgaagtgatcgcccgggtgcgaatgtgggtgaacctgaacctgtggcagaagctgaagctaagcagagatgatgccaagcctctgctgagactgaagggattcccttcctttcctctggtcgagagacaggccaacgaagtggactggtgggacatggtgtgtaacgtgaagaagctgatcaacgagaaaaaggaggatggcaaggtgttttggcagaatctggctggctacaagagacaggaagccctgagaccatacctgagcagcgaggaagatcggaagaagggaaagaaattcgctcggtaccagctgggcgacctgctgctgcacctggaaaagaagcacggcgaggactggggaaaggtgtacgacgaggcctgggagcggattgacaagaaagtggaaggcctgagcaagcacatcaagctggaagaggaacggagaagcgaggacgcccagagcaaggccgccctgaccgactggctgcgggctaaggccagcttcgtgatcgagggcctgaaggaggccgacaaggacgagttctgcagatgcgagctgaagctgcagaagtggtacggggacctgcggggaaagcccttcgccatcgaagccgagaacagcatcctggacatcagcggcttcagcaagcagtacaactgtgccttcatctggcagaaggacggcgtgaagaagctgaacctgtacctgatcatcaactacttcaagggcggcaagctgcggttcaagaagatcaaacctgaagccttcgaagccaacagattctacaccgtgatcaacaaaaagagcggcgagatcgtgcccatggaggtgaacttcaacttcgacgaccccaacctgatcatcctgcctctggcctttggcaagagacagggcagagaattcatctggaacgacctgctgtccctggaaaccggcagcctgaagctggccaacggaagagtgatcgagaagacactgtacaacagaagaacccggcaggatgagcctgccctgttcgtggccctgaccttcgagcggcgggaggtcctggactcctccaatatcaaaccaatgaacctgatcggcgtggcaagaggcgaaaacatccccgccgtgatcgccctgaccgaccccgagggctgcccactgagccggtttaaggatagcctgggaaacccaacccacatcctgagaatcggcgagagctataaggagaagcagcggaccatccaggccaagaaggaggtggagcagcggagagccggcggctacagccggaagtacgccagcaaagccaagaatctggcagacgatatggtgagaaacaccgctagagatctgctgtactacgccgtgacccaggatgccatgctgatcttcgccaacctgagccggggcttcggccggcagggcaagcggaccttcatggccgagagacagtacacacggatggaggactggctgaccgccaagctggcctacgagggcctgagcaagacctacctgtccaagacactggcccagtacacctccaagacatgcagcaactgtgggtttaccatcaccagcgccgactacgacagggtgctggagaagctgaagaagacagcaacaggctggatgaccacaattaacggcaaggagctgaaggtggagggccagattacctactacaacagatacaagagacagaacgtagtcaaggacctgtccgtcgagctggatagactgagcgaagaatctgtgaacaacgacatctcctcctggacaaagggcagaagcggagaagctctgagcctcctgaagaaaagattctcccatagacccgtgcaggagaagttcgtgtgcctgaactgcggcttcgagacacacgcagccgagcaagccgccctgaacatcgccagatcctggctgttcctgcggagccaggagtacaagaaataccagacaaacaagacaaccggcaacaccgataagagagccttcgtcgagacctggcagtccttttaccggaagaagcttaaggaggtgtggaaacctgccgtgcggtctggcggatctggcggaggctccaccagccccaagaaaaagagaaaagtctaagctgccttctgcggggcttgccttctggccatgcccttcttctctcccttgcacctgtacctcttggtctttgaataaagcctgagtaggaaggctagcaaaaaaaaaaaaaaaaaaaaaaaaaaaaaaaaaaaaaaaaaaaaaaaaaaaaaaaaaaaaaaaaaaaaaaaaaaaaaaaa

SEQ ID NO: 10225 - RNA, 8787 nt, synthetic construct
  source 1..8787: mol_type = other RNA
aggaaataagagagaaaagaagagtaagaagaaatataagagccaccatggcccctaagaagaagcgtaaagtgagccggatgaaccacgaccaggagttcgacccccctaaggtgtaccctcccgtccccgccgagaagagaaagcccatccgggtcctgagcctgttcgatggcatcgccaccggtctgctggtgctgaaggacctgggcatccaggtggataggtacattgcctccgaggtgtgcgaggactccatcaccgtgggaatggtgcgtcatcagggcaagatcatgtacgtgggcgacgtgcggagcgtgacacagaagcatatccaggagtggggccctttcgacctggtgatcggcggcagcccttgcaatgacctgagcatcgtgaacccagcccggaagggcctgtacgagggaaccggcagactgttcttcgagttttacagactgctgcacgacgcccggcctaaggaaggcgacgaccggcccttcttttggctgttcgagaatgtggtggccatgggagtcagcgacaagcgggatattagccggttcctggagagcaaccccgtgatgatcgatgccaaggaagtgagcgccgcccaccgggccagatacttctggggcaatctgcctggcatgaacagacccctggccagcaccgtgaacgacaagctggagctgcaggagtgcctggagcacggccggatcgccaagttcagcaaggtgagaaccatcaccacccgaagcaacagcatcaaacaaggcaaggaccagcactttcctgtgttcatgaacgagaaggaggacatcctgtggtgtaccgagatggagagagtgttcgggttcccagtccactacacagatgtcagcaacatgtctagactggccagacagagactgctgggaagaagctggtccgtccctgtgatcagacacctgttcgcccctctgaaggagtacttcgcctgcgtgagcagcggcaacagcaacgccaacagccggggccccagcttctctagcggcctggtgccactgtccctgagagggagccacatgggccccatggagatctacaaaaccgtgagcgcctggaagcggcagcctgtgcgcgtgctgagcctgtttcggaatatcgataaagtcctgaaaagcctgggattcctggagagcggctctggctccggcggtggcaccctgaagtacgtggaggatgtgacaaacgtggtcagacgggatgtggagaagtggggccccttcgatctggtgtacggcagcacccaacccctgggcagctcttgtgaccggtgccctggctggtacatgtttcagttccaccggatcctgcagtacgccctgccgagacaggagtcccagcggccattcttttggattttcatggacaacttgctgctgaccgaggatgaccaggaaactaccactcggttcctgcagaccgaagccgtgaccctgcaggacgtgagaggccgggactaccagaacgccatgcgggtgtggtccaacatccctggactgaaaagcaagcacgcacctctgacccctaaagaagaggagtacctgcaggcccaggtgcggagcagaagcaagctggacgcccctaaggtggatctgctggtgaagaattgcctcctgcccctgagagagtacttcaagtatttcagccagaatagtctgcccctgggaggcagcggcggcggcgtggccggccccgtgaccttcgaggaggtggccgtgtacttcagcgaggaggagtgggccctgctggaccccggccagagggccctgtacagggacgtgatgcaggagaactacgaggccgtgagctggctgggcttccccgtgagcaagcccggcgagaccagctggctggagagggccggcaagctgcaggagtgggagagcaggagccacgccaacaccgccaggcccaggggcaaccagggcggcccaagcagcggcgcccctcctcccagcggcggcaggcggcccaagcagcggcgcccctcctcccagcggcggcagcccagccggctccccaacctctaccgaggagggcacctctgagtccgccacccccgagagcggccctggcacctccaccgagcccagcgagggcagcgcacccggcagccctgccggcagccccacctccacagaggagggaaccagcaccgagcccagcgaaggcagcgccccaggcaccagcaccgagcctagtgagcaggagattaaacggatcaacaagatcagaagaagacttgtgaaagacagcaacaccaagaaggccggcaagacaggccccatgaaaaccctgctggttagagtgatgacacccgatctgagagagcggctggaaaacctgagaaagaagcctgaaaatatcccccagcccatcagcaatacatctagagccaacctgaataagctgctgaccgattacaccgaaatgaagaaggcgatcctgcatgtgtactgggaagagttccagaaggaccctgtgggcctgatgagccgggtggcccagcctgccagcaagaagatcgatcagaacaagctgaaacctgagatggacgagaagggcaacctgaccaccgccggctttgcctgctctcagtgtggccagcccctgttcgtgtacaagctggagcaggtgtctgagaagggcaaggcttacaccaactacttcggacggtgcaatgtggccgagcacgaaaagctgatcctgctggcccagctgaagcccgagaaggatagcgacgaagccgtgacatatagcctgggaaagtttgggcagagggccctggatttctacagcattcatgtgaccaaggagtccacccaccccgtgaagcccctggcccagatcgccggaaacagatacgcctccggacctgtgggaaaggccctgagcgacgcatgtatgggcacaatcgcctccttcctgtctaagtaccaggacatcatcatcgaacaccagaaggtggtgaagggcaaccagaagagactggagagcctgcgggagctggccggcaaggaaaacctggaataccctagcgtgaccctgccacctcagcctcacaccaaggagggcgttgatgcctacaacgaagtgatcgcccgggtgcgaatgtgggtgaacctgaacctgtggcagaagctgaagctaagcagagatgatgccaagcctctgctgagactgaagggattcccttcctttcctctggtcgagagacaggccaacgaagtggactggtgggacatggtgtgtaacgtgaagaagctgatcaacgagaaaaaggaggatggcaaggtgttttggcagaatctggctggctacaagagacaggaagccctgagaccatacctgagcagcgaggaagatcggaagaagggaaagaaattcgctcggtaccagctgggcgacctgctgctgcacctggaaaagaagcacggcgaggactggggaaaggtgtacgacgaggcctgggagcggattgacaagaaagtggaaggcctgagcaagcacatcaagctggaagaggaacggagaagcgaggacgcccagagcaaggccgccctgaccgactggctgcgggctaaggccagcttcgtgatcgagggcctgaaggaggccgacaaggacgagttctgcagatgcgagctgaagctgcagaagtggtacggggacctgcggggaaagcccttcgccatcgaagccgagaacagcatcctggacatcagcggcttcagcaagcagtacaactgtgccttcatctggcagaaggacggcgtgaagaagctgaacctgtacctgatcatcaactacttcaagggcggcaagctgcggttcaagaagatcaaacctgaagccttcgaagccaacagattctacaccgtgatcaacaaaaagagcggcgagatcgtgcccatggaggtgaacttcaacttcgacgaccccaacctgatcatcctgcctctggcctttggcaagagacagggcagagaattcatctggaacgacctgctgtccctggaaaccggcagcctgaagctggccaacggaagagtgatcgagaagacactgtacaacagaagaacccggcaggatgagcctgccctgttcgtggccctgaccttcgagcggcgggaggtcctggactcctccaatatcaaaccaatgaacctgatcggcgtggcaagaggcgaaaacatccccgccgtgatcgccctgaccgaccccgagggctgcccactgagccggtttaaggatagcctgggaaacccaacccacatcctgagaatcggcgagagctataaggagaagcagcggaccatccaggccaagaaggaggtggagcagcggagagccggcggctacagccggaagtacgccagcaaagccaagaatctggcagacgatatggtgagaaacaccgctagagatctgctgtactacgccgtgacccaggatgccatgctgatcttcgccaacctgagccggggcttcggccggcagggcaagcggaccttcatggccgagagacagtacacacggatggaggactggctgaccgccaagctggcctacgagggcctgagcaagacctacctgtccaagacactggcccagtacacctccaagacatgcagcaactgtgggtttaccatcaccagcgccgactacgacagggtgctggagaagctgaagaagacagcaacaggctggatgaccacaattaacggcaaggagctgaaggtggagggccagattacctactacaacagatacaagagacagaacgtagtcaaggacctgtccgtcgagctggatagactgagcgaagaatctgtgaacaacgacatctcctcctggacaaagggcagaagcggagaagctctgagcctcctgaagaaaagattctcccatagacccgtgcaggagaagttcgtgtgcctgaactgcggcttcgagacacacgcagccgagcaagccgccctgaacatcgccagatcctggctgttcctgcggagccaggagtacaagaaataccagacaaacaagacaaccggcaacaccgataagagagccttcgtcgagacctggcagtccttttaccggaagaagcttaaggaggtgtggaaacctgccgtgcggtctggcggatctggcggaggctccaccagccccaagaaaaagagaaaagtctaagctgccttctgcggggcttgccttctggccatgcccttcttctctcccttgcacctgtacctcttggtctttgaataaagcctgagtaggaaggctagcaaaaaaaaaaaaaaaaaaaaaaaaaaaaaaaaaaaaaaaaaaaaaaaaaaaaaaaaaaaaaaaaaaaaaaaaaaaaaaaagcccagccggctccccaacctctaccgaggagggcacctctgagtccgccacccccgagagcggccctggcacctccaccgagcccagcgagggcagcgcacccggcagccctgccggcagccccacctccacagaggagggaaccagcaccgagcccagcgaaggcagcgccccaggcaccagcaccgagcctagtgagcaggagattaaacggatcaacaagatcagaagaagacttgtgaaagacagcaacaccaagaaggccggcaagacaggccccatgaaaaccctgctggttagagtgatgacacccgatctgagagagcggctggaaaacctgagaaagaagcctgaaaatatcccccagcccatcagcaatacatctagagccaacctgaataagctgctgaccgattacaccgaaatgaagaaggcgatcctgcatgtgtactgggaagagttccagaaggaccctgtgggcctgatgagccgggtggcccagcctgccagcaagaagatcgatcagaacaagctgaaacctgagatggacgagaagggcaacctgaccaccgccggctttgcctgctctcagtgtggccagcccctgttcgtgtacaagctggagcaggtgtctgagaagggcaaggcttacaccaactacttcggacggtgcaatgtggccgagcacgaaaagctgatcctgctggcccagctgaagcccgagaaggatagcgacgaagccgtgacatatagcctgggaaagtttgggcagagggccctggatttctacagcattcatgtgaccaaggagtccacccaccccgtgaagcccctggcccagatcgccggaaacagatacgcctccggacctgtgggaaaggccctgagcgacgcatgtatgggcacaatcgcctccttcctgtctaagtaccaggacatcatcatcgaacaccagaaggtggtgaagggcaaccagaagagactggagagcctgcgggagctggccggcaaggaaaacctggaataccctagcgtgaccctgccacctcagcctcacaccaaggagggcgttgatgcctacaacgaagtgatcgcccgggtgcgaatgtgggtgaacctgaacctgtggcagaagctgaagctaagcagagatgatgccaagcctctgctgagactgaagggattcccttcctttcctctggtcgagagacaggccaacgaagtggactggtgggacatggtgtgtaacgtgaagaagctgatcaacgagaaaaaggaggatggcaaggtgttttggcagaatctggctggctacaagagacaggaagccctgagaccatacctgagcagcgaggaagatcggaagaagggaaagaaattcgctcggtaccagctgggcgacctgctgctgcacctggaaaagaagcacggcgaggactggggaaaggtgtacgacgaggcctgggagcggattgacaagaaagtggaaggcctgagcaagcacatcaagctggaagaggaacggagaagcgaggacgcccagagcaaggccgccctgaccgactggctgcgggctaaggccagcttcgtgatcgagggcctgaaggaggccgacaaggacgagttctgcagatgcgagctgaagctgcagaagtggtacggggacctgcggggaaagcccttcgccatcgaagccgagaacagcatcctggacatcagcggcttcagcaagcagtacaactgtgccttcatctggcagaaggacggcgtgaagaagctgaacctgtacctgatcatcaactacttcaagggcggcaagctgcggttcaagaagatcaaacctgaagccttcgaagccaacagattctacaccgtgatcaacaaaaagagcggcgagatcgtgcccatggaggtgaacttcaacttcgacgaccccaacctgatcatcctgcctctggcctttggcaagagacagggcagagaattcatctggaacgacctgctgtccctggaaaccggcagcctgaagctggccaacggaagagtgatcgagaagacactgtacaacagaagaacccggcaggatgagcctgccctgttcgtggccctgaccttcgagcggcgggaggtcctggactcctccaatatcaaaccaatgaacctgatcggcgtggcaagaggcgaaaacatccccgccgtgatcgccctgaccgaccccgagggctgcccactgagccggtttaaggatagcctgggaaacccaacccacatcctgagaatcggcgagagctataaggagaagcagcggaccatccaggccaagaaggaggtggagcagcggagagccggcggctacagccggaagtacgccagcaaagccaagaatctggcagacgatatggtgagaaacaccgctagagatctgctgtactacgccgtgacccaggatgccatgctgatcttcgccaacctgagccggggcttcggccggcagggcaagcggaccttcatggccgagagacagtacacacggatggaggactggctgaccgccaagctggcctacgagggcctgagcaagacctacctgtccaagacactggcccagtacacctccaagacatgcagcaactgtgggtttaccatcaccagcgccgactacgacagggtgctggagaagctgaagaagacagcaacaggctggatgaccacaattaacggcaaggagctgaaggtggagggccagattacctactacaacagatacaagagacagaacgtagtcaaggacctgtccgtcgagctggatagactgagcgaagaatctgtgaacaacgacatctcctcctggacaaagggcagaagcggagaagctctgagcctcctgaagaaaagattctcccatagacccgtgcaggagaagttcgtgtgcctgaactgcggcttcgagacacacgcagccgagcaagccgccctgaacatcgccagatcctggctgttcctgcggagccaggagtacaagaaataccagacaaacaagacaaccggcaacaccgataagagagccttcgtcgagacctggcagtccttttaccggaagaagcttaaggaggtgtggaaacctgccgtgcggtctggcggatctggcggaggctccaccagccccaagaaaaagagaaaagtctaagctgccttctgcggggcttgccttctggccatgcccttcttctctcccttgcacctgtacctcttggtctttgaataaagcctgagtaggaaggctagcaaaaaaaaaaaaaaaaaaaaaaaaaaaaaaaaaaaaaaaaaaaaaaaaaaaaaaaaaaaaaaaaaaaaaaaaaaaaaaaa

SEQ ID NO: 10226 - RNA, 8793 nt, synthetic construct
  source 1..8793: mol_type = other RNA
aggaaataagagagaaaagaagagtaagaagaaatataagagccaccatggcccctaagaagaagcgtaaagtgagccggatgaaccacgaccaggagttcgacccccctaaggtgtaccctcccgtccccgccgagaagagaaagcccatccgggtcctgagcctgttcgatggcatcgccaccggtctgctggtgctgaaggacctgggcatccaggtggataggtacattgcctccgaggtgtgcgaggactccatcaccgtgggaatggtgcgtcatcagggcaagatcatgtacgtgggcgacgtgcggagcgtgacacagaagcatatccaggagtggggccctttcgacctggtgatcggcggcagcccttgcaatgacctgagcatcgtgaacccagcccggaagggcctgtacgagggaaccggcagactgttcttcgagttttacagactgctgcacgacgcccggcctaaggaaggcgacgaccggcccttcttttggctgttcgagaatgtggtggccatgggagtcagcgacaagcgggatattagccggttcctggagagcaaccccgtgatgatcgatgccaaggaagtgagcgccgcccaccgggccagatacttctggggcaatctgcctggcatgaacagacccctggccagcaccgtgaacgacaagctggagctgcaggagtgcctggagcacggccggatcgccaagttcagcaaggtgagaaccatcaccacccgaagcaacagcatcaaacaaggcaaggaccagcactttcctgtgttcatgaacgagaaggaggacatcctgtggtgtaccgagatggagagagtgttcgggttcccagtccactacacagatgtcagcaacatgtctagactggccagacagagactgctgggaagaagctggtccgtccctgtgatcagacacctgttcgcccctctgaaggagtacttcgcctgcgtgagcagcggcaacagcaacgccaacagccggggccccagcttctctagcggcctggtgccactgtccctgagagggagccacatgggccccatggagatctacaaaaccgtgagcgcctggaagcggcagcctgtgcgcgtgctgagcctgtttcggaatatcgataaagtcctgaaaagcctgggattcctggagagcggctctggctccggcggtggcaccctgaagtacgtggaggatgtgacaaacgtggtcagacgggatgtggagaagtggggccccttcgatctggtgtacggcagcacccaacccctgggcagctcttgtgaccggtgccctggctggtacatgtttcagttccaccggatcctgcagtacgccctgccgagacaggagtcccagcggccattcttttggattttcatggacaacttgctgctgaccgaggatgaccaggaaactaccactcggttcctgcagaccgaagccgtgaccctgcaggacgtgagaggccgggactaccagaacgccatgcgggtgtggtccaacatccctggactgaaaagcaagcacgcacctctgacccctaaagaagaggagtacctgcaggcccaggtgcggagcagaagcaagctggacgcccctaaggtggatctgctggtgaagaattgcctcctgcccctgagagagtacttcaagtatttcagccagaatagtctgcccctgggaggcagcggcggcggcatgacctacgacgacgtgcacgtgaacttcaccggcgaggagtgggccctgctgagccccagccagaagaggctgtacaaggacgtgatgctggagacctacaggaacctgaccgccatcggctacaactgggaggaccacaacagcgagcacttccagcacagcaggaggcacggcaggcacgagaggaggcacaccggcgagaagcccagcgtgtacacccagtgcggcaaggtgttcgcctaccacggcggcccaagcagcggcgcccctcctcccagcggcggcaggcggcccaagcagcggcgcccctcctcccagcggcggcagcccagccggctccccaacctctaccgaggagggcacctctgagtccgccacccccgagagcggccctggcacctccaccgagcccagcgagggcagcgcacccggcagccctgccggcagccccacctccacagaggagggaaccagcaccgagcccagcgaaggcagcgccccaggcaccagcaccgagcctagtgagcaggagattaaacggatcaacaagatcagaagaagacttgtgaaagacagcaacaccaagaaggccggcaagacaggccccatgaaaaccctgctggttagagtgatgacacccgatctgagagagcggctggaaaacctgagaaagaagcctgaaaatatcccccagcccatcagcaatacatctagagccaacctgaataagctgctgaccgattacaccgaaatgaagaaggcgatcctgcatgtgtactgggaagagttccagaaggaccctgtgggcctgatgagccgggtggcccagcctgccagcaagaagatcgatcagaacaagctgaaacctgagatggacgagaagggcaacctgaccaccgccggctttgcctgctctcagtgtggccagcccctgttcgtgtacaagctggagcaggtgtctgagaagggcaaggcttacaccaactacttcggacggtgcaatgtggccgagcacgaaaagctgatcctgctggcccagctgaagcccgagaaggatagcgacgaagccgtgacatatagcctgggaaagtttgggcagagggccctggatttctacagcattcatgtgaccaaggagtccacccaccccgtgaagcccctggcccagatcgccggaaacagatacgcctccggacctgtgggaaaggccctgagcgacgcatgtatgggcacaatcgcctccttcctgtctaagtaccaggacatcatcatcgaacaccagaaggtggtgaagggcaaccagaagagactggagagcctgcgggagctggccggcaaggaaaacctggaataccctagcgtgaccctgccacctcagcctcacaccaaggagggcgttgatgcctacaacgaagtgatcgcccgggtgcgaatgtgggtgaacctgaacctgtggcagaagctgaagctaagcagagatgatgccaagcctctgctgagactgaagggattcccttcctttcctctggtcgagagacaggccaacgaagtggactggtgggacatggtgtgtaacgtgaagaagctgatcaacgagaaaaaggaggatggcaaggtgttttggcagaatctggctggctacaagagacaggaagccctgagaccatacctgagcagcgaggaagatcggaagaagggaaagaaattcgctcggtaccagctgggcgacctgctgctgcacctggaaaagaagcacggcgaggactggggaaaggtgtacgacgaggcctgggagcggattgacaagaaagtggaaggcctgagcaagcacatcaagctggaagaggaacggagaagcgaggacgcccagagcaaggccgccctgaccgactggctgcgggctaaggccagcttcgtgatcgagggcctgaaggaggccgacaaggacgagttctgcagatgcgagctgaagctgcagaagtggtacggggacctgcggggaaagcccttcgccatcgaagccgagaacagcatcctggacatcagcggcttcagcaagcagtacaactgtgccttcatctggcagaaggacggcgtgaagaagctgaacctgtacctgatcatcaactacttcaagggcggcaagctgcggttcaagaagatcaaacctgaagccttcgaagccaacagattctacaccgtgatcaacaaaaagagcggcgagatcgtgcccatggaggtgaacttcaacttcgacgaccccaacctgatcatcctgcctctggcctttggcaagagacagggcagagaattcatctggaacgacctgctgtccctggaaaccggcagcctgaagctggccaacggaagagtgatcgagaagacactgtacaacagaagaacccggcaggatgagcctgccctgttcgtggccctgaccttcgagcggcgggaggtcctggactcctccaatatcaaaccaatgaacctgatcggcgtggcaagaggcgaaaacatccccgccgtgatcgccctgaccgaccccgagggctgcccactgagccggtttaaggatagcctgggaaacccaacccacatcctgagaatcggcgagagctataaggagaagcagcggaccatccaggccaagaaggaggtggagcagcggagagccggcggctacagccggaagtacgccagcaaagccaagaatctggcagacgatatggtgagaaacaccgctagagatctgctgtactacgccgtgacccaggatgccatgctgatcttcgccaacctgagccggggcttcggccggcagggcaagcggaccttcatggccgagagacagtacacacggatggaggactggctgaccgccaagctggcctacgagggcctgagcaagacctacctgtccaagacactggcccagtacacctccaagacatgcagcaactgtgggtttaccatcaccagcgccgactacgacagggtgctggagaagctgaagaagacagcaacaggctggatgaccacaattaacggcaaggagctgaaggtggagggccagattacctactacaacagatacaagagacagaacgtagtcaaggacctgtccgtcgagctggatagactgagcgaagaatctgtgaacaacgacatctcctcctggacaaagggcagaagcggagaagctctgagcctcctgaagaaaagattctcccatagacccgtgcaggagaagttcgtgtgcctgaactgcggcttcgagacacacgcagccgagcaagccgccctgaacatcgccagatcctggctgttcctgcggagccaggagtacaagaaataccagacaaacaagacaaccggcaacaccgataagagagccttcgtcgagacctggcagtccttttaccggaagaagcttaaggaggtgtggaaacctgccgtgcggtctggcggatctggcggaggctccaccagccccaagaaaaagagaaaagtctaagctgccttctgcggggcttgccttctggccatgcccttcttctctcccttgcacctgtacctcttggtctttgaataaagcctgagtaggaaggctagcaaaaaaaaaaaaaaaaaaaaaaaaaaaaaaaaaaaaaaaaaaaaaaaaaaaaaaaaaaaaaaaaaaaaaaaaaaaaaaaagcccagccggctccccaacctctaccgaggagggcacctctgagtccgccacccccgagagcggccctggcacctccaccgagcccagcgagggcagcgcacccggcagccctgccggcagccccacctccacagaggagggaaccagcaccgagcccagcgaaggcagcgccccaggcaccagcaccgagcctagtgagcaggagattaaacggatcaacaagatcagaagaagacttgtgaaagacagcaacaccaagaaggccggcaagacaggccccatgaaaaccctgctggttagagtgatgacacccgatctgagagagcggctggaaaacctgagaaagaagcctgaaaatatcccccagcccatcagcaatacatctagagccaacctgaataagctgctgaccgattacaccgaaatgaagaaggcgatcctgcatgtgtactgggaagagttccagaaggaccctgtgggcctgatgagccgggtggcccagcctgccagcaagaagatcgatcagaacaagctgaaacctgagatggacgagaagggcaacctgaccaccgccggctttgcctgctctcagtgtggccagcccctgttcgtgtacaagctggagcaggtgtctgagaagggcaaggcttacaccaactacttcggacggtgcaatgtggccgagcacgaaaagctgatcctgctggcccagctgaagcccgagaaggatagcgacgaagccgtgacatatagcctgggaaagtttgggcagagggccctggatttctacagcattcatgtgaccaaggagtccacccaccccgtgaagcccctggcccagatcgccggaaacagatacgcctccggacctgtgggaaaggccctgagcgacgcatgtatgggcacaatcgcctccttcctgtctaagtaccaggacatcatcatcgaacaccagaaggtggtgaagggcaaccagaagagactggagagcctgcgggagctggccggcaaggaaaacctggaataccctagcgtgaccctgccacctcagcctcacaccaaggagggcgttgatgcctacaacgaagtgatcgcccgggtgcgaatgtgggtgaacctgaacctgtggcagaagctgaagctaagcagagatgatgccaagcctctgctgagactgaagggattcccttcctttcctctggtcgagagacaggccaacgaagtggactggtgggacatggtgtgtaacgtgaagaagctgatcaacgagaaaaaggaggatggcaaggtgttttggcagaatctggctggctacaagagacaggaagccctgagaccatacctgagcagcgaggaagatcggaagaagggaaagaaattcgctcggtaccagctgggcgacctgctgctgcacctggaaaagaagcacggcgaggactggggaaaggtgtacgacgaggcctgggagcggattgacaagaaagtggaaggcctgagcaagcacatcaagctggaagaggaacggagaagcgaggacgcccagagcaaggccgccctgaccgactggctgcgggctaaggccagcttcgtgatcgagggcctgaaggaggccgacaaggacgagttctgcagatgcgagctgaagctgcagaagtggtacggggacctgcggggaaagcccttcgccatcgaagccgagaacagcatcctggacatcagcggcttcagcaagcagtacaactgtgccttcatctggcagaaggacggcgtgaagaagctgaacctgtacctgatcatcaactacttcaagggcggcaagctgcggttcaagaagatcaaacctgaagccttcgaagccaacagattctacaccgtgatcaacaaaaagagcggcgagatcgtgcccatggaggtgaacttcaacttcgacgaccccaacctgatcatcctgcctctggcctttggcaagagacagggcagagaattcatctggaacgacctgctgtccctggaaaccggcagcctgaagctggccaacggaagagtgatcgagaagacactgtacaacagaagaacccggcaggatgagcctgccctgttcgtggccctgaccttcgagcggcgggaggtcctggactcctccaatatcaaaccaatgaacctgatcggcgtggcaagaggcgaaaacatccccgccgtgatcgccctgaccgaccccgagggctgcccactgagccggtttaaggatagcctgggaaacccaacccacatcctgagaatcggcgagagctataaggagaagcagcggaccatccaggccaagaaggaggtggagcagcggagagccggcggctacagccggaagtacgccagcaaagccaagaatctggcagacgatatggtgagaaacaccgctagagatctgctgtactacgccgtgacccaggatgccatgctgatcttcgccaacctgagccggggcttcggccggcagggcaagcggaccttcatggccgagagacagtacacacggatggaggactggctgaccgccaagctggcctacgagggcctgagcaagacctacctgtccaagacactggcccagtacacctccaagacatgcagcaactgtgggtttaccatcaccagcgccgactacgacagggtgctggagaagctgaagaagacagcaacaggctggatgaccacaattaacggcaaggagctgaaggtggagggccagattacctactacaacagatacaagagacagaacgtagtcaaggacctgtccgtcgagctggatagactgagcgaagaatctgtgaacaacgacatctcctcctggacaaagggcagaagcggagaagctctgagcctcctgaagaaaagattctcccatagacccgtgcaggagaagttcgtgtgcctgaactgcggcttcgagacacacgcagccgagcaagccgccctgaacatcgccagatcctggctgttcctgcggagccaggagtacaagaaataccagacaaacaagacaaccggcaacaccgataagagagccttcgtcgagacctggcagtccttttaccggaagaagcttaaggaggtgtggaaacctgccgtgcggtctggcggatctggcggaggctccaccagccccaagaaaaagagaaaagtctaagctgccttctgcggggcttgccttctggccatgcccttcttctctcccttgcacctgtacctcttggtctttgaataaagcctgagtaggaaggctagcaaaaaaaaaaaaaaaaaaaaaaaaaaaaaaaaaaaaaaaaaaaaaaaaaaaaaaaaaaaaaaaaaaaaaaaaaaaaaaaa

SEQ ID NO: 10227 - RNA, 8787 nt, synthetic construct
  source 1..8787: mol_type = other RNA
aggaaataagagagaaaagaagagtaagaagaaatataagagccaccatggcccctaagaagaagcgtaaagtgagccggatgaaccacgaccaggagttcgacccccctaaggtgtaccctcccgtccccgccgagaagagaaagcccatccgggtcctgagcctgttcgatggcatcgccaccggtctgctggtgctgaaggacctgggcatccaggtggataggtacattgcctccgaggtgtgcgaggactccatcaccgtgggaatggtgcgtcatcagggcaagatcatgtacgtgggcgacgtgcggagcgtgacacagaagcatatccaggagtggggccctttcgacctggtgatcggcggcagcccttgcaatgacctgagcatcgtgaacccagcccggaagggcctgtacgagggaaccggcagactgttcttcgagttttacagactgctgcacgacgcccggcctaaggaaggcgacgaccggcccttcttttggctgttcgagaatgtggtggccatgggagtcagcgacaagcgggatattagccggttcctggagagcaaccccgtgatgatcgatgccaaggaagtgagcgccgcccaccgggccagatacttctggggcaatctgcctggcatgaacagacccctggccagcaccgtgaacgacaagctggagctgcaggagtgcctggagcacggccggatcgccaagttcagcaaggtgagaaccatcaccacccgaagcaacagcatcaaacaaggcaaggaccagcactttcctgtgttcatgaacgagaaggaggacatcctgtggtgtaccgagatggagagagtgttcgggttcccagtccactacacagatgtcagcaacatgtctagactggccagacagagactgctgggaagaagctggtccgtccctgtgatcagacacctgttcgcccctctgaaggagtacttcgcctgcgtgagcagcggcaacagcaacgccaacagccggggccccagcttctctagcggcctggtgccactgtccctgagagggagccacatgggccccatggagatctacaaaaccgtgagcgcctggaagcggcagcctgtgcgcgtgctgagcctgtttcggaatatcgataaagtcctgaaaagcctgggattcctggagagcggctctggctccggcggtggcaccctgaagtacgtggaggatgtgacaaacgtggtcagacgggatgtggagaagtggggccccttcgatctggtgtacggcagcacccaacccctgggcagctcttgtgaccggtgccctggctggtacatgtttcagttccaccggatcctgcagtacgccctgccgagacaggagtcccagcggccattcttttggattttcatggacaacttgctgctgaccgaggatgaccaggaaactaccactcggttcctgcagaccgaagccgtgaccctgcaggacgtgagaggccgggactaccagaacgccatgcgggtgtggtccaacatccctggactgaaaagcaagcacgcacctctgacccctaaagaagaggagtacctgcaggcccaggtgcggagcagaagcaagctggacgcccctaaggtggatctgctggtgaagaattgcctcctgcccctgagagagtacttcaagtatttcagccagaatagtctgcccctgggaggcagcggcggcggcctgcaggagcccctggagttcatggacgtggccatcgagttcagcctggaggagtggcactgcctggacaccgcccagaggaacctgtacagggacgtgatgctggagaactacaggaacctggtgttcctgggcatcgtggtgagcaagcccgacctgatcacctggctggagcagggcaagaagcccctgaccgtgaagaggaggggcatgatcgccgccccccccggcatgagcagccacggcggcccaagcagcggcgcccctcctcccagcggcggcaggcggcccaagcagcggcgcccctcctcccagcggcggcagcccagccggctccccaacctctaccgaggagggcacctctgagtccgccacccccgagagcggccctggcacctccaccgagcccagcgagggcagcgcacccggcagccctgccggcagccccacctccacagaggagggaaccagcaccgagcccagcgaaggcagcgccccaggcaccagcaccgagcctagtgagcaggagattaaacggatcaacaagatcagaagaagacttgtgaaagacagcaacaccaagaaggccggcaagacaggccccatgaaaaccctgctggttagagtgatgacacccgatctgagagagcggctggaaaacctgagaaagaagcctgaaaatatcccccagcccatcagcaatacatctagagccaacctgaataagctgctgaccgattacaccgaaatgaagaaggcgatcctgcatgtgtactgggaagagttccagaaggaccctgtgggcctgatgagccgggtggcccagcctgccagcaagaagatcgatcagaacaagctgaaacctgagatggacgagaagggcaacctgaccaccgccggctttgcctgctctcagtgtggccagcccctgttcgtgtacaagctggagcaggtgtctgagaagggcaaggcttacaccaactacttcggacggtgcaatgtggccgagcacgaaaagctgatcctgctggcccagctgaagcccgagaaggatagcgacgaagccgtgacatatagcctgggaaagtttgggcagagggccctggatttctacagcattcatgtgaccaaggagtccacccaccccgtgaagcccctggcccagatcgccggaaacagatacgcctccggacctgtgggaaaggccctgagcgacgcatgtatgggcacaatcgcctccttcctgtctaagtaccaggacatcatcatcgaacaccagaaggtggtgaagggcaaccagaagagactggagagcctgcgggagctggccggcaaggaaaacctggaataccctagcgtgaccctgccacctcagcctcacaccaaggagggcgttgatgcctacaacgaagtgatcgcccgggtgcgaatgtgggtgaacctgaacctgtggcagaagctgaagctaagcagagatgatgccaagcctctgctgagactgaagggattcccttcctttcctctggtcgagagacaggccaacgaagtggactggtgggacatggtgtgtaacgtgaagaagctgatcaacgagaaaaaggaggatggcaaggtgttttggcagaatctggctggctacaagagacaggaagccctgagaccatacctgagcagcgaggaagatcggaagaagggaaagaaattcgctcggtaccagctgggcgacctgctgctgcacctggaaaagaagcacggcgaggactggggaaaggtgtacgacgaggcctgggagcggattgacaagaaagtggaaggcctgagcaagcacatcaagctggaagaggaacggagaagcgaggacgcccagagcaaggccgccctgaccgactggctgcgggctaaggccagcttcgtgatcgagggcctgaaggaggccgacaaggacgagttctgcagatgcgagctgaagctgcagaagtggtacggggacctgcggggaaagcccttcgccatcgaagccgagaacagcatcctggacatcagcggcttcagcaagcagtacaactgtgccttcatctggcagaaggacggcgtgaagaagctgaacctgtacctgatcatcaactacttcaagggcggcaagctgcggttcaagaagatcaaacctgaagccttcgaagccaacagattctacaccgtgatcaacaaaaagagcggcgagatcgtgcccatggaggtgaacttcaacttcgacgaccccaacctgatcatcctgcctctggcctttggcaagagacagggcagagaattcatctggaacgacctgctgtccctggaaaccggcagcctgaagctggccaacggaagagtgatcgagaagacactgtacaacagaagaacccggcaggatgagcctgccctgttcgtggccctgaccttcgagcggcgggaggtcctggactcctccaatatcaaaccaatgaacctgatcggcgtggcaagaggcgaaaacatccccgccgtgatcgccctgaccgaccccgagggctgcccactgagccggtttaaggatagcctgggaaacccaacccacatcctgagaatcggcgagagctataaggagaagcagcggaccatccaggccaagaaggaggtggagcagcggagagccggcggctacagccggaagtacgccagcaaagccaagaatctggcagacgatatggtgagaaacaccgctagagatctgctgtactacgccgtgacccaggatgccatgctgatcttcgccaacctgagccggggcttcggccggcagggcaagcggaccttcatggccgagagacagtacacacggatggaggactggctgaccgccaagctggcctacgagggcctgagcaagacctacctgtccaagacactggcccagtacacctccaagacatgcagcaactgtgggtttaccatcaccagcgccgactacgacagggtgctggagaagctgaagaagacagcaacaggctggatgaccacaattaacggcaaggagctgaaggtggagggccagattacctactacaacagatacaagagacagaacgtagtcaaggacctgtccgtcgagctggatagactgagcgaagaatctgtgaacaacgacatctcctcctggacaaagggcagaagcggagaagctctgagcctcctgaagaaaagattctcccatagacccgtgcaggagaagttcgtgtgcctgaactgcggcttcgagacacacgcagccgagcaagccgccctgaacatcgccagatcctggctgttcctgcggagccaggagtacaagaaataccagacaaacaagacaaccggcaacaccgataagagagccttcgtcgagacctggcagtccttttaccggaagaagcttaaggaggtgtggaaacctgccgtgcggtctggcggatctggcggaggctccaccagccccaagaaaaagagaaaagtctaagctgccttctgcggggcttgccttctggccatgcccttcttctctcccttgcacctgtacctcttggtctttgaataaagcctgagtaggaaggctagcaaaaaaaaaaaaaaaaaaaaaaaaaaaaaaaaaaaaaaaaaaaaaaaaaaaaaaaaaaaaaaaaaaaaaaaaaaaaaaaagcccagccggctccccaacctctaccgaggagggcacctctgagtccgccacccccgagagcggccctggcacctccaccgagcccagcgagggcagcgcacccggcagccctgccggcagccccacctccacagaggagggaaccagcaccgagcccagcgaaggcagcgccccaggcaccagcaccgagcctagtgagcaggagattaaacggatcaacaagatcagaagaagacttgtgaaagacagcaacaccaagaaggccggcaagacaggccccatgaaaaccctgctggttagagtgatgacacccgatctgagagagcggctggaaaacctgagaaagaagcctgaaaatatcccccagcccatcagcaatacatctagagccaacctgaataagctgctgaccgattacaccgaaatgaagaaggcgatcctgcatgtgtactgggaagagttccagaaggaccctgtgggcctgatgagccgggtggcccagcctgccagcaagaagatcgatcagaacaagctgaaacctgagatggacgagaagggcaacctgaccaccgccggctttgcctgctctcagtgtggccagcccctgttcgtgtacaagctggagcaggtgtctgagaagggcaaggcttacaccaactacttcggacggtgcaatgtggccgagcacgaaaagctgatcctgctggcccagctgaagcccgagaaggatagcgacgaagccgtgacatatagcctgggaaagtttgggcagagggccctggatttctacagcattcatgtgaccaaggagtccacccaccccgtgaagcccctggcccagatcgccggaaacagatacgcctccggacctgtgggaaaggccctgagcgacgcatgtatgggcacaatcgcctccttcctgtctaagtaccaggacatcatcatcgaacaccagaaggtggtgaagggcaaccagaagagactggagagcctgcgggagctggccggcaaggaaaacctggaataccctagcgtgaccctgccacctcagcctcacaccaaggagggcgttgatgcctacaacgaagtgatcgcccgggtgcgaatgtgggtgaacctgaacctgtggcagaagctgaagctaagcagagatgatgccaagcctctgctgagactgaagggattcccttcctttcctctggtcgagagacaggccaacgaagtggactggtgggacatggtgtgtaacgtgaagaagctgatcaacgagaaaaaggaggatggcaaggtgttttggcagaatctggctggctacaagagacaggaagccctgagaccatacctgagcagcgaggaagatcggaagaagggaaagaaattcgctcggtaccagctgggcgacctgctgctgcacctggaaaagaagcacggcgaggactggggaaaggtgtacgacgaggcctgggagcggattgacaagaaagtggaaggcctgagcaagcacatcaagctggaagaggaacggagaagcgaggacgcccagagcaaggccgccctgaccgactggctgcgggctaaggccagcttcgtgatcgagggcctgaaggaggccgacaaggacgagttctgcagatgcgagctgaagctgcagaagtggtacggggacctgcggggaaagcccttcgccatcgaagccgagaacagcatcctggacatcagcggcttcagcaagcagtacaactgtgccttcatctggcagaaggacggcgtgaagaagctgaacctgtacctgatcatcaactacttcaagggcggcaagctgcggttcaagaagatcaaacctgaagccttcgaagccaacagattctacaccgtgatcaacaaaaagagcggcgagatcgtgcccatggaggtgaacttcaacttcgacgaccccaacctgatcatcctgcctctggcctttggcaagagacagggcagagaattcatctggaacgacctgctgtccctggaaaccggcagcctgaagctggccaacggaagagtgatcgagaagacactgtacaacagaagaacccggcaggatgagcctgccctgttcgtggccctgaccttcgagcggcgggaggtcctggactcctccaatatcaaaccaatgaacctgatcggcgtggcaagaggcgaaaacatccccgccgtgatcgccctgaccgaccccgagggctgcccactgagccggtttaaggatagcctgggaaacccaacccacatcctgagaatcggcgagagctataaggagaagcagcggaccatccaggccaagaaggaggtggagcagcggagagccggcggctacagccggaagtacgccagcaaagccaagaatctggcagacgatatggtgagaaacaccgctagagatctgctgtactacgccgtgacccaggatgccatgctgatcttcgccaacctgagccggggcttcggccggcagggcaagcggaccttcatggccgagagacagtacacacggatggaggactggctgaccgccaagctggcctacgagggcctgagcaagacctacctgtccaagacactggcccagtacacctccaagacatgcagcaactgtgggtttaccatcaccagcgccgactacgacagggtgctggagaagctgaagaagacagcaacaggctggatgaccacaattaacggcaaggagctgaaggtggagggccagattacctactacaacagatacaagagacagaacgtagtcaaggacctgtccgtcgagctggatagactgagcgaagaatctgtgaacaacgacatctcctcctggacaaagggcagaagcggagaagctctgagcctcctgaagaaaagattctcccatagacccgtgcaggagaagttcgtgtgcctgaactgcggcttcgagacacacgcagccgagcaagccgccctgaacatcgccagatcctggctgttcctgcggagccaggagtacaagaaataccagacaaacaagacaaccggcaacaccgataagagagccttcgtcgagacctggcagtccttttaccggaagaagcttaaggaggtgtggaaacctgccgtgcggtctggcggatctggcggaggctccaccagccccaagaaaaagagaaaagtctaagctgccttctgcggggcttgccttctggccatgcccttcttctctcccttgcacctgtacctcttggtctttgaataaagcctgagtaggaaggctagcaaaaaaaaaaaaaaaaaaaaaaaaaaaaaaaaaaaaaaaaaaaaaaaaaaaaaaaaaaaaaaaaaaaaaaaaaaaaaaaa

SEQ ID NO: 10228 - RNA, 8787 nt, synthetic construct
  source 1..8787: mol_type = other RNA
aggaaataagagagaaaagaagagtaagaagaaatataagagccaccatggcccctaagaagaagcgtaaagtgagccggatgaaccacgaccaggagttcgacccccctaaggtgtaccctcccgtccccgccgagaagagaaagcccatccgggtcctgagcctgttcgatggcatcgccaccggtctgctggtgctgaaggacctgggcatccaggtggataggtacattgcctccgaggtgtgcgaggactccatcaccgtgggaatggtgcgtcatcagggcaagatcatgtacgtgggcgacgtgcggagcgtgacacagaagcatatccaggagtggggccctttcgacctggtgatcggcggcagcccttgcaatgacctgagcatcgtgaacccagcccggaagggcctgtacgagggaaccggcagactgttcttcgagttttacagactgctgcacgacgcccggcctaaggaaggcgacgaccggcccttcttttggctgttcgagaatgtggtggccatgggagtcagcgacaagcgggatattagccggttcctggagagcaaccccgtgatgatcgatgccaaggaagtgagcgccgcccaccgggccagatacttctggggcaatctgcctggcatgaacagacccctggccagcaccgtgaacgacaagctggagctgcaggagtgcctggagcacggccggatcgccaagttcagcaaggtgagaaccatcaccacccgaagcaacagcatcaaacaaggcaaggaccagcactttcctgtgttcatgaacgagaaggaggacatcctgtggtgtaccgagatggagagagtgttcgggttcccagtccactacacagatgtcagcaacatgtctagactggccagacagagactgctgggaagaagctggtccgtccctgtgatcagacacctgttcgcccctctgaaggagtacttcgcctgcgtgagcagcggcaacagcaacgccaacagccggggccccagcttctctagcggcctggtgccactgtccctgagagggagccacatgggccccatggagatctacaaaaccgtgagcgcctggaagcggcagcctgtgcgcgtgctgagcctgtttcggaatatcgataaagtcctgaaaagcctgggattcctggagagcggctctggctccggcggtggcaccctgaagtacgtggaggatgtgacaaacgtggtcagacgggatgtggagaagtggggccccttcgatctggtgtacggcagcacccaacccctgggcagctcttgtgaccggtgccctggctggtacatgtttcagttccaccggatcctgcagtacgccctgccgagacaggagtcccagcggccattcttttggattttcatggacaacttgctgctgaccgaggatgaccaggaaactaccactcggttcctgcagaccgaagccgtgaccctgcaggacgtgagaggccgggactaccagaacgccatgcgggtgtggtccaacatccctggactgaaaagcaagcacgcacctctgacccctaaagaagaggagtacctgcaggcccaggtgcggagcagaagcaagctggacgcccctaaggtggatctgctggtgaagaattgcctcctgcccctgagagagtacttcaagtatttcagccagaatagtctgcccctgggaggcagcggcggcggccagatgcccatcaagttcgaggacatcgccgtgagcttcagccaggaggagtgggagtacctgaacgaggagcagaaggagctgtacagggaggtgatgaaggagaactaccagaccctgatcagcctgggcaccggcagcccccccgtgacccccgacatcatcagccacatcgagaggggcgaggagccctacatcagggaggagcccggcagcgaggagagggagcccggcaggagcagcggcggcccaagcagcggcgcccctcctcccagcggcggcaggcggcccaagcagcggcgcccctcctcccagcggcggcagcccagccggctccccaacctctaccgaggagggcacctctgagtccgccacccccgagagcggccctggcacctccaccgagcccagcgagggcagcgcacccggcagccctgccggcagccccacctccacagaggagggaaccagcaccgagcccagcgaaggcagcgccccaggcaccagcaccgagcctagtgagcaggagattaaacggatcaacaagatcagaagaagacttgtgaaagacagcaacaccaagaaggccggcaagacaggccccatgaaaaccctgctggttagagtgatgacacccgatctgagagagcggctggaaaacctgagaaagaagcctgaaaatatcccccagcccatcagcaatacatctagagccaacctgaataagctgctgaccgattacaccgaaatgaagaaggcgatcctgcatgtgtactgggaagagttccagaaggaccctgtgggcctgatgagccgggtggcccagcctgccagcaagaagatcgatcagaacaagctgaaacctgagatggacgagaagggcaacctgaccaccgccggctttgcctgctctcagtgtggccagcccctgttcgtgtacaagctggagcaggtgtctgagaagggcaaggcttacaccaactacttcggacggtgcaatgtggccgagcacgaaaagctgatcctgctggcccagctgaagcccgagaaggatagcgacgaagccgtgacatatagcctgggaaagtttgggcagagggccctggatttctacagcattcatgtgaccaaggagtccacccaccccgtgaagcccctggcccagatcgccggaaacagatacgcctccggacctgtgggaaaggccctgagcgacgcatgtatgggcacaatcgcctccttcctgtctaagtaccaggacatcatcatcgaacaccagaaggtggtgaagggcaaccagaagagactggagagcctgcgggagctggccggcaaggaaaacctggaataccctagcgtgaccctgccacctcagcctcacaccaaggagggcgttgatgcctacaacgaagtgatcgcccgggtgcgaatgtgggtgaacctgaacctgtggcagaagctgaagctaagcagagatgatgccaagcctctgctgagactgaagggattcccttcctttcctctggtcgagagacaggccaacgaagtggactggtgggacatggtgtgtaacgtgaagaagctgatcaacgagaaaaaggaggatggcaaggtgttttggcagaatctggctggctacaagagacaggaagccctgagaccatacctgagcagcgaggaagatcggaagaagggaaagaaattcgctcggtaccagctgggcgacctgctgctgcacctggaaaagaagcacggcgaggactggggaaaggtgtacgacgaggcctgggagcggattgacaagaaagtggaaggcctgagcaagcacatcaagctggaagaggaacggagaagcgaggacgcccagagcaaggccgccctgaccgactggctgcgggctaaggccagcttcgtgatcgagggcctgaaggaggccgacaaggacgagttctgcagatgcgagctgaagctgcagaagtggtacggggacctgcggggaaagcccttcgccatcgaagccgagaacagcatcctggacatcagcggcttcagcaagcagtacaactgtgccttcatctggcagaaggacggcgtgaagaagctgaacctgtacctgatcatcaactacttcaagggcggcaagctgcggttcaagaagatcaaacctgaagccttcgaagccaacagattctacaccgtgatcaacaaaaagagcggcgagatcgtgcccatggaggtgaacttcaacttcgacgaccccaacctgatcatcctgcctctggcctttggcaagagacagggcagagaattcatctggaacgacctgctgtccctggaaaccggcagcctgaagctggccaacggaagagtgatcgagaagacactgtacaacagaagaacccggcaggatgagcctgccctgttcgtggccctgaccttcgagcggcgggaggtcctggactcctccaatatcaaaccaatgaacctgatcggcgtggcaagaggcgaaaacatccccgccgtgatcgccctgaccgaccccgagggctgcccactgagccggtttaaggatagcctgggaaacccaacccacatcctgagaatcggcgagagctataaggagaagcagcggaccatccaggccaagaaggaggtggagcagcggagagccggcggctacagccggaagtacgccagcaaagccaagaatctggcagacgatatggtgagaaacaccgctagagatctgctgtactacgccgtgacccaggatgccatgctgatcttcgccaacctgagccggggcttcggccggcagggcaagcggaccttcatggccgagagacagtacacacggatggaggactggctgaccgccaagctggcctacgagggcctgagcaagacctacctgtccaagacactggcccagtacacctccaagacatgcagcaactgtgggtttaccatcaccagcgccgactacgacagggtgctggagaagctgaagaagacagcaacaggctggatgaccacaattaacggcaaggagctgaaggtggagggccagattacctactacaacagatacaagagacagaacgtagtcaaggacctgtccgtcgagctggatagactgagcgaagaatctgtgaacaacgacatctcctcctggacaaagggcagaagcggagaagctctgagcctcctgaagaaaagattctcccatagacccgtgcaggagaagttcgtgtgcctgaactgcggcttcgagacacacgcagccgagcaagccgccctgaacatcgccagatcctggctgttcctgcggagccaggagtacaagaaataccagacaaacaagacaaccggcaacaccgataagagagccttcgtcgagacctggcagtccttttaccggaagaagcttaaggaggtgtggaaacctgccgtgcggtctggcggatctggcggaggctccaccagccccaagaaaaagagaaaagtctaagctgccttctgcggggcttgccttctggccatgcccttcttctctcccttgcacctgtacctcttggtctttgaataaagcctgagtaggaaggctagcaaaaaaaaaaaaaaaaaaaaaaaaaaaaaaaaaaaaaaaaaaaaaaaaaaaaaaaaaaaaaaaaaaaaaaaaaaaaaaaagcccagccggctccccaacctctaccgaggagggcacctctgagtccgccacccccgagagcggccctggcacctccaccgagcccagcgagggcagcgcacccggcagccctgccggcagccccacctccacagaggagggaaccagcaccgagcccagcgaaggcagcgccccaggcaccagcaccgagcctagtgagcaggagattaaacggatcaacaagatcagaagaagacttgtgaaagacagcaacaccaagaaggccggcaagacaggccccatgaaaaccctgctggttagagtgatgacacccgatctgagagagcggctggaaaacctgagaaagaagcctgaaaatatcccccagcccatcagcaatacatctagagccaacctgaataagctgctgaccgattacaccgaaatgaagaaggcgatcctgcatgtgtactgggaagagttccagaaggaccctgtgggcctgatgagccgggtggcccagcctgccagcaagaagatcgatcagaacaagctgaaacctgagatggacgagaagggcaacctgaccaccgccggctttgcctgctctcagtgtggccagcccctgttcgtgtacaagctggagcaggtgtctgagaagggcaaggcttacaccaactacttcggacggtgcaatgtggccgagcacgaaaagctgatcctgctggcccagctgaagcccgagaaggatagcgacgaagccgtgacatatagcctgggaaagtttgggcagagggccctggatttctacagcattcatgtgaccaaggagtccacccaccccgtgaagcccctggcccagatcgccggaaacagatacgcctccggacctgtgggaaaggccctgagcgacgcatgtatgggcacaatcgcctccttcctgtctaagtaccaggacatcatcatcgaacaccagaaggtggtgaagggcaaccagaagagactggagagcctgcgggagctggccggcaaggaaaacctggaataccctagcgtgaccctgccacctcagcctcacaccaaggagggcgttgatgcctacaacgaagtgatcgcccgggtgcgaatgtgggtgaacctgaacctgtggcagaagctgaagctaagcagagatgatgccaagcctctgctgagactgaagggattcccttcctttcctctggtcgagagacaggccaacgaagtggactggtgggacatggtgtgtaacgtgaagaagctgatcaacgagaaaaaggaggatggcaaggtgttttggcagaatctggctggctacaagagacaggaagccctgagaccatacctgagcagcgaggaagatcggaagaagggaaagaaattcgctcggtaccagctgggcgacctgctgctgcacctggaaaagaagcacggcgaggactggggaaaggtgtacgacgaggcctgggagcggattgacaagaaagtggaaggcctgagcaagcacatcaagctggaagaggaacggagaagcgaggacgcccagagcaaggccgccctgaccgactggctgcgggctaaggccagcttcgtgatcgagggcctgaaggaggccgacaaggacgagttctgcagatgcgagctgaagctgcagaagtggtacggggacctgcggggaaagcccttcgccatcgaagccgagaacagcatcctggacatcagcggcttcagcaagcagtacaactgtgccttcatctggcagaaggacggcgtgaagaagctgaacctgtacctgatcatcaactacttcaagggcggcaagctgcggttcaagaagatcaaacctgaagccttcgaagccaacagattctacaccgtgatcaacaaaaagagcggcgagatcgtgcccatggaggtgaacttcaacttcgacgaccccaacctgatcatcctgcctctggcctttggcaagagacagggcagagaattcatctggaacgacctgctgtccctggaaaccggcagcctgaagctggccaacggaagagtgatcgagaagacactgtacaacagaagaacccggcaggatgagcctgccctgttcgtggccctgaccttcgagcggcgggaggtcctggactcctccaatatcaaaccaatgaacctgatcggcgtggcaagaggcgaaaacatccccgccgtgatcgccctgaccgaccccgagggctgcccactgagccggtttaaggatagcctgggaaacccaacccacatcctgagaatcggcgagagctataaggagaagcagcggaccatccaggccaagaaggaggtggagcagcggagagccggcggctacagccggaagtacgccagcaaagccaagaatctggcagacgatatggtgagaaacaccgctagagatctgctgtactacgccgtgacccaggatgccatgctgatcttcgccaacctgagccggggcttcggccggcagggcaagcggaccttcatggccgagagacagtacacacggatggaggactggctgaccgccaagctggcctacgagggcctgagcaagacctacctgtccaagacactggcccagtacacctccaagacatgcagcaactgtgggtttaccatcaccagcgccgactacgacagggtgctggagaagctgaagaagacagcaacaggctggatgaccacaattaacggcaaggagctgaaggtggagggccagattacctactacaacagatacaagagacagaacgtagtcaaggacctgtccgtcgagctggatagactgagcgaagaatctgtgaacaacgacatctcctcctggacaaagggcagaagcggagaagctctgagcctcctgaagaaaagattctcccatagacccgtgcaggagaagttcgtgtgcctgaactgcggcttcgagacacacgcagccgagcaagccgccctgaacatcgccagatcctggctgttcctgcggagccaggagtacaagaaataccagacaaacaagacaaccggcaacaccgataagagagccttcgtcgagacctggcagtccttttaccggaagaagcttaaggaggtgtggaaacctgccgtgcggtctggcggatctggcggaggctccaccagccccaagaaaaagagaaaagtctaagctgccttctgcggggcttgccttctggccatgcccttcttctctcccttgcacctgtacctcttggtctttgaataaagcctgagtaggaaggctagcaaaaaaaaaaaaaaaaaaaaaaaaaaaaaaaaaaaaaaaaaaaaaaaaaaaaaaaaaaaaaaaaaaaaaaaaaaaaaaaa

SEQ ID NO: 10229 - RNA, 8787 nt, synthetic construct
  source 1..8787: mol_type = other RNA
aggaaataagagagaaaagaagagtaagaagaaatataagagccaccatggcccctaagaagaagcgtaaagtgagccggatgaaccacgaccaggagttcgacccccctaaggtgtaccctcccgtccccgccgagaagagaaagcccatccgggtcctgagcctgttcgatggcatcgccaccggtctgctggtgctgaaggacctgggcatccaggtggataggtacattgcctccgaggtgtgcgaggactccatcaccgtgggaatggtgcgtcatcagggcaagatcatgtacgtgggcgacgtgcggagcgtgacacagaagcatatccaggagtggggccctttcgacctggtgatcggcggcagcccttgcaatgacctgagcatcgtgaacccagcccggaagggcctgtacgagggaaccggcagactgttcttcgagttttacagactgctgcacgacgcccggcctaaggaaggcgacgaccggcccttcttttggctgttcgagaatgtggtggccatgggagtcagcgacaagcgggatattagccggttcctggagagcaaccccgtgatgatcgatgccaaggaagtgagcgccgcccaccgggccagatacttctggggcaatctgcctggcatgaacagacccctggccagcaccgtgaacgacaagctggagctgcaggagtgcctggagcacggccggatcgccaagttcagcaaggtgagaaccatcaccacccgaagcaacagcatcaaacaaggcaaggaccagcactttcctgtgttcatgaacgagaaggaggacatcctgtggtgtaccgagatggagagagtgttcgggttcccagtccactacacagatgtcagcaacatgtctagactggccagacagagactgctgggaagaagctggtccgtccctgtgatcagacacctgttcgcccctctgaaggagtacttcgcctgcgtgagcagcggcaacagcaacgccaacagccggggccccagcttctctagcggcctggtgccactgtccctgagagggagccacatgggccccatggagatctacaaaaccgtgagcgcctggaagcggcagcctgtgcgcgtgctgagcctgtttcggaatatcgataaagtcctgaaaagcctgggattcctggagagcggctctggctccggcggtggcaccctgaagtacgtggaggatgtgacaaacgtggtcagacgggatgtggagaagtggggccccttcgatctggtgtacggcagcacccaacccctgggcagctcttgtgaccggtgccctggctggtacatgtttcagttccaccggatcctgcagtacgccctgccgagacaggagtcccagcggccattcttttggattttcatggacaacttgctgctgaccgaggatgaccaggaaactaccactcggttcctgcagaccgaagccgtgaccctgcaggacgtgagaggccgggactaccagaacgccatgcgggtgtggtccaacatccctggactgaaaagcaagcacgcacctctgacccctaaagaagaggagtacctgcaggcccaggtgcggagcagaagcaagctggacgcccctaaggtggatctgctggtgaagaattgcctcctgcccctgagagagtacttcaagtatttcagccagaatagtctgcccctgggaggcagcggcggcggcgtgtgcggcagcgtgaccttcaaggacgtggccgtggacttcagccaggaggagtgggcctgcctggacgccacccagaaggtgctgtacagggacatgatgctggagacctacagcaacctggtggccgtggtgggcaggtgcatcagcaagcccgacctgatcgtgctgctggagcaggagaaggagccctggatggccgtgaaggaggagaccgacaggcccagccccgacctggagagcggcggcccaagcagcggcgcccctcctcccagcggcggcaggcggcccaagcagcggcgcccctcctcccagcggcggcagcccagccggctccccaacctctaccgaggagggcacctctgagtccgccacccccgagagcggccctggcacctccaccgagcccagcgagggcagcgcacccggcagccctgccggcagccccacctccacagaggagggaaccagcaccgagcccagcgaaggcagcgccccaggcaccagcaccgagcctagtgagcaggagattaaacggatcaacaagatcagaagaagacttgtgaaagacagcaacaccaagaaggccggcaagacaggccccatgaaaaccctgctggttagagtgatgacacccgatctgagagagcggctggaaaacctgagaaagaagcctgaaaatatcccccagcccatcagcaatacatctagagccaacctgaataagctgctgaccgattacaccgaaatgaagaaggcgatcctgcatgtgtactgggaagagttccagaaggaccctgtgggcctgatgagccgggtggcccagcctgccagcaagaagatcgatcagaacaagctgaaacctgagatggacgagaagggcaacctgaccaccgccggctttgcctgctctcagtgtggccagcccctgttcgtgtacaagctggagcaggtgtctgagaagggcaaggcttacaccaactacttcggacggtgcaatgtggccgagcacgaaaagctgatcctgctggcccagctgaagcccgagaaggatagcgacgaagccgtgacatatagcctgggaaagtttgggcagagggccctggatttctacagcattcatgtgaccaaggagtccacccaccccgtgaagcccctggcccagatcgccggaaacagatacgcctccggacctgtgggaaaggccctgagcgacgcatgtatgggcacaatcgcctccttcctgtctaagtaccaggacatcatcatcgaacaccagaaggtggtgaagggcaaccagaagagactggagagcctgcgggagctggccggcaaggaaaacctggaataccctagcgtgaccctgccacctcagcctcacaccaaggagggcgttgatgcctacaacgaagtgatcgcccgggtgcgaatgtgggtgaacctgaacctgtggcagaagctgaagctaagcagagatgatgccaagcctctgctgagactgaagggattcccttcctttcctctggtcgagagacaggccaacgaagtggactggtgggacatggtgtgtaacgtgaagaagctgatcaacgagaaaaaggaggatggcaaggtgttttggcagaatctggctggctacaagagacaggaagccctgagaccatacctgagcagcgaggaagatcggaagaagggaaagaaattcgctcggtaccagctgggcgacctgctgctgcacctggaaaagaagcacggcgaggactggggaaaggtgtacgacgaggcctgggagcggattgacaagaaagtggaaggcctgagcaagcacatcaagctggaagaggaacggagaagcgaggacgcccagagcaaggccgccctgaccgactggctgcgggctaaggccagcttcgtgatcgagggcctgaaggaggccgacaaggacgagttctgcagatgcgagctgaagctgcagaagtggtacggggacctgcggggaaagcccttcgccatcgaagccgagaacagcatcctggacatcagcggcttcagcaagcagtacaactgtgccttcatctggcagaaggacggcgtgaagaagctgaacctgtacctgatcatcaactacttcaagggcggcaagctgcggttcaagaagatcaaacctgaagccttcgaagccaacagattctacaccgtgatcaacaaaaagagcggcgagatcgtgcccatggaggtgaacttcaacttcgacgaccccaacctgatcatcctgcctctggcctttggcaagagacagggcagagaattcatctggaacgacctgctgtccctggaaaccggcagcctgaagctggccaacggaagagtgatcgagaagacactgtacaacagaagaacccggcaggatgagcctgccctgttcgtggccctgaccttcgagcggcgggaggtcctggactcctccaatatcaaaccaatgaacctgatcggcgtggcaagaggcgaaaacatccccgccgtgatcgccctgaccgaccccgagggctgcccactgagccggtttaaggatagcctgggaaacccaacccacatcctgagaatcggcgagagctataaggagaagcagcggaccatccaggccaagaaggaggtggagcagcggagagccggcggctacagccggaagtacgccagcaaagccaagaatctggcagacgatatggtgagaaacaccgctagagatctgctgtactacgccgtgacccaggatgccatgctgatcttcgccaacctgagccggggcttcggccggcagggcaagcggaccttcatggccgagagacagtacacacggatggaggactggctgaccgccaagctggcctacgagggcctgagcaagacctacctgtccaagacactggcccagtacacctccaagacatgcagcaactgtgggtttaccatcaccagcgccgactacgacagggtgctggagaagctgaagaagacagcaacaggctggatgaccacaattaacggcaaggagctgaaggtggagggccagattacctactacaacagatacaagagacagaacgtagtcaaggacctgtccgtcgagctggatagactgagcgaagaatctgtgaacaacgacatctcctcctggacaaagggcagaagcggagaagctctgagcctcctgaagaaaagattctcccatagacccgtgcaggagaagttcgtgtgcctgaactgcggcttcgagacacacgcagccgagcaagccgccctgaacatcgccagatcctggctgttcctgcggagccaggagtacaagaaataccagacaaacaagacaaccggcaacaccgataagagagccttcgtcgagacctggcagtccttttaccggaagaagcttaaggaggtgtggaaacctgccgtgcggtctggcggatctggcggaggctccaccagccccaagaaaaagagaaaagtctaagctgccttctgcggggcttgccttctggccatgcccttcttctctcccttgcacctgtacctcttggtctttgaataaagcctgagtaggaaggctagcaaaaaaaaaaaaaaaaaaaaaaaaaaaaaaaaaaaaaaaaaaaaaaaaaaaaaaaaaaaaaaaaaaaaaaaaaaaaaaaagcccagccggctccccaacctctaccgaggagggcacctctgagtccgccacccccgagagcggccctggcacctccaccgagcccagcgagggcagcgcacccggcagccctgccggcagccccacctccacagaggagggaaccagcaccgagcccagcgaaggcagcgccccaggcaccagcaccgagcctagtgagcaggagattaaacggatcaacaagatcagaagaagacttgtgaaagacagcaacaccaagaaggccggcaagacaggccccatgaaaaccctgctggttagagtgatgacacccgatctgagagagcggctggaaaacctgagaaagaagcctgaaaatatcccccagcccatcagcaatacatctagagccaacctgaataagctgctgaccgattacaccgaaatgaagaaggcgatcctgcatgtgtactgggaagagttccagaaggaccctgtgggcctgatgagccgggtggcccagcctgccagcaagaagatcgatcagaacaagctgaaacctgagatggacgagaagggcaacctgaccaccgccggctttgcctgctctcagtgtggccagcccctgttcgtgtacaagctggagcaggtgtctgagaagggcaaggcttacaccaactacttcggacggtgcaatgtggccgagcacgaaaagctgatcctgctggcccagctgaagcccgagaaggatagcgacgaagccgtgacatatagcctgggaaagtttgggcagagggccctggatttctacagcattcatgtgaccaaggagtccacccaccccgtgaagcccctggcccagatcgccggaaacagatacgcctccggacctgtgggaaaggccctgagcgacgcatgtatgggcacaatcgcctccttcctgtctaagtaccaggacatcatcatcgaacaccagaaggtggtgaagggcaaccagaagagactggagagcctgcgggagctggccggcaaggaaaacctggaataccctagcgtgaccctgccacctcagcctcacaccaaggagggcgttgatgcctacaacgaagtgatcgcccgggtgcgaatgtgggtgaacctgaacctgtggcagaagctgaagctaagcagagatgatgccaagcctctgctgagactgaagggattcccttcctttcctctggtcgagagacaggccaacgaagtggactggtgggacatggtgtgtaacgtgaagaagctgatcaacgagaaaaaggaggatggcaaggtgttttggcagaatctggctggctacaagagacaggaagccctgagaccatacctgagcagcgaggaagatcggaagaagggaaagaaattcgctcggtaccagctgggcgacctgctgctgcacctggaaaagaagcacggcgaggactggggaaaggtgtacgacgaggcctgggagcggattgacaagaaagtggaaggcctgagcaagcacatcaagctggaagaggaacggagaagcgaggacgcccagagcaaggccgccctgaccgactggctgcgggctaaggccagcttcgtgatcgagggcctgaaggaggccgacaaggacgagttctgcagatgcgagctgaagctgcagaagtggtacggggacctgcggggaaagcccttcgccatcgaagccgagaacagcatcctggacatcagcggcttcagcaagcagtacaactgtgccttcatctggcagaaggacggcgtgaagaagctgaacctgtacctgatcatcaactacttcaagggcggcaagctgcggttcaagaagatcaaacctgaagccttcgaagccaacagattctacaccgtgatcaacaaaaagagcggcgagatcgtgcccatggaggtgaacttcaacttcgacgaccccaacctgatcatcctgcctctggcctttggcaagagacagggcagagaattcatctggaacgacctgctgtccctggaaaccggcagcctgaagctggccaacggaagagtgatcgagaagacactgtacaacagaagaacccggcaggatgagcctgccctgttcgtggccctgaccttcgagcggcgggaggtcctggactcctccaatatcaaaccaatgaacctgatcggcgtggcaagaggcgaaaacatccccgccgtgatcgccctgaccgaccccgagggctgcccactgagccggtttaaggatagcctgggaaacccaacccacatcctgagaatcggcgagagctataaggagaagcagcggaccatccaggccaagaaggaggtggagcagcggagagccggcggctacagccggaagtacgccagcaaagccaagaatctggcagacgatatggtgagaaacaccgctagagatctgctgtactacgccgtgacccaggatgccatgctgatcttcgccaacctgagccggggcttcggccggcagggcaagcggaccttcatggccgagagacagtacacacggatggaggactggctgaccgccaagctggcctacgagggcctgagcaagacctacctgtccaagacactggcccagtacacctccaagacatgcagcaactgtgggtttaccatcaccagcgccgactacgacagggtgctggagaagctgaagaagacagcaacaggctggatgaccacaattaacggcaaggagctgaaggtggagggccagattacctactacaacagatacaagagacagaacgtagtcaaggacctgtccgtcgagctggatagactgagcgaagaatctgtgaacaacgacatctcctcctggacaaagggcagaagcggagaagctctgagcctcctgaagaaaagattctcccatagacccgtgcaggagaagttcgtgtgcctgaactgcggcttcgagacacacgcagccgagcaagccgccctgaacatcgccagatcctggctgttcctgcggagccaggagtacaagaaataccagacaaacaagacaaccggcaacaccgataagagagccttcgtcgagacctggcagtccttttaccggaagaagcttaaggaggtgtggaaacctgccgtgcggtctggcggatctggcggaggctccaccagccccaagaaaaagagaaaagtctaagctgccttctgcggggcttgccttctggccatgcccttcttctctcccttgcacctgtacctcttggtctttgaataaagcctgagtaggaaggctagcaaaaaaaaaaaaaaaaaaaaaaaaaaaaaaaaaaaaaaaaaaaaaaaaaaaaaaaaaaaaaaaaaaaaaaaaaaaaaaaa

SEQ ID NO: 10230 - RNA, 8787 nt, synthetic construct
  source 1..8787: mol_type = other RNA
aggaaataagagagaaaagaagagtaagaagaaatataagagccaccatggcccctaagaagaagcgtaaagtgagccggatgaaccacgaccaggagttcgacccccctaaggtgtaccctcccgtccccgccgagaagagaaagcccatccgggtcctgagcctgttcgatggcatcgccaccggtctgctggtgctgaaggacctgggcatccaggtggataggtacattgcctccgaggtgtgcgaggactccatcaccgtgggaatggtgcgtcatcagggcaagatcatgtacgtgggcgacgtgcggagcgtgacacagaagcatatccaggagtggggccctttcgacctggtgatcggcggcagcccttgcaatgacctgagcatcgtgaacccagcccggaagggcctgtacgagggaaccggcagactgttcttcgagttttacagactgctgcacgacgcccggcctaaggaaggcgacgaccggcccttcttttggctgttcgagaatgtggtggccatgggagtcagcgacaagcgggatattagccggttcctggagagcaaccccgtgatgatcgatgccaaggaagtgagcgccgcccaccgggccagatacttctggggcaatctgcctggcatgaacagacccctggccagcaccgtgaacgacaagctggagctgcaggagtgcctggagcacggccggatcgccaagttcagcaaggtgagaaccatcaccacccgaagcaacagcatcaaacaaggcaaggaccagcactttcctgtgttcatgaacgagaaggaggacatcctgtggtgtaccgagatggagagagtgttcgggttcccagtccactacacagatgtcagcaacatgtctagactggccagacagagactgctgggaagaagctggtccgtccctgtgatcagacacctgttcgcccctctgaaggagtacttcgcctgcgtgagcagcggcaacagcaacgccaacagccggggccccagcttctctagcggcctggtgccactgtccctgagagggagccacatgggccccatggagatctacaaaaccgtgagcgcctggaagcggcagcctgtgcgcgtgctgagcctgtttcggaatatcgataaagtcctgaaaagcctgggattcctggagagcggctctggctccggcggtggcaccctgaagtacgtggaggatgtgacaaacgtggtcagacgggatgtggagaagtggggccccttcgatctggtgtacggcagcacccaacccctgggcagctcttgtgaccggtgccctggctggtacatgtttcagttccaccggatcctgcagtacgccctgccgagacaggagtcccagcggccattcttttggattttcatggacaacttgctgctgaccgaggatgaccaggaaactaccactcggttcctgcagaccgaagccgtgaccctgcaggacgtgagaggccgggactaccagaacgccatgcgggtgtggtccaacatccctggactgaaaagcaagcacgcacctctgacccctaaagaagaggagtacctgcaggcccaggtgcggagcagaagcaagctggacgcccctaaggtggatctgctggtgaagaattgcctcctgcccctgagagagtacttcaagtatttcagccagaatagtctgcccctgggaggcagcggcggcggcttccaggagagcctgaccttcaaggacgtggccgtggacttcacctacgaggagtggcagcagctgaaccccgaccagaggtacctgtacagggacgtgatgctggagaactacaagaacctggtgttcctgggccaccagatcagcaagcccgacgtgatcagccagctggagcagggcaaggagccctggcccatcgagagggagatcttcacctacagctgcagggactgggagaccaagggcggcccaagcagcggcgcccctcctcccagcggcggcaggcggcccaagcagcggcgcccctcctcccagcggcggcagcccagccggctccccaacctctaccgaggagggcacctctgagtccgccacccccgagagcggccctggcacctccaccgagcccagcgagggcagcgcacccggcagccctgccggcagccccacctccacagaggagggaaccagcaccgagcccagcgaaggcagcgccccaggcaccagcaccgagcctagtgagcaggagattaaacggatcaacaagatcagaagaagacttgtgaaagacagcaacaccaagaaggccggcaagacaggccccatgaaaaccctgctggttagagtgatgacacccgatctgagagagcggctggaaaacctgagaaagaagcctgaaaatatcccccagcccatcagcaatacatctagagccaacctgaataagctgctgaccgattacaccgaaatgaagaaggcgatcctgcatgtgtactgggaagagttccagaaggaccctgtgggcctgatgagccgggtggcccagcctgccagcaagaagatcgatcagaacaagctgaaacctgagatggacgagaagggcaacctgaccaccgccggctttgcctgctctcagtgtggccagcccctgttcgtgtacaagctggagcaggtgtctgagaagggcaaggcttacaccaactacttcggacggtgcaatgtggccgagcacgaaaagctgatcctgctggcccagctgaagcccgagaaggatagcgacgaagccgtgacatatagcctgggaaagtttgggcagagggccctggatttctacagcattcatgtgaccaaggagtccacccaccccgtgaagcccctggcccagatcgccggaaacagatacgcctccggacctgtgggaaaggccctgagcgacgcatgtatgggcacaatcgcctccttcctgtctaagtaccaggacatcatcatcgaacaccagaaggtggtgaagggcaaccagaagagactggagagcctgcgggagctggccggcaaggaaaacctggaataccctagcgtgaccctgccacctcagcctcacaccaaggagggcgttgatgcctacaacgaagtgatcgcccgggtgcgaatgtgggtgaacctgaacctgtggcagaagctgaagctaagcagagatgatgccaagcctctgctgagactgaagggattcccttcctttcctctggtcgagagacaggccaacgaagtggactggtgggacatggtgtgtaacgtgaagaagctgatcaacgagaaaaaggaggatggcaaggtgttttggcagaatctggctggctacaagagacaggaagccctgagaccatacctgagcagcgaggaagatcggaagaagggaaagaaattcgctcggtaccagctgggcgacctgctgctgcacctggaaaagaagcacggcgaggactggggaaaggtgtacgacgaggcctgggagcggattgacaagaaagtggaaggcctgagcaagcacatcaagctggaagaggaacggagaagcgaggacgcccagagcaaggccgccctgaccgactggctgcgggctaaggccagcttcgtgatcgagggcctgaaggaggccgacaaggacgagttctgcagatgcgagctgaagctgcagaagtggtacggggacctgcggggaaagcccttcgccatcgaagccgagaacagcatcctggacatcagcggcttcagcaagcagtacaactgtgccttcatctggcagaaggacggcgtgaagaagctgaacctgtacctgatcatcaactacttcaagggcggcaagctgcggttcaagaagatcaaacctgaagccttcgaagccaacagattctacaccgtgatcaacaaaaagagcggcgagatcgtgcccatggaggtgaacttcaacttcgacgaccccaacctgatcatcctgcctctggcctttggcaagagacagggcagagaattcatctggaacgacctgctgtccctggaaaccggcagcctgaagctggccaacggaagagtgatcgagaagacactgtacaacagaagaacccggcaggatgagcctgccctgttcgtggccctgaccttcgagcggcgggaggtcctggactcctccaatatcaaaccaatgaacctgatcggcgtggcaagaggcgaaaacatccccgccgtgatcgccctgaccgaccccgagggctgcccactgagccggtttaaggatagcctgggaaacccaacccacatcctgagaatcggcgagagctataaggagaagcagcggaccatccaggccaagaaggaggtggagcagcggagagccggcggctacagccggaagtacgccagcaaagccaagaatctggcagacgatatggtgagaaacaccgctagagatctgctgtactacgccgtgacccaggatgccatgctgatcttcgccaacctgagccggggcttcggccggcagggcaagcggaccttcatggccgagagacagtacacacggatggaggactggctgaccgccaagctggcctacgagggcctgagcaagacctacctgtccaagacactggcccagtacacctccaagacatgcagcaactgtgggtttaccatcaccagcgccgactacgacagggtgctggagaagctgaagaagacagcaacaggctggatgaccacaattaacggcaaggagctgaaggtggagggccagattacctactacaacagatacaagagacagaacgtagtcaaggacctgtccgtcgagctggatagactgagcgaagaatctgtgaacaacgacatctcctcctggacaaagggcagaagcggagaagctctgagcctcctgaagaaaagattctcccatagacccgtgcaggagaagttcgtgtgcctgaactgcggcttcgagacacacgcagccgagcaagccgccctgaacatcgccagatcctggctgttcctgcggagccaggagtacaagaaataccagacaaacaagacaaccggcaacaccgataagagagccttcgtcgagacctggcagtccttttaccggaagaagcttaaggaggtgtggaaacctgccgtgcggtctggcggatctggcggaggctccaccagccccaagaaaaagagaaaagtctaagctgccttctgcggggcttgccttctggccatgcccttcttctctcccttgcacctgtacctcttggtctttgaataaagcctgagtaggaaggctagcaaaaaaaaaaaaaaaaaaaaaaaaaaaaaaaaaaaaaaaaaaaaaaaaaaaaaaaaaaaaaaaaaaaaaaaaaaaaaaaagcccagccggctccccaacctctaccgaggagggcacctctgagtccgccacccccgagagcggccctggcacctccaccgagcccagcgagggcagcgcacccggcagccctgccggcagccccacctccacagaggagggaaccagcaccgagcccagcgaaggcagcgccccaggcaccagcaccgagcctagtgagcaggagattaaacggatcaacaagatcagaagaagacttgtgaaagacagcaacaccaagaaggccggcaagacaggccccatgaaaaccctgctggttagagtgatgacacccgatctgagagagcggctggaaaacctgagaaagaagcctgaaaatatcccccagcccatcagcaatacatctagagccaacctgaataagctgctgaccgattacaccgaaatgaagaaggcgatcctgcatgtgtactgggaagagttccagaaggaccctgtgggcctgatgagccgggtggcccagcctgccagcaagaagatcgatcagaacaagctgaaacctgagatggacgagaagggcaacctgaccaccgccggctttgcctgctctcagtgtggccagcccctgttcgtgtacaagctggagcaggtgtctgagaagggcaaggcttacaccaactacttcggacggtgcaatgtggccgagcacgaaaagctgatcctgctggcccagctgaagcccgagaaggatagcgacgaagccgtgacatatagcctgggaaagtttgggcagagggccctggatttctacagcattcatgtgaccaaggagtccacccaccccgtgaagcccctggcccagatcgccggaaacagatacgcctccggacctgtgggaaaggccctgagcgacgcatgtatgggcacaatcgcctccttcctgtctaagtaccaggacatcatcatcgaacaccagaaggtggtgaagggcaaccagaagagactggagagcctgcgggagctggccggcaaggaaaacctggaataccctagcgtgaccctgccacctcagcctcacaccaaggagggcgttgatgcctacaacgaagtgatcgcccgggtgcgaatgtgggtgaacctgaacctgtggcagaagctgaagctaagcagagatgatgccaagcctctgctgagactgaagggattcccttcctttcctctggtcgagagacaggccaacgaagtggactggtgggacatggtgtgtaacgtgaagaagctgatcaacgagaaaaaggaggatggcaaggtgttttggcagaatctggctggctacaagagacaggaagccctgagaccatacctgagcagcgaggaagatcggaagaagggaaagaaattcgctcggtaccagctgggcgacctgctgctgcacctggaaaagaagcacggcgaggactggggaaaggtgtacgacgaggcctgggagcggattgacaagaaagtggaaggcctgagcaagcacatcaagctggaagaggaacggagaagcgaggacgcccagagcaaggccgccctgaccgactggctgcgggctaaggccagcttcgtgatcgagggcctgaaggaggccgacaaggacgagttctgcagatgcgagctgaagctgcagaagtggtacggggacctgcggggaaagcccttcgccatcgaagccgagaacagcatcctggacatcagcggcttcagcaagcagtacaactgtgccttcatctggcagaaggacggcgtgaagaagctgaacctgtacctgatcatcaactacttcaagggcggcaagctgcggttcaagaagatcaaacctgaagccttcgaagccaacagattctacaccgtgatcaacaaaaagagcggcgagatcgtgcccatggaggtgaacttcaacttcgacgaccccaacctgatcatcctgcctctggcctttggcaagagacagggcagagaattcatctggaacgacctgctgtccctggaaaccggcagcctgaagctggccaacggaagagtgatcgagaagacactgtacaacagaagaacccggcaggatgagcctgccctgttcgtggccctgaccttcgagcggcgggaggtcctggactcctccaatatcaaaccaatgaacctgatcggcgtggcaagaggcgaaaacatccccgccgtgatcgccctgaccgaccccgagggctgcccactgagccggtttaaggatagcctgggaaacccaacccacatcctgagaatcggcgagagctataaggagaagcagcggaccatccaggccaagaaggaggtggagcagcggagagccggcggctacagccggaagtacgccagcaaagccaagaatctggcagacgatatggtgagaaacaccgctagagatctgctgtactacgccgtgacccaggatgccatgctgatcttcgccaacctgagccggggcttcggccggcagggcaagcggaccttcatggccgagagacagtacacacggatggaggactggctgaccgccaagctggcctacgagggcctgagcaagacctacctgtccaagacactggcccagtacacctccaagacatgcagcaactgtgggtttaccatcaccagcgccgactacgacagggtgctggagaagctgaagaagacagcaacaggctggatgaccacaattaacggcaaggagctgaaggtggagggccagattacctactacaacagatacaagagacagaacgtagtcaaggacctgtccgtcgagctggatagactgagcgaagaatctgtgaacaacgacatctcctcctggacaaagggcagaagcggagaagctctgagcctcctgaagaaaagattctcccatagacccgtgcaggagaagttcgtgtgcctgaactgcggcttcgagacacacgcagccgagcaagccgccctgaacatcgccagatcctggctgttcctgcggagccaggagtacaagaaataccagacaaacaagacaaccggcaacaccgataagagagccttcgtcgagacctggcagtccttttaccggaagaagcttaaggaggtgtggaaacctgccgtgcggtctggcggatctggcggaggctccaccagccccaagaaaaagagaaaagtctaagctgccttctgcggggcttgccttctggccatgcccttcttctctcccttgcacctgtacctcttggtctttgaataaagcctgagtaggaaggctagcaaaaaaaaaaaaaaaaaaaaaaaaaaaaaaaaaaaaaaaaaaaaaaaaaaaaaaaaaaaaaaaaaaaaaaaaaaaaaaaa

SEQ ID NO: 10231 - RNA, 8787 nt, synthetic construct
  source 1..8787: mol_type = other RNA
aggaaataagagagaaaagaagagtaagaagaaatataagagccaccatggcccctaagaagaagcgtaaagtgagccggatgaaccacgaccaggagttcgacccccctaaggtgtaccctcccgtccccgccgagaagagaaagcccatccgggtcctgagcctgttcgatggcatcgccaccggtctgctggtgctgaaggacctgggcatccaggtggataggtacattgcctccgaggtgtgcgaggactccatcaccgtgggaatggtgcgtcatcagggcaagatcatgtacgtgggcgacgtgcggagcgtgacacagaagcatatccaggagtggggccctttcgacctggtgatcggcggcagcccttgcaatgacctgagcatcgtgaacccagcccggaagggcctgtacgagggaaccggcagactgttcttcgagttttacagactgctgcacgacgcccggcctaaggaaggcgacgaccggcccttcttttggctgttcgagaatgtggtggccatgggagtcagcgacaagcgggatattagccggttcctggagagcaaccccgtgatgatcgatgccaaggaagtgagcgccgcccaccgggccagatacttctggggcaatctgcctggcatgaacagacccctggccagcaccgtgaacgacaagctggagctgcaggagtgcctggagcacggccggatcgccaagttcagcaaggtgagaaccatcaccacccgaagcaacagcatcaaacaaggcaaggaccagcactttcctgtgttcatgaacgagaaggaggacatcctgtggtgtaccgagatggagagagtgttcgggttcccagtccactacacagatgtcagcaacatgtctagactggccagacagagactgctgggaagaagctggtccgtccctgtgatcagacacctgttcgcccctctgaaggagtacttcgcctgcgtgagcagcggcaacagcaacgccaacagccggggccccagcttctctagcggcctggtgccactgtccctgagagggagccacatgggccccatggagatctacaaaaccgtgagcgcctggaagcggcagcctgtgcgcgtgctgagcctgtttcggaatatcgataaagtcctgaaaagcctgggattcctggagagcggctctggctccggcggtggcaccctgaagtacgtggaggatgtgacaaacgtggtcagacgggatgtggagaagtggggccccttcgatctggtgtacggcagcacccaacccctgggcagctcttgtgaccggtgccctggctggtacatgtttcagttccaccggatcctgcagtacgccctgccgagacaggagtcccagcggccattcttttggattttcatggacaacttgctgctgaccgaggatgaccaggaaactaccactcggttcctgcagaccgaagccgtgaccctgcaggacgtgagaggccgggactaccagaacgccatgcgggtgtggtccaacatccctggactgaaaagcaagcacgcacctctgacccctaaagaagaggagtacctgcaggcccaggtgcggagcagaagcaagctggacgcccctaaggtggatctgctggtgaagaattgcctcctgcccctgagagagtacttcaagtatttcagccagaatagtctgcccctgggaggcagcggcggcggcttccagaacagcctgaccttcgacgacgtggccgtggacttcacccaggaggagtgggtgctgatggaccagacccagagggacctgtacagggaggtgatgctggagaactaccagaacctgttcagcgccggctgcgagatcaccaagcccagcctgatcagctggctggaggaggacctgcagatcggccagagggaggacttccaggagtgggagatgcaggacaccctgagggagcagggcggcccaagcagcggcgcccctcctcccagcggcggcaggcggcccaagcagcggcgcccctcctcccagcggcggcagcccagccggctccccaacctctaccgaggagggcacctctgagtccgccacccccgagagcggccctggcacctccaccgagcccagcgagggcagcgcacccggcagccctgccggcagccccacctccacagaggagggaaccagcaccgagcccagcgaaggcagcgccccaggcaccagcaccgagcctagtgagcaggagattaaacggatcaacaagatcagaagaagacttgtgaaagacagcaacaccaagaaggccggcaagacaggccccatgaaaaccctgctggttagagtgatgacacccgatctgagagagcggctggaaaacctgagaaagaagcctgaaaatatcccccagcccatcagcaatacatctagagccaacctgaataagctgctgaccgattacaccgaaatgaagaaggcgatcctgcatgtgtactgggaagagttccagaaggaccctgtgggcctgatgagccgggtggcccagcctgccagcaagaagatcgatcagaacaagctgaaacctgagatggacgagaagggcaacctgaccaccgccggctttgcctgctctcagtgtggccagcccctgttcgtgtacaagctggagcaggtgtctgagaagggcaaggcttacaccaactacttcggacggtgcaatgtggccgagcacgaaaagctgatcctgctggcccagctgaagcccgagaaggatagcgacgaagccgtgacatatagcctgggaaagtttgggcagagggccctggatttctacagcattcatgtgaccaaggagtccacccaccccgtgaagcccctggcccagatcgccggaaacagatacgcctccggacctgtgggaaaggccctgagcgacgcatgtatgggcacaatcgcctccttcctgtctaagtaccaggacatcatcatcgaacaccagaaggtggtgaagggcaaccagaagagactggagagcctgcgggagctggccggcaaggaaaacctggaataccctagcgtgaccctgccacctcagcctcacaccaaggagggcgttgatgcctacaacgaagtgatcgcccgggtgcgaatgtgggtgaacctgaacctgtggcagaagctgaagctaagcagagatgatgccaagcctctgctgagactgaagggattcccttcctttcctctggtcgagagacaggccaacgaagtggactggtgggacatggtgtgtaacgtgaagaagctgatcaacgagaaaaaggaggatggcaaggtgttttggcagaatctggctggctacaagagacaggaagccctgagaccatacctgagcagcgaggaagatcggaagaagggaaagaaattcgctcggtaccagctgggcgacctgctgctgcacctggaaaagaagcacggcgaggactggggaaaggtgtacgacgaggcctgggagcggattgacaagaaagtggaaggcctgagcaagcacatcaagctggaagaggaacggagaagcgaggacgcccagagcaaggccgccctgaccgactggctgcgggctaaggccagcttcgtgatcgagggcctgaaggaggccgacaaggacgagttctgcagatgcgagctgaagctgcagaagtggtacggggacctgcggggaaagcccttcgccatcgaagccgagaacagcatcctggacatcagcggcttcagcaagcagtacaactgtgccttcatctggcagaaggacggcgtgaagaagctgaacctgtacctgatcatcaactacttcaagggcggcaagctgcggttcaagaagatcaaacctgaagccttcgaagccaacagattctacaccgtgatcaacaaaaagagcggcgagatcgtgcccatggaggtgaacttcaacttcgacgaccccaacctgatcatcctgcctctggcctttggcaagagacagggcagagaattcatctggaacgacctgctgtccctggaaaccggcagcctgaagctggccaacggaagagtgatcgagaagacactgtacaacagaagaacccggcaggatgagcctgccctgttcgtggccctgaccttcgagcggcgggaggtcctggactcctccaatatcaaaccaatgaacctgatcggcgtggcaagaggcgaaaacatccccgccgtgatcgccctgaccgaccccgagggctgcccactgagccggtttaaggatagcctgggaaacccaacccacatcctgagaatcggcgagagctataaggagaagcagcggaccatccaggccaagaaggaggtggagcagcggagagccggcggctacagccggaagtacgccagcaaagccaagaatctggcagacgatatggtgagaaacaccgctagagatctgctgtactacgccgtgacccaggatgccatgctgatcttcgccaacctgagccggggcttcggccggcagggcaagcggaccttcatggccgagagacagtacacacggatggaggactggctgaccgccaagctggcctacgagggcctgagcaagacctacctgtccaagacactggcccagtacacctccaagacatgcagcaactgtgggtttaccatcaccagcgccgactacgacagggtgctggagaagctgaagaagacagcaacaggctggatgaccacaattaacggcaaggagctgaaggtggagggccagattacctactacaacagatacaagagacagaacgtagtcaaggacctgtccgtcgagctggatagactgagcgaagaatctgtgaacaacgacatctcctcctggacaaagggcagaagcggagaagctctgagcctcctgaagaaaagattctcccatagacccgtgcaggagaagttcgtgtgcctgaactgcggcttcgagacacacgcagccgagcaagccgccctgaacatcgccagatcctggctgttcctgcggagccaggagtacaagaaataccagacaaacaagacaaccggcaacaccgataagagagccttcgtcgagacctggcagtccttttaccggaagaagcttaaggaggtgtggaaacctgccgtgcggtctggcggatctggcggaggctccaccagccccaagaaaaagagaaaagtctaagctgccttctgcggggcttgccttctggccatgcccttcttctctcccttgcacctgtacctcttggtctttgaataaagcctgagtaggaaggctagcaaaaaaaaaaaaaaaaaaaaaaaaaaaaaaaaaaaaaaaaaaaaaaaaaaaaaaaaaaaaaaaaaaaaaaaaaaaaaaaagcccagccggctccccaacctctaccgaggagggcacctctgagtccgccacccccgagagcggccctggcacctccaccgagcccagcgagggcagcgcacccggcagccctgccggcagccccacctccacagaggagggaaccagcaccgagcccagcgaaggcagcgccccaggcaccagcaccgagcctagtgagcaggagattaaacggatcaacaagatcagaagaagacttgtgaaagacagcaacaccaagaaggccggcaagacaggccccatgaaaaccctgctggttagagtgatgacacccgatctgagagagcggctggaaaacctgagaaagaagcctgaaaatatcccccagcccatcagcaatacatctagagccaacctgaataagctgctgaccgattacaccgaaatgaagaaggcgatcctgcatgtgtactgggaagagttccagaaggaccctgtgggcctgatgagccgggtggcccagcctgccagcaagaagatcgatcagaacaagctgaaacctgagatggacgagaagggcaacctgaccaccgccggctttgcctgctctcagtgtggccagcccctgttcgtgtacaagctggagcaggtgtctgagaagggcaaggcttacaccaactacttcggacggtgcaatgtggccgagcacgaaaagctgatcctgctggcccagctgaagcccgagaaggatagcgacgaagccgtgacatatagcctgggaaagtttgggcagagggccctggatttctacagcattcatgtgaccaaggagtccacccaccccgtgaagcccctggcccagatcgccggaaacagatacgcctccggacctgtgggaaaggccctgagcgacgcatgtatgggcacaatcgcctccttcctgtctaagtaccaggacatcatcatcgaacaccagaaggtggtgaagggcaaccagaagagactggagagcctgcgggagctggccggcaaggaaaacctggaataccctagcgtgaccctgccacctcagcctcacaccaaggagggcgttgatgcctacaacgaagtgatcgcccgggtgcgaatgtgggtgaacctgaacctgtggcagaagctgaagctaagcagagatgatgccaagcctctgctgagactgaagggattcccttcctttcctctggtcgagagacaggccaacgaagtggactggtgggacatggtgtgtaacgtgaagaagctgatcaacgagaaaaaggaggatggcaaggtgttttggcagaatctggctggctacaagagacaggaagccctgagaccatacctgagcagcgaggaagatcggaagaagggaaagaaattcgctcggtaccagctgggcgacctgctgctgcacctggaaaagaagcacggcgaggactggggaaaggtgtacgacgaggcctgggagcggattgacaagaaagtggaaggcctgagcaagcacatcaagctggaagaggaacggagaagcgaggacgcccagagcaaggccgccctgaccgactggctgcgggctaaggccagcttcgtgatcgagggcctgaaggaggccgacaaggacgagttctgcagatgcgagctgaagctgcagaagtggtacggggacctgcggggaaagcccttcgccatcgaagccgagaacagcatcctggacatcagcggcttcagcaagcagtacaactgtgccttcatctggcagaaggacggcgtgaagaagctgaacctgtacctgatcatcaactacttcaagggcggcaagctgcggttcaagaagatcaaacctgaagccttcgaagccaacagattctacaccgtgatcaacaaaaagagcggcgagatcgtgcccatggaggtgaacttcaacttcgacgaccccaacctgatcatcctgcctctggcctttggcaagagacagggcagagaattcatctggaacgacctgctgtccctggaaaccggcagcctgaagctggccaacggaagagtgatcgagaagacactgtacaacagaagaacccggcaggatgagcctgccctgttcgtggccctgaccttcgagcggcgggaggtcctggactcctccaatatcaaaccaatgaacctgatcggcgtggcaagaggcgaaaacatccccgccgtgatcgccctgaccgaccccgagggctgcccactgagccggtttaaggatagcctgggaaacccaacccacatcctgagaatcggcgagagctataaggagaagcagcggaccatccaggccaagaaggaggtggagcagcggagagccggcggctacagccggaagtacgccagcaaagccaagaatctggcagacgatatggtgagaaacaccgctagagatctgctgtactacgccgtgacccaggatgccatgctgatcttcgccaacctgagccggggcttcggccggcagggcaagcggaccttcatggccgagagacagtacacacggatggaggactggctgaccgccaagctggcctacgagggcctgagcaagacctacctgtccaagacactggcccagtacacctccaagacatgcagcaactgtgggtttaccatcaccagcgccgactacgacagggtgctggagaagctgaagaagacagcaacaggctggatgaccacaattaacggcaaggagctgaaggtggagggccagattacctactacaacagatacaagagacagaacgtagtcaaggacctgtccgtcgagctggatagactgagcgaagaatctgtgaacaacgacatctcctcctggacaaagggcagaagcggagaagctctgagcctcctgaagaaaagattctcccatagacccgtgcaggagaagttcgtgtgcctgaactgcggcttcgagacacacgcagccgagcaagccgccctgaacatcgccagatcctggctgttcctgcggagccaggagtacaagaaataccagacaaacaagacaaccggcaacaccgataagagagccttcgtcgagacctggcagtccttttaccggaagaagcttaaggaggtgtggaaacctgccgtgcggtctggcggatctggcggaggctccaccagccccaagaaaaagagaaaagtctaagctgccttctgcggggcttgccttctggccatgcccttcttctctcccttgcacctgtacctcttggtctttgaataaagcctgagtaggaaggctagcaaaaaaaaaaaaaaaaaaaaaaaaaaaaaaaaaaaaaaaaaaaaaaaaaaaaaaaaaaaaaaaaaaaaaaaaaaaaaaaa

SEQ ID NO: 10232 - RNA, 8787 nt, synthetic construct
  source 1..8787: mol_type = other RNA
aggaaataagagagaaaagaagagtaagaagaaatataagagccaccatggcccctaagaagaagcgtaaagtgagccggatgaaccacgaccaggagttcgacccccctaaggtgtaccctcccgtccccgccgagaagagaaagcccatccgggtcctgagcctgttcgatggcatcgccaccggtctgctggtgctgaaggacctgggcatccaggtggataggtacattgcctccgaggtgtgcgaggactccatcaccgtgggaatggtgcgtcatcagggcaagatcatgtacgtgggcgacgtgcggagcgtgacacagaagcatatccaggagtggggccctttcgacctggtgatcggcggcagcccttgcaatgacctgagcatcgtgaacccagcccggaagggcctgtacgagggaaccggcagactgttcttcgagttttacagactgctgcacgacgcccggcctaaggaaggcgacgaccggcccttcttttggctgttcgagaatgtggtggccatgggagtcagcgacaagcgggatattagccggttcctggagagcaaccccgtgatgatcgatgccaaggaagtgagcgccgcccaccgggccagatacttctggggcaatctgcctggcatgaacagacccctggccagcaccgtgaacgacaagctggagctgcaggagtgcctggagcacggccggatcgccaagttcagcaaggtgagaaccatcaccacccgaagcaacagcatcaaacaaggcaaggaccagcactttcctgtgttcatgaacgagaaggaggacatcctgtggtgtaccgagatggagagagtgttcgggttcccagtccactacacagatgtcagcaacatgtctagactggccagacagagactgctgggaagaagctggtccgtccctgtgatcagacacctgttcgcccctctgaaggagtacttcgcctgcgtgagcagcggcaacagcaacgccaacagccggggccccagcttctctagcggcctggtgccactgtccctgagagggagccacatgggccccatggagatctacaaaaccgtgagcgcctggaagcggcagcctgtgcgcgtgctgagcctgtttcggaatatcgataaagtcctgaaaagcctgggattcctggagagcggctctggctccggcggtggcaccctgaagtacgtggaggatgtgacaaacgtggtcagacgggatgtggagaagtggggccccttcgatctggtgtacggcagcacccaacccctgggcagctcttgtgaccggtgccctggctggtacatgtttcagttccaccggatcctgcagtacgccctgccgagacaggagtcccagcggccattcttttggattttcatggacaacttgctgctgaccgaggatgaccaggaaactaccactcggttcctgcagaccgaagccgtgaccctgcaggacgtgagaggccgggactaccagaacgccatgcgggtgtggtccaacatccctggactgaaaagcaagcacgcacctctgacccctaaagaagaggagtacctgcaggcccaggtgcggagcagaagcaagctggacgcccctaaggtggatctgctggtgaagaattgcctcctgcccctgagagagtacttcaagtatttcagccagaatagtctgcccctgggaggcagcggcggcggcccccaggagagcgtgaccttcagggacgtggccgtggacttcacctgggaggagtggggccagctggaccccagccagaaggagctgtacagggaggtgatgctggagaactacggcaacctggcctgcctgggcctggccgtgagcaagcccgacgtgatcctgcagctggagaggggcgagatcccctggatgagcgagaggaaggtgcccgagggcatctgccccgactgggaggccaggggcggcccaagcagcggcgcccctcctcccagcggcggcaggcggcccaagcagcggcgcccctcctcccagcggcggcagcccagccggctccccaacctctaccgaggagggcacctctgagtccgccacccccgagagcggccctggcacctccaccgagcccagcgagggcagcgcacccggcagccctgccggcagccccacctccacagaggagggaaccagcaccgagcccagcgaaggcagcgccccaggcaccagcaccgagcctagtgagcaggagattaaacggatcaacaagatcagaagaagacttgtgaaagacagcaacaccaagaaggccggcaagacaggccccatgaaaaccctgctggttagagtgatgacacccgatctgagagagcggctggaaaacctgagaaagaagcctgaaaatatcccccagcccatcagcaatacatctagagccaacctgaataagctgctgaccgattacaccgaaatgaagaaggcgatcctgcatgtgtactgggaagagttccagaaggaccctgtgggcctgatgagccgggtggcccagcctgccagcaagaagatcgatcagaacaagctgaaacctgagatggacgagaagggcaacctgaccaccgccggctttgcctgctctcagtgtggccagcccctgttcgtgtacaagctggagcaggtgtctgagaagggcaaggcttacaccaactacttcggacggtgcaatgtggccgagcacgaaaagctgatcctgctggcccagctgaagcccgagaaggatagcgacgaagccgtgacatatagcctgggaaagtttgggcagagggccctggatttctacagcattcatgtgaccaaggagtccacccaccccgtgaagcccctggcccagatcgccggaaacagatacgcctccggacctgtgggaaaggccctgagcgacgcatgtatgggcacaatcgcctccttcctgtctaagtaccaggacatcatcatcgaacaccagaaggtggtgaagggcaaccagaagagactggagagcctgcgggagctggccggcaaggaaaacctggaataccctagcgtgaccctgccacctcagcctcacaccaaggagggcgttgatgcctacaacgaagtgatcgcccgggtgcgaatgtgggtgaacctgaacctgtggcagaagctgaagctaagcagagatgatgccaagcctctgctgagactgaagggattcccttcctttcctctggtcgagagacaggccaacgaagtggactggtgggacatggtgtgtaacgtgaagaagctgatcaacgagaaaaaggaggatggcaaggtgttttggcagaatctggctggctacaagagacaggaagccctgagaccatacctgagcagcgaggaagatcggaagaagggaaagaaattcgctcggtaccagctgggcgacctgctgctgcacctggaaaagaagcacggcgaggactggggaaaggtgtacgacgaggcctgggagcggattgacaagaaagtggaaggcctgagcaagcacatcaagctggaagaggaacggagaagcgaggacgcccagagcaaggccgccctgaccgactggctgcgggctaaggccagcttcgtgatcgagggcctgaaggaggccgacaaggacgagttctgcagatgcgagctgaagctgcagaagtggtacggggacctgcggggaaagcccttcgccatcgaagccgagaacagcatcctggacatcagcggcttcagcaagcagtacaactgtgccttcatctggcagaaggacggcgtgaagaagctgaacctgtacctgatcatcaactacttcaagggcggcaagctgcggttcaagaagatcaaacctgaagccttcgaagccaacagattctacaccgtgatcaacaaaaagagcggcgagatcgtgcccatggaggtgaacttcaacttcgacgaccccaacctgatcatcctgcctctggcctttggcaagagacagggcagagaattcatctggaacgacctgctgtccctggaaaccggcagcctgaagctggccaacggaagagtgatcgagaagacactgtacaacagaagaacccggcaggatgagcctgccctgttcgtggccctgaccttcgagcggcgggaggtcctggactcctccaatatcaaaccaatgaacctgatcggcgtggcaagaggcgaaaacatccccgccgtgatcgccctgaccgaccccgagggctgcccactgagccggtttaaggatagcctgggaaacccaacccacatcctgagaatcggcgagagctataaggagaagcagcggaccatccaggccaagaaggaggtggagcagcggagagccggcggctacagccggaagtacgccagcaaagccaagaatctggcagacgatatggtgagaaacaccgctagagatctgctgtactacgccgtgacccaggatgccatgctgatcttcgccaacctgagccggggcttcggccggcagggcaagcggaccttcatggccgagagacagtacacacggatggaggactggctgaccgccaagctggcctacgagggcctgagcaagacctacctgtccaagacactggcccagtacacctccaagacatgcagcaactgtgggtttaccatcaccagcgccgactacgacagggtgctggagaagctgaagaagacagcaacaggctggatgaccacaattaacggcaaggagctgaaggtggagggccagattacctactacaacagatacaagagacagaacgtagtcaaggacctgtccgtcgagctggatagactgagcgaagaatctgtgaacaacgacatctcctcctggacaaagggcagaagcggagaagctctgagcctcctgaagaaaagattctcccatagacccgtgcaggagaagttcgtgtgcctgaactgcggcttcgagacacacgcagccgagcaagccgccctgaacatcgccagatcctggctgttcctgcggagccaggagtacaagaaataccagacaaacaagacaaccggcaacaccgataagagagccttcgtcgagacctggcagtccttttaccggaagaagcttaaggaggtgtggaaacctgccgtgcggtctggcggatctggcggaggctccaccagccccaagaaaaagagaaaagtctaagctgccttctgcggggcttgccttctggccatgcccttcttctctcccttgcacctgtacctcttggtctttgaataaagcctgagtaggaaggctagcaaaaaaaaaaaaaaaaaaaaaaaaaaaaaaaaaaaaaaaaaaaaaaaaaaaaaaaaaaaaaaaaaaaaaaaaaaaaaaaagcccagccggctccccaacctctaccgaggagggcacctctgagtccgccacccccgagagcggccctggcacctccaccgagcccagcgagggcagcgcacccggcagccctgccggcagccccacctccacagaggagggaaccagcaccgagcccagcgaaggcagcgccccaggcaccagcaccgagcctagtgagcaggagattaaacggatcaacaagatcagaagaagacttgtgaaagacagcaacaccaagaaggccggcaagacaggccccatgaaaaccctgctggttagagtgatgacacccgatctgagagagcggctggaaaacctgagaaagaagcctgaaaatatcccccagcccatcagcaatacatctagagccaacctgaataagctgctgaccgattacaccgaaatgaagaaggcgatcctgcatgtgtactgggaagagttccagaaggaccctgtgggcctgatgagccgggtggcccagcctgccagcaagaagatcgatcagaacaagctgaaacctgagatggacgagaagggcaacctgaccaccgccggctttgcctgctctcagtgtggccagcccctgttcgtgtacaagctggagcaggtgtctgagaagggcaaggcttacaccaactacttcggacggtgcaatgtggccgagcacgaaaagctgatcctgctggcccagctgaagcccgagaaggatagcgacgaagccgtgacatatagcctgggaaagtttgggcagagggccctggatttctacagcattcatgtgaccaaggagtccacccaccccgtgaagcccctggcccagatcgccggaaacagatacgcctccggacctgtgggaaaggccctgagcgacgcatgtatgggcacaatcgcctccttcctgtctaagtaccaggacatcatcatcgaacaccagaaggtggtgaagggcaaccagaagagactggagagcctgcgggagctggccggcaaggaaaacctggaataccctagcgtgaccctgccacctcagcctcacaccaaggagggcgttgatgcctacaacgaagtgatcgcccgggtgcgaatgtgggtgaacctgaacctgtggcagaagctgaagctaagcagagatgatgccaagcctctgctgagactgaagggattcccttcctttcctctggtcgagagacaggccaacgaagtggactggtgggacatggtgtgtaacgtgaagaagctgatcaacgagaaaaaggaggatggcaaggtgttttggcagaatctggctggctacaagagacaggaagccctgagaccatacctgagcagcgaggaagatcggaagaagggaaagaaattcgctcggtaccagctgggcgacctgctgctgcacctggaaaagaagcacggcgaggactggggaaaggtgtacgacgaggcctgggagcggattgacaagaaagtggaaggcctgagcaagcacatcaagctggaagaggaacggagaagcgaggacgcccagagcaaggccgccctgaccgactggctgcgggctaaggccagcttcgtgatcgagggcctgaaggaggccgacaaggacgagttctgcagatgcgagctgaagctgcagaagtggtacggggacctgcggggaaagcccttcgccatcgaagccgagaacagcatcctggacatcagcggcttcagcaagcagtacaactgtgccttcatctggcagaaggacggcgtgaagaagctgaacctgtacctgatcatcaactacttcaagggcggcaagctgcggttcaagaagatcaaacctgaagccttcgaagccaacagattctacaccgtgatcaacaaaaagagcggcgagatcgtgcccatggaggtgaacttcaacttcgacgaccccaacctgatcatcctgcctctggcctttggcaagagacagggcagagaattcatctggaacgacctgctgtccctggaaaccggcagcctgaagctggccaacggaagagtgatcgagaagacactgtacaacagaagaacccggcaggatgagcctgccctgttcgtggccctgaccttcgagcggcgggaggtcctggactcctccaatatcaaaccaatgaacctgatcggcgtggcaagaggcgaaaacatccccgccgtgatcgccctgaccgaccccgagggctgcccactgagccggtttaaggatagcctgggaaacccaacccacatcctgagaatcggcgagagctataaggagaagcagcggaccatccaggccaagaaggaggtggagcagcggagagccggcggctacagccggaagtacgccagcaaagccaagaatctggcagacgatatggtgagaaacaccgctagagatctgctgtactacgccgtgacccaggatgccatgctgatcttcgccaacctgagccggggcttcggccggcagggcaagcggaccttcatggccgagagacagtacacacggatggaggactggctgaccgccaagctggcctacgagggcctgagcaagacctacctgtccaagacactggcccagtacacctccaagacatgcagcaactgtgggtttaccatcaccagcgccgactacgacagggtgctggagaagctgaagaagacagcaacaggctggatgaccacaattaacggcaaggagctgaaggtggagggccagattacctactacaacagatacaagagacagaacgtagtcaaggacctgtccgtcgagctggatagactgagcgaagaatctgtgaacaacgacatctcctcctggacaaagggcagaagcggagaagctctgagcctcctgaagaaaagattctcccatagacccgtgcaggagaagttcgtgtgcctgaactgcggcttcgagacacacgcagccgagcaagccgccctgaacatcgccagatcctggctgttcctgcggagccaggagtacaagaaataccagacaaacaagacaaccggcaacaccgataagagagccttcgtcgagacctggcagtccttttaccggaagaagcttaaggaggtgtggaaacctgccgtgcggtctggcggatctggcggaggctccaccagccccaagaaaaagagaaaagtctaagctgccttctgcggggcttgccttctggccatgcccttcttctctcccttgcacctgtacctcttggtctttgaataaagcctgagtaggaaggctagcaaaaaaaaaaaaaaaaaaaaaaaaaaaaaaaaaaaaaaaaaaaaaaaaaaaaaaaaaaaaaaaaaaaaaaaaaaaaaaaa

SEQ ID NO: 10233 - RNA, 8787 nt, synthetic construct
  source 1..8787: mol_type = other RNA
aggaaataagagagaaaagaagagtaagaagaaatataagagccaccatggcccctaagaagaagcgtaaagtgagccggatgaaccacgaccaggagttcgacccccctaaggtgtaccctcccgtccccgccgagaagagaaagcccatccgggtcctgagcctgttcgatggcatcgccaccggtctgctggtgctgaaggacctgggcatccaggtggataggtacattgcctccgaggtgtgcgaggactccatcaccgtgggaatggtgcgtcatcagggcaagatcatgtacgtgggcgacgtgcggagcgtgacacagaagcatatccaggagtggggccctttcgacctggtgatcggcggcagcccttgcaatgacctgagcatcgtgaacccagcccggaagggcctgtacgagggaaccggcagactgttcttcgagttttacagactgctgcacgacgcccggcctaaggaaggcgacgaccggcccttcttttggctgttcgagaatgtggtggccatgggagtcagcgacaagcgggatattagccggttcctggagagcaaccccgtgatgatcgatgccaaggaagtgagcgccgcccaccgggccagatacttctggggcaatctgcctggcatgaacagacccctggccagcaccgtgaacgacaagctggagctgcaggagtgcctggagcacggccggatcgccaagttcagcaaggtgagaaccatcaccacccgaagcaacagcatcaaacaaggcaaggaccagcactttcctgtgttcatgaacgagaaggaggacatcctgtggtgtaccgagatggagagagtgttcgggttcccagtccactacacagatgtcagcaacatgtctagactggccagacagagactgctgggaagaagctggtccgtccctgtgatcagacacctgttcgcccctctgaaggagtacttcgcctgcgtgagcagcggcaacagcaacgccaacagccggggccccagcttctctagcggcctggtgccactgtccctgagagggagccacatgggccccatggagatctacaaaaccgtgagcgcctggaagcggcagcctgtgcgcgtgctgagcctgtttcggaatatcgataaagtcctgaaaagcctgggattcctggagagcggctctggctccggcggtggcaccctgaagtacgtggaggatgtgacaaacgtggtcagacgggatgtggagaagtggggccccttcgatctggtgtacggcagcacccaacccctgggcagctcttgtgaccggtgccctggctggtacatgtttcagttccaccggatcctgcagtacgccctgccgagacaggagtcccagcggccattcttttggattttcatggacaacttgctgctgaccgaggatgaccaggaaactaccactcggttcctgcagaccgaagccgtgaccctgcaggacgtgagaggccgggactaccagaacgccatgcgggtgtggtccaacatccctggactgaaaagcaagcacgcacctctgacccctaaagaagaggagtacctgcaggcccaggtgcggagcagaagcaagctggacgcccctaaggtggatctgctggtgaagaattgcctcctgcccctgagagagtacttcaagtatttcagccagaatagtctgcccctgggaggcagcggcggcggcgtggtgctgctggaggccttcgaggacgtggccgtgtacttcacccagaaggagtgggccctgctggacgacggcgacaaggccctgtacagggaccagatgctgaggaactaccaggccctgatcagcctgggctacaggggccccacccccgccctgatcaacaggatccagaggggcgagatggagctgtgggtgtgcgacaaggactacggcgagaagagcagcctggagggcctgttcggcggcccaagcagcggcgcccctcctcccagcggcggcaggcggcccaagcagcggcgcccctcctcccagcggcggcagcccagccggctccccaacctctaccgaggagggcacctctgagtccgccacccccgagagcggccctggcacctccaccgagcccagcgagggcagcgcacccggcagccctgccggcagccccacctccacagaggagggaaccagcaccgagcccagcgaaggcagcgccccaggcaccagcaccgagcctagtgagcaggagattaaacggatcaacaagatcagaagaagacttgtgaaagacagcaacaccaagaaggccggcaagacaggccccatgaaaaccctgctggttagagtgatgacacccgatctgagagagcggctggaaaacctgagaaagaagcctgaaaatatcccccagcccatcagcaatacatctagagccaacctgaataagctgctgaccgattacaccgaaatgaagaaggcgatcctgcatgtgtactgggaagagttccagaaggaccctgtgggcctgatgagccgggtggcccagcctgccagcaagaagatcgatcagaacaagctgaaacctgagatggacgagaagggcaacctgaccaccgccggctttgcctgctctcagtgtggccagcccctgttcgtgtacaagctggagcaggtgtctgagaagggcaaggcttacaccaactacttcggacggtgcaatgtggccgagcacgaaaagctgatcctgctggcccagctgaagcccgagaaggatagcgacgaagccgtgacatatagcctgggaaagtttgggcagagggccctggatttctacagcattcatgtgaccaaggagtccacccaccccgtgaagcccctggcccagatcgccggaaacagatacgcctccggacctgtgggaaaggccctgagcgacgcatgtatgggcacaatcgcctccttcctgtctaagtaccaggacatcatcatcgaacaccagaaggtggtgaagggcaaccagaagagactggagagcctgcgggagctggccggcaaggaaaacctggaataccctagcgtgaccctgccacctcagcctcacaccaaggagggcgttgatgcctacaacgaagtgatcgcccgggtgcgaatgtgggtgaacctgaacctgtggcagaagctgaagctaagcagagatgatgccaagcctctgctgagactgaagggattcccttcctttcctctggtcgagagacaggccaacgaagtggactggtgggacatggtgtgtaacgtgaagaagctgatcaacgagaaaaaggaggatggcaaggtgttttggcagaatctggctggctacaagagacaggaagccctgagaccatacctgagcagcgaggaagatcggaagaagggaaagaaattcgctcggtaccagctgggcgacctgctgctgcacctggaaaagaagcacggcgaggactggggaaaggtgtacgacgaggcctgggagcggattgacaagaaagtggaaggcctgagcaagcacatcaagctggaagaggaacggagaagcgaggacgcccagagcaaggccgccctgaccgactggctgcgggctaaggccagcttcgtgatcgagggcctgaaggaggccgacaaggacgagttctgcagatgcgagctgaagctgcagaagtggtacggggacctgcggggaaagcccttcgccatcgaagccgagaacagcatcctggacatcagcggcttcagcaagcagtacaactgtgccttcatctggcagaaggacggcgtgaagaagctgaacctgtacctgatcatcaactacttcaagggcggcaagctgcggttcaagaagatcaaacctgaagccttcgaagccaacagattctacaccgtgatcaacaaaaagagcggcgagatcgtgcccatggaggtgaacttcaacttcgacgaccccaacctgatcatcctgcctctggcctttggcaagagacagggcagagaattcatctggaacgacctgctgtccctggaaaccggcagcctgaagctggccaacggaagagtgatcgagaagacactgtacaacagaagaacccggcaggatgagcctgccctgttcgtggccctgaccttcgagcggcgggaggtcctggactcctccaatatcaaaccaatgaacctgatcggcgtggcaagaggcgaaaacatccccgccgtgatcgccctgaccgaccccgagggctgcccactgagccggtttaaggatagcctgggaaacccaacccacatcctgagaatcggcgagagctataaggagaagcagcggaccatccaggccaagaaggaggtggagcagcggagagccggcggctacagccggaagtacgccagcaaagccaagaatctggcagacgatatggtgagaaacaccgctagagatctgctgtactacgccgtgacccaggatgccatgctgatcttcgccaacctgagccggggcttcggccggcagggcaagcggaccttcatggccgagagacagtacacacggatggaggactggctgaccgccaagctggcctacgagggcctgagcaagacctacctgtccaagacactggcccagtacacctccaagacatgcagcaactgtgggtttaccatcaccagcgccgactacgacagggtgctggagaagctgaagaagacagcaacaggctggatgaccacaattaacggcaaggagctgaaggtggagggccagattacctactacaacagatacaagagacagaacgtagtcaaggacctgtccgtcgagctggatagactgagcgaagaatctgtgaacaacgacatctcctcctggacaaagggcagaagcggagaagctctgagcctcctgaagaaaagattctcccatagacccgtgcaggagaagttcgtgtgcctgaactgcggcttcgagacacacgcagccgagcaagccgccctgaacatcgccagatcctggctgttcctgcggagccaggagtacaagaaataccagacaaacaagacaaccggcaacaccgataagagagccttcgtcgagacctggcagtccttttaccggaagaagcttaaggaggtgtggaaacctgccgtgcggtctggcggatctggcggaggctccaccagccccaagaaaaagagaaaagtctaagctgccttctgcggggcttgccttctggccatgcccttcttctctcccttgcacctgtacctcttggtctttgaataaagcctgagtaggaaggctagcaaaaaaaaaaaaaaaaaaaaaaaaaaaaaaaaaaaaaaaaaaaaaaaaaaaaaaaaaaaaaaaaaaaaaaaaaaaaaaaagcccagccggctccccaacctctaccgaggagggcacctctgagtccgccacccccgagagcggccctggcacctccaccgagcccagcgagggcagcgcacccggcagccctgccggcagccccacctccacagaggagggaaccagcaccgagcccagcgaaggcagcgccccaggcaccagcaccgagcctagtgagcaggagattaaacggatcaacaagatcagaagaagacttgtgaaagacagcaacaccaagaaggccggcaagacaggccccatgaaaaccctgctggttagagtgatgacacccgatctgagagagcggctggaaaacctgagaaagaagcctgaaaatatcccccagcccatcagcaatacatctagagccaacctgaataagctgctgaccgattacaccgaaatgaagaaggcgatcctgcatgtgtactgggaagagttccagaaggaccctgtgggcctgatgagccgggtggcccagcctgccagcaagaagatcgatcagaacaagctgaaacctgagatggacgagaagggcaacctgaccaccgccggctttgcctgctctcagtgtggccagcccctgttcgtgtacaagctggagcaggtgtctgagaagggcaaggcttacaccaactacttcggacggtgcaatgtggccgagcacgaaaagctgatcctgctggcccagctgaagcccgagaaggatagcgacgaagccgtgacatatagcctgggaaagtttgggcagagggccctggatttctacagcattcatgtgaccaaggagtccacccaccccgtgaagcccctggcccagatcgccggaaacagatacgcctccggacctgtgggaaaggccctgagcgacgcatgtatgggcacaatcgcctccttcctgtctaagtaccaggacatcatcatcgaacaccagaaggtggtgaagggcaaccagaagagactggagagcctgcgggagctggccggcaaggaaaacctggaataccctagcgtgaccctgccacctcagcctcacaccaaggagggcgttgatgcctacaacgaagtgatcgcccgggtgcgaatgtgggtgaacctgaacctgtggcagaagctgaagctaagcagagatgatgccaagcctctgctgagactgaagggattcccttcctttcctctggtcgagagacaggccaacgaagtggactggtgggacatggtgtgtaacgtgaagaagctgatcaacgagaaaaaggaggatggcaaggtgttttggcagaatctggctggctacaagagacaggaagccctgagaccatacctgagcagcgaggaagatcggaagaagggaaagaaattcgctcggtaccagctgggcgacctgctgctgcacctggaaaagaagcacggcgaggactggggaaaggtgtacgacgaggcctgggagcggattgacaagaaagtggaaggcctgagcaagcacatcaagctggaagaggaacggagaagcgaggacgcccagagcaaggccgccctgaccgactggctgcgggctaaggccagcttcgtgatcgagggcctgaaggaggccgacaaggacgagttctgcagatgcgagctgaagctgcagaagtggtacggggacctgcggggaaagcccttcgccatcgaagccgagaacagcatcctggacatcagcggcttcagcaagcagtacaactgtgccttcatctggcagaaggacggcgtgaagaagctgaacctgtacctgatcatcaactacttcaagggcggcaagctgcggttcaagaagatcaaacctgaagccttcgaagccaacagattctacaccgtgatcaacaaaaagagcggcgagatcgtgcccatggaggtgaacttcaacttcgacgaccccaacctgatcatcctgcctctggcctttggcaagagacagggcagagaattcatctggaacgacctgctgtccctggaaaccggcagcctgaagctggccaacggaagagtgatcgagaagacactgtacaacagaagaacccggcaggatgagcctgccctgttcgtggccctgaccttcgagcggcgggaggtcctggactcctccaatatcaaaccaatgaacctgatcggcgtggcaagaggcgaaaacatccccgccgtgatcgccctgaccgaccccgagggctgcccactgagccggtttaaggatagcctgggaaacccaacccacatcctgagaatcggcgagagctataaggagaagcagcggaccatccaggccaagaaggaggtggagcagcggagagccggcggctacagccggaagtacgccagcaaagccaagaatctggcagacgatatggtgagaaacaccgctagagatctgctgtactacgccgtgacccaggatgccatgctgatcttcgccaacctgagccggggcttcggccggcagggcaagcggaccttcatggccgagagacagtacacacggatggaggactggctgaccgccaagctggcctacgagggcctgagcaagacctacctgtccaagacactggcccagtacacctccaagacatgcagcaactgtgggtttaccatcaccagcgccgactacgacagggtgctggagaagctgaagaagacagcaacaggctggatgaccacaattaacggcaaggagctgaaggtggagggccagattacctactacaacagatacaagagacagaacgtagtcaaggacctgtccgtcgagctggatagactgagcgaagaatctgtgaacaacgacatctcctcctggacaaagggcagaagcggagaagctctgagcctcctgaagaaaagattctcccatagacccgtgcaggagaagttcgtgtgcctgaactgcggcttcgagacacacgcagccgagcaagccgccctgaacatcgccagatcctggctgttcctgcggagccaggagtacaagaaataccagacaaacaagacaaccggcaacaccgataagagagccttcgtcgagacctggcagtccttttaccggaagaagcttaaggaggtgtggaaacctgccgtgcggtctggcggatctggcggaggctccaccagccccaagaaaaagagaaaagtctaagctgccttctgcggggcttgccttctggccatgcccttcttctctcccttgcacctgtacctcttggtctttgaataaagcctgagtaggaaggctagcaaaaaaaaaaaaaaaaaaaaaaaaaaaaaaaaaaaaaaaaaaaaaaaaaaaaaaaaaaaaaaaaaaaaaaaaaaaaaaaa

SEQ ID NO: 10234 - RNA, 8787 nt, synthetic construct
  source 1..8787: mol_type = other RNA
aggaaataagagagaaaagaagagtaagaagaaatataagagccaccatggcccctaagaagaagcgtaaagtgagccggatgaaccacgaccaggagttcgacccccctaaggtgtaccctcccgtccccgccgagaagagaaagcccatccgggtcctgagcctgttcgatggcatcgccaccggtctgctggtgctgaaggacctgggcatccaggtggataggtacattgcctccgaggtgtgcgaggactccatcaccgtgggaatggtgcgtcatcagggcaagatcatgtacgtgggcgacgtgcggagcgtgacacagaagcatatccaggagtggggccctttcgacctggtgatcggcggcagcccttgcaatgacctgagcatcgtgaacccagcccggaagggcctgtacgagggaaccggcagactgttcttcgagttttacagactgctgcacgacgcccggcctaaggaaggcgacgaccggcccttcttttggctgttcgagaatgtggtggccatgggagtcagcgacaagcgggatattagccggttcctggagagcaaccccgtgatgatcgatgccaaggaagtgagcgccgcccaccgggccagatacttctggggcaatctgcctggcatgaacagacccctggccagcaccgtgaacgacaagctggagctgcaggagtgcctggagcacggccggatcgccaagttcagcaaggtgagaaccatcaccacccgaagcaacagcatcaaacaaggcaaggaccagcactttcctgtgttcatgaacgagaaggaggacatcctgtggtgtaccgagatggagagagtgttcgggttcccagtccactacacagatgtcagcaacatgtctagactggccagacagagactgctgggaagaagctggtccgtccctgtgatcagacacctgttcgcccctctgaaggagtacttcgcctgcgtgagcagcggcaacagcaacgccaacagccggggccccagcttctctagcggcctggtgccactgtccctgagagggagccacatgggccccatggagatctacaaaaccgtgagcgcctggaagcggcagcctgtgcgcgtgctgagcctgtttcggaatatcgataaagtcctgaaaagcctgggattcctggagagcggctctggctccggcggtggcaccctgaagtacgtggaggatgtgacaaacgtggtcagacgggatgtggagaagtggggccccttcgatctggtgtacggcagcacccaacccctgggcagctcttgtgaccggtgccctggctggtacatgtttcagttccaccggatcctgcagtacgccctgccgagacaggagtcccagcggccattcttttggattttcatggacaacttgctgctgaccgaggatgaccaggaaactaccactcggttcctgcagaccgaagccgtgaccctgcaggacgtgagaggccgggactaccagaacgccatgcgggtgtggtccaacatccctggactgaaaagcaagcacgcacctctgacccctaaagaagaggagtacctgcaggcccaggtgcggagcagaagcaagctggacgcccctaaggtggatctgctggtgaagaattgcctcctgcccctgagagagtacttcaagtatttcagccagaatagtctgcccctgggaggcagcggcggcggccaggccgaggtgaccttcgaggacgtggccgtgctgctgagccaggaggagtggggcctgctgggccccagccagaagggcctgtacagggaggtgatgctggagacctacaggaacctgctgagcctgggcgtgggcctggccgaccccaagcccgaggtgatcgtgcagctggagaggggcgacgagctgtgggtgctggacatgcacggcgccgagcagcccagcgtggacggcagcgccggcggcccaagcagcggcgcccctcctcccagcggcggcaggcggcccaagcagcggcgcccctcctcccagcggcggcagcccagccggctccccaacctctaccgaggagggcacctctgagtccgccacccccgagagcggccctggcacctccaccgagcccagcgagggcagcgcacccggcagccctgccggcagccccacctccacagaggagggaaccagcaccgagcccagcgaaggcagcgccccaggcaccagcaccgagcctagtgagcaggagattaaacggatcaacaagatcagaagaagacttgtgaaagacagcaacaccaagaaggccggcaagacaggccccatgaaaaccctgctggttagagtgatgacacccgatctgagagagcggctggaaaacctgagaaagaagcctgaaaatatcccccagcccatcagcaatacatctagagccaacctgaataagctgctgaccgattacaccgaaatgaagaaggcgatcctgcatgtgtactgggaagagttccagaaggaccctgtgggcctgatgagccgggtggcccagcctgccagcaagaagatcgatcagaacaagctgaaacctgagatggacgagaagggcaacctgaccaccgccggctttgcctgctctcagtgtggccagcccctgttcgtgtacaagctggagcaggtgtctgagaagggcaaggcttacaccaactacttcggacggtgcaatgtggccgagcacgaaaagctgatcctgctggcccagctgaagcccgagaaggatagcgacgaagccgtgacatatagcctgggaaagtttgggcagagggccctggatttctacagcattcatgtgaccaaggagtccacccaccccgtgaagcccctggcccagatcgccggaaacagatacgcctccggacctgtgggaaaggccctgagcgacgcatgtatgggcacaatcgcctccttcctgtctaagtaccaggacatcatcatcgaacaccagaaggtggtgaagggcaaccagaagagactggagagcctgcgggagctggccggcaaggaaaacctggaataccctagcgtgaccctgccacctcagcctcacaccaaggagggcgttgatgcctacaacgaagtgatcgcccgggtgcgaatgtgggtgaacctgaacctgtggcagaagctgaagctaagcagagatgatgccaagcctctgctgagactgaagggattcccttcctttcctctggtcgagagacaggccaacgaagtggactggtgggacatggtgtgtaacgtgaagaagctgatcaacgagaaaaaggaggatggcaaggtgttttggcagaatctggctggctacaagagacaggaagccctgagaccatacctgagcagcgaggaagatcggaagaagggaaagaaattcgctcggtaccagctgggcgacctgctgctgcacctggaaaagaagcacggcgaggactggggaaaggtgtacgacgaggcctgggagcggattgacaagaaagtggaaggcctgagcaagcacatcaagctggaagaggaacggagaagcgaggacgcccagagcaaggccgccctgaccgactggctgcgggctaaggccagcttcgtgatcgagggcctgaaggaggccgacaaggacgagttctgcagatgcgagctgaagctgcagaagtggtacggggacctgcggggaaagcccttcgccatcgaagccgagaacagcatcctggacatcagcggcttcagcaagcagtacaactgtgccttcatctggcagaaggacggcgtgaagaagctgaacctgtacctgatcatcaactacttcaagggcggcaagctgcggttcaagaagatcaaacctgaagccttcgaagccaacagattctacaccgtgatcaacaaaaagagcggcgagatcgtgcccatggaggtgaacttcaacttcgacgaccccaacctgatcatcctgcctctggcctttggcaagagacagggcagagaattcatctggaacgacctgctgtccctggaaaccggcagcctgaagctggccaacggaagagtgatcgagaagacactgtacaacagaagaacccggcaggatgagcctgccctgttcgtggccctgaccttcgagcggcgggaggtcctggactcctccaatatcaaaccaatgaacctgatcggcgtggcaagaggcgaaaacatccccgccgtgatcgccctgaccgaccccgagggctgcccactgagccggtttaaggatagcctgggaaacccaacccacatcctgagaatcggcgagagctataaggagaagcagcggaccatccaggccaagaaggaggtggagcagcggagagccggcggctacagccggaagtacgccagcaaagccaagaatctggcagacgatatggtgagaaacaccgctagagatctgctgtactacgccgtgacccaggatgccatgctgatcttcgccaacctgagccggggcttcggccggcagggcaagcggaccttcatggccgagagacagtacacacggatggaggactggctgaccgccaagctggcctacgagggcctgagcaagacctacctgtccaagacactggcccagtacacctccaagacatgcagcaactgtgggtttaccatcaccagcgccgactacgacagggtgctggagaagctgaagaagacagcaacaggctggatgaccacaattaacggcaaggagctgaaggtggagggccagattacctactacaacagatacaagagacagaacgtagtcaaggacctgtccgtcgagctggatagactgagcgaagaatctgtgaacaacgacatctcctcctggacaaagggcagaagcggagaagctctgagcctcctgaagaaaagattctcccatagacccgtgcaggagaagttcgtgtgcctgaactgcggcttcgagacacacgcagccgagcaagccgccctgaacatcgccagatcctggctgttcctgcggagccaggagtacaagaaataccagacaaacaagacaaccggcaacaccgataagagagccttcgtcgagacctggcagtccttttaccggaagaagcttaaggaggtgtggaaacctgccgtgcggtctggcggatctggcggaggctccaccagccccaagaaaaagagaaaagtctaagctgccttctgcggggcttgccttctggccatgcccttcttctctcccttgcacctgtacctcttggtctttgaataaagcctgagtaggaaggctagcaaaaaaaaaaaaaaaaaaaaaaaaaaaaaaaaaaaaaaaaaaaaaaaaaaaaaaaaaaaaaaaaaaaaaaaaaaaaaaaagcccagccggctccccaacctctaccgaggagggcacctctgagtccgccacccccgagagcggccctggcacctccaccgagcccagcgagggcagcgcacccggcagccctgccggcagccccacctccacagaggagggaaccagcaccgagcccagcgaaggcagcgccccaggcaccagcaccgagcctagtgagcaggagattaaacggatcaacaagatcagaagaagacttgtgaaagacagcaacaccaagaaggccggcaagacaggccccatgaaaaccctgctggttagagtgatgacacccgatctgagagagcggctggaaaacctgagaaagaagcctgaaaatatcccccagcccatcagcaatacatctagagccaacctgaataagctgctgaccgattacaccgaaatgaagaaggcgatcctgcatgtgtactgggaagagttccagaaggaccctgtgggcctgatgagccgggtggcccagcctgccagcaagaagatcgatcagaacaagctgaaacctgagatggacgagaagggcaacctgaccaccgccggctttgcctgctctcagtgtggccagcccctgttcgtgtacaagctggagcaggtgtctgagaagggcaaggcttacaccaactacttcggacggtgcaatgtggccgagcacgaaaagctgatcctgctggcccagctgaagcccgagaaggatagcgacgaagccgtgacatatagcctgggaaagtttgggcagagggccctggatttctacagcattcatgtgaccaaggagtccacccaccccgtgaagcccctggcccagatcgccggaaacagatacgcctccggacctgtgggaaaggccctgagcgacgcatgtatgggcacaatcgcctccttcctgtctaagtaccaggacatcatcatcgaacaccagaaggtggtgaagggcaaccagaagagactggagagcctgcgggagctggccggcaaggaaaacctggaataccctagcgtgaccctgccacctcagcctcacaccaaggagggcgttgatgcctacaacgaagtgatcgcccgggtgcgaatgtgggtgaacctgaacctgtggcagaagctgaagctaagcagagatgatgccaagcctctgctgagactgaagggattcccttcctttcctctggtcgagagacaggccaacgaagtggactggtgggacatggtgtgtaacgtgaagaagctgatcaacgagaaaaaggaggatggcaaggtgttttggcagaatctggctggctacaagagacaggaagccctgagaccatacctgagcagcgaggaagatcggaagaagggaaagaaattcgctcggtaccagctgggcgacctgctgctgcacctggaaaagaagcacggcgaggactggggaaaggtgtacgacgaggcctgggagcggattgacaagaaagtggaaggcctgagcaagcacatcaagctggaagaggaacggagaagcgaggacgcccagagcaaggccgccctgaccgactggctgcgggctaaggccagcttcgtgatcgagggcctgaaggaggccgacaaggacgagttctgcagatgcgagctgaagctgcagaagtggtacggggacctgcggggaaagcccttcgccatcgaagccgagaacagcatcctggacatcagcggcttcagcaagcagtacaactgtgccttcatctggcagaaggacggcgtgaagaagctgaacctgtacctgatcatcaactacttcaagggcggcaagctgcggttcaagaagatcaaacctgaagccttcgaagccaacagattctacaccgtgatcaacaaaaagagcggcgagatcgtgcccatggaggtgaacttcaacttcgacgaccccaacctgatcatcctgcctctggcctttggcaagagacagggcagagaattcatctggaacgacctgctgtccctggaaaccggcagcctgaagctggccaacggaagagtgatcgagaagacactgtacaacagaagaacccggcaggatgagcctgccctgttcgtggccctgaccttcgagcggcgggaggtcctggactcctccaatatcaaaccaatgaacctgatcggcgtggcaagaggcgaaaacatccccgccgtgatcgccctgaccgaccccgagggctgcccactgagccggtttaaggatagcctgggaaacccaacccacatcctgagaatcggcgagagctataaggagaagcagcggaccatccaggccaagaaggaggtggagcagcggagagccggcggctacagccggaagtacgccagcaaagccaagaatctggcagacgatatggtgagaaacaccgctagagatctgctgtactacgccgtgacccaggatgccatgctgatcttcgccaacctgagccggggcttcggccggcagggcaagcggaccttcatggccgagagacagtacacacggatggaggactggctgaccgccaagctggcctacgagggcctgagcaagacctacctgtccaagacactggcccagtacacctccaagacatgcagcaactgtgggtttaccatcaccagcgccgactacgacagggtgctggagaagctgaagaagacagcaacaggctggatgaccacaattaacggcaaggagctgaaggtggagggccagattacctactacaacagatacaagagacagaacgtagtcaaggacctgtccgtcgagctggatagactgagcgaagaatctgtgaacaacgacatctcctcctggacaaagggcagaagcggagaagctctgagcctcctgaagaaaagattctcccatagacccgtgcaggagaagttcgtgtgcctgaactgcggcttcgagacacacgcagccgagcaagccgccctgaacatcgccagatcctggctgttcctgcggagccaggagtacaagaaataccagacaaacaagacaaccggcaacaccgataagagagccttcgtcgagacctggcagtccttttaccggaagaagcttaaggaggtgtggaaacctgccgtgcggtctggcggatctggcggaggctccaccagccccaagaaaaagagaaaagtctaagctgccttctgcggggcttgccttctggccatgcccttcttctctcccttgcacctgtacctcttggtctttgaataaagcctgagtaggaaggctagcaaaaaaaaaaaaaaaaaaaaaaaaaaaaaaaaaaaaaaaaaaaaaaaaaaaaaaaaaaaaaaaaaaaaaaaaaaaaaaaa

SEQ ID NO: 10235 - RNA, 8787 nt, synthetic construct
  source 1..8787: mol_type = other RNA
aggaaataagagagaaaagaagagtaagaagaaatataagagccaccatggcccctaagaagaagcgtaaagtgagccggatgaaccacgaccaggagttcgacccccctaaggtgtaccctcccgtccccgccgagaagagaaagcccatccgggtcctgagcctgttcgatggcatcgccaccggtctgctggtgctgaaggacctgggcatccaggtggataggtacattgcctccgaggtgtgcgaggactccatcaccgtgggaatggtgcgtcatcagggcaagatcatgtacgtgggcgacgtgcggagcgtgacacagaagcatatccaggagtggggccctttcgacctggtgatcggcggcagcccttgcaatgacctgagcatcgtgaacccagcccggaagggcctgtacgagggaaccggcagactgttcttcgagttttacagactgctgcacgacgcccggcctaaggaaggcgacgaccggcccttcttttggctgttcgagaatgtggtggccatgggagtcagcgacaagcgggatattagccggttcctggagagcaaccccgtgatgatcgatgccaaggaagtgagcgccgcccaccgggccagatacttctggggcaatctgcctggcatgaacagacccctggccagcaccgtgaacgacaagctggagctgcaggagtgcctggagcacggccggatcgccaagttcagcaaggtgagaaccatcaccacccgaagcaacagcatcaaacaaggcaaggaccagcactttcctgtgttcatgaacgagaaggaggacatcctgtggtgtaccgagatggagagagtgttcgggttcccagtccactacacagatgtcagcaacatgtctagactggccagacagagactgctgggaagaagctggtccgtccctgtgatcagacacctgttcgcccctctgaaggagtacttcgcctgcgtgagcagcggcaacagcaacgccaacagccggggccccagcttctctagcggcctggtgccactgtccctgagagggagccacatgggccccatggagatctacaaaaccgtgagcgcctggaagcggcagcctgtgcgcgtgctgagcctgtttcggaatatcgataaagtcctgaaaagcctgggattcctggagagcggctctggctccggcggtggcaccctgaagtacgtggaggatgtgacaaacgtggtcagacgggatgtggagaagtggggccccttcgatctggtgtacggcagcacccaacccctgggcagctcttgtgaccggtgccctggctggtacatgtttcagttccaccggatcctgcagtacgccctgccgagacaggagtcccagcggccattcttttggattttcatggacaacttgctgctgaccgaggatgaccaggaaactaccactcggttcctgcagaccgaagccgtgaccctgcaggacgtgagaggccgggactaccagaacgccatgcgggtgtggtccaacatccctggactgaaaagcaagcacgcacctctgacccctaaagaagaggagtacctgcaggcccaggtgcggagcagaagcaagctggacgcccctaaggtggatctgctggtgaagaattgcctcctgcccctgagagagtacttcaagtatttcagccagaatagtctgcccctgggaggcagcggcggcggcccccagagcctgctgagcttcggcgacgtggccgtggacttcagccaggaggagtgggagtacctggactacgaccagaggaccctgtacatggacgtgatgctggagaactacagcaacctggtgttcgtggagaaccacaggatctacggcaagtacgagaaggacctggaccagggcaccaagcacatcgcccacgaggacgtgatcatccaggagaagagctacaagtgcaacgagctgggcggcccaagcagcggcgcccctcctcccagcggcggcaggcggcccaagcagcggcgcccctcctcccagcggcggcagcccagccggctccccaacctctaccgaggagggcacctctgagtccgccacccccgagagcggccctggcacctccaccgagcccagcgagggcagcgcacccggcagccctgccggcagccccacctccacagaggagggaaccagcaccgagcccagcgaaggcagcgccccaggcaccagcaccgagcctagtgagcaggagattaaacggatcaacaagatcagaagaagacttgtgaaagacagcaacaccaagaaggccggcaagacaggccccatgaaaaccctgctggttagagtgatgacacccgatctgagagagcggctggaaaacctgagaaagaagcctgaaaatatcccccagcccatcagcaatacatctagagccaacctgaataagctgctgaccgattacaccgaaatgaagaaggcgatcctgcatgtgtactgggaagagttccagaaggaccctgtgggcctgatgagccgggtggcccagcctgccagcaagaagatcgatcagaacaagctgaaacctgagatggacgagaagggcaacctgaccaccgccggctttgcctgctctcagtgtggccagcccctgttcgtgtacaagctggagcaggtgtctgagaagggcaaggcttacaccaactacttcggacggtgcaatgtggccgagcacgaaaagctgatcctgctggcccagctgaagcccgagaaggatagcgacgaagccgtgacatatagcctgggaaagtttgggcagagggccctggatttctacagcattcatgtgaccaaggagtccacccaccccgtgaagcccctggcccagatcgccggaaacagatacgcctccggacctgtgggaaaggccctgagcgacgcatgtatgggcacaatcgcctccttcctgtctaagtaccaggacatcatcatcgaacaccagaaggtggtgaagggcaaccagaagagactggagagcctgcgggagctggccggcaaggaaaacctggaataccctagcgtgaccctgccacctcagcctcacaccaaggagggcgttgatgcctacaacgaagtgatcgcccgggtgcgaatgtgggtgaacctgaacctgtggcagaagctgaagctaagcagagatgatgccaagcctctgctgagactgaagggattcccttcctttcctctggtcgagagacaggccaacgaagtggactggtgggacatggtgtgtaacgtgaagaagctgatcaacgagaaaaaggaggatggcaaggtgttttggcagaatctggctggctacaagagacaggaagccctgagaccatacctgagcagcgaggaagatcggaagaagggaaagaaattcgctcggtaccagctgggcgacctgctgctgcacctggaaaagaagcacggcgaggactggggaaaggtgtacgacgaggcctgggagcggattgacaagaaagtggaaggcctgagcaagcacatcaagctggaagaggaacggagaagcgaggacgcccagagcaaggccgccctgaccgactggctgcgggctaaggccagcttcgtgatcgagggcctgaaggaggccgacaaggacgagttctgcagatgcgagctgaagctgcagaagtggtacggggacctgcggggaaagcccttcgccatcgaagccgagaacagcatcctggacatcagcggcttcagcaagcagtacaactgtgccttcatctggcagaaggacggcgtgaagaagctgaacctgtacctgatcatcaactacttcaagggcggcaagctgcggttcaagaagatcaaacctgaagccttcgaagccaacagattctacaccgtgatcaacaaaaagagcggcgagatcgtgcccatggaggtgaacttcaacttcgacgaccccaacctgatcatcctgcctctggcctttggcaagagacagggcagagaattcatctggaacgacctgctgtccctggaaaccggcagcctgaagctggccaacggaagagtgatcgagaagacactgtacaacagaagaacccggcaggatgagcctgccctgttcgtggccctgaccttcgagcggcgggaggtcctggactcctccaatatcaaaccaatgaacctgatcggcgtggcaagaggcgaaaacatccccgccgtgatcgccctgaccgaccccgagggctgcccactgagccggtttaaggatagcctgggaaacccaacccacatcctgagaatcggcgagagctataaggagaagcagcggaccatccaggccaagaaggaggtggagcagcggagagccggcggctacagccggaagtacgccagcaaagccaagaatctggcagacgatatggtgagaaacaccgctagagatctgctgtactacgccgtgacccaggatgccatgctgatcttcgccaacctgagccggggcttcggccggcagggcaagcggaccttcatggccgagagacagtacacacggatggaggactggctgaccgccaagctggcctacgagggcctgagcaagacctacctgtccaagacactggcccagtacacctccaagacatgcagcaactgtgggtttaccatcaccagcgccgactacgacagggtgctggagaagctgaagaagacagcaacaggctggatgaccacaattaacggcaaggagctgaaggtggagggccagattacctactacaacagatacaagagacagaacgtagtcaaggacctgtccgtcgagctggatagactgagcgaagaatctgtgaacaacgacatctcctcctggacaaagggcagaagcggagaagctctgagcctcctgaagaaaagattctcccatagacccgtgcaggagaagttcgtgtgcctgaactgcggcttcgagacacacgcagccgagcaagccgccctgaacatcgccagatcctggctgttcctgcggagccaggagtacaagaaataccagacaaacaagacaaccggcaacaccgataagagagccttcgtcgagacctggcagtccttttaccggaagaagcttaaggaggtgtggaaacctgccgtgcggtctggcggatctggcggaggctccaccagccccaagaaaaagagaaaagtctaagctgccttctgcggggcttgccttctggccatgcccttcttctctcccttgcacctgtacctcttggtctttgaataaagcctgagtaggaaggctagcaaaaaaaaaaaaaaaaaaaaaaaaaaaaaaaaaaaaaaaaaaaaaaaaaaaaaaaaaaaaaaaaaaaaaaaaaaaaaaaagcccagccggctccccaacctctaccgaggagggcacctctgagtccgccacccccgagagcggccctggcacctccaccgagcccagcgagggcagcgcacccggcagccctgccggcagccccacctccacagaggagggaaccagcaccgagcccagcgaaggcagcgccccaggcaccagcaccgagcctagtgagcaggagattaaacggatcaacaagatcagaagaagacttgtgaaagacagcaacaccaagaaggccggcaagacaggccccatgaaaaccctgctggttagagtgatgacacccgatctgagagagcggctggaaaacctgagaaagaagcctgaaaatatcccccagcccatcagcaatacatctagagccaacctgaataagctgctgaccgattacaccgaaatgaagaaggcgatcctgcatgtgtactgggaagagttccagaaggaccctgtgggcctgatgagccgggtggcccagcctgccagcaagaagatcgatcagaacaagctgaaacctgagatggacgagaagggcaacctgaccaccgccggctttgcctgctctcagtgtggccagcccctgttcgtgtacaagctggagcaggtgtctgagaagggcaaggcttacaccaactacttcggacggtgcaatgtggccgagcacgaaaagctgatcctgctggcccagctgaagcccgagaaggatagcgacgaagccgtgacatatagcctgggaaagtttgggcagagggccctggatttctacagcattcatgtgaccaaggagtccacccaccccgtgaagcccctggcccagatcgccggaaacagatacgcctccggacctgtgggaaaggccctgagcgacgcatgtatgggcacaatcgcctccttcctgtctaagtaccaggacatcatcatcgaacaccagaaggtggtgaagggcaaccagaagagactggagagcctgcgggagctggccggcaaggaaaacctggaataccctagcgtgaccctgccacctcagcctcacaccaaggagggcgttgatgcctacaacgaagtgatcgcccgggtgcgaatgtgggtgaacctgaacctgtggcagaagctgaagctaagcagagatgatgccaagcctctgctgagactgaagggattcccttcctttcctctggtcgagagacaggccaacgaagtggactggtgggacatggtgtgtaacgtgaagaagctgatcaacgagaaaaaggaggatggcaaggtgttttggcagaatctggctggctacaagagacaggaagccctgagaccatacctgagcagcgaggaagatcggaagaagggaaagaaattcgctcggtaccagctgggcgacctgctgctgcacctggaaaagaagcacggcgaggactggggaaaggtgtacgacgaggcctgggagcggattgacaagaaagtggaaggcctgagcaagcacatcaagctggaagaggaacggagaagcgaggacgcccagagcaaggccgccctgaccgactggctgcgggctaaggccagcttcgtgatcgagggcctgaaggaggccgacaaggacgagttctgcagatgcgagctgaagctgcagaagtggtacggggacctgcggggaaagcccttcgccatcgaagccgagaacagcatcctggacatcagcggcttcagcaagcagtacaactgtgccttcatctggcagaaggacggcgtgaagaagctgaacctgtacctgatcatcaactacttcaagggcggcaagctgcggttcaagaagatcaaacctgaagccttcgaagccaacagattctacaccgtgatcaacaaaaagagcggcgagatcgtgcccatggaggtgaacttcaacttcgacgaccccaacctgatcatcctgcctctggcctttggcaagagacagggcagagaattcatctggaacgacctgctgtccctggaaaccggcagcctgaagctggccaacggaagagtgatcgagaagacactgtacaacagaagaacccggcaggatgagcctgccctgttcgtggccctgaccttcgagcggcgggaggtcctggactcctccaatatcaaaccaatgaacctgatcggcgtggcaagaggcgaaaacatccccgccgtgatcgccctgaccgaccccgagggctgcccactgagccggtttaaggatagcctgggaaacccaacccacatcctgagaatcggcgagagctataaggagaagcagcggaccatccaggccaagaaggaggtggagcagcggagagccggcggctacagccggaagtacgccagcaaagccaagaatctggcagacgatatggtgagaaacaccgctagagatctgctgtactacgccgtgacccaggatgccatgctgatcttcgccaacctgagccggggcttcggccggcagggcaagcggaccttcatggccgagagacagtacacacggatggaggactggctgaccgccaagctggcctacgagggcctgagcaagacctacctgtccaagacactggcccagtacacctccaagacatgcagcaactgtgggtttaccatcaccagcgccgactacgacagggtgctggagaagctgaagaagacagcaacaggctggatgaccacaattaacggcaaggagctgaaggtggagggccagattacctactacaacagatacaagagacagaacgtagtcaaggacctgtccgtcgagctggatagactgagcgaagaatctgtgaacaacgacatctcctcctggacaaagggcagaagcggagaagctctgagcctcctgaagaaaagattctcccatagacccgtgcaggagaagttcgtgtgcctgaactgcggcttcgagacacacgcagccgagcaagccgccctgaacatcgccagatcctggctgttcctgcggagccaggagtacaagaaataccagacaaacaagacaaccggcaacaccgataagagagccttcgtcgagacctggcagtccttttaccggaagaagcttaaggaggtgtggaaacctgccgtgcggtctggcggatctggcggaggctccaccagccccaagaaaaagagaaaagtctaagctgccttctgcggggcttgccttctggccatgcccttcttctctcccttgcacctgtacctcttggtctttgaataaagcctgagtaggaaggctagcaaaaaaaaaaaaaaaaaaaaaaaaaaaaaaaaaaaaaaaaaaaaaaaaaaaaaaaaaaaaaaaaaaaaaaaaaaaaaaaa

SEQ ID NO: 10236 - RNA, 8787 nt, synthetic construct
  source 1..8787: mol_type = other RNA
aggaaataagagagaaaagaagagtaagaagaaatataagagccaccatggcccctaagaagaagcgtaaagtgagccggatgaaccacgaccaggagttcgacccccctaaggtgtaccctcccgtccccgccgagaagagaaagcccatccgggtcctgagcctgttcgatggcatcgccaccggtctgctggtgctgaaggacctgggcatccaggtggataggtacattgcctccgaggtgtgcgaggactccatcaccgtgggaatggtgcgtcatcagggcaagatcatgtacgtgggcgacgtgcggagcgtgacacagaagcatatccaggagtggggccctttcgacctggtgatcggcggcagcccttgcaatgacctgagcatcgtgaacccagcccggaagggcctgtacgagggaaccggcagactgttcttcgagttttacagactgctgcacgacgcccggcctaaggaaggcgacgaccggcccttcttttggctgttcgagaatgtggtggccatgggagtcagcgacaagcgggatattagccggttcctggagagcaaccccgtgatgatcgatgccaaggaagtgagcgccgcccaccgggccagatacttctggggcaatctgcctggcatgaacagacccctggccagcaccgtgaacgacaagctggagctgcaggagtgcctggagcacggccggatcgccaagttcagcaaggtgagaaccatcaccacccgaagcaacagcatcaaacaaggcaaggaccagcactttcctgtgttcatgaacgagaaggaggacatcctgtggtgtaccgagatggagagagtgttcgggttcccagtccactacacagatgtcagcaacatgtctagactggccagacagagactgctgggaagaagctggtccgtccctgtgatcagacacctgttcgcccctctgaaggagtacttcgcctgcgtgagcagcggcaacagcaacgccaacagccggggccccagcttctctagcggcctggtgccactgtccctgagagggagccacatgggccccatggagatctacaaaaccgtgagcgcctggaagcggcagcctgtgcgcgtgctgagcctgtttcggaatatcgataaagtcctgaaaagcctgggattcctggagagcggctctggctccggcggtggcaccctgaagtacgtggaggatgtgacaaacgtggtcagacgggatgtggagaagtggggccccttcgatctggtgtacggcagcacccaacccctgggcagctcttgtgaccggtgccctggctggtacatgtttcagttccaccggatcctgcagtacgccctgccgagacaggagtcccagcggccattcttttggattttcatggacaacttgctgctgaccgaggatgaccaggaaactaccactcggttcctgcagaccgaagccgtgaccctgcaggacgtgagaggccgggactaccagaacgccatgcgggtgtggtccaacatccctggactgaaaagcaagcacgcacctctgacccctaaagaagaggagtacctgcaggcccaggtgcggagcagaagcaagctggacgcccctaaggtggatctgctggtgaagaattgcctcctgcccctgagagagtacttcaagtatttcagccagaatagtctgcccctgggaggcagcggcggcggcgccaggggcctggtgaccttcgaggacgtggccgtgtacttcagcagggaggagtggggcctgctgaacctgacccagaggagcctgtacagggacgtgatgctggagaacttcgccctgatcggcagcctgggcttcgcccccagcaggagccacgtggtggcccagctggagagcgaggaggagctgtgggtgcccagcatggtggacctgaccctgggcagcagggccgaggccaggaggggcggcccaagcagcggcgcccctcctcccagcggcggcaggcggcccaagcagcggcgcccctcctcccagcggcggcagcccagccggctccccaacctctaccgaggagggcacctctgagtccgccacccccgagagcggccctggcacctccaccgagcccagcgagggcagcgcacccggcagccctgccggcagccccacctccacagaggagggaaccagcaccgagcccagcgaaggcagcgccccaggcaccagcaccgagcctagtgagcaggagattaaacggatcaacaagatcagaagaagacttgtgaaagacagcaacaccaagaaggccggcaagacaggccccatgaaaaccctgctggttagagtgatgacacccgatctgagagagcggctggaaaacctgagaaagaagcctgaaaatatcccccagcccatcagcaatacatctagagccaacctgaataagctgctgaccgattacaccgaaatgaagaaggcgatcctgcatgtgtactgggaagagttccagaaggaccctgtgggcctgatgagccgggtggcccagcctgccagcaagaagatcgatcagaacaagctgaaacctgagatggacgagaagggcaacctgaccaccgccggctttgcctgctctcagtgtggccagcccctgttcgtgtacaagctggagcaggtgtctgagaagggcaaggcttacaccaactacttcggacggtgcaatgtggccgagcacgaaaagctgatcctgctggcccagctgaagcccgagaaggatagcgacgaagccgtgacatatagcctgggaaagtttgggcagagggccctggatttctacagcattcatgtgaccaaggagtccacccaccccgtgaagcccctggcccagatcgccggaaacagatacgcctccggacctgtgggaaaggccctgagcgacgcatgtatgggcacaatcgcctccttcctgtctaagtaccaggacatcatcatcgaacaccagaaggtggtgaagggcaaccagaagagactggagagcctgcgggagctggccggcaaggaaaacctggaataccctagcgtgaccctgccacctcagcctcacaccaaggagggcgttgatgcctacaacgaagtgatcgcccgggtgcgaatgtgggtgaacctgaacctgtggcagaagctgaagctaagcagagatgatgccaagcctctgctgagactgaagggattcccttcctttcctctggtcgagagacaggccaacgaagtggactggtgggacatggtgtgtaacgtgaagaagctgatcaacgagaaaaaggaggatggcaaggtgttttggcagaatctggctggctacaagagacaggaagccctgagaccatacctgagcagcgaggaagatcggaagaagggaaagaaattcgctcggtaccagctgggcgacctgctgctgcacctggaaaagaagcacggcgaggactggggaaaggtgtacgacgaggcctgggagcggattgacaagaaagtggaaggcctgagcaagcacatcaagctggaagaggaacggagaagcgaggacgcccagagcaaggccgccctgaccgactggctgcgggctaaggccagcttcgtgatcgagggcctgaaggaggccgacaaggacgagttctgcagatgcgagctgaagctgcagaagtggtacggggacctgcggggaaagcccttcgccatcgaagccgagaacagcatcctggacatcagcggcttcagcaagcagtacaactgtgccttcatctggcagaaggacggcgtgaagaagctgaacctgtacctgatcatcaactacttcaagggcggcaagctgcggttcaagaagatcaaacctgaagccttcgaagccaacagattctacaccgtgatcaacaaaaagagcggcgagatcgtgcccatggaggtgaacttcaacttcgacgaccccaacctgatcatcctgcctctggcctttggcaagagacagggcagagaattcatctggaacgacctgctgtccctggaaaccggcagcctgaagctggccaacggaagagtgatcgagaagacactgtacaacagaagaacccggcaggatgagcctgccctgttcgtggccctgaccttcgagcggcgggaggtcctggactcctccaatatcaaaccaatgaacctgatcggcgtggcaagaggcgaaaacatccccgccgtgatcgccctgaccgaccccgagggctgcccactgagccggtttaaggatagcctgggaaacccaacccacatcctgagaatcggcgagagctataaggagaagcagcggaccatccaggccaagaaggaggtggagcagcggagagccggcggctacagccggaagtacgccagcaaagccaagaatctggcagacgatatggtgagaaacaccgctagagatctgctgtactacgccgtgacccaggatgccatgctgatcttcgccaacctgagccggggcttcggccggcagggcaagcggaccttcatggccgagagacagtacacacggatggaggactggctgaccgccaagctggcctacgagggcctgagcaagacctacctgtccaagacactggcccagtacacctccaagacatgcagcaactgtgggtttaccatcaccagcgccgactacgacagggtgctggagaagctgaagaagacagcaacaggctggatgaccacaattaacggcaaggagctgaaggtggagggccagattacctactacaacagatacaagagacagaacgtagtcaaggacctgtccgtcgagctggatagactgagcgaagaatctgtgaacaacgacatctcctcctggacaaagggcagaagcggagaagctctgagcctcctgaagaaaagattctcccatagacccgtgcaggagaagttcgtgtgcctgaactgcggcttcgagacacacgcagccgagcaagccgccctgaacatcgccagatcctggctgttcctgcggagccaggagtacaagaaataccagacaaacaagacaaccggcaacaccgataagagagccttcgtcgagacctggcagtccttttaccggaagaagcttaaggaggtgtggaaacctgccgtgcggtctggcggatctggcggaggctccaccagccccaagaaaaagagaaaagtctaagctgccttctgcggggcttgccttctggccatgcccttcttctctcccttgcacctgtacctcttggtctttgaataaagcctgagtaggaaggctagcaaaaaaaaaaaaaaaaaaaaaaaaaaaaaaaaaaaaaaaaaaaaaaaaaaaaaaaaaaaaaaaaaaaaaaaaaaaaaaaagcccagccggctccccaacctctaccgaggagggcacctctgagtccgccacccccgagagcggccctggcacctccaccgagcccagcgagggcagcgcacccggcagccctgccggcagccccacctccacagaggagggaaccagcaccgagcccagcgaaggcagcgccccaggcaccagcaccgagcctagtgagcaggagattaaacggatcaacaagatcagaagaagacttgtgaaagacagcaacaccaagaaggccggcaagacaggccccatgaaaaccctgctggttagagtgatgacacccgatctgagagagcggctggaaaacctgagaaagaagcctgaaaatatcccccagcccatcagcaatacatctagagccaacctgaataagctgctgaccgattacaccgaaatgaagaaggcgatcctgcatgtgtactgggaagagttccagaaggaccctgtgggcctgatgagccgggtggcccagcctgccagcaagaagatcgatcagaacaagctgaaacctgagatggacgagaagggcaacctgaccaccgccggctttgcctgctctcagtgtggccagcccctgttcgtgtacaagctggagcaggtgtctgagaagggcaaggcttacaccaactacttcggacggtgcaatgtggccgagcacgaaaagctgatcctgctggcccagctgaagcccgagaaggatagcgacgaagccgtgacatatagcctgggaaagtttgggcagagggccctggatttctacagcattcatgtgaccaaggagtccacccaccccgtgaagcccctggcccagatcgccggaaacagatacgcctccggacctgtgggaaaggccctgagcgacgcatgtatgggcacaatcgcctccttcctgtctaagtaccaggacatcatcatcgaacaccagaaggtggtgaagggcaaccagaagagactggagagcctgcgggagctggccggcaaggaaaacctggaataccctagcgtgaccctgccacctcagcctcacaccaaggagggcgttgatgcctacaacgaagtgatcgcccgggtgcgaatgtgggtgaacctgaacctgtggcagaagctgaagctaagcagagatgatgccaagcctctgctgagactgaagggattcccttcctttcctctggtcgagagacaggccaacgaagtggactggtgggacatggtgtgtaacgtgaagaagctgatcaacgagaaaaaggaggatggcaaggtgttttggcagaatctggctggctacaagagacaggaagccctgagaccatacctgagcagcgaggaagatcggaagaagggaaagaaattcgctcggtaccagctgggcgacctgctgctgcacctggaaaagaagcacggcgaggactggggaaaggtgtacgacgaggcctgggagcggattgacaagaaagtggaaggcctgagcaagcacatcaagctggaagaggaacggagaagcgaggacgcccagagcaaggccgccctgaccgactggctgcgggctaaggccagcttcgtgatcgagggcctgaaggaggccgacaaggacgagttctgcagatgcgagctgaagctgcagaagtggtacggggacctgcggggaaagcccttcgccatcgaagccgagaacagcatcctggacatcagcggcttcagcaagcagtacaactgtgccttcatctggcagaaggacggcgtgaagaagctgaacctgtacctgatcatcaactacttcaagggcggcaagctgcggttcaagaagatcaaacctgaagccttcgaagccaacagattctacaccgtgatcaacaaaaagagcggcgagatcgtgcccatggaggtgaacttcaacttcgacgaccccaacctgatcatcctgcctctggcctttggcaagagacagggcagagaattcatctggaacgacctgctgtccctggaaaccggcagcctgaagctggccaacggaagagtgatcgagaagacactgtacaacagaagaacccggcaggatgagcctgccctgttcgtggccctgaccttcgagcggcgggaggtcctggactcctccaatatcaaaccaatgaacctgatcggcgtggcaagaggcgaaaacatccccgccgtgatcgccctgaccgaccccgagggctgcccactgagccggtttaaggatagcctgggaaacccaacccacatcctgagaatcggcgagagctataaggagaagcagcggaccatccaggccaagaaggaggtggagcagcggagagccggcggctacagccggaagtacgccagcaaagccaagaatctggcagacgatatggtgagaaacaccgctagagatctgctgtactacgccgtgacccaggatgccatgctgatcttcgccaacctgagccggggcttcggccggcagggcaagcggaccttcatggccgagagacagtacacacggatggaggactggctgaccgccaagctggcctacgagggcctgagcaagacctacctgtccaagacactggcccagtacacctccaagacatgcagcaactgtgggtttaccatcaccagcgccgactacgacagggtgctggagaagctgaagaagacagcaacaggctggatgaccacaattaacggcaaggagctgaaggtggagggccagattacctactacaacagatacaagagacagaacgtagtcaaggacctgtccgtcgagctggatagactgagcgaagaatctgtgaacaacgacatctcctcctggacaaagggcagaagcggagaagctctgagcctcctgaagaaaagattctcccatagacccgtgcaggagaagttcgtgtgcctgaactgcggcttcgagacacacgcagccgagcaagccgccctgaacatcgccagatcctggctgttcctgcggagccaggagtacaagaaataccagacaaacaagacaaccggcaacaccgataagagagccttcgtcgagacctggcagtccttttaccggaagaagcttaaggaggtgtggaaacctgccgtgcggtctggcggatctggcggaggctccaccagccccaagaaaaagagaaaagtctaagctgccttctgcggggcttgccttctggccatgcccttcttctctcccttgcacctgtacctcttggtctttgaataaagcctgagtaggaaggctagcaaaaaaaaaaaaaaaaaaaaaaaaaaaaaaaaaaaaaaaaaaaaaaaaaaaaaaaaaaaaaaaaaaaaaaaaaaaaaaaa

SEQ ID NO: 10237 - RNA, 8787 nt, synthetic construct
  source 1..8787: mol_type = other RNA
aggaaataagagagaaaagaagagtaagaagaaatataagagccaccatggcccctaagaagaagcgtaaagtgagccggatgaaccacgaccaggagttcgacccccctaaggtgtaccctcccgtccccgccgagaagagaaagcccatccgggtcctgagcctgttcgatggcatcgccaccggtctgctggtgctgaaggacctgggcatccaggtggataggtacattgcctccgaggtgtgcgaggactccatcaccgtgggaatggtgcgtcatcagggcaagatcatgtacgtgggcgacgtgcggagcgtgacacagaagcatatccaggagtggggccctttcgacctggtgatcggcggcagcccttgcaatgacctgagcatcgtgaacccagcccggaagggcctgtacgagggaaccggcagactgttcttcgagttttacagactgctgcacgacgcccggcctaaggaaggcgacgaccggcccttcttttggctgttcgagaatgtggtggccatgggagtcagcgacaagcgggatattagccggttcctggagagcaaccccgtgatgatcgatgccaaggaagtgagcgccgcccaccgggccagatacttctggggcaatctgcctggcatgaacagacccctggccagcaccgtgaacgacaagctggagctgcaggagtgcctggagcacggccggatcgccaagttcagcaaggtgagaaccatcaccacccgaagcaacagcatcaaacaaggcaaggaccagcactttcctgtgttcatgaacgagaaggaggacatcctgtggtgtaccgagatggagagagtgttcgggttcccagtccactacacagatgtcagcaacatgtctagactggccagacagagactgctgggaagaagctggtccgtccctgtgatcagacacctgttcgcccctctgaaggagtacttcgcctgcgtgagcagcggcaacagcaacgccaacagccggggccccagcttctctagcggcctggtgccactgtccctgagagggagccacatgggccccatggagatctacaaaaccgtgagcgcctggaagcggcagcctgtgcgcgtgctgagcctgtttcggaatatcgataaagtcctgaaaagcctgggattcctggagagcggctctggctccggcggtggcaccctgaagtacgtggaggatgtgacaaacgtggtcagacgggatgtggagaagtggggccccttcgatctggtgtacggcagcacccaacccctgggcagctcttgtgaccggtgccctggctggtacatgtttcagttccaccggatcctgcagtacgccctgccgagacaggagtcccagcggccattcttttggattttcatggacaacttgctgctgaccgaggatgaccaggaaactaccactcggttcctgcagaccgaagccgtgaccctgcaggacgtgagaggccgggactaccagaacgccatgcgggtgtggtccaacatccctggactgaaaagcaagcacgcacctctgacccctaaagaagaggagtacctgcaggcccaggtgcggagcagaagcaagctggacgcccctaaggtggatctgctggtgaagaattgcctcctgcccctgagagagtacttcaagtatttcagccagaatagtctgcccctgggaggcagcggcggcggcccccaggagagcgtgaccttcaaggacgtggccgtggacttcacctgggaggagtggggctacctggacaccagccagaaggagctgtactgggaggtgatgctggagaactacaggaacctggtgagcctgggcctggccgacagcaacgtggacatgatcagccagctggagagcggcgaggcccagggcatccccgtggacagcgtgctgaccagctgctggcccgacggcgacaggaggggcggcccaagcagcggcgcccctcctcccagcggcggcaggcggcccaagcagcggcgcccctcctcccagcggcggcagcccagccggctccccaacctctaccgaggagggcacctctgagtccgccacccccgagagcggccctggcacctccaccgagcccagcgagggcagcgcacccggcagccctgccggcagccccacctccacagaggagggaaccagcaccgagcccagcgaaggcagcgccccaggcaccagcaccgagcctagtgagcaggagattaaacggatcaacaagatcagaagaagacttgtgaaagacagcaacaccaagaaggccggcaagacaggccccatgaaaaccctgctggttagagtgatgacacccgatctgagagagcggctggaaaacctgagaaagaagcctgaaaatatcccccagcccatcagcaatacatctagagccaacctgaataagctgctgaccgattacaccgaaatgaagaaggcgatcctgcatgtgtactgggaagagttccagaaggaccctgtgggcctgatgagccgggtggcccagcctgccagcaagaagatcgatcagaacaagctgaaacctgagatggacgagaagggcaacctgaccaccgccggctttgcctgctctcagtgtggccagcccctgttcgtgtacaagctggagcaggtgtctgagaagggcaaggcttacaccaactacttcggacggtgcaatgtggccgagcacgaaaagctgatcctgctggcccagctgaagcccgagaaggatagcgacgaagccgtgacatatagcctgggaaagtttgggcagagggccctggatttctacagcattcatgtgaccaaggagtccacccaccccgtgaagcccctggcccagatcgccggaaacagatacgcctccggacctgtgggaaaggccctgagcgacgcatgtatgggcacaatcgcctccttcctgtctaagtaccaggacatcatcatcgaacaccagaaggtggtgaagggcaaccagaagagactggagagcctgcgggagctggccggcaaggaaaacctggaataccctagcgtgaccctgccacctcagcctcacaccaaggagggcgttgatgcctacaacgaagtgatcgcccgggtgcgaatgtgggtgaacctgaacctgtggcagaagctgaagctaagcagagatgatgccaagcctctgctgagactgaagggattcccttcctttcctctggtcgagagacaggccaacgaagtggactggtgggacatggtgtgtaacgtgaagaagctgatcaacgagaaaaaggaggatggcaaggtgttttggcagaatctggctggctacaagagacaggaagccctgagaccatacctgagcagcgaggaagatcggaagaagggaaagaaattcgctcggtaccagctgggcgacctgctgctgcacctggaaaagaagcacggcgaggactggggaaaggtgtacgacgaggcctgggagcggattgacaagaaagtggaaggcctgagcaagcacatcaagctggaagaggaacggagaagcgaggacgcccagagcaaggccgccctgaccgactggctgcgggctaaggccagcttcgtgatcgagggcctgaaggaggccgacaaggacgagttctgcagatgcgagctgaagctgcagaagtggtacggggacctgcggggaaagcccttcgccatcgaagccgagaacagcatcctggacatcagcggcttcagcaagcagtacaactgtgccttcatctggcagaaggacggcgtgaagaagctgaacctgtacctgatcatcaactacttcaagggcggcaagctgcggttcaagaagatcaaacctgaagccttcgaagccaacagattctacaccgtgatcaacaaaaagagcggcgagatcgtgcccatggaggtgaacttcaacttcgacgaccccaacctgatcatcctgcctctggcctttggcaagagacagggcagagaattcatctggaacgacctgctgtccctggaaaccggcagcctgaagctggccaacggaagagtgatcgagaagacactgtacaacagaagaacccggcaggatgagcctgccctgttcgtggccctgaccttcgagcggcgggaggtcctggactcctccaatatcaaaccaatgaacctgatcggcgtggcaagaggcgaaaacatccccgccgtgatcgccctgaccgaccccgagggctgcccactgagccggtttaaggatagcctgggaaacccaacccacatcctgagaatcggcgagagctataaggagaagcagcggaccatccaggccaagaaggaggtggagcagcggagagccggcggctacagccggaagtacgccagcaaagccaagaatctggcagacgatatggtgagaaacaccgctagagatctgctgtactacgccgtgacccaggatgccatgctgatcttcgccaacctgagccggggcttcggccggcagggcaagcggaccttcatggccgagagacagtacacacggatggaggactggctgaccgccaagctggcctacgagggcctgagcaagacctacctgtccaagacactggcccagtacacctccaagacatgcagcaactgtgggtttaccatcaccagcgccgactacgacagggtgctggagaagctgaagaagacagcaacaggctggatgaccacaattaacggcaaggagctgaaggtggagggccagattacctactacaacagatacaagagacagaacgtagtcaaggacctgtccgtcgagctggatagactgagcgaagaatctgtgaacaacgacatctcctcctggacaaagggcagaagcggagaagctctgagcctcctgaagaaaagattctcccatagacccgtgcaggagaagttcgtgtgcctgaactgcggcttcgagacacacgcagccgagcaagccgccctgaacatcgccagatcctggctgttcctgcggagccaggagtacaagaaataccagacaaacaagacaaccggcaacaccgataagagagccttcgtcgagacctggcagtccttttaccggaagaagcttaaggaggtgtggaaacctgccgtgcggtctggcggatctggcggaggctccaccagccccaagaaaaagagaaaagtctaagctgccttctgcggggcttgccttctggccatgcccttcttctctcccttgcacctgtacctcttggtctttgaataaagcctgagtaggaaggctagcaaaaaaaaaaaaaaaaaaaaaaaaaaaaaaaaaaaaaaaaaaaaaaaaaaaaaaaaaaaaaaaaaaaaaaaaaaaaaaaagcccagccggctccccaacctctaccgaggagggcacctctgagtccgccacccccgagagcggccctggcacctccaccgagcccagcgagggcagcgcacccggcagccctgccggcagccccacctccacagaggagggaaccagcaccgagcccagcgaaggcagcgccccaggcaccagcaccgagcctagtgagcaggagattaaacggatcaacaagatcagaagaagacttgtgaaagacagcaacaccaagaaggccggcaagacaggccccatgaaaaccctgctggttagagtgatgacacccgatctgagagagcggctggaaaacctgagaaagaagcctgaaaatatcccccagcccatcagcaatacatctagagccaacctgaataagctgctgaccgattacaccgaaatgaagaaggcgatcctgcatgtgtactgggaagagttccagaaggaccctgtgggcctgatgagccgggtggcccagcctgccagcaagaagatcgatcagaacaagctgaaacctgagatggacgagaagggcaacctgaccaccgccggctttgcctgctctcagtgtggccagcccctgttcgtgtacaagctggagcaggtgtctgagaagggcaaggcttacaccaactacttcggacggtgcaatgtggccgagcacgaaaagctgatcctgctggcccagctgaagcccgagaaggatagcgacgaagccgtgacatatagcctgggaaagtttgggcagagggccctggatttctacagcattcatgtgaccaaggagtccacccaccccgtgaagcccctggcccagatcgccggaaacagatacgcctccggacctgtgggaaaggccctgagcgacgcatgtatgggcacaatcgcctccttcctgtctaagtaccaggacatcatcatcgaacaccagaaggtggtgaagggcaaccagaagagactggagagcctgcgggagctggccggcaaggaaaacctggaataccctagcgtgaccctgccacctcagcctcacaccaaggagggcgttgatgcctacaacgaagtgatcgcccgggtgcgaatgtgggtgaacctgaacctgtggcagaagctgaagctaagcagagatgatgccaagcctctgctgagactgaagggattcccttcctttcctctggtcgagagacaggccaacgaagtggactggtgggacatggtgtgtaacgtgaagaagctgatcaacgagaaaaaggaggatggcaaggtgttttggcagaatctggctggctacaagagacaggaagccctgagaccatacctgagcagcgaggaagatcggaagaagggaaagaaattcgctcggtaccagctgggcgacctgctgctgcacctggaaaagaagcacggcgaggactggggaaaggtgtacgacgaggcctgggagcggattgacaagaaagtggaaggcctgagcaagcacatcaagctggaagaggaacggagaagcgaggacgcccagagcaaggccgccctgaccgactggctgcgggctaaggccagcttcgtgatcgagggcctgaaggaggccgacaaggacgagttctgcagatgcgagctgaagctgcagaagtggtacggggacctgcggggaaagcccttcgccatcgaagccgagaacagcatcctggacatcagcggcttcagcaagcagtacaactgtgccttcatctggcagaaggacggcgtgaagaagctgaacctgtacctgatcatcaactacttcaagggcggcaagctgcggttcaagaagatcaaacctgaagccttcgaagccaacagattctacaccgtgatcaacaaaaagagcggcgagatcgtgcccatggaggtgaacttcaacttcgacgaccccaacctgatcatcctgcctctggcctttggcaagagacagggcagagaattcatctggaacgacctgctgtccctggaaaccggcagcctgaagctggccaacggaagagtgatcgagaagacactgtacaacagaagaacccggcaggatgagcctgccctgttcgtggccctgaccttcgagcggcgggaggtcctggactcctccaatatcaaaccaatgaacctgatcggcgtggcaagaggcgaaaacatccccgccgtgatcgccctgaccgaccccgagggctgcccactgagccggtttaaggatagcctgggaaacccaacccacatcctgagaatcggcgagagctataaggagaagcagcggaccatccaggccaagaaggaggtggagcagcggagagccggcggctacagccggaagtacgccagcaaagccaagaatctggcagacgatatggtgagaaacaccgctagagatctgctgtactacgccgtgacccaggatgccatgctgatcttcgccaacctgagccggggcttcggccggcagggcaagcggaccttcatggccgagagacagtacacacggatggaggactggctgaccgccaagctggcctacgagggcctgagcaagacctacctgtccaagacactggcccagtacacctccaagacatgcagcaactgtgggtttaccatcaccagcgccgactacgacagggtgctggagaagctgaagaagacagcaacaggctggatgaccacaattaacggcaaggagctgaaggtggagggccagattacctactacaacagatacaagagacagaacgtagtcaaggacctgtccgtcgagctggatagactgagcgaagaatctgtgaacaacgacatctcctcctggacaaagggcagaagcggagaagctctgagcctcctgaagaaaagattctcccatagacccgtgcaggagaagttcgtgtgcctgaactgcggcttcgagacacacgcagccgagcaagccgccctgaacatcgccagatcctggctgttcctgcggagccaggagtacaagaaataccagacaaacaagacaaccggcaacaccgataagagagccttcgtcgagacctggcagtccttttaccggaagaagcttaaggaggtgtggaaacctgccgtgcggtctggcggatctggcggaggctccaccagccccaagaaaaagagaaaagtctaagctgccttctgcggggcttgccttctggccatgcccttcttctctcccttgcacctgtacctcttggtctttgaataaagcctgagtaggaaggctagcaaaaaaaaaaaaaaaaaaaaaaaaaaaaaaaaaaaaaaaaaaaaaaaaaaaaaaaaaaaaaaaaaaaaaaaaaaaaaaaa

SEQ ID NO: 10238 - RNA, 8787 nt, synthetic construct
  source 1..8787: mol_type = other RNA
aggaaataagagagaaaagaagagtaagaagaaatataagagccaccatggcccctaagaagaagcgtaaagtgagccggatgaaccacgaccaggagttcgacccccctaaggtgtaccctcccgtccccgccgagaagagaaagcccatccgggtcctgagcctgttcgatggcatcgccaccggtctgctggtgctgaaggacctgggcatccaggtggataggtacattgcctccgaggtgtgcgaggactccatcaccgtgggaatggtgcgtcatcagggcaagatcatgtacgtgggcgacgtgcggagcgtgacacagaagcatatccaggagtggggccctttcgacctggtgatcggcggcagcccttgcaatgacctgagcatcgtgaacccagcccggaagggcctgtacgagggaaccggcagactgttcttcgagttttacagactgctgcacgacgcccggcctaaggaaggcgacgaccggcccttcttttggctgttcgagaatgtggtggccatgggagtcagcgacaagcgggatattagccggttcctggagagcaaccccgtgatgatcgatgccaaggaagtgagcgccgcccaccgggccagatacttctggggcaatctgcctggcatgaacagacccctggccagcaccgtgaacgacaagctggagctgcaggagtgcctggagcacggccggatcgccaagttcagcaaggtgagaaccatcaccacccgaagcaacagcatcaaacaaggcaaggaccagcactttcctgtgttcatgaacgagaaggaggacatcctgtggtgtaccgagatggagagagtgttcgggttcccagtccactacacagatgtcagcaacatgtctagactggccagacagagactgctgggaagaagctggtccgtccctgtgatcagacacctgttcgcccctctgaaggagtacttcgcctgcgtgagcagcggcaacagcaacgccaacagccggggccccagcttctctagcggcctggtgccactgtccctgagagggagccacatgggccccatggagatctacaaaaccgtgagcgcctggaagcggcagcctgtgcgcgtgctgagcctgtttcggaatatcgataaagtcctgaaaagcctgggattcctggagagcggctctggctccggcggtggcaccctgaagtacgtggaggatgtgacaaacgtggtcagacgggatgtggagaagtggggccccttcgatctggtgtacggcagcacccaacccctgggcagctcttgtgaccggtgccctggctggtacatgtttcagttccaccggatcctgcagtacgccctgccgagacaggagtcccagcggccattcttttggattttcatggacaacttgctgctgaccgaggatgaccaggaaactaccactcggttcctgcagaccgaagccgtgaccctgcaggacgtgagaggccgggactaccagaacgccatgcgggtgtggtccaacatccctggactgaaaagcaagcacgcacctctgacccctaaagaagaggagtacctgcaggcccaggtgcggagcagaagcaagctggacgcccctaaggtggatctgctggtgaagaattgcctcctgcccctgagagagtacttcaagtatttcagccagaatagtctgcccctgggaggcagcggcggcggcgcccaggtgctggtgaccttccaggacgtggccgtggacttcacccaggaggagtggaggctgctggacctgggccagaaggagctgtacaaggaggtgatgctggagaacgtgcagaacatgctgttcctgggcctgcccgtgcccagggaggactggatcagccacttcgaccagggcagggccccctggatgctggagggcgagggccccagcaacagcaggctggacggccagaggaggggcggcccaagcagcggcgcccctcctcccagcggcggcaggcggcccaagcagcggcgcccctcctcccagcggcggcagcccagccggctccccaacctctaccgaggagggcacctctgagtccgccacccccgagagcggccctggcacctccaccgagcccagcgagggcagcgcacccggcagccctgccggcagccccacctccacagaggagggaaccagcaccgagcccagcgaaggcagcgccccaggcaccagcaccgagcctagtgagcaggagattaaacggatcaacaagatcagaagaagacttgtgaaagacagcaacaccaagaaggccggcaagacaggccccatgaaaaccctgctggttagagtgatgacacccgatctgagagagcggctggaaaacctgagaaagaagcctgaaaatatcccccagcccatcagcaatacatctagagccaacctgaataagctgctgaccgattacaccgaaatgaagaaggcgatcctgcatgtgtactgggaagagttccagaaggaccctgtgggcctgatgagccgggtggcccagcctgccagcaagaagatcgatcagaacaagctgaaacctgagatggacgagaagggcaacctgaccaccgccggctttgcctgctctcagtgtggccagcccctgttcgtgtacaagctggagcaggtgtctgagaagggcaaggcttacaccaactacttcggacggtgcaatgtggccgagcacgaaaagctgatcctgctggcccagctgaagcccgagaaggatagcgacgaagccgtgacatatagcctgggaaagtttgggcagagggccctggatttctacagcattcatgtgaccaaggagtccacccaccccgtgaagcccctggcccagatcgccggaaacagatacgcctccggacctgtgggaaaggccctgagcgacgcatgtatgggcacaatcgcctccttcctgtctaagtaccaggacatcatcatcgaacaccagaaggtggtgaagggcaaccagaagagactggagagcctgcgggagctggccggcaaggaaaacctggaataccctagcgtgaccctgccacctcagcctcacaccaaggagggcgttgatgcctacaacgaagtgatcgcccgggtgcgaatgtgggtgaacctgaacctgtggcagaagctgaagctaagcagagatgatgccaagcctctgctgagactgaagggattcccttcctttcctctggtcgagagacaggccaacgaagtggactggtgggacatggtgtgtaacgtgaagaagctgatcaacgagaaaaaggaggatggcaaggtgttttggcagaatctggctggctacaagagacaggaagccctgagaccatacctgagcagcgaggaagatcggaagaagggaaagaaattcgctcggtaccagctgggcgacctgctgctgcacctggaaaagaagcacggcgaggactggggaaaggtgtacgacgaggcctgggagcggattgacaagaaagtggaaggcctgagcaagcacatcaagctggaagaggaacggagaagcgaggacgcccagagcaaggccgccctgaccgactggctgcgggctaaggccagcttcgtgatcgagggcctgaaggaggccgacaaggacgagttctgcagatgcgagctgaagctgcagaagtggtacggggacctgcggggaaagcccttcgccatcgaagccgagaacagcatcctggacatcagcggcttcagcaagcagtacaactgtgccttcatctggcagaaggacggcgtgaagaagctgaacctgtacctgatcatcaactacttcaagggcggcaagctgcggttcaagaagatcaaacctgaagccttcgaagccaacagattctacaccgtgatcaacaaaaagagcggcgagatcgtgcccatggaggtgaacttcaacttcgacgaccccaacctgatcatcctgcctctggcctttggcaagagacagggcagagaattcatctggaacgacctgctgtccctggaaaccggcagcctgaagctggccaacggaagagtgatcgagaagacactgtacaacagaagaacccggcaggatgagcctgccctgttcgtggccctgaccttcgagcggcgggaggtcctggactcctccaatatcaaaccaatgaacctgatcggcgtggcaagaggcgaaaacatccccgccgtgatcgccctgaccgaccccgagggctgcccactgagccggtttaaggatagcctgggaaacccaacccacatcctgagaatcggcgagagctataaggagaagcagcggaccatccaggccaagaaggaggtggagcagcggagagccggcggctacagccggaagtacgccagcaaagccaagaatctggcagacgatatggtgagaaacaccgctagagatctgctgtactacgccgtgacccaggatgccatgctgatcttcgccaacctgagccggggcttcggccggcagggcaagcggaccttcatggccgagagacagtacacacggatggaggactggctgaccgccaagctggcctacgagggcctgagcaagacctacctgtccaagacactggcccagtacacctccaagacatgcagcaactgtgggtttaccatcaccagcgccgactacgacagggtgctggagaagctgaagaagacagcaacaggctggatgaccacaattaacggcaaggagctgaaggtggagggccagattacctactacaacagatacaagagacagaacgtagtcaaggacctgtccgtcgagctggatagactgagcgaagaatctgtgaacaacgacatctcctcctggacaaagggcagaagcggagaagctctgagcctcctgaagaaaagattctcccatagacccgtgcaggagaagttcgtgtgcctgaactgcggcttcgagacacacgcagccgagcaagccgccctgaacatcgccagatcctggctgttcctgcggagccaggagtacaagaaataccagacaaacaagacaaccggcaacaccgataagagagccttcgtcgagacctggcagtccttttaccggaagaagcttaaggaggtgtggaaacctgccgtgcggtctggcggatctggcggaggctccaccagccccaagaaaaagagaaaagtctaagctgccttctgcggggcttgccttctggccatgcccttcttctctcccttgcacctgtacctcttggtctttgaataaagcctgagtaggaaggctagcaaaaaaaaaaaaaaaaaaaaaaaaaaaaaaaaaaaaaaaaaaaaaaaaaaaaaaaaaaaaaaaaaaaaaaaaaaaaaaaagcccagccggctccccaacctctaccgaggagggcacctctgagtccgccacccccgagagcggccctggcacctccaccgagcccagcgagggcagcgcacccggcagccctgccggcagccccacctccacagaggagggaaccagcaccgagcccagcgaaggcagcgccccaggcaccagcaccgagcctagtgagcaggagattaaacggatcaacaagatcagaagaagacttgtgaaagacagcaacaccaagaaggccggcaagacaggccccatgaaaaccctgctggttagagtgatgacacccgatctgagagagcggctggaaaacctgagaaagaagcctgaaaatatcccccagcccatcagcaatacatctagagccaacctgaataagctgctgaccgattacaccgaaatgaagaaggcgatcctgcatgtgtactgggaagagttccagaaggaccctgtgggcctgatgagccgggtggcccagcctgccagcaagaagatcgatcagaacaagctgaaacctgagatggacgagaagggcaacctgaccaccgccggctttgcctgctctcagtgtggccagcccctgttcgtgtacaagctggagcaggtgtctgagaagggcaaggcttacaccaactacttcggacggtgcaatgtggccgagcacgaaaagctgatcctgctggcccagctgaagcccgagaaggatagcgacgaagccgtgacatatagcctgggaaagtttgggcagagggccctggatttctacagcattcatgtgaccaaggagtccacccaccccgtgaagcccctggcccagatcgccggaaacagatacgcctccggacctgtgggaaaggccctgagcgacgcatgtatgggcacaatcgcctccttcctgtctaagtaccaggacatcatcatcgaacaccagaaggtggtgaagggcaaccagaagagactggagagcctgcgggagctggccggcaaggaaaacctggaataccctagcgtgaccctgccacctcagcctcacaccaaggagggcgttgatgcctacaacgaagtgatcgcccgggtgcgaatgtgggtgaacctgaacctgtggcagaagctgaagctaagcagagatgatgccaagcctctgctgagactgaagggattcccttcctttcctctggtcgagagacaggccaacgaagtggactggtgggacatggtgtgtaacgtgaagaagctgatcaacgagaaaaaggaggatggcaaggtgttttggcagaatctggctggctacaagagacaggaagccctgagaccatacctgagcagcgaggaagatcggaagaagggaaagaaattcgctcggtaccagctgggcgacctgctgctgcacctggaaaagaagcacggcgaggactggggaaaggtgtacgacgaggcctgggagcggattgacaagaaagtggaaggcctgagcaagcacatcaagctggaagaggaacggagaagcgaggacgcccagagcaaggccgccctgaccgactggctgcgggctaaggccagcttcgtgatcgagggcctgaaggaggccgacaaggacgagttctgcagatgcgagctgaagctgcagaagtggtacggggacctgcggggaaagcccttcgccatcgaagccgagaacagcatcctggacatcagcggcttcagcaagcagtacaactgtgccttcatctggcagaaggacggcgtgaagaagctgaacctgtacctgatcatcaactacttcaagggcggcaagctgcggttcaagaagatcaaacctgaagccttcgaagccaacagattctacaccgtgatcaacaaaaagagcggcgagatcgtgcccatggaggtgaacttcaacttcgacgaccccaacctgatcatcctgcctctggcctttggcaagagacagggcagagaattcatctggaacgacctgctgtccctggaaaccggcagcctgaagctggccaacggaagagtgatcgagaagacactgtacaacagaagaacccggcaggatgagcctgccctgttcgtggccctgaccttcgagcggcgggaggtcctggactcctccaatatcaaaccaatgaacctgatcggcgtggcaagaggcgaaaacatccccgccgtgatcgccctgaccgaccccgagggctgcccactgagccggtttaaggatagcctgggaaacccaacccacatcctgagaatcggcgagagctataaggagaagcagcggaccatccaggccaagaaggaggtggagcagcggagagccggcggctacagccggaagtacgccagcaaagccaagaatctggcagacgatatggtgagaaacaccgctagagatctgctgtactacgccgtgacccaggatgccatgctgatcttcgccaacctgagccggggcttcggccggcagggcaagcggaccttcatggccgagagacagtacacacggatggaggactggctgaccgccaagctggcctacgagggcctgagcaagacctacctgtccaagacactggcccagtacacctccaagacatgcagcaactgtgggtttaccatcaccagcgccgactacgacagggtgctggagaagctgaagaagacagcaacaggctggatgaccacaattaacggcaaggagctgaaggtggagggccagattacctactacaacagatacaagagacagaacgtagtcaaggacctgtccgtcgagctggatagactgagcgaagaatctgtgaacaacgacatctcctcctggacaaagggcagaagcggagaagctctgagcctcctgaagaaaagattctcccatagacccgtgcaggagaagttcgtgtgcctgaactgcggcttcgagacacacgcagccgagcaagccgccctgaacatcgccagatcctggctgttcctgcggagccaggagtacaagaaataccagacaaacaagacaaccggcaacaccgataagagagccttcgtcgagacctggcagtccttttaccggaagaagcttaaggaggtgtggaaacctgccgtgcggtctggcggatctggcggaggctccaccagccccaagaaaaagagaaaagtctaagctgccttctgcggggcttgccttctggccatgcccttcttctctcccttgcacctgtacctcttggtctttgaataaagcctgagtaggaaggctagcaaaaaaaaaaaaaaaaaaaaaaaaaaaaaaaaaaaaaaaaaaaaaaaaaaaaaaaaaaaaaaaaaaaaaaaaaaaaaaaa

SEQ ID NO: 10239 - RNA, 8787 nt, synthetic construct
  source 1..8787: mol_type = other RNA
aggaaataagagagaaaagaagagtaagaagaaatataagagccaccatggcccctaagaagaagcgtaaagtgagccggatgaaccacgaccaggagttcgacccccctaaggtgtaccctcccgtccccgccgagaagagaaagcccatccgggtcctgagcctgttcgatggcatcgccaccggtctgctggtgctgaaggacctgggcatccaggtggataggtacattgcctccgaggtgtgcgaggactccatcaccgtgggaatggtgcgtcatcagggcaagatcatgtacgtgggcgacgtgcggagcgtgacacagaagcatatccaggagtggggccctttcgacctggtgatcggcggcagcccttgcaatgacctgagcatcgtgaacccagcccggaagggcctgtacgagggaaccggcagactgttcttcgagttttacagactgctgcacgacgcccggcctaaggaaggcgacgaccggcccttcttttggctgttcgagaatgtggtggccatgggagtcagcgacaagcgggatattagccggttcctggagagcaaccccgtgatgatcgatgccaaggaagtgagcgccgcccaccgggccagatacttctggggcaatctgcctggcatgaacagacccctggccagcaccgtgaacgacaagctggagctgcaggagtgcctggagcacggccggatcgccaagttcagcaaggtgagaaccatcaccacccgaagcaacagcatcaaacaaggcaaggaccagcactttcctgtgttcatgaacgagaaggaggacatcctgtggtgtaccgagatggagagagtgttcgggttcccagtccactacacagatgtcagcaacatgtctagactggccagacagagactgctgggaagaagctggtccgtccctgtgatcagacacctgttcgcccctctgaaggagtacttcgcctgcgtgagcagcggcaacagcaacgccaacagccggggccccagcttctctagcggcctggtgccactgtccctgagagggagccacatgggccccatggagatctacaaaaccgtgagcgcctggaagcggcagcctgtgcgcgtgctgagcctgtttcggaatatcgataaagtcctgaaaagcctgggattcctggagagcggctctggctccggcggtggcaccctgaagtacgtggaggatgtgacaaacgtggtcagacgggatgtggagaagtggggccccttcgatctggtgtacggcagcacccaacccctgggcagctcttgtgaccggtgccctggctggtacatgtttcagttccaccggatcctgcagtacgccctgccgagacaggagtcccagcggccattcttttggattttcatggacaacttgctgctgaccgaggatgaccaggaaactaccactcggttcctgcagaccgaagccgtgaccctgcaggacgtgagaggccgggactaccagaacgccatgcgggtgtggtccaacatccctggactgaaaagcaagcacgcacctctgacccctaaagaagaggagtacctgcaggcccaggtgcggagcagaagcaagctggacgcccctaaggtggatctgctggtgaagaattgcctcctgcccctgagagagtacttcaagtatttcagccagaatagtctgcccctgggaggcagcggcggcggcatgcccctgaaggccaggtaccaggagatggtgaccttcgaggacgtggccgtgcacttcaccaagaccgagtggaccggcctgagccccgcccagagggccctgtacaggagcgtgatgctggagaacttcggcaacctgaccgccctgggctaccccgtgcccaagcccgccctgatcagcctgctggagggcggcgacatggactggggcctggaggcccaggacgacccccccgccgagggcggcccaagcagcggcgcccctcctcccagcggcggcaggcggcccaagcagcggcgcccctcctcccagcggcggcagcccagccggctccccaacctctaccgaggagggcacctctgagtccgccacccccgagagcggccctggcacctccaccgagcccagcgagggcagcgcacccggcagccctgccggcagccccacctccacagaggagggaaccagcaccgagcccagcgaaggcagcgccccaggcaccagcaccgagcctagtgagcaggagattaaacggatcaacaagatcagaagaagacttgtgaaagacagcaacaccaagaaggccggcaagacaggccccatgaaaaccctgctggttagagtgatgacacccgatctgagagagcggctggaaaacctgagaaagaagcctgaaaatatcccccagcccatcagcaatacatctagagccaacctgaataagctgctgaccgattacaccgaaatgaagaaggcgatcctgcatgtgtactgggaagagttccagaaggaccctgtgggcctgatgagccgggtggcccagcctgccagcaagaagatcgatcagaacaagctgaaacctgagatggacgagaagggcaacctgaccaccgccggctttgcctgctctcagtgtggccagcccctgttcgtgtacaagctggagcaggtgtctgagaagggcaaggcttacaccaactacttcggacggtgcaatgtggccgagcacgaaaagctgatcctgctggcccagctgaagcccgagaaggatagcgacgaagccgtgacatatagcctgggaaagtttgggcagagggccctggatttctacagcattcatgtgaccaaggagtccacccaccccgtgaagcccctggcccagatcgccggaaacagatacgcctccggacctgtgggaaaggccctgagcgacgcatgtatgggcacaatcgcctccttcctgtctaagtaccaggacatcatcatcgaacaccagaaggtggtgaagggcaaccagaagagactggagagcctgcgggagctggccggcaaggaaaacctggaataccctagcgtgaccctgccacctcagcctcacaccaaggagggcgttgatgcctacaacgaagtgatcgcccgggtgcgaatgtgggtgaacctgaacctgtggcagaagctgaagctaagcagagatgatgccaagcctctgctgagactgaagggattcccttcctttcctctggtcgagagacaggccaacgaagtggactggtgggacatggtgtgtaacgtgaagaagctgatcaacgagaaaaaggaggatggcaaggtgttttggcagaatctggctggctacaagagacaggaagccctgagaccatacctgagcagcgaggaagatcggaagaagggaaagaaattcgctcggtaccagctgggcgacctgctgctgcacctggaaaagaagcacggcgaggactggggaaaggtgtacgacgaggcctgggagcggattgacaagaaagtggaaggcctgagcaagcacatcaagctggaagaggaacggagaagcgaggacgcccagagcaaggccgccctgaccgactggctgcgggctaaggccagcttcgtgatcgagggcctgaaggaggccgacaaggacgagttctgcagatgcgagctgaagctgcagaagtggtacggggacctgcggggaaagcccttcgccatcgaagccgagaacagcatcctggacatcagcggcttcagcaagcagtacaactgtgccttcatctggcagaaggacggcgtgaagaagctgaacctgtacctgatcatcaactacttcaagggcggcaagctgcggttcaagaagatcaaacctgaagccttcgaagccaacagattctacaccgtgatcaacaaaaagagcggcgagatcgtgcccatggaggtgaacttcaacttcgacgaccccaacctgatcatcctgcctctggcctttggcaagagacagggcagagaattcatctggaacgacctgctgtccctggaaaccggcagcctgaagctggccaacggaagagtgatcgagaagacactgtacaacagaagaacccggcaggatgagcctgccctgttcgtggccctgaccttcgagcggcgggaggtcctggactcctccaatatcaaaccaatgaacctgatcggcgtggcaagaggcgaaaacatccccgccgtgatcgccctgaccgaccccgagggctgcccactgagccggtttaaggatagcctgggaaacccaacccacatcctgagaatcggcgagagctataaggagaagcagcggaccatccaggccaagaaggaggtggagcagcggagagccggcggctacagccggaagtacgccagcaaagccaagaatctggcagacgatatggtgagaaacaccgctagagatctgctgtactacgccgtgacccaggatgccatgctgatcttcgccaacctgagccggggcttcggccggcagggcaagcggaccttcatggccgagagacagtacacacggatggaggactggctgaccgccaagctggcctacgagggcctgagcaagacctacctgtccaagacactggcccagtacacctccaagacatgcagcaactgtgggtttaccatcaccagcgccgactacgacagggtgctggagaagctgaagaagacagcaacaggctggatgaccacaattaacggcaaggagctgaaggtggagggccagattacctactacaacagatacaagagacagaacgtagtcaaggacctgtccgtcgagctggatagactgagcgaagaatctgtgaacaacgacatctcctcctggacaaagggcagaagcggagaagctctgagcctcctgaagaaaagattctcccatagacccgtgcaggagaagttcgtgtgcctgaactgcggcttcgagacacacgcagccgagcaagccgccctgaacatcgccagatcctggctgttcctgcggagccaggagtacaagaaataccagacaaacaagacaaccggcaacaccgataagagagccttcgtcgagacctggcagtccttttaccggaagaagcttaaggaggtgtggaaacctgccgtgcggtctggcggatctggcggaggctccaccagccccaagaaaaagagaaaagtctaagctgccttctgcggggcttgccttctggccatgcccttcttctctcccttgcacctgtacctcttggtctttgaataaagcctgagtaggaaggctagcaaaaaaaaaaaaaaaaaaaaaaaaaaaaaaaaaaaaaaaaaaaaaaaaaaaaaaaaaaaaaaaaaaaaaaaaaaaaaaaagcccagccggctccccaacctctaccgaggagggcacctctgagtccgccacccccgagagcggccctggcacctccaccgagcccagcgagggcagcgcacccggcagccctgccggcagccccacctccacagaggagggaaccagcaccgagcccagcgaaggcagcgccccaggcaccagcaccgagcctagtgagcaggagattaaacggatcaacaagatcagaagaagacttgtgaaagacagcaacaccaagaaggccggcaagacaggccccatgaaaaccctgctggttagagtgatgacacccgatctgagagagcggctggaaaacctgagaaagaagcctgaaaatatcccccagcccatcagcaatacatctagagccaacctgaataagctgctgaccgattacaccgaaatgaagaaggcgatcctgcatgtgtactgggaagagttccagaaggaccctgtgggcctgatgagccgggtggcccagcctgccagcaagaagatcgatcagaacaagctgaaacctgagatggacgagaagggcaacctgaccaccgccggctttgcctgctctcagtgtggccagcccctgttcgtgtacaagctggagcaggtgtctgagaagggcaaggcttacaccaactacttcggacggtgcaatgtggccgagcacgaaaagctgatcctgctggcccagctgaagcccgagaaggatagcgacgaagccgtgacatatagcctgggaaagtttgggcagagggccctggatttctacagcattcatgtgaccaaggagtccacccaccccgtgaagcccctggcccagatcgccggaaacagatacgcctccggacctgtgggaaaggccctgagcgacgcatgtatgggcacaatcgcctccttcctgtctaagtaccaggacatcatcatcgaacaccagaaggtggtgaagggcaaccagaagagactggagagcctgcgggagctggccggcaaggaaaacctggaataccctagcgtgaccctgccacctcagcctcacaccaaggagggcgttgatgcctacaacgaagtgatcgcccgggtgcgaatgtgggtgaacctgaacctgtggcagaagctgaagctaagcagagatgatgccaagcctctgctgagactgaagggattcccttcctttcctctggtcgagagacaggccaacgaagtggactggtgggacatggtgtgtaacgtgaagaagctgatcaacgagaaaaaggaggatggcaaggtgttttggcagaatctggctggctacaagagacaggaagccctgagaccatacctgagcagcgaggaagatcggaagaagggaaagaaattcgctcggtaccagctgggcgacctgctgctgcacctggaaaagaagcacggcgaggactggggaaaggtgtacgacgaggcctgggagcggattgacaagaaagtggaaggcctgagcaagcacatcaagctggaagaggaacggagaagcgaggacgcccagagcaaggccgccctgaccgactggctgcgggctaaggccagcttcgtgatcgagggcctgaaggaggccgacaaggacgagttctgcagatgcgagctgaagctgcagaagtggtacggggacctgcggggaaagcccttcgccatcgaagccgagaacagcatcctggacatcagcggcttcagcaagcagtacaactgtgccttcatctggcagaaggacggcgtgaagaagctgaacctgtacctgatcatcaactacttcaagggcggcaagctgcggttcaagaagatcaaacctgaagccttcgaagccaacagattctacaccgtgatcaacaaaaagagcggcgagatcgtgcccatggaggtgaacttcaacttcgacgaccccaacctgatcatcctgcctctggcctttggcaagagacagggcagagaattcatctggaacgacctgctgtccctggaaaccggcagcctgaagctggccaacggaagagtgatcgagaagacactgtacaacagaagaacccggcaggatgagcctgccctgttcgtggccctgaccttcgagcggcgggaggtcctggactcctccaatatcaaaccaatgaacctgatcggcgtggcaagaggcgaaaacatccccgccgtgatcgccctgaccgaccccgagggctgcccactgagccggtttaaggatagcctgggaaacccaacccacatcctgagaatcggcgagagctataaggagaagcagcggaccatccaggccaagaaggaggtggagcagcggagagccggcggctacagccggaagtacgccagcaaagccaagaatctggcagacgatatggtgagaaacaccgctagagatctgctgtactacgccgtgacccaggatgccatgctgatcttcgccaacctgagccggggcttcggccggcagggcaagcggaccttcatggccgagagacagtacacacggatggaggactggctgaccgccaagctggcctacgagggcctgagcaagacctacctgtccaagacactggcccagtacacctccaagacatgcagcaactgtgggtttaccatcaccagcgccgactacgacagggtgctggagaagctgaagaagacagcaacaggctggatgaccacaattaacggcaaggagctgaaggtggagggccagattacctactacaacagatacaagagacagaacgtagtcaaggacctgtccgtcgagctggatagactgagcgaagaatctgtgaacaacgacatctcctcctggacaaagggcagaagcggagaagctctgagcctcctgaagaaaagattctcccatagacccgtgcaggagaagttcgtgtgcctgaactgcggcttcgagacacacgcagccgagcaagccgccctgaacatcgccagatcctggctgttcctgcggagccaggagtacaagaaataccagacaaacaagacaaccggcaacaccgataagagagccttcgtcgagacctggcagtccttttaccggaagaagcttaaggaggtgtggaaacctgccgtgcggtctggcggatctggcggaggctccaccagccccaagaaaaagagaaaagtctaagctgccttctgcggggcttgccttctggccatgcccttcttctctcccttgcacctgtacctcttggtctttgaataaagcctgagtaggaaggctagcaaaaaaaaaaaaaaaaaaaaaaaaaaaaaaaaaaaaaaaaaaaaaaaaaaaaaaaaaaaaaaaaaaaaaaaaaaaaaaaa

SEQ ID NO: 10240 - RNA, 8787 nt, synthetic construct
  source 1..8787: mol_type = other RNA
aggaaataagagagaaaagaagagtaagaagaaatataagagccaccatggcccctaagaagaagcgtaaagtgagccggatgaaccacgaccaggagttcgacccccctaaggtgtaccctcccgtccccgccgagaagagaaagcccatccgggtcctgagcctgttcgatggcatcgccaccggtctgctggtgctgaaggacctgggcatccaggtggataggtacattgcctccgaggtgtgcgaggactccatcaccgtgggaatggtgcgtcatcagggcaagatcatgtacgtgggcgacgtgcggagcgtgacacagaagcatatccaggagtggggccctttcgacctggtgatcggcggcagcccttgcaatgacctgagcatcgtgaacccagcccggaagggcctgtacgagggaaccggcagactgttcttcgagttttacagactgctgcacgacgcccggcctaaggaaggcgacgaccggcccttcttttggctgttcgagaatgtggtggccatgggagtcagcgacaagcgggatattagccggttcctggagagcaaccccgtgatgatcgatgccaaggaagtgagcgccgcccaccgggccagatacttctggggcaatctgcctggcatgaacagacccctggccagcaccgtgaacgacaagctggagctgcaggagtgcctggagcacggccggatcgccaagttcagcaaggtgagaaccatcaccacccgaagcaacagcatcaaacaaggcaaggaccagcactttcctgtgttcatgaacgagaaggaggacatcctgtggtgtaccgagatggagagagtgttcgggttcccagtccactacacagatgtcagcaacatgtctagactggccagacagagactgctgggaagaagctggtccgtccctgtgatcagacacctgttcgcccctctgaaggagtacttcgcctgcgtgagcagcggcaacagcaacgccaacagccggggccccagcttctctagcggcctggtgccactgtccctgagagggagccacatgggccccatggagatctacaaaaccgtgagcgcctggaagcggcagcctgtgcgcgtgctgagcctgtttcggaatatcgataaagtcctgaaaagcctgggattcctggagagcggctctggctccggcggtggcaccctgaagtacgtggaggatgtgacaaacgtggtcagacgggatgtggagaagtggggccccttcgatctggtgtacggcagcacccaacccctgggcagctcttgtgaccggtgccctggctggtacatgtttcagttccaccggatcctgcagtacgccctgccgagacaggagtcccagcggccattcttttggattttcatggacaacttgctgctgaccgaggatgaccaggaaactaccactcggttcctgcagaccgaagccgtgaccctgcaggacgtgagaggccgggactaccagaacgccatgcgggtgtggtccaacatccctggactgaaaagcaagcacgcacctctgacccctaaagaagaggagtacctgcaggcccaggtgcggagcagaagcaagctggacgcccctaaggtggatctgctggtgaagaattgcctcctgcccctgagagagtacttcaagtatttcagccagaatagtctgcccctgggaggcagcggcggcggcgagctggtgaccttcagggacgtggtgatcagcttcagccaggaggagtgggagtacctggacagcgcccagagggacctgtactgggacgtgatgatggagaactacagcaacctggtgagcctggacctggagagcaagtacgacaagaagaccctgagcaccgagaaggacatcatcgagaagaacgacagccagtgggaggtgatcgagagcagcaagctggtgggcctggccaacagcggcggcccaagcagcggcgcccctcctcccagcggcggcaggcggcccaagcagcggcgcccctcctcccagcggcggcagcccagccggctccccaacctctaccgaggagggcacctctgagtccgccacccccgagagcggccctggcacctccaccgagcccagcgagggcagcgcacccggcagccctgccggcagccccacctccacagaggagggaaccagcaccgagcccagcgaaggcagcgccccaggcaccagcaccgagcctagtgagcaggagattaaacggatcaacaagatcagaagaagacttgtgaaagacagcaacaccaagaaggccggcaagacaggccccatgaaaaccctgctggttagagtgatgacacccgatctgagagagcggctggaaaacctgagaaagaagcctgaaaatatcccccagcccatcagcaatacatctagagccaacctgaataagctgctgaccgattacaccgaaatgaagaaggcgatcctgcatgtgtactgggaagagttccagaaggaccctgtgggcctgatgagccgggtggcccagcctgccagcaagaagatcgatcagaacaagctgaaacctgagatggacgagaagggcaacctgaccaccgccggctttgcctgctctcagtgtggccagcccctgttcgtgtacaagctggagcaggtgtctgagaagggcaaggcttacaccaactacttcggacggtgcaatgtggccgagcacgaaaagctgatcctgctggcccagctgaagcccgagaaggatagcgacgaagccgtgacatatagcctgggaaagtttgggcagagggccctggatttctacagcattcatgtgaccaaggagtccacccaccccgtgaagcccctggcccagatcgccggaaacagatacgcctccggacctgtgggaaaggccctgagcgacgcatgtatgggcacaatcgcctccttcctgtctaagtaccaggacatcatcatcgaacaccagaaggtggtgaagggcaaccagaagagactggagagcctgcgggagctggccggcaaggaaaacctggaataccctagcgtgaccctgccacctcagcctcacaccaaggagggcgttgatgcctacaacgaagtgatcgcccgggtgcgaatgtgggtgaacctgaacctgtggcagaagctgaagctaagcagagatgatgccaagcctctgctgagactgaagggattcccttcctttcctctggtcgagagacaggccaacgaagtggactggtgggacatggtgtgtaacgtgaagaagctgatcaacgagaaaaaggaggatggcaaggtgttttggcagaatctggctggctacaagagacaggaagccctgagaccatacctgagcagcgaggaagatcggaagaagggaaagaaattcgctcggtaccagctgggcgacctgctgctgcacctggaaaagaagcacggcgaggactggggaaaggtgtacgacgaggcctgggagcggattgacaagaaagtggaaggcctgagcaagcacatcaagctggaagaggaacggagaagcgaggacgcccagagcaaggccgccctgaccgactggctgcgggctaaggccagcttcgtgatcgagggcctgaaggaggccgacaaggacgagttctgcagatgcgagctgaagctgcagaagtggtacggggacctgcggggaaagcccttcgccatcgaagccgagaacagcatcctggacatcagcggcttcagcaagcagtacaactgtgccttcatctggcagaaggacggcgtgaagaagctgaacctgtacctgatcatcaactacttcaagggcggcaagctgcggttcaagaagatcaaacctgaagccttcgaagccaacagattctacaccgtgatcaacaaaaagagcggcgagatcgtgcccatggaggtgaacttcaacttcgacgaccccaacctgatcatcctgcctctggcctttggcaagagacagggcagagaattcatctggaacgacctgctgtccctggaaaccggcagcctgaagctggccaacggaagagtgatcgagaagacactgtacaacagaagaacccggcaggatgagcctgccctgttcgtggccctgaccttcgagcggcgggaggtcctggactcctccaatatcaaaccaatgaacctgatcggcgtggcaagaggcgaaaacatccccgccgtgatcgccctgaccgaccccgagggctgcccactgagccggtttaaggatagcctgggaaacccaacccacatcctgagaatcggcgagagctataaggagaagcagcggaccatccaggccaagaaggaggtggagcagcggagagccggcggctacagccggaagtacgccagcaaagccaagaatctggcagacgatatggtgagaaacaccgctagagatctgctgtactacgccgtgacccaggatgccatgctgatcttcgccaacctgagccggggcttcggccggcagggcaagcggaccttcatggccgagagacagtacacacggatggaggactggctgaccgccaagctggcctacgagggcctgagcaagacctacctgtccaagacactggcccagtacacctccaagacatgcagcaactgtgggtttaccatcaccagcgccgactacgacagggtgctggagaagctgaagaagacagcaacaggctggatgaccacaattaacggcaaggagctgaaggtggagggccagattacctactacaacagatacaagagacagaacgtagtcaaggacctgtccgtcgagctggatagactgagcgaagaatctgtgaacaacgacatctcctcctggacaaagggcagaagcggagaagctctgagcctcctgaagaaaagattctcccatagacccgtgcaggagaagttcgtgtgcctgaactgcggcttcgagacacacgcagccgagcaagccgccctgaacatcgccagatcctggctgttcctgcggagccaggagtacaagaaataccagacaaacaagacaaccggcaacaccgataagagagccttcgtcgagacctggcagtccttttaccggaagaagcttaaggaggtgtggaaacctgccgtgcggtctggcggatctggcggaggctccaccagccccaagaaaaagagaaaagtctaagctgccttctgcggggcttgccttctggccatgcccttcttctctcccttgcacctgtacctcttggtctttgaataaagcctgagtaggaaggctagcaaaaaaaaaaaaaaaaaaaaaaaaaaaaaaaaaaaaaaaaaaaaaaaaaaaaaaaaaaaaaaaaaaaaaaaaaaaaaaaagcccagccggctccccaacctctaccgaggagggcacctctgagtccgccacccccgagagcggccctggcacctccaccgagcccagcgagggcagcgcacccggcagccctgccggcagccccacctccacagaggagggaaccagcaccgagcccagcgaaggcagcgccccaggcaccagcaccgagcctagtgagcaggagattaaacggatcaacaagatcagaagaagacttgtgaaagacagcaacaccaagaaggccggcaagacaggccccatgaaaaccctgctggttagagtgatgacacccgatctgagagagcggctggaaaacctgagaaagaagcctgaaaatatcccccagcccatcagcaatacatctagagccaacctgaataagctgctgaccgattacaccgaaatgaagaaggcgatcctgcatgtgtactgggaagagttccagaaggaccctgtgggcctgatgagccgggtggcccagcctgccagcaagaagatcgatcagaacaagctgaaacctgagatggacgagaagggcaacctgaccaccgccggctttgcctgctctcagtgtggccagcccctgttcgtgtacaagctggagcaggtgtctgagaagggcaaggcttacaccaactacttcggacggtgcaatgtggccgagcacgaaaagctgatcctgctggcccagctgaagcccgagaaggatagcgacgaagccgtgacatatagcctgggaaagtttgggcagagggccctggatttctacagcattcatgtgaccaaggagtccacccaccccgtgaagcccctggcccagatcgccggaaacagatacgcctccggacctgtgggaaaggccctgagcgacgcatgtatgggcacaatcgcctccttcctgtctaagtaccaggacatcatcatcgaacaccagaaggtggtgaagggcaaccagaagagactggagagcctgcgggagctggccggcaaggaaaacctggaataccctagcgtgaccctgccacctcagcctcacaccaaggagggcgttgatgcctacaacgaagtgatcgcccgggtgcgaatgtgggtgaacctgaacctgtggcagaagctgaagctaagcagagatgatgccaagcctctgctgagactgaagggattcccttcctttcctctggtcgagagacaggccaacgaagtggactggtgggacatggtgtgtaacgtgaagaagctgatcaacgagaaaaaggaggatggcaaggtgttttggcagaatctggctggctacaagagacaggaagccctgagaccatacctgagcagcgaggaagatcggaagaagggaaagaaattcgctcggtaccagctgggcgacctgctgctgcacctggaaaagaagcacggcgaggactggggaaaggtgtacgacgaggcctgggagcggattgacaagaaagtggaaggcctgagcaagcacatcaagctggaagaggaacggagaagcgaggacgcccagagcaaggccgccctgaccgactggctgcgggctaaggccagcttcgtgatcgagggcctgaaggaggccgacaaggacgagttctgcagatgcgagctgaagctgcagaagtggtacggggacctgcggggaaagcccttcgccatcgaagccgagaacagcatcctggacatcagcggcttcagcaagcagtacaactgtgccttcatctggcagaaggacggcgtgaagaagctgaacctgtacctgatcatcaactacttcaagggcggcaagctgcggttcaagaagatcaaacctgaagccttcgaagccaacagattctacaccgtgatcaacaaaaagagcggcgagatcgtgcccatggaggtgaacttcaacttcgacgaccccaacctgatcatcctgcctctggcctttggcaagagacagggcagagaattcatctggaacgacctgctgtccctggaaaccggcagcctgaagctggccaacggaagagtgatcgagaagacactgtacaacagaagaacccggcaggatgagcctgccctgttcgtggccctgaccttcgagcggcgggaggtcctggactcctccaatatcaaaccaatgaacctgatcggcgtggcaagaggcgaaaacatccccgccgtgatcgccctgaccgaccccgagggctgcccactgagccggtttaaggatagcctgggaaacccaacccacatcctgagaatcggcgagagctataaggagaagcagcggaccatccaggccaagaaggaggtggagcagcggagagccggcggctacagccggaagtacgccagcaaagccaagaatctggcagacgatatggtgagaaacaccgctagagatctgctgtactacgccgtgacccaggatgccatgctgatcttcgccaacctgagccggggcttcggccggcagggcaagcggaccttcatggccgagagacagtacacacggatggaggactggctgaccgccaagctggcctacgagggcctgagcaagacctacctgtccaagacactggcccagtacacctccaagacatgcagcaactgtgggtttaccatcaccagcgccgactacgacagggtgctggagaagctgaagaagacagcaacaggctggatgaccacaattaacggcaaggagctgaaggtggagggccagattacctactacaacagatacaagagacagaacgtagtcaaggacctgtccgtcgagctggatagactgagcgaagaatctgtgaacaacgacatctcctcctggacaaagggcagaagcggagaagctctgagcctcctgaagaaaagattctcccatagacccgtgcaggagaagttcgtgtgcctgaactgcggcttcgagacacacgcagccgagcaagccgccctgaacatcgccagatcctggctgttcctgcggagccaggagtacaagaaataccagacaaacaagacaaccggcaacaccgataagagagccttcgtcgagacctggcagtccttttaccggaagaagcttaaggaggtgtggaaacctgccgtgcggtctggcggatctggcggaggctccaccagccccaagaaaaagagaaaagtctaagctgccttctgcggggcttgccttctggccatgcccttcttctctcccttgcacctgtacctcttggtctttgaataaagcctgagtaggaaggctagcaaaaaaaaaaaaaaaaaaaaaaaaaaaaaaaaaaaaaaaaaaaaaaaaaaaaaaaaaaaaaaaaaaaaaaaaaaaaaaaa

SEQ ID NO: 10241 - RNA, 8787 nt, synthetic construct
  source 1..8787: mol_type = other RNA
aggaaataagagagaaaagaagagtaagaagaaatataagagccaccatggcccctaagaagaagcgtaaagtgagccggatgaaccacgaccaggagttcgacccccctaaggtgtaccctcccgtccccgccgagaagagaaagcccatccgggtcctgagcctgttcgatggcatcgccaccggtctgctggtgctgaaggacctgggcatccaggtggataggtacattgcctccgaggtgtgcgaggactccatcaccgtgggaatggtgcgtcatcagggcaagatcatgtacgtgggcgacgtgcggagcgtgacacagaagcatatccaggagtggggccctttcgacctggtgatcggcggcagcccttgcaatgacctgagcatcgtgaacccagcccggaagggcctgtacgagggaaccggcagactgttcttcgagttttacagactgctgcacgacgcccggcctaaggaaggcgacgaccggcccttcttttggctgttcgagaatgtggtggccatgggagtcagcgacaagcgggatattagccggttcctggagagcaaccccgtgatgatcgatgccaaggaagtgagcgccgcccaccgggccagatacttctggggcaatctgcctggcatgaacagacccctggccagcaccgtgaacgacaagctggagctgcaggagtgcctggagcacggccggatcgccaagttcagcaaggtgagaaccatcaccacccgaagcaacagcatcaaacaaggcaaggaccagcactttcctgtgttcatgaacgagaaggaggacatcctgtggtgtaccgagatggagagagtgttcgggttcccagtccactacacagatgtcagcaacatgtctagactggccagacagagactgctgggaagaagctggtccgtccctgtgatcagacacctgttcgcccctctgaaggagtacttcgcctgcgtgagcagcggcaacagcaacgccaacagccggggccccagcttctctagcggcctggtgccactgtccctgagagggagccacatgggccccatggagatctacaaaaccgtgagcgcctggaagcggcagcctgtgcgcgtgctgagcctgtttcggaatatcgataaagtcctgaaaagcctgggattcctggagagcggctctggctccggcggtggcaccctgaagtacgtggaggatgtgacaaacgtggtcagacgggatgtggagaagtggggccccttcgatctggtgtacggcagcacccaacccctgggcagctcttgtgaccggtgccctggctggtacatgtttcagttccaccggatcctgcagtacgccctgccgagacaggagtcccagcggccattcttttggattttcatggacaacttgctgctgaccgaggatgaccaggaaactaccactcggttcctgcagaccgaagccgtgaccctgcaggacgtgagaggccgggactaccagaacgccatgcgggtgtggtccaacatccctggactgaaaagcaagcacgcacctctgacccctaaagaagaggagtacctgcaggcccaggtgcggagcagaagcaagctggacgcccctaaggtggatctgctggtgaagaattgcctcctgcccctgagagagtacttcaagtatttcagccagaatagtctgcccctgggaggcagcggcggcggcgcctgcgagagcatcaccttcggcgacgtggccatcgacttcagccaccaggagtgggagtacctgaacctggtgcagaagaccctgtaccaggaggtgatgatggagaactacgacaacctggtgagcctgggccacagcatcagcaagcccgacctgatcaccctgctggagcagggcaaggagccctggatgatcgtgggcgaggagaccaggggcgagtgcaccgacctggacagcaggggcggcccaagcagcggcgcccctcctcccagcggcggcaggcggcccaagcagcggcgcccctcctcccagcggcggcagcccagccggctccccaacctctaccgaggagggcacctctgagtccgccacccccgagagcggccctggcacctccaccgagcccagcgagggcagcgcacccggcagccctgccggcagccccacctccacagaggagggaaccagcaccgagcccagcgaaggcagcgccccaggcaccagcaccgagcctagtgagcaggagattaaacggatcaacaagatcagaagaagacttgtgaaagacagcaacaccaagaaggccggcaagacaggccccatgaaaaccctgctggttagagtgatgacacccgatctgagagagcggctggaaaacctgagaaagaagcctgaaaatatcccccagcccatcagcaatacatctagagccaacctgaataagctgctgaccgattacaccgaaatgaagaaggcgatcctgcatgtgtactgggaagagttccagaaggaccctgtgggcctgatgagccgggtggcccagcctgccagcaagaagatcgatcagaacaagctgaaacctgagatggacgagaagggcaacctgaccaccgccggctttgcctgctctcagtgtggccagcccctgttcgtgtacaagctggagcaggtgtctgagaagggcaaggcttacaccaactacttcggacggtgcaatgtggccgagcacgaaaagctgatcctgctggcccagctgaagcccgagaaggatagcgacgaagccgtgacatatagcctgggaaagtttgggcagagggccctggatttctacagcattcatgtgaccaaggagtccacccaccccgtgaagcccctggcccagatcgccggaaacagatacgcctccggacctgtgggaaaggccctgagcgacgcatgtatgggcacaatcgcctccttcctgtctaagtaccaggacatcatcatcgaacaccagaaggtggtgaagggcaaccagaagagactggagagcctgcgggagctggccggcaaggaaaacctggaataccctagcgtgaccctgccacctcagcctcacaccaaggagggcgttgatgcctacaacgaagtgatcgcccgggtgcgaatgtgggtgaacctgaacctgtggcagaagctgaagctaagcagagatgatgccaagcctctgctgagactgaagggattcccttcctttcctctggtcgagagacaggccaacgaagtggactggtgggacatggtgtgtaacgtgaagaagctgatcaacgagaaaaaggaggatggcaaggtgttttggcagaatctggctggctacaagagacaggaagccctgagaccatacctgagcagcgaggaagatcggaagaagggaaagaaattcgctcggtaccagctgggcgacctgctgctgcacctggaaaagaagcacggcgaggactggggaaaggtgtacgacgaggcctgggagcggattgacaagaaagtggaaggcctgagcaagcacatcaagctggaagaggaacggagaagcgaggacgcccagagcaaggccgccctgaccgactggctgcgggctaaggccagcttcgtgatcgagggcctgaaggaggccgacaaggacgagttctgcagatgcgagctgaagctgcagaagtggtacggggacctgcggggaaagcccttcgccatcgaagccgagaacagcatcctggacatcagcggcttcagcaagcagtacaactgtgccttcatctggcagaaggacggcgtgaagaagctgaacctgtacctgatcatcaactacttcaagggcggcaagctgcggttcaagaagatcaaacctgaagccttcgaagccaacagattctacaccgtgatcaacaaaaagagcggcgagatcgtgcccatggaggtgaacttcaacttcgacgaccccaacctgatcatcctgcctctggcctttggcaagagacagggcagagaattcatctggaacgacctgctgtccctggaaaccggcagcctgaagctggccaacggaagagtgatcgagaagacactgtacaacagaagaacccggcaggatgagcctgccctgttcgtggccctgaccttcgagcggcgggaggtcctggactcctccaatatcaaaccaatgaacctgatcggcgtggcaagaggcgaaaacatccccgccgtgatcgccctgaccgaccccgagggctgcccactgagccggtttaaggatagcctgggaaacccaacccacatcctgagaatcggcgagagctataaggagaagcagcggaccatccaggccaagaaggaggtggagcagcggagagccggcggctacagccggaagtacgccagcaaagccaagaatctggcagacgatatggtgagaaacaccgctagagatctgctgtactacgccgtgacccaggatgccatgctgatcttcgccaacctgagccggggcttcggccggcagggcaagcggaccttcatggccgagagacagtacacacggatggaggactggctgaccgccaagctggcctacgagggcctgagcaagacctacctgtccaagacactggcccagtacacctccaagacatgcagcaactgtgggtttaccatcaccagcgccgactacgacagggtgctggagaagctgaagaagacagcaacaggctggatgaccacaattaacggcaaggagctgaaggtggagggccagattacctactacaacagatacaagagacagaacgtagtcaaggacctgtccgtcgagctggatagactgagcgaagaatctgtgaacaacgacatctcctcctggacaaagggcagaagcggagaagctctgagcctcctgaagaaaagattctcccatagacccgtgcaggagaagttcgtgtgcctgaactgcggcttcgagacacacgcagccgagcaagccgccctgaacatcgccagatcctggctgttcctgcggagccaggagtacaagaaataccagacaaacaagacaaccggcaacaccgataagagagccttcgtcgagacctggcagtccttttaccggaagaagcttaaggaggtgtggaaacctgccgtgcggtctggcggatctggcggaggctccaccagccccaagaaaaagagaaaagtctaagctgccttctgcggggcttgccttctggccatgcccttcttctctcccttgcacctgtacctcttggtctttgaataaagcctgagtaggaaggctagcaaaaaaaaaaaaaaaaaaaaaaaaaaaaaaaaaaaaaaaaaaaaaaaaaaaaaaaaaaaaaaaaaaaaaaaaaaaaaaaagcccagccggctccccaacctctaccgaggagggcacctctgagtccgccacccccgagagcggccctggcacctccaccgagcccagcgagggcagcgcacccggcagccctgccggcagccccacctccacagaggagggaaccagcaccgagcccagcgaaggcagcgccccaggcaccagcaccgagcctagtgagcaggagattaaacggatcaacaagatcagaagaagacttgtgaaagacagcaacaccaagaaggccggcaagacaggccccatgaaaaccctgctggttagagtgatgacacccgatctgagagagcggctggaaaacctgagaaagaagcctgaaaatatcccccagcccatcagcaatacatctagagccaacctgaataagctgctgaccgattacaccgaaatgaagaaggcgatcctgcatgtgtactgggaagagttccagaaggaccctgtgggcctgatgagccgggtggcccagcctgccagcaagaagatcgatcagaacaagctgaaacctgagatggacgagaagggcaacctgaccaccgccggctttgcctgctctcagtgtggccagcccctgttcgtgtacaagctggagcaggtgtctgagaagggcaaggcttacaccaactacttcggacggtgcaatgtggccgagcacgaaaagctgatcctgctggcccagctgaagcccgagaaggatagcgacgaagccgtgacatatagcctgggaaagtttgggcagagggccctggatttctacagcattcatgtgaccaaggagtccacccaccccgtgaagcccctggcccagatcgccggaaacagatacgcctccggacctgtgggaaaggccctgagcgacgcatgtatgggcacaatcgcctccttcctgtctaagtaccaggacatcatcatcgaacaccagaaggtggtgaagggcaaccagaagagactggagagcctgcgggagctggccggcaaggaaaacctggaataccctagcgtgaccctgccacctcagcctcacaccaaggagggcgttgatgcctacaacgaagtgatcgcccgggtgcgaatgtgggtgaacctgaacctgtggcagaagctgaagctaagcagagatgatgccaagcctctgctgagactgaagggattcccttcctttcctctggtcgagagacaggccaacgaagtggactggtgggacatggtgtgtaacgtgaagaagctgatcaacgagaaaaaggaggatggcaaggtgttttggcagaatctggctggctacaagagacaggaagccctgagaccatacctgagcagcgaggaagatcggaagaagggaaagaaattcgctcggtaccagctgggcgacctgctgctgcacctggaaaagaagcacggcgaggactggggaaaggtgtacgacgaggcctgggagcggattgacaagaaagtggaaggcctgagcaagcacatcaagctggaagaggaacggagaagcgaggacgcccagagcaaggccgccctgaccgactggctgcgggctaaggccagcttcgtgatcgagggcctgaaggaggccgacaaggacgagttctgcagatgcgagctgaagctgcagaagtggtacggggacctgcggggaaagcccttcgccatcgaagccgagaacagcatcctggacatcagcggcttcagcaagcagtacaactgtgccttcatctggcagaaggacggcgtgaagaagctgaacctgtacctgatcatcaactacttcaagggcggcaagctgcggttcaagaagatcaaacctgaagccttcgaagccaacagattctacaccgtgatcaacaaaaagagcggcgagatcgtgcccatggaggtgaacttcaacttcgacgaccccaacctgatcatcctgcctctggcctttggcaagagacagggcagagaattcatctggaacgacctgctgtccctggaaaccggcagcctgaagctggccaacggaagagtgatcgagaagacactgtacaacagaagaacccggcaggatgagcctgccctgttcgtggccctgaccttcgagcggcgggaggtcctggactcctccaatatcaaaccaatgaacctgatcggcgtggcaagaggcgaaaacatccccgccgtgatcgccctgaccgaccccgagggctgcccactgagccggtttaaggatagcctgggaaacccaacccacatcctgagaatcggcgagagctataaggagaagcagcggaccatccaggccaagaaggaggtggagcagcggagagccggcggctacagccggaagtacgccagcaaagccaagaatctggcagacgatatggtgagaaacaccgctagagatctgctgtactacgccgtgacccaggatgccatgctgatcttcgccaacctgagccggggcttcggccggcagggcaagcggaccttcatggccgagagacagtacacacggatggaggactggctgaccgccaagctggcctacgagggcctgagcaagacctacctgtccaagacactggcccagtacacctccaagacatgcagcaactgtgggtttaccatcaccagcgccgactacgacagggtgctggagaagctgaagaagacagcaacaggctggatgaccacaattaacggcaaggagctgaaggtggagggccagattacctactacaacagatacaagagacagaacgtagtcaaggacctgtccgtcgagctggatagactgagcgaagaatctgtgaacaacgacatctcctcctggacaaagggcagaagcggagaagctctgagcctcctgaagaaaagattctcccatagacccgtgcaggagaagttcgtgtgcctgaactgcggcttcgagacacacgcagccgagcaagccgccctgaacatcgccagatcctggctgttcctgcggagccaggagtacaagaaataccagacaaacaagacaaccggcaacaccgataagagagccttcgtcgagacctggcagtccttttaccggaagaagcttaaggaggtgtggaaacctgccgtgcggtctggcggatctggcggaggctccaccagccccaagaaaaagagaaaagtctaagctgccttctgcggggcttgccttctggccatgcccttcttctctcccttgcacctgtacctcttggtctttgaataaagcctgagtaggaaggctagcaaaaaaaaaaaaaaaaaaaaaaaaaaaaaaaaaaaaaaaaaaaaaaaaaaaaaaaaaaaaaaaaaaaaaaaaaaaaaaaa

SEQ ID NO: 10242 - RNA, 8784 nt, synthetic construct
  source 1..8784: mol_type = other RNA
aggaaataagagagaaaagaagagtaagaagaaatataagagccaccatggcccctaagaagaagcgtaaagtgagccggatgaaccacgaccaggagttcgacccccctaaggtgtaccctcccgtccccgccgagaagagaaagcccatccgggtcctgagcctgttcgatggcatcgccaccggtctgctggtgctgaaggacctgggcatccaggtggataggtacattgcctccgaggtgtgcgaggactccatcaccgtgggaatggtgcgtcatcagggcaagatcatgtacgtgggcgacgtgcggagcgtgacacagaagcatatccaggagtggggccctttcgacctggtgatcggcggcagcccttgcaatgacctgagcatcgtgaacccagcccggaagggcctgtacgagggaaccggcagactgttcttcgagttttacagactgctgcacgacgcccggcctaaggaaggcgacgaccggcccttcttttggctgttcgagaatgtggtggccatgggagtcagcgacaagcgggatattagccggttcctggagagcaaccccgtgatgatcgatgccaaggaagtgagcgccgcccaccgggccagatacttctggggcaatctgcctggcatgaacagacccctggccagcaccgtgaacgacaagctggagctgcaggagtgcctggagcacggccggatcgccaagttcagcaaggtgagaaccatcaccacccgaagcaacagcatcaaacaaggcaaggaccagcactttcctgtgttcatgaacgagaaggaggacatcctgtggtgtaccgagatggagagagtgttcgggttcccagtccactacacagatgtcagcaacatgtctagactggccagacagagactgctgggaagaagctggtccgtccctgtgatcagacacctgttcgcccctctgaaggagtacttcgcctgcgtgagcagcggcaacagcaacgccaacagccggggccccagcttctctagcggcctggtgccactgtccctgagagggagccacatgggccccatggagatctacaaaaccgtgagcgcctggaagcggcagcctgtgcgcgtgctgagcctgtttcggaatatcgataaagtcctgaaaagcctgggattcctggagagcggctctggctccggcggtggcaccctgaagtacgtggaggatgtgacaaacgtggtcagacgggatgtggagaagtggggccccttcgatctggtgtacggcagcacccaacccctgggcagctcttgtgaccggtgccctggctggtacatgtttcagttccaccggatcctgcagtacgccctgccgagacaggagtcccagcggccattcttttggattttcatggacaacttgctgctgaccgaggatgaccaggaaactaccactcggttcctgcagaccgaagccgtgaccctgcaggacgtgagaggccgggactaccagaacgccatgcgggtgtggtccaacatccctggactgaaaagcaagcacgcacctctgacccctaaagaagaggagtacctgcaggcccaggtgcggagcagaagcaagctggacgcccctaaggtggatctgctggtgaagaattgcctcctgcccctgagagagtacttcaagtatttcagccagaatagtctgcccctgggaggcagcggcggcggcctgcagggcctgctgaccttcggcgacgtggccatcgagttcagccaggaggagtggaggtgcctgagccacacccagagggagctgtacagggacgtgatgctggagaactacggccacctgctgttcctgggcctgaccgtgagcaagcccgacctggtgagcttcctggagcagaggaaggagccctgggacgagaagaggaacaagaccgccggcttcgacgccagcaggtgggagggcggcccaagcagcggcgcccctcctcccagcggcggcaggcggcccaagcagcggcgcccctcctcccagcggcggcagcccagccggctccccaacctctaccgaggagggcacctctgagtccgccacccccgagagcggccctggcacctccaccgagcccagcgagggcagcgcacccggcagccctgccggcagccccacctccacagaggagggaaccagcaccgagcccagcgaaggcagcgccccaggcaccagcaccgagcctagtgagcaggagattaaacggatcaacaagatcagaagaagacttgtgaaagacagcaacaccaagaaggccggcaagacaggccccatgaaaaccctgctggttagagtgatgacacccgatctgagagagcggctggaaaacctgagaaagaagcctgaaaatatcccccagcccatcagcaatacatctagagccaacctgaataagctgctgaccgattacaccgaaatgaagaaggcgatcctgcatgtgtactgggaagagttccagaaggaccctgtgggcctgatgagccgggtggcccagcctgccagcaagaagatcgatcagaacaagctgaaacctgagatggacgagaagggcaacctgaccaccgccggctttgcctgctctcagtgtggccagcccctgttcgtgtacaagctggagcaggtgtctgagaagggcaaggcttacaccaactacttcggacggtgcaatgtggccgagcacgaaaagctgatcctgctggcccagctgaagcccgagaaggatagcgacgaagccgtgacatatagcctgggaaagtttgggcagagggccctggatttctacagcattcatgtgaccaaggagtccacccaccccgtgaagcccctggcccagatcgccggaaacagatacgcctccggacctgtgggaaaggccctgagcgacgcatgtatgggcacaatcgcctccttcctgtctaagtaccaggacatcatcatcgaacaccagaaggtggtgaagggcaaccagaagagactggagagcctgcgggagctggccggcaaggaaaacctggaataccctagcgtgaccctgccacctcagcctcacaccaaggagggcgttgatgcctacaacgaagtgatcgcccgggtgcgaatgtgggtgaacctgaacctgtggcagaagctgaagctaagcagagatgatgccaagcctctgctgagactgaagggattcccttcctttcctctggtcgagagacaggccaacgaagtggactggtgggacatggtgtgtaacgtgaagaagctgatcaacgagaaaaaggaggatggcaaggtgttttggcagaatctggctggctacaagagacaggaagccctgagaccatacctgagcagcgaggaagatcggaagaagggaaagaaattcgctcggtaccagctgggcgacctgctgctgcacctggaaaagaagcacggcgaggactggggaaaggtgtacgacgaggcctgggagcggattgacaagaaagtggaaggcctgagcaagcacatcaagctggaagaggaacggagaagcgaggacgcccagagcaaggccgccctgaccgactggctgcgggctaaggccagcttcgtgatcgagggcctgaaggaggccgacaaggacgagttctgcagatgcgagctgaagctgcagaagtggtacggggacctgcggggaaagcccttcgccatcgaagccgagaacagcatcctggacatcagcggcttcagcaagcagtacaactgtgccttcatctggcagaaggacggcgtgaagaagctgaacctgtacctgatcatcaactacttcaagggcggcaagctgcggttcaagaagatcaaacctgaagccttcgaagccaacagattctacaccgtgatcaacaaaaagagcggcgagatcgtgcccatggaggtgaacttcaacttcgacgaccccaacctgatcatcctgcctctggcctttggcaagagacagggcagagaattcatctggaacgacctgctgtccctggaaaccggcagcctgaagctggccaacggaagagtgatcgagaagacactgtacaacagaagaacccggcaggatgagcctgccctgttcgtggccctgaccttcgagcggcgggaggtcctggactcctccaatatcaaaccaatgaacctgatcggcgtggcaagaggcgaaaacatccccgccgtgatcgccctgaccgaccccgagggctgcccactgagccggtttaaggatagcctgggaaacccaacccacatcctgagaatcggcgagagctataaggagaagcagcggaccatccaggccaagaaggaggtggagcagcggagagccggcggctacagccggaagtacgccagcaaagccaagaatctggcagacgatatggtgagaaacaccgctagagatctgctgtactacgccgtgacccaggatgccatgctgatcttcgccaacctgagccggggcttcggccggcagggcaagcggaccttcatggccgagagacagtacacacggatggaggactggctgaccgccaagctggcctacgagggcctgagcaagacctacctgtccaagacactggcccagtacacctccaagacatgcagcaactgtgggtttaccatcaccagcgccgactacgacagggtgctggagaagctgaagaagacagcaacaggctggatgaccacaattaacggcaaggagctgaaggtggagggccagattacctactacaacagatacaagagacagaacgtagtcaaggacctgtccgtcgagctggatagactgagcgaagaatctgtgaacaacgacatctcctcctggacaaagggcagaagcggagaagctctgagcctcctgaagaaaagattctcccatagacccgtgcaggagaagttcgtgtgcctgaactgcggcttcgagacacacgcagccgagcaagccgccctgaacatcgccagatcctggctgttcctgcggagccaggagtacaagaaataccagacaaacaagacaaccggcaacaccgataagagagccttcgtcgagacctggcagtccttttaccggaagaagcttaaggaggtgtggaaacctgccgtgcggtctggcggatctggcggaggctccaccagccccaagaaaaagagaaaagtctaagctgccttctgcggggcttgccttctggccatgcccttcttctctcccttgcacctgtacctcttggtctttgaataaagcctgagtaggaaggctagcaaaaaaaaaaaaaaaaaaaaaaaaaaaaaaaaaaaaaaaaaaaaaaaaaaaaaaaaaaaaaaaaaaaaaaaaaaaaaaaagcccagccggctccccaacctctaccgaggagggcacctctgagtccgccacccccgagagcggccctggcacctccaccgagcccagcgagggcagcgcacccggcagccctgccggcagccccacctccacagaggagggaaccagcaccgagcccagcgaaggcagcgccccaggcaccagcaccgagcctagtgagcaggagattaaacggatcaacaagatcagaagaagacttgtgaaagacagcaacaccaagaaggccggcaagacaggccccatgaaaaccctgctggttagagtgatgacacccgatctgagagagcggctggaaaacctgagaaagaagcctgaaaatatcccccagcccatcagcaatacatctagagccaacctgaataagctgctgaccgattacaccgaaatgaagaaggcgatcctgcatgtgtactgggaagagttccagaaggaccctgtgggcctgatgagccgggtggcccagcctgccagcaagaagatcgatcagaacaagctgaaacctgagatggacgagaagggcaacctgaccaccgccggctttgcctgctctcagtgtggccagcccctgttcgtgtacaagctggagcaggtgtctgagaagggcaaggcttacaccaactacttcggacggtgcaatgtggccgagcacgaaaagctgatcctgctggcccagctgaagcccgagaaggatagcgacgaagccgtgacatatagcctgggaaagtttgggcagagggccctggatttctacagcattcatgtgaccaaggagtccacccaccccgtgaagcccctggcccagatcgccggaaacagatacgcctccggacctgtgggaaaggccctgagcgacgcatgtatgggcacaatcgcctccttcctgtctaagtaccaggacatcatcatcgaacaccagaaggtggtgaagggcaaccagaagagactggagagcctgcgggagctggccggcaaggaaaacctggaataccctagcgtgaccctgccacctcagcctcacaccaaggagggcgttgatgcctacaacgaagtgatcgcccgggtgcgaatgtgggtgaacctgaacctgtggcagaagctgaagctaagcagagatgatgccaagcctctgctgagactgaagggattcccttcctttcctctggtcgagagacaggccaacgaagtggactggtgggacatggtgtgtaacgtgaagaagctgatcaacgagaaaaaggaggatggcaaggtgttttggcagaatctggctggctacaagagacaggaagccctgagaccatacctgagcagcgaggaagatcggaagaagggaaagaaattcgctcggtaccagctgggcgacctgctgctgcacctggaaaagaagcacggcgaggactggggaaaggtgtacgacgaggcctgggagcggattgacaagaaagtggaaggcctgagcaagcacatcaagctggaagaggaacggagaagcgaggacgcccagagcaaggccgccctgaccgactggctgcgggctaaggccagcttcgtgatcgagggcctgaaggaggccgacaaggacgagttctgcagatgcgagctgaagctgcagaagtggtacggggacctgcggggaaagcccttcgccatcgaagccgagaacagcatcctggacatcagcggcttcagcaagcagtacaactgtgccttcatctggcagaaggacggcgtgaagaagctgaacctgtacctgatcatcaactacttcaagggcggcaagctgcggttcaagaagatcaaacctgaagccttcgaagccaacagattctacaccgtgatcaacaaaaagagcggcgagatcgtgcccatggaggtgaacttcaacttcgacgaccccaacctgatcatcctgcctctggcctttggcaagagacagggcagagaattcatctggaacgacctgctgtccctggaaaccggcagcctgaagctggccaacggaagagtgatcgagaagacactgtacaacagaagaacccggcaggatgagcctgccctgttcgtggccctgaccttcgagcggcgggaggtcctggactcctccaatatcaaaccaatgaacctgatcggcgtggcaagaggcgaaaacatccccgccgtgatcgccctgaccgaccccgagggctgcccactgagccggtttaaggatagcctgggaaacccaacccacatcctgagaatcggcgagagctataaggagaagcagcggaccatccaggccaagaaggaggtggagcagcggagagccggcggctacagccggaagtacgccagcaaagccaagaatctggcagacgatatggtgagaaacaccgctagagatctgctgtactacgccgtgacccaggatgccatgctgatcttcgccaacctgagccggggcttcggccggcagggcaagcggaccttcatggccgagagacagtacacacggatggaggactggctgaccgccaagctggcctacgagggcctgagcaagacctacctgtccaagacactggcccagtacacctccaagacatgcagcaactgtgggtttaccatcaccagcgccgactacgacagggtgctggagaagctgaagaagacagcaacaggctggatgaccacaattaacggcaaggagctgaaggtggagggccagattacctactacaacagatacaagagacagaacgtagtcaaggacctgtccgtcgagctggatagactgagcgaagaatctgtgaacaacgacatctcctcctggacaaagggcagaagcggagaagctctgagcctcctgaagaaaagattctcccatagacccgtgcaggagaagttcgtgtgcctgaactgcggcttcgagacacacgcagccgagcaagccgccctgaacatcgccagatcctggctgttcctgcggagccaggagtacaagaaataccagacaaacaagacaaccggcaacaccgataagagagccttcgtcgagacctggcagtccttttaccggaagaagcttaaggaggtgtggaaacctgccgtgcggtctggcggatctggcggaggctccaccagccccaagaaaaagagaaaagtctaagctgccttctgcggggcttgccttctggccatgcccttcttctctcccttgcacctgtacctcttggtctttgaataaagcctgagtaggaaggctagcaaaaaaaaaaaaaaaaaaaaaaaaaaaaaaaaaaaaaaaaaaaaaaaaaaaaaaaaaaaaaaaaaaaaaaaaaaaaaaaa

SEQ ID NO: 10243 - RNA, 8787 nt, synthetic construct
  source 1..8787: mol_type = other RNA
aggaaataagagagaaaagaagagtaagaagaaatataagagccaccatggcccctaagaagaagcgtaaagtgagccggatgaaccacgaccaggagttcgacccccctaaggtgtaccctcccgtccccgccgagaagagaaagcccatccgggtcctgagcctgttcgatggcatcgccaccggtctgctggtgctgaaggacctgggcatccaggtggataggtacattgcctccgaggtgtgcgaggactccatcaccgtgggaatggtgcgtcatcagggcaagatcatgtacgtgggcgacgtgcggagcgtgacacagaagcatatccaggagtggggccctttcgacctggtgatcggcggcagcccttgcaatgacctgagcatcgtgaacccagcccggaagggcctgtacgagggaaccggcagactgttcttcgagttttacagactgctgcacgacgcccggcctaaggaaggcgacgaccggcccttcttttggctgttcgagaatgtggtggccatgggagtcagcgacaagcgggatattagccggttcctggagagcaaccccgtgatgatcgatgccaaggaagtgagcgccgcccaccgggccagatacttctggggcaatctgcctggcatgaacagacccctggccagcaccgtgaacgacaagctggagctgcaggagtgcctggagcacggccggatcgccaagttcagcaaggtgagaaccatcaccacccgaagcaacagcatcaaacaaggcaaggaccagcactttcctgtgttcatgaacgagaaggaggacatcctgtggtgtaccgagatggagagagtgttcgggttcccagtccactacacagatgtcagcaacatgtctagactggccagacagagactgctgggaagaagctggtccgtccctgtgatcagacacctgttcgcccctctgaaggagtacttcgcctgcgtgagcagcggcaacagcaacgccaacagccggggccccagcttctctagcggcctggtgccactgtccctgagagggagccacatgggccccatggagatctacaaaaccgtgagcgcctggaagcggcagcctgtgcgcgtgctgagcctgtttcggaatatcgataaagtcctgaaaagcctgggattcctggagagcggctctggctccggcggtggcaccctgaagtacgtggaggatgtgacaaacgtggtcagacgggatgtggagaagtggggccccttcgatctggtgtacggcagcacccaacccctgggcagctcttgtgaccggtgccctggctggtacatgtttcagttccaccggatcctgcagtacgccctgccgagacaggagtcccagcggccattcttttggattttcatggacaacttgctgctgaccgaggatgaccaggaaactaccactcggttcctgcagaccgaagccgtgaccctgcaggacgtgagaggccgggactaccagaacgccatgcgggtgtggtccaacatccctggactgaaaagcaagcacgcacctctgacccctaaagaagaggagtacctgcaggcccaggtgcggagcagaagcaagctggacgcccctaaggtggatctgctggtgaagaattgcctcctgcccctgagagagtacttcaagtatttcagccagaatagtctgcccctgggaggcagcggcggcggcgtgcacggcagcgtgaccttcagggacgtggccatcgacttcagccaggaggagtgggagtgcctgcagcccgaccagaggaacctgtacagggacgtgatgctggagaactacagccacctgatcagcctgggcagcagcatcagcaagcccgacgtgatcaccctgctggagcaggagaaggagccctggatcgtggtgaggaaggagaccagcaggtggtaccccgacctggagagcaagggcggcccaagcagcggcgcccctcctcccagcggcggcaggcggcccaagcagcggcgcccctcctcccagcggcggcagcccagccggctccccaacctctaccgaggagggcacctctgagtccgccacccccgagagcggccctggcacctccaccgagcccagcgagggcagcgcacccggcagccctgccggcagccccacctccacagaggagggaaccagcaccgagcccagcgaaggcagcgccccaggcaccagcaccgagcctagtgagcaggagattaaacggatcaacaagatcagaagaagacttgtgaaagacagcaacaccaagaaggccggcaagacaggccccatgaaaaccctgctggttagagtgatgacacccgatctgagagagcggctggaaaacctgagaaagaagcctgaaaatatcccccagcccatcagcaatacatctagagccaacctgaataagctgctgaccgattacaccgaaatgaagaaggcgatcctgcatgtgtactgggaagagttccagaaggaccctgtgggcctgatgagccgggtggcccagcctgccagcaagaagatcgatcagaacaagctgaaacctgagatggacgagaagggcaacctgaccaccgccggctttgcctgctctcagtgtggccagcccctgttcgtgtacaagctggagcaggtgtctgagaagggcaaggcttacaccaactacttcggacggtgcaatgtggccgagcacgaaaagctgatcctgctggcccagctgaagcccgagaaggatagcgacgaagccgtgacatatagcctgggaaagtttgggcagagggccctggatttctacagcattcatgtgaccaaggagtccacccaccccgtgaagcccctggcccagatcgccggaaacagatacgcctccggacctgtgggaaaggccctgagcgacgcatgtatgggcacaatcgcctccttcctgtctaagtaccaggacatcatcatcgaacaccagaaggtggtgaagggcaaccagaagagactggagagcctgcgggagctggccggcaaggaaaacctggaataccctagcgtgaccctgccacctcagcctcacaccaaggagggcgttgatgcctacaacgaagtgatcgcccgggtgcgaatgtgggtgaacctgaacctgtggcagaagctgaagctaagcagagatgatgccaagcctctgctgagactgaagggattcccttcctttcctctggtcgagagacaggccaacgaagtggactggtgggacatggtgtgtaacgtgaagaagctgatcaacgagaaaaaggaggatggcaaggtgttttggcagaatctggctggctacaagagacaggaagccctgagaccatacctgagcagcgaggaagatcggaagaagggaaagaaattcgctcggtaccagctgggcgacctgctgctgcacctggaaaagaagcacggcgaggactggggaaaggtgtacgacgaggcctgggagcggattgacaagaaagtggaaggcctgagcaagcacatcaagctggaagaggaacggagaagcgaggacgcccagagcaaggccgccctgaccgactggctgcgggctaaggccagcttcgtgatcgagggcctgaaggaggccgacaaggacgagttctgcagatgcgagctgaagctgcagaagtggtacggggacctgcggggaaagcccttcgccatcgaagccgagaacagcatcctggacatcagcggcttcagcaagcagtacaactgtgccttcatctggcagaaggacggcgtgaagaagctgaacctgtacctgatcatcaactacttcaagggcggcaagctgcggttcaagaagatcaaacctgaagccttcgaagccaacagattctacaccgtgatcaacaaaaagagcggcgagatcgtgcccatggaggtgaacttcaacttcgacgaccccaacctgatcatcctgcctctggcctttggcaagagacagggcagagaattcatctggaacgacctgctgtccctggaaaccggcagcctgaagctggccaacggaagagtgatcgagaagacactgtacaacagaagaacccggcaggatgagcctgccctgttcgtggccctgaccttcgagcggcgggaggtcctggactcctccaatatcaaaccaatgaacctgatcggcgtggcaagaggcgaaaacatccccgccgtgatcgccctgaccgaccccgagggctgcccactgagccggtttaaggatagcctgggaaacccaacccacatcctgagaatcggcgagagctataaggagaagcagcggaccatccaggccaagaaggaggtggagcagcggagagccggcggctacagccggaagtacgccagcaaagccaagaatctggcagacgatatggtgagaaacaccgctagagatctgctgtactacgccgtgacccaggatgccatgctgatcttcgccaacctgagccggggcttcggccggcagggcaagcggaccttcatggccgagagacagtacacacggatggaggactggctgaccgccaagctggcctacgagggcctgagcaagacctacctgtccaagacactggcccagtacacctccaagacatgcagcaactgtgggtttaccatcaccagcgccgactacgacagggtgctggagaagctgaagaagacagcaacaggctggatgaccacaattaacggcaaggagctgaaggtggagggccagattacctactacaacagatacaagagacagaacgtagtcaaggacctgtccgtcgagctggatagactgagcgaagaatctgtgaacaacgacatctcctcctggacaaagggcagaagcggagaagctctgagcctcctgaagaaaagattctcccatagacccgtgcaggagaagttcgtgtgcctgaactgcggcttcgagacacacgcagccgagcaagccgccctgaacatcgccagatcctggctgttcctgcggagccaggagtacaagaaataccagacaaacaagacaaccggcaacaccgataagagagccttcgtcgagacctggcagtccttttaccggaagaagcttaaggaggtgtggaaacctgccgtgcggtctggcggatctggcggaggctccaccagccccaagaaaaagagaaaagtctaagctgccttctgcggggcttgccttctggccatgcccttcttctctcccttgcacctgtacctcttggtctttgaataaagcctgagtaggaaggctagcaaaaaaaaaaaaaaaaaaaaaaaaaaaaaaaaaaaaaaaaaaaaaaaaaaaaaaaaaaaaaaaaaaaaaaaaaaaaaaaagcccagccggctccccaacctctaccgaggagggcacctctgagtccgccacccccgagagcggccctggcacctccaccgagcccagcgagggcagcgcacccggcagccctgccggcagccccacctccacagaggagggaaccagcaccgagcccagcgaaggcagcgccccaggcaccagcaccgagcctagtgagcaggagattaaacggatcaacaagatcagaagaagacttgtgaaagacagcaacaccaagaaggccggcaagacaggccccatgaaaaccctgctggttagagtgatgacacccgatctgagagagcggctggaaaacctgagaaagaagcctgaaaatatcccccagcccatcagcaatacatctagagccaacctgaataagctgctgaccgattacaccgaaatgaagaaggcgatcctgcatgtgtactgggaagagttccagaaggaccctgtgggcctgatgagccgggtggcccagcctgccagcaagaagatcgatcagaacaagctgaaacctgagatggacgagaagggcaacctgaccaccgccggctttgcctgctctcagtgtggccagcccctgttcgtgtacaagctggagcaggtgtctgagaagggcaaggcttacaccaactacttcggacggtgcaatgtggccgagcacgaaaagctgatcctgctggcccagctgaagcccgagaaggatagcgacgaagccgtgacatatagcctgggaaagtttgggcagagggccctggatttctacagcattcatgtgaccaaggagtccacccaccccgtgaagcccctggcccagatcgccggaaacagatacgcctccggacctgtgggaaaggccctgagcgacgcatgtatgggcacaatcgcctccttcctgtctaagtaccaggacatcatcatcgaacaccagaaggtggtgaagggcaaccagaagagactggagagcctgcgggagctggccggcaaggaaaacctggaataccctagcgtgaccctgccacctcagcctcacaccaaggagggcgttgatgcctacaacgaagtgatcgcccgggtgcgaatgtgggtgaacctgaacctgtggcagaagctgaagctaagcagagatgatgccaagcctctgctgagactgaagggattcccttcctttcctctggtcgagagacaggccaacgaagtggactggtgggacatggtgtgtaacgtgaagaagctgatcaacgagaaaaaggaggatggcaaggtgttttggcagaatctggctggctacaagagacaggaagccctgagaccatacctgagcagcgaggaagatcggaagaagggaaagaaattcgctcggtaccagctgggcgacctgctgctgcacctggaaaagaagcacggcgaggactggggaaaggtgtacgacgaggcctgggagcggattgacaagaaagtggaaggcctgagcaagcacatcaagctggaagaggaacggagaagcgaggacgcccagagcaaggccgccctgaccgactggctgcgggctaaggccagcttcgtgatcgagggcctgaaggaggccgacaaggacgagttctgcagatgcgagctgaagctgcagaagtggtacggggacctgcggggaaagcccttcgccatcgaagccgagaacagcatcctggacatcagcggcttcagcaagcagtacaactgtgccttcatctggcagaaggacggcgtgaagaagctgaacctgtacctgatcatcaactacttcaagggcggcaagctgcggttcaagaagatcaaacctgaagccttcgaagccaacagattctacaccgtgatcaacaaaaagagcggcgagatcgtgcccatggaggtgaacttcaacttcgacgaccccaacctgatcatcctgcctctggcctttggcaagagacagggcagagaattcatctggaacgacctgctgtccctggaaaccggcagcctgaagctggccaacggaagagtgatcgagaagacactgtacaacagaagaacccggcaggatgagcctgccctgttcgtggccctgaccttcgagcggcgggaggtcctggactcctccaatatcaaaccaatgaacctgatcggcgtggcaagaggcgaaaacatccccgccgtgatcgccctgaccgaccccgagggctgcccactgagccggtttaaggatagcctgggaaacccaacccacatcctgagaatcggcgagagctataaggagaagcagcggaccatccaggccaagaaggaggtggagcagcggagagccggcggctacagccggaagtacgccagcaaagccaagaatctggcagacgatatggtgagaaacaccgctagagatctgctgtactacgccgtgacccaggatgccatgctgatcttcgccaacctgagccggggcttcggccggcagggcaagcggaccttcatggccgagagacagtacacacggatggaggactggctgaccgccaagctggcctacgagggcctgagcaagacctacctgtccaagacactggcccagtacacctccaagacatgcagcaactgtgggtttaccatcaccagcgccgactacgacagggtgctggagaagctgaagaagacagcaacaggctggatgaccacaattaacggcaaggagctgaaggtggagggccagattacctactacaacagatacaagagacagaacgtagtcaaggacctgtccgtcgagctggatagactgagcgaagaatctgtgaacaacgacatctcctcctggacaaagggcagaagcggagaagctctgagcctcctgaagaaaagattctcccatagacccgtgcaggagaagttcgtgtgcctgaactgcggcttcgagacacacgcagccgagcaagccgccctgaacatcgccagatcctggctgttcctgcggagccaggagtacaagaaataccagacaaacaagacaaccggcaacaccgataagagagccttcgtcgagacctggcagtccttttaccggaagaagcttaaggaggtgtggaaacctgccgtgcggtctggcggatctggcggaggctccaccagccccaagaaaaagagaaaagtctaagctgccttctgcggggcttgccttctggccatgcccttcttctctcccttgcacctgtacctcttggtctttgaataaagcctgagtaggaaggctagcaaaaaaaaaaaaaaaaaaaaaaaaaaaaaaaaaaaaaaaaaaaaaaaaaaaaaaaaaaaaaaaaaaaaaaaaaaaaaaaa

SEQ ID NO: 10244 - RNA, 8787 nt, synthetic construct
  source 1..8787: mol_type = other RNA
aggaaataagagagaaaagaagagtaagaagaaatataagagccaccatggcccctaagaagaagcgtaaagtgagccggatgaaccacgaccaggagttcgacccccctaaggtgtaccctcccgtccccgccgagaagagaaagcccatccgggtcctgagcctgttcgatggcatcgccaccggtctgctggtgctgaaggacctgggcatccaggtggataggtacattgcctccgaggtgtgcgaggactccatcaccgtgggaatggtgcgtcatcagggcaagatcatgtacgtgggcgacgtgcggagcgtgacacagaagcatatccaggagtggggccctttcgacctggtgatcggcggcagcccttgcaatgacctgagcatcgtgaacccagcccggaagggcctgtacgagggaaccggcagactgttcttcgagttttacagactgctgcacgacgcccggcctaaggaaggcgacgaccggcccttcttttggctgttcgagaatgtggtggccatgggagtcagcgacaagcgggatattagccggttcctggagagcaaccccgtgatgatcgatgccaaggaagtgagcgccgcccaccgggccagatacttctggggcaatctgcctggcatgaacagacccctggccagcaccgtgaacgacaagctggagctgcaggagtgcctggagcacggccggatcgccaagttcagcaaggtgagaaccatcaccacccgaagcaacagcatcaaacaaggcaaggaccagcactttcctgtgttcatgaacgagaaggaggacatcctgtggtgtaccgagatggagagagtgttcgggttcccagtccactacacagatgtcagcaacatgtctagactggccagacagagactgctgggaagaagctggtccgtccctgtgatcagacacctgttcgcccctctgaaggagtacttcgcctgcgtgagcagcggcaacagcaacgccaacagccggggccccagcttctctagcggcctggtgccactgtccctgagagggagccacatgggccccatggagatctacaaaaccgtgagcgcctggaagcggcagcctgtgcgcgtgctgagcctgtttcggaatatcgataaagtcctgaaaagcctgggattcctggagagcggctctggctccggcggtggcaccctgaagtacgtggaggatgtgacaaacgtggtcagacgggatgtggagaagtggggccccttcgatctggtgtacggcagcacccaacccctgggcagctcttgtgaccggtgccctggctggtacatgtttcagttccaccggatcctgcagtacgccctgccgagacaggagtcccagcggccattcttttggattttcatggacaacttgctgctgaccgaggatgaccaggaaactaccactcggttcctgcagaccgaagccgtgaccctgcaggacgtgagaggccgggactaccagaacgccatgcgggtgtggtccaacatccctggactgaaaagcaagcacgcacctctgacccctaaagaagaggagtacctgcaggcccaggtgcggagcagaagcaagctggacgcccctaaggtggatctgctggtgaagaattgcctcctgcccctgagagagtacttcaagtatttcagccagaatagtctgcccctgggaggcagcggcggcggcatgggccccctgcagttcagggacgtggccatcgagttcagcctggaggagtggcactgcctggacaccacccagaggaacctgtacagggacgtgatgctggagaactacaggaacctggtgttcctgggcatcgtggtgagcaagcccgacctgatcacctgcctggagcagggcaagaagcccctgaccatgaagaggcacgagatgatcgccaagccccccggccaggcccagtggctgggcggcccaagcagcggcgcccctcctcccagcggcggcaggcggcccaagcagcggcgcccctcctcccagcggcggcagcccagccggctccccaacctctaccgaggagggcacctctgagtccgccacccccgagagcggccctggcacctccaccgagcccagcgagggcagcgcacccggcagccctgccggcagccccacctccacagaggagggaaccagcaccgagcccagcgaaggcagcgccccaggcaccagcaccgagcctagtgagcaggagattaaacggatcaacaagatcagaagaagacttgtgaaagacagcaacaccaagaaggccggcaagacaggccccatgaaaaccctgctggttagagtgatgacacccgatctgagagagcggctggaaaacctgagaaagaagcctgaaaatatcccccagcccatcagcaatacatctagagccaacctgaataagctgctgaccgattacaccgaaatgaagaaggcgatcctgcatgtgtactgggaagagttccagaaggaccctgtgggcctgatgagccgggtggcccagcctgccagcaagaagatcgatcagaacaagctgaaacctgagatggacgagaagggcaacctgaccaccgccggctttgcctgctctcagtgtggccagcccctgttcgtgtacaagctggagcaggtgtctgagaagggcaaggcttacaccaactacttcggacggtgcaatgtggccgagcacgaaaagctgatcctgctggcccagctgaagcccgagaaggatagcgacgaagccgtgacatatagcctgggaaagtttgggcagagggccctggatttctacagcattcatgtgaccaaggagtccacccaccccgtgaagcccctggcccagatcgccggaaacagatacgcctccggacctgtgggaaaggccctgagcgacgcatgtatgggcacaatcgcctccttcctgtctaagtaccaggacatcatcatcgaacaccagaaggtggtgaagggcaaccagaagagactggagagcctgcgggagctggccggcaaggaaaacctggaataccctagcgtgaccctgccacctcagcctcacaccaaggagggcgttgatgcctacaacgaagtgatcgcccgggtgcgaatgtgggtgaacctgaacctgtggcagaagctgaagctaagcagagatgatgccaagcctctgctgagactgaagggattcccttcctttcctctggtcgagagacaggccaacgaagtggactggtgggacatggtgtgtaacgtgaagaagctgatcaacgagaaaaaggaggatggcaaggtgttttggcagaatctggctggctacaagagacaggaagccctgagaccatacctgagcagcgaggaagatcggaagaagggaaagaaattcgctcggtaccagctgggcgacctgctgctgcacctggaaaagaagcacggcgaggactggggaaaggtgtacgacgaggcctgggagcggattgacaagaaagtggaaggcctgagcaagcacatcaagctggaagaggaacggagaagcgaggacgcccagagcaaggccgccctgaccgactggctgcgggctaaggccagcttcgtgatcgagggcctgaaggaggccgacaaggacgagttctgcagatgcgagctgaagctgcagaagtggtacggggacctgcggggaaagcccttcgccatcgaagccgagaacagcatcctggacatcagcggcttcagcaagcagtacaactgtgccttcatctggcagaaggacggcgtgaagaagctgaacctgtacctgatcatcaactacttcaagggcggcaagctgcggttcaagaagatcaaacctgaagccttcgaagccaacagattctacaccgtgatcaacaaaaagagcggcgagatcgtgcccatggaggtgaacttcaacttcgacgaccccaacctgatcatcctgcctctggcctttggcaagagacagggcagagaattcatctggaacgacctgctgtccctggaaaccggcagcctgaagctggccaacggaagagtgatcgagaagacactgtacaacagaagaacccggcaggatgagcctgccctgttcgtggccctgaccttcgagcggcgggaggtcctggactcctccaatatcaaaccaatgaacctgatcggcgtggcaagaggcgaaaacatccccgccgtgatcgccctgaccgaccccgagggctgcccactgagccggtttaaggatagcctgggaaacccaacccacatcctgagaatcggcgagagctataaggagaagcagcggaccatccaggccaagaaggaggtggagcagcggagagccggcggctacagccggaagtacgccagcaaagccaagaatctggcagacgatatggtgagaaacaccgctagagatctgctgtactacgccgtgacccaggatgccatgctgatcttcgccaacctgagccggggcttcggccggcagggcaagcggaccttcatggccgagagacagtacacacggatggaggactggctgaccgccaagctggcctacgagggcctgagcaagacctacctgtccaagacactggcccagtacacctccaagacatgcagcaactgtgggtttaccatcaccagcgccgactacgacagggtgctggagaagctgaagaagacagcaacaggctggatgaccacaattaacggcaaggagctgaaggtggagggccagattacctactacaacagatacaagagacagaacgtagtcaaggacctgtccgtcgagctggatagactgagcgaagaatctgtgaacaacgacatctcctcctggacaaagggcagaagcggagaagctctgagcctcctgaagaaaagattctcccatagacccgtgcaggagaagttcgtgtgcctgaactgcggcttcgagacacacgcagccgagcaagccgccctgaacatcgccagatcctggctgttcctgcggagccaggagtacaagaaataccagacaaacaagacaaccggcaacaccgataagagagccttcgtcgagacctggcagtccttttaccggaagaagcttaaggaggtgtggaaacctgccgtgcggtctggcggatctggcggaggctccaccagccccaagaaaaagagaaaagtctaagctgccttctgcggggcttgccttctggccatgcccttcttctctcccttgcacctgtacctcttggtctttgaataaagcctgagtaggaaggctagcaaaaaaaaaaaaaaaaaaaaaaaaaaaaaaaaaaaaaaaaaaaaaaaaaaaaaaaaaaaaaaaaaaaaaaaaaaaaaaaagcccagccggctccccaacctctaccgaggagggcacctctgagtccgccacccccgagagcggccctggcacctccaccgagcccagcgagggcagcgcacccggcagccctgccggcagccccacctccacagaggagggaaccagcaccgagcccagcgaaggcagcgccccaggcaccagcaccgagcctagtgagcaggagattaaacggatcaacaagatcagaagaagacttgtgaaagacagcaacaccaagaaggccggcaagacaggccccatgaaaaccctgctggttagagtgatgacacccgatctgagagagcggctggaaaacctgagaaagaagcctgaaaatatcccccagcccatcagcaatacatctagagccaacctgaataagctgctgaccgattacaccgaaatgaagaaggcgatcctgcatgtgtactgggaagagttccagaaggaccctgtgggcctgatgagccgggtggcccagcctgccagcaagaagatcgatcagaacaagctgaaacctgagatggacgagaagggcaacctgaccaccgccggctttgcctgctctcagtgtggccagcccctgttcgtgtacaagctggagcaggtgtctgagaagggcaaggcttacaccaactacttcggacggtgcaatgtggccgagcacgaaaagctgatcctgctggcccagctgaagcccgagaaggatagcgacgaagccgtgacatatagcctgggaaagtttgggcagagggccctggatttctacagcattcatgtgaccaaggagtccacccaccccgtgaagcccctggcccagatcgccggaaacagatacgcctccggacctgtgggaaaggccctgagcgacgcatgtatgggcacaatcgcctccttcctgtctaagtaccaggacatcatcatcgaacaccagaaggtggtgaagggcaaccagaagagactggagagcctgcgggagctggccggcaaggaaaacctggaataccctagcgtgaccctgccacctcagcctcacaccaaggagggcgttgatgcctacaacgaagtgatcgcccgggtgcgaatgtgggtgaacctgaacctgtggcagaagctgaagctaagcagagatgatgccaagcctctgctgagactgaagggattcccttcctttcctctggtcgagagacaggccaacgaagtggactggtgggacatggtgtgtaacgtgaagaagctgatcaacgagaaaaaggaggatggcaaggtgttttggcagaatctggctggctacaagagacaggaagccctgagaccatacctgagcagcgaggaagatcggaagaagggaaagaaattcgctcggtaccagctgggcgacctgctgctgcacctggaaaagaagcacggcgaggactggggaaaggtgtacgacgaggcctgggagcggattgacaagaaagtggaaggcctgagcaagcacatcaagctggaagaggaacggagaagcgaggacgcccagagcaaggccgccctgaccgactggctgcgggctaaggccagcttcgtgatcgagggcctgaaggaggccgacaaggacgagttctgcagatgcgagctgaagctgcagaagtggtacggggacctgcggggaaagcccttcgccatcgaagccgagaacagcatcctggacatcagcggcttcagcaagcagtacaactgtgccttcatctggcagaaggacggcgtgaagaagctgaacctgtacctgatcatcaactacttcaagggcggcaagctgcggttcaagaagatcaaacctgaagccttcgaagccaacagattctacaccgtgatcaacaaaaagagcggcgagatcgtgcccatggaggtgaacttcaacttcgacgaccccaacctgatcatcctgcctctggcctttggcaagagacagggcagagaattcatctggaacgacctgctgtccctggaaaccggcagcctgaagctggccaacggaagagtgatcgagaagacactgtacaacagaagaacccggcaggatgagcctgccctgttcgtggccctgaccttcgagcggcgggaggtcctggactcctccaatatcaaaccaatgaacctgatcggcgtggcaagaggcgaaaacatccccgccgtgatcgccctgaccgaccccgagggctgcccactgagccggtttaaggatagcctgggaaacccaacccacatcctgagaatcggcgagagctataaggagaagcagcggaccatccaggccaagaaggaggtggagcagcggagagccggcggctacagccggaagtacgccagcaaagccaagaatctggcagacgatatggtgagaaacaccgctagagatctgctgtactacgccgtgacccaggatgccatgctgatcttcgccaacctgagccggggcttcggccggcagggcaagcggaccttcatggccgagagacagtacacacggatggaggactggctgaccgccaagctggcctacgagggcctgagcaagacctacctgtccaagacactggcccagtacacctccaagacatgcagcaactgtgggtttaccatcaccagcgccgactacgacagggtgctggagaagctgaagaagacagcaacaggctggatgaccacaattaacggcaaggagctgaaggtggagggccagattacctactacaacagatacaagagacagaacgtagtcaaggacctgtccgtcgagctggatagactgagcgaagaatctgtgaacaacgacatctcctcctggacaaagggcagaagcggagaagctctgagcctcctgaagaaaagattctcccatagacccgtgcaggagaagttcgtgtgcctgaactgcggcttcgagacacacgcagccgagcaagccgccctgaacatcgccagatcctggctgttcctgcggagccaggagtacaagaaataccagacaaacaagacaaccggcaacaccgataagagagccttcgtcgagacctggcagtccttttaccggaagaagcttaaggaggtgtggaaacctgccgtgcggtctggcggatctggcggaggctccaccagccccaagaaaaagagaaaagtctaagctgccttctgcggggcttgccttctggccatgcccttcttctctcccttgcacctgtacctcttggtctttgaataaagcctgagtaggaaggctagcaaaaaaaaaaaaaaaaaaaaaaaaaaaaaaaaaaaaaaaaaaaaaaaaaaaaaaaaaaaaaaaaaaaaaaaaaaaaaaaa

SEQ ID NO: 10245 - RNA, 8787 nt, synthetic construct
  source 1..8787: mol_type = other RNA
aggaaataagagagaaaagaagagtaagaagaaatataagagccaccatggcccctaagaagaagcgtaaagtgagccggatgaaccacgaccaggagttcgacccccctaaggtgtaccctcccgtccccgccgagaagagaaagcccatccgggtcctgagcctgttcgatggcatcgccaccggtctgctggtgctgaaggacctgggcatccaggtggataggtacattgcctccgaggtgtgcgaggactccatcaccgtgggaatggtgcgtcatcagggcaagatcatgtacgtgggcgacgtgcggagcgtgacacagaagcatatccaggagtggggccctttcgacctggtgatcggcggcagcccttgcaatgacctgagcatcgtgaacccagcccggaagggcctgtacgagggaaccggcagactgttcttcgagttttacagactgctgcacgacgcccggcctaaggaaggcgacgaccggcccttcttttggctgttcgagaatgtggtggccatgggagtcagcgacaagcgggatattagccggttcctggagagcaaccccgtgatgatcgatgccaaggaagtgagcgccgcccaccgggccagatacttctggggcaatctgcctggcatgaacagacccctggccagcaccgtgaacgacaagctggagctgcaggagtgcctggagcacggccggatcgccaagttcagcaaggtgagaaccatcaccacccgaagcaacagcatcaaacaaggcaaggaccagcactttcctgtgttcatgaacgagaaggaggacatcctgtggtgtaccgagatggagagagtgttcgggttcccagtccactacacagatgtcagcaacatgtctagactggccagacagagactgctgggaagaagctggtccgtccctgtgatcagacacctgttcgcccctctgaaggagtacttcgcctgcgtgagcagcggcaacagcaacgccaacagccggggccccagcttctctagcggcctggtgccactgtccctgagagggagccacatgggccccatggagatctacaaaaccgtgagcgcctggaagcggcagcctgtgcgcgtgctgagcctgtttcggaatatcgataaagtcctgaaaagcctgggattcctggagagcggctctggctccggcggtggcaccctgaagtacgtggaggatgtgacaaacgtggtcagacgggatgtggagaagtggggccccttcgatctggtgtacggcagcacccaacccctgggcagctcttgtgaccggtgccctggctggtacatgtttcagttccaccggatcctgcagtacgccctgccgagacaggagtcccagcggccattcttttggattttcatggacaacttgctgctgaccgaggatgaccaggaaactaccactcggttcctgcagaccgaagccgtgaccctgcaggacgtgagaggccgggactaccagaacgccatgcgggtgtggtccaacatccctggactgaaaagcaagcacgcacctctgacccctaaagaagaggagtacctgcaggcccaggtgcggagcagaagcaagctggacgcccctaaggtggatctgctggtgaagaattgcctcctgcccctgagagagtacttcaagtatttcagccagaatagtctgcccctgggaggcagcggcggcggcgccagcggcaccctgaccttcgacgacgtggccctgtacttcagcgagcaggagtgggagatcctggagaagtggcagaagcagatgtacaagcaggagatgaagaccaactacgagaccctggacagcctgggctacgccttcagcaagcccgacctgatcacctggatggagaagggcaggatgctgctgatcagcgaccagggcaggctgcacaagaccaagaggaccgccggcccccccggcggcccaagcagcggcgcccctcctcccagcggcggcaggcggcccaagcagcggcgcccctcctcccagcggcggcagcccagccggctccccaacctctaccgaggagggcacctctgagtccgccacccccgagagcggccctggcacctccaccgagcccagcgagggcagcgcacccggcagccctgccggcagccccacctccacagaggagggaaccagcaccgagcccagcgaaggcagcgccccaggcaccagcaccgagcctagtgagcaggagattaaacggatcaacaagatcagaagaagacttgtgaaagacagcaacaccaagaaggccggcaagacaggccccatgaaaaccctgctggttagagtgatgacacccgatctgagagagcggctggaaaacctgagaaagaagcctgaaaatatcccccagcccatcagcaatacatctagagccaacctgaataagctgctgaccgattacaccgaaatgaagaaggcgatcctgcatgtgtactgggaagagttccagaaggaccctgtgggcctgatgagccgggtggcccagcctgccagcaagaagatcgatcagaacaagctgaaacctgagatggacgagaagggcaacctgaccaccgccggctttgcctgctctcagtgtggccagcccctgttcgtgtacaagctggagcaggtgtctgagaagggcaaggcttacaccaactacttcggacggtgcaatgtggccgagcacgaaaagctgatcctgctggcccagctgaagcccgagaaggatagcgacgaagccgtgacatatagcctgggaaagtttgggcagagggccctggatttctacagcattcatgtgaccaaggagtccacccaccccgtgaagcccctggcccagatcgccggaaacagatacgcctccggacctgtgggaaaggccctgagcgacgcatgtatgggcacaatcgcctccttcctgtctaagtaccaggacatcatcatcgaacaccagaaggtggtgaagggcaaccagaagagactggagagcctgcgggagctggccggcaaggaaaacctggaataccctagcgtgaccctgccacctcagcctcacaccaaggagggcgttgatgcctacaacgaagtgatcgcccgggtgcgaatgtgggtgaacctgaacctgtggcagaagctgaagctaagcagagatgatgccaagcctctgctgagactgaagggattcccttcctttcctctggtcgagagacaggccaacgaagtggactggtgggacatggtgtgtaacgtgaagaagctgatcaacgagaaaaaggaggatggcaaggtgttttggcagaatctggctggctacaagagacaggaagccctgagaccatacctgagcagcgaggaagatcggaagaagggaaagaaattcgctcggtaccagctgggcgacctgctgctgcacctggaaaagaagcacggcgaggactggggaaaggtgtacgacgaggcctgggagcggattgacaagaaagtggaaggcctgagcaagcacatcaagctggaagaggaacggagaagcgaggacgcccagagcaaggccgccctgaccgactggctgcgggctaaggccagcttcgtgatcgagggcctgaaggaggccgacaaggacgagttctgcagatgcgagctgaagctgcagaagtggtacggggacctgcggggaaagcccttcgccatcgaagccgagaacagcatcctggacatcagcggcttcagcaagcagtacaactgtgccttcatctggcagaaggacggcgtgaagaagctgaacctgtacctgatcatcaactacttcaagggcggcaagctgcggttcaagaagatcaaacctgaagccttcgaagccaacagattctacaccgtgatcaacaaaaagagcggcgagatcgtgcccatggaggtgaacttcaacttcgacgaccccaacctgatcatcctgcctctggcctttggcaagagacagggcagagaattcatctggaacgacctgctgtccctggaaaccggcagcctgaagctggccaacggaagagtgatcgagaagacactgtacaacagaagaacccggcaggatgagcctgccctgttcgtggccctgaccttcgagcggcgggaggtcctggactcctccaatatcaaaccaatgaacctgatcggcgtggcaagaggcgaaaacatccccgccgtgatcgccctgaccgaccccgagggctgcccactgagccggtttaaggatagcctgggaaacccaacccacatcctgagaatcggcgagagctataaggagaagcagcggaccatccaggccaagaaggaggtggagcagcggagagccggcggctacagccggaagtacgccagcaaagccaagaatctggcagacgatatggtgagaaacaccgctagagatctgctgtactacgccgtgacccaggatgccatgctgatcttcgccaacctgagccggggcttcggccggcagggcaagcggaccttcatggccgagagacagtacacacggatggaggactggctgaccgccaagctggcctacgagggcctgagcaagacctacctgtccaagacactggcccagtacacctccaagacatgcagcaactgtgggtttaccatcaccagcgccgactacgacagggtgctggagaagctgaagaagacagcaacaggctggatgaccacaattaacggcaaggagctgaaggtggagggccagattacctactacaacagatacaagagacagaacgtagtcaaggacctgtccgtcgagctggatagactgagcgaagaatctgtgaacaacgacatctcctcctggacaaagggcagaagcggagaagctctgagcctcctgaagaaaagattctcccatagacccgtgcaggagaagttcgtgtgcctgaactgcggcttcgagacacacgcagccgagcaagccgccctgaacatcgccagatcctggctgttcctgcggagccaggagtacaagaaataccagacaaacaagacaaccggcaacaccgataagagagccttcgtcgagacctggcagtccttttaccggaagaagcttaaggaggtgtggaaacctgccgtgcggtctggcggatctggcggaggctccaccagccccaagaaaaagagaaaagtctaagctgccttctgcggggcttgccttctggccatgcccttcttctctcccttgcacctgtacctcttggtctttgaataaagcctgagtaggaaggctagcaaaaaaaaaaaaaaaaaaaaaaaaaaaaaaaaaaaaaaaaaaaaaaaaaaaaaaaaaaaaaaaaaaaaaaaaaaaaaaaagcccagccggctccccaacctctaccgaggagggcacctctgagtccgccacccccgagagcggccctggcacctccaccgagcccagcgagggcagcgcacccggcagccctgccggcagccccacctccacagaggagggaaccagcaccgagcccagcgaaggcagcgccccaggcaccagcaccgagcctagtgagcaggagattaaacggatcaacaagatcagaagaagacttgtgaaagacagcaacaccaagaaggccggcaagacaggccccatgaaaaccctgctggttagagtgatgacacccgatctgagagagcggctggaaaacctgagaaagaagcctgaaaatatcccccagcccatcagcaatacatctagagccaacctgaataagctgctgaccgattacaccgaaatgaagaaggcgatcctgcatgtgtactgggaagagttccagaaggaccctgtgggcctgatgagccgggtggcccagcctgccagcaagaagatcgatcagaacaagctgaaacctgagatggacgagaagggcaacctgaccaccgccggctttgcctgctctcagtgtggccagcccctgttcgtgtacaagctggagcaggtgtctgagaagggcaaggcttacaccaactacttcggacggtgcaatgtggccgagcacgaaaagctgatcctgctggcccagctgaagcccgagaaggatagcgacgaagccgtgacatatagcctgggaaagtttgggcagagggccctggatttctacagcattcatgtgaccaaggagtccacccaccccgtgaagcccctggcccagatcgccggaaacagatacgcctccggacctgtgggaaaggccctgagcgacgcatgtatgggcacaatcgcctccttcctgtctaagtaccaggacatcatcatcgaacaccagaaggtggtgaagggcaaccagaagagactggagagcctgcgggagctggccggcaaggaaaacctggaataccctagcgtgaccctgccacctcagcctcacaccaaggagggcgttgatgcctacaacgaagtgatcgcccgggtgcgaatgtgggtgaacctgaacctgtggcagaagctgaagctaagcagagatgatgccaagcctctgctgagactgaagggattcccttcctttcctctggtcgagagacaggccaacgaagtggactggtgggacatggtgtgtaacgtgaagaagctgatcaacgagaaaaaggaggatggcaaggtgttttggcagaatctggctggctacaagagacaggaagccctgagaccatacctgagcagcgaggaagatcggaagaagggaaagaaattcgctcggtaccagctgggcgacctgctgctgcacctggaaaagaagcacggcgaggactggggaaaggtgtacgacgaggcctgggagcggattgacaagaaagtggaaggcctgagcaagcacatcaagctggaagaggaacggagaagcgaggacgcccagagcaaggccgccctgaccgactggctgcgggctaaggccagcttcgtgatcgagggcctgaaggaggccgacaaggacgagttctgcagatgcgagctgaagctgcagaagtggtacggggacctgcggggaaagcccttcgccatcgaagccgagaacagcatcctggacatcagcggcttcagcaagcagtacaactgtgccttcatctggcagaaggacggcgtgaagaagctgaacctgtacctgatcatcaactacttcaagggcggcaagctgcggttcaagaagatcaaacctgaagccttcgaagccaacagattctacaccgtgatcaacaaaaagagcggcgagatcgtgcccatggaggtgaacttcaacttcgacgaccccaacctgatcatcctgcctctggcctttggcaagagacagggcagagaattcatctggaacgacctgctgtccctggaaaccggcagcctgaagctggccaacggaagagtgatcgagaagacactgtacaacagaagaacccggcaggatgagcctgccctgttcgtggccctgaccttcgagcggcgggaggtcctggactcctccaatatcaaaccaatgaacctgatcggcgtggcaagaggcgaaaacatccccgccgtgatcgccctgaccgaccccgagggctgcccactgagccggtttaaggatagcctgggaaacccaacccacatcctgagaatcggcgagagctataaggagaagcagcggaccatccaggccaagaaggaggtggagcagcggagagccggcggctacagccggaagtacgccagcaaagccaagaatctggcagacgatatggtgagaaacaccgctagagatctgctgtactacgccgtgacccaggatgccatgctgatcttcgccaacctgagccggggcttcggccggcagggcaagcggaccttcatggccgagagacagtacacacggatggaggactggctgaccgccaagctggcctacgagggcctgagcaagacctacctgtccaagacactggcccagtacacctccaagacatgcagcaactgtgggtttaccatcaccagcgccgactacgacagggtgctggagaagctgaagaagacagcaacaggctggatgaccacaattaacggcaaggagctgaaggtggagggccagattacctactacaacagatacaagagacagaacgtagtcaaggacctgtccgtcgagctggatagactgagcgaagaatctgtgaacaacgacatctcctcctggacaaagggcagaagcggagaagctctgagcctcctgaagaaaagattctcccatagacccgtgcaggagaagttcgtgtgcctgaactgcggcttcgagacacacgcagccgagcaagccgccctgaacatcgccagatcctggctgttcctgcggagccaggagtacaagaaataccagacaaacaagacaaccggcaacaccgataagagagccttcgtcgagacctggcagtccttttaccggaagaagcttaaggaggtgtggaaacctgccgtgcggtctggcggatctggcggaggctccaccagccccaagaaaaagagaaaagtctaagctgccttctgcggggcttgccttctggccatgcccttcttctctcccttgcacctgtacctcttggtctttgaataaagcctgagtaggaaggctagcaaaaaaaaaaaaaaaaaaaaaaaaaaaaaaaaaaaaaaaaaaaaaaaaaaaaaaaaaaaaaaaaaaaaaaaaaaaaaaaa

SEQ ID NO: 10246 - RNA, 8787 nt, synthetic construct
  source 1..8787: mol_type = other RNA
aggaaataagagagaaaagaagagtaagaagaaatataagagccaccatggcccctaagaagaagcgtaaagtgagccggatgaaccacgaccaggagttcgacccccctaaggtgtaccctcccgtccccgccgagaagagaaagcccatccgggtcctgagcctgttcgatggcatcgccaccggtctgctggtgctgaaggacctgggcatccaggtggataggtacattgcctccgaggtgtgcgaggactccatcaccgtgggaatggtgcgtcatcagggcaagatcatgtacgtgggcgacgtgcggagcgtgacacagaagcatatccaggagtggggccctttcgacctggtgatcggcggcagcccttgcaatgacctgagcatcgtgaacccagcccggaagggcctgtacgagggaaccggcagactgttcttcgagttttacagactgctgcacgacgcccggcctaaggaaggcgacgaccggcccttcttttggctgttcgagaatgtggtggccatgggagtcagcgacaagcgggatattagccggttcctggagagcaaccccgtgatgatcgatgccaaggaagtgagcgccgcccaccgggccagatacttctggggcaatctgcctggcatgaacagacccctggccagcaccgtgaacgacaagctggagctgcaggagtgcctggagcacggccggatcgccaagttcagcaaggtgagaaccatcaccacccgaagcaacagcatcaaacaaggcaaggaccagcactttcctgtgttcatgaacgagaaggaggacatcctgtggtgtaccgagatggagagagtgttcgggttcccagtccactacacagatgtcagcaacatgtctagactggccagacagagactgctgggaagaagctggtccgtccctgtgatcagacacctgttcgcccctctgaaggagtacttcgcctgcgtgagcagcggcaacagcaacgccaacagccggggccccagcttctctagcggcctggtgccactgtccctgagagggagccacatgggccccatggagatctacaaaaccgtgagcgcctggaagcggcagcctgtgcgcgtgctgagcctgtttcggaatatcgataaagtcctgaaaagcctgggattcctggagagcggctctggctccggcggtggcaccctgaagtacgtggaggatgtgacaaacgtggtcagacgggatgtggagaagtggggccccttcgatctggtgtacggcagcacccaacccctgggcagctcttgtgaccggtgccctggctggtacatgtttcagttccaccggatcctgcagtacgccctgccgagacaggagtcccagcggccattcttttggattttcatggacaacttgctgctgaccgaggatgaccaggaaactaccactcggttcctgcagaccgaagccgtgaccctgcaggacgtgagaggccgggactaccagaacgccatgcgggtgtggtccaacatccctggactgaaaagcaagcacgcacctctgacccctaaagaagaggagtacctgcaggcccaggtgcggagcagaagcaagctggacgcccctaaggtggatctgctggtgaagaattgcctcctgcccctgagagagtacttcaagtatttcagccagaatagtctgcccctgggaggcagcggcggcggcggccccctgaccttcagggacgtggccatcgagttcagccaggaggagtggaagagcctggaccccgtgcagaaggccctgtactgggacgtgatgctggagaactacaggaacctggtgttcctgggcatcctgcccaagtgcatgaccaaggagctgccccccatcggcaacagcaacaccggcgagaagttccagagggtgatgctggagaggcacgagtgctacgacatcgagaacttcggcggcccaagcagcggcgcccctcctcccagcggcggcaggcggcccaagcagcggcgcccctcctcccagcggcggcagcccagccggctccccaacctctaccgaggagggcacctctgagtccgccacccccgagagcggccctggcacctccaccgagcccagcgagggcagcgcacccggcagccctgccggcagccccacctccacagaggagggaaccagcaccgagcccagcgaaggcagcgccccaggcaccagcaccgagcctagtgagcaggagattaaacggatcaacaagatcagaagaagacttgtgaaagacagcaacaccaagaaggccggcaagacaggccccatgaaaaccctgctggttagagtgatgacacccgatctgagagagcggctggaaaacctgagaaagaagcctgaaaatatcccccagcccatcagcaatacatctagagccaacctgaataagctgctgaccgattacaccgaaatgaagaaggcgatcctgcatgtgtactgggaagagttccagaaggaccctgtgggcctgatgagccgggtggcccagcctgccagcaagaagatcgatcagaacaagctgaaacctgagatggacgagaagggcaacctgaccaccgccggctttgcctgctctcagtgtggccagcccctgttcgtgtacaagctggagcaggtgtctgagaagggcaaggcttacaccaactacttcggacggtgcaatgtggccgagcacgaaaagctgatcctgctggcccagctgaagcccgagaaggatagcgacgaagccgtgacatatagcctgggaaagtttgggcagagggccctggatttctacagcattcatgtgaccaaggagtccacccaccccgtgaagcccctggcccagatcgccggaaacagatacgcctccggacctgtgggaaaggccctgagcgacgcatgtatgggcacaatcgcctccttcctgtctaagtaccaggacatcatcatcgaacaccagaaggtggtgaagggcaaccagaagagactggagagcctgcgggagctggccggcaaggaaaacctggaataccctagcgtgaccctgccacctcagcctcacaccaaggagggcgttgatgcctacaacgaagtgatcgcccgggtgcgaatgtgggtgaacctgaacctgtggcagaagctgaagctaagcagagatgatgccaagcctctgctgagactgaagggattcccttcctttcctctggtcgagagacaggccaacgaagtggactggtgggacatggtgtgtaacgtgaagaagctgatcaacgagaaaaaggaggatggcaaggtgttttggcagaatctggctggctacaagagacaggaagccctgagaccatacctgagcagcgaggaagatcggaagaagggaaagaaattcgctcggtaccagctgggcgacctgctgctgcacctggaaaagaagcacggcgaggactggggaaaggtgtacgacgaggcctgggagcggattgacaagaaagtggaaggcctgagcaagcacatcaagctggaagaggaacggagaagcgaggacgcccagagcaaggccgccctgaccgactggctgcgggctaaggccagcttcgtgatcgagggcctgaaggaggccgacaaggacgagttctgcagatgcgagctgaagctgcagaagtggtacggggacctgcggggaaagcccttcgccatcgaagccgagaacagcatcctggacatcagcggcttcagcaagcagtacaactgtgccttcatctggcagaaggacggcgtgaagaagctgaacctgtacctgatcatcaactacttcaagggcggcaagctgcggttcaagaagatcaaacctgaagccttcgaagccaacagattctacaccgtgatcaacaaaaagagcggcgagatcgtgcccatggaggtgaacttcaacttcgacgaccccaacctgatcatcctgcctctggcctttggcaagagacagggcagagaattcatctggaacgacctgctgtccctggaaaccggcagcctgaagctggccaacggaagagtgatcgagaagacactgtacaacagaagaacccggcaggatgagcctgccctgttcgtggccctgaccttcgagcggcgggaggtcctggactcctccaatatcaaaccaatgaacctgatcggcgtggcaagaggcgaaaacatccccgccgtgatcgccctgaccgaccccgagggctgcccactgagccggtttaaggatagcctgggaaacccaacccacatcctgagaatcggcgagagctataaggagaagcagcggaccatccaggccaagaaggaggtggagcagcggagagccggcggctacagccggaagtacgccagcaaagccaagaatctggcagacgatatggtgagaaacaccgctagagatctgctgtactacgccgtgacccaggatgccatgctgatcttcgccaacctgagccggggcttcggccggcagggcaagcggaccttcatggccgagagacagtacacacggatggaggactggctgaccgccaagctggcctacgagggcctgagcaagacctacctgtccaagacactggcccagtacacctccaagacatgcagcaactgtgggtttaccatcaccagcgccgactacgacagggtgctggagaagctgaagaagacagcaacaggctggatgaccacaattaacggcaaggagctgaaggtggagggccagattacctactacaacagatacaagagacagaacgtagtcaaggacctgtccgtcgagctggatagactgagcgaagaatctgtgaacaacgacatctcctcctggacaaagggcagaagcggagaagctctgagcctcctgaagaaaagattctcccatagacccgtgcaggagaagttcgtgtgcctgaactgcggcttcgagacacacgcagccgagcaagccgccctgaacatcgccagatcctggctgttcctgcggagccaggagtacaagaaataccagacaaacaagacaaccggcaacaccgataagagagccttcgtcgagacctggcagtccttttaccggaagaagcttaaggaggtgtggaaacctgccgtgcggtctggcggatctggcggaggctccaccagccccaagaaaaagagaaaagtctaagctgccttctgcggggcttgccttctggccatgcccttcttctctcccttgcacctgtacctcttggtctttgaataaagcctgagtaggaaggctagcaaaaaaaaaaaaaaaaaaaaaaaaaaaaaaaaaaaaaaaaaaaaaaaaaaaaaaaaaaaaaaaaaaaaaaaaaaaaaaaagcccagccggctccccaacctctaccgaggagggcacctctgagtccgccacccccgagagcggccctggcacctccaccgagcccagcgagggcagcgcacccggcagccctgccggcagccccacctccacagaggagggaaccagcaccgagcccagcgaaggcagcgccccaggcaccagcaccgagcctagtgagcaggagattaaacggatcaacaagatcagaagaagacttgtgaaagacagcaacaccaagaaggccggcaagacaggccccatgaaaaccctgctggttagagtgatgacacccgatctgagagagcggctggaaaacctgagaaagaagcctgaaaatatcccccagcccatcagcaatacatctagagccaacctgaataagctgctgaccgattacaccgaaatgaagaaggcgatcctgcatgtgtactgggaagagttccagaaggaccctgtgggcctgatgagccgggtggcccagcctgccagcaagaagatcgatcagaacaagctgaaacctgagatggacgagaagggcaacctgaccaccgccggctttgcctgctctcagtgtggccagcccctgttcgtgtacaagctggagcaggtgtctgagaagggcaaggcttacaccaactacttcggacggtgcaatgtggccgagcacgaaaagctgatcctgctggcccagctgaagcccgagaaggatagcgacgaagccgtgacatatagcctgggaaagtttgggcagagggccctggatttctacagcattcatgtgaccaaggagtccacccaccccgtgaagcccctggcccagatcgccggaaacagatacgcctccggacctgtgggaaaggccctgagcgacgcatgtatgggcacaatcgcctccttcctgtctaagtaccaggacatcatcatcgaacaccagaaggtggtgaagggcaaccagaagagactggagagcctgcgggagctggccggcaaggaaaacctggaataccctagcgtgaccctgccacctcagcctcacaccaaggagggcgttgatgcctacaacgaagtgatcgcccgggtgcgaatgtgggtgaacctgaacctgtggcagaagctgaagctaagcagagatgatgccaagcctctgctgagactgaagggattcccttcctttcctctggtcgagagacaggccaacgaagtggactggtgggacatggtgtgtaacgtgaagaagctgatcaacgagaaaaaggaggatggcaaggtgttttggcagaatctggctggctacaagagacaggaagccctgagaccatacctgagcagcgaggaagatcggaagaagggaaagaaattcgctcggtaccagctgggcgacctgctgctgcacctggaaaagaagcacggcgaggactggggaaaggtgtacgacgaggcctgggagcggattgacaagaaagtggaaggcctgagcaagcacatcaagctggaagaggaacggagaagcgaggacgcccagagcaaggccgccctgaccgactggctgcgggctaaggccagcttcgtgatcgagggcctgaaggaggccgacaaggacgagttctgcagatgcgagctgaagctgcagaagtggtacggggacctgcggggaaagcccttcgccatcgaagccgagaacagcatcctggacatcagcggcttcagcaagcagtacaactgtgccttcatctggcagaaggacggcgtgaagaagctgaacctgtacctgatcatcaactacttcaagggcggcaagctgcggttcaagaagatcaaacctgaagccttcgaagccaacagattctacaccgtgatcaacaaaaagagcggcgagatcgtgcccatggaggtgaacttcaacttcgacgaccccaacctgatcatcctgcctctggcctttggcaagagacagggcagagaattcatctggaacgacctgctgtccctggaaaccggcagcctgaagctggccaacggaagagtgatcgagaagacactgtacaacagaagaacccggcaggatgagcctgccctgttcgtggccctgaccttcgagcggcgggaggtcctggactcctccaatatcaaaccaatgaacctgatcggcgtggcaagaggcgaaaacatccccgccgtgatcgccctgaccgaccccgagggctgcccactgagccggtttaaggatagcctgggaaacccaacccacatcctgagaatcggcgagagctataaggagaagcagcggaccatccaggccaagaaggaggtggagcagcggagagccggcggctacagccggaagtacgccagcaaagccaagaatctggcagacgatatggtgagaaacaccgctagagatctgctgtactacgccgtgacccaggatgccatgctgatcttcgccaacctgagccggggcttcggccggcagggcaagcggaccttcatggccgagagacagtacacacggatggaggactggctgaccgccaagctggcctacgagggcctgagcaagacctacctgtccaagacactggcccagtacacctccaagacatgcagcaactgtgggtttaccatcaccagcgccgactacgacagggtgctggagaagctgaagaagacagcaacaggctggatgaccacaattaacggcaaggagctgaaggtggagggccagattacctactacaacagatacaagagacagaacgtagtcaaggacctgtccgtcgagctggatagactgagcgaagaatctgtgaacaacgacatctcctcctggacaaagggcagaagcggagaagctctgagcctcctgaagaaaagattctcccatagacccgtgcaggagaagttcgtgtgcctgaactgcggcttcgagacacacgcagccgagcaagccgccctgaacatcgccagatcctggctgttcctgcggagccaggagtacaagaaataccagacaaacaagacaaccggcaacaccgataagagagccttcgtcgagacctggcagtccttttaccggaagaagcttaaggaggtgtggaaacctgccgtgcggtctggcggatctggcggaggctccaccagccccaagaaaaagagaaaagtctaagctgccttctgcggggcttgccttctggccatgcccttcttctctcccttgcacctgtacctcttggtctttgaataaagcctgagtaggaaggctagcaaaaaaaaaaaaaaaaaaaaaaaaaaaaaaaaaaaaaaaaaaaaaaaaaaaaaaaaaaaaaaaaaaaaaaaaaaaaaaaa

SEQ ID NO: 10247 - RNA, 8787 nt, synthetic construct
  source 1..8787: mol_type = other RNA
aggaaataagagagaaaagaagagtaagaagaaatataagagccaccatggcccctaagaagaagcgtaaagtgagccggatgaaccacgaccaggagttcgacccccctaaggtgtaccctcccgtccccgccgagaagagaaagcccatccgggtcctgagcctgttcgatggcatcgccaccggtctgctggtgctgaaggacctgggcatccaggtggataggtacattgcctccgaggtgtgcgaggactccatcaccgtgggaatggtgcgtcatcagggcaagatcatgtacgtgggcgacgtgcggagcgtgacacagaagcatatccaggagtggggccctttcgacctggtgatcggcggcagcccttgcaatgacctgagcatcgtgaacccagcccggaagggcctgtacgagggaaccggcagactgttcttcgagttttacagactgctgcacgacgcccggcctaaggaaggcgacgaccggcccttcttttggctgttcgagaatgtggtggccatgggagtcagcgacaagcgggatattagccggttcctggagagcaaccccgtgatgatcgatgccaaggaagtgagcgccgcccaccgggccagatacttctggggcaatctgcctggcatgaacagacccctggccagcaccgtgaacgacaagctggagctgcaggagtgcctggagcacggccggatcgccaagttcagcaaggtgagaaccatcaccacccgaagcaacagcatcaaacaaggcaaggaccagcactttcctgtgttcatgaacgagaaggaggacatcctgtggtgtaccgagatggagagagtgttcgggttcccagtccactacacagatgtcagcaacatgtctagactggccagacagagactgctgggaagaagctggtccgtccctgtgatcagacacctgttcgcccctctgaaggagtacttcgcctgcgtgagcagcggcaacagcaacgccaacagccggggccccagcttctctagcggcctggtgccactgtccctgagagggagccacatgggccccatggagatctacaaaaccgtgagcgcctggaagcggcagcctgtgcgcgtgctgagcctgtttcggaatatcgataaagtcctgaaaagcctgggattcctggagagcggctctggctccggcggtggcaccctgaagtacgtggaggatgtgacaaacgtggtcagacgggatgtggagaagtggggccccttcgatctggtgtacggcagcacccaacccctgggcagctcttgtgaccggtgccctggctggtacatgtttcagttccaccggatcctgcagtacgccctgccgagacaggagtcccagcggccattcttttggattttcatggacaacttgctgctgaccgaggatgaccaggaaactaccactcggttcctgcagaccgaagccgtgaccctgcaggacgtgagaggccgggactaccagaacgccatgcgggtgtggtccaacatccctggactgaaaagcaagcacgcacctctgacccctaaagaagaggagtacctgcaggcccaggtgcggagcagaagcaagctggacgcccctaaggtggatctgctggtgaagaattgcctcctgcccctgagagagtacttcaagtatttcagccagaatagtctgcccctgggaggcagcggcggcggcttccagggcagcgtgaccttcagggacgtgagcatcgacttcagccaggaggagtgggagtggctgcagcccgcccagagggacctgtacaggcacgtgatgctggagaactacggccacctggtgagcctgggcctgaacatgagcaagcccgacgtggtgagcctgctggagcagggcaaggagccctggctgggcaacggcgacgtgagcagggagctgttccccgccagcaagagcaacggcggcccaagcagcggcgcccctcctcccagcggcggcaggcggcccaagcagcggcgcccctcctcccagcggcggcagcccagccggctccccaacctctaccgaggagggcacctctgagtccgccacccccgagagcggccctggcacctccaccgagcccagcgagggcagcgcacccggcagccctgccggcagccccacctccacagaggagggaaccagcaccgagcccagcgaaggcagcgccccaggcaccagcaccgagcctagtgagcaggagattaaacggatcaacaagatcagaagaagacttgtgaaagacagcaacaccaagaaggccggcaagacaggccccatgaaaaccctgctggttagagtgatgacacccgatctgagagagcggctggaaaacctgagaaagaagcctgaaaatatcccccagcccatcagcaatacatctagagccaacctgaataagctgctgaccgattacaccgaaatgaagaaggcgatcctgcatgtgtactgggaagagttccagaaggaccctgtgggcctgatgagccgggtggcccagcctgccagcaagaagatcgatcagaacaagctgaaacctgagatggacgagaagggcaacctgaccaccgccggctttgcctgctctcagtgtggccagcccctgttcgtgtacaagctggagcaggtgtctgagaagggcaaggcttacaccaactacttcggacggtgcaatgtggccgagcacgaaaagctgatcctgctggcccagctgaagcccgagaaggatagcgacgaagccgtgacatatagcctgggaaagtttgggcagagggccctggatttctacagcattcatgtgaccaaggagtccacccaccccgtgaagcccctggcccagatcgccggaaacagatacgcctccggacctgtgggaaaggccctgagcgacgcatgtatgggcacaatcgcctccttcctgtctaagtaccaggacatcatcatcgaacaccagaaggtggtgaagggcaaccagaagagactggagagcctgcgggagctggccggcaaggaaaacctggaataccctagcgtgaccctgccacctcagcctcacaccaaggagggcgttgatgcctacaacgaagtgatcgcccgggtgcgaatgtgggtgaacctgaacctgtggcagaagctgaagctaagcagagatgatgccaagcctctgctgagactgaagggattcccttcctttcctctggtcgagagacaggccaacgaagtggactggtgggacatggtgtgtaacgtgaagaagctgatcaacgagaaaaaggaggatggcaaggtgttttggcagaatctggctggctacaagagacaggaagccctgagaccatacctgagcagcgaggaagatcggaagaagggaaagaaattcgctcggtaccagctgggcgacctgctgctgcacctggaaaagaagcacggcgaggactggggaaaggtgtacgacgaggcctgggagcggattgacaagaaagtggaaggcctgagcaagcacatcaagctggaagaggaacggagaagcgaggacgcccagagcaaggccgccctgaccgactggctgcgggctaaggccagcttcgtgatcgagggcctgaaggaggccgacaaggacgagttctgcagatgcgagctgaagctgcagaagtggtacggggacctgcggggaaagcccttcgccatcgaagccgagaacagcatcctggacatcagcggcttcagcaagcagtacaactgtgccttcatctggcagaaggacggcgtgaagaagctgaacctgtacctgatcatcaactacttcaagggcggcaagctgcggttcaagaagatcaaacctgaagccttcgaagccaacagattctacaccgtgatcaacaaaaagagcggcgagatcgtgcccatggaggtgaacttcaacttcgacgaccccaacctgatcatcctgcctctggcctttggcaagagacagggcagagaattcatctggaacgacctgctgtccctggaaaccggcagcctgaagctggccaacggaagagtgatcgagaagacactgtacaacagaagaacccggcaggatgagcctgccctgttcgtggccctgaccttcgagcggcgggaggtcctggactcctccaatatcaaaccaatgaacctgatcggcgtggcaagaggcgaaaacatccccgccgtgatcgccctgaccgaccccgagggctgcccactgagccggtttaaggatagcctgggaaacccaacccacatcctgagaatcggcgagagctataaggagaagcagcggaccatccaggccaagaaggaggtggagcagcggagagccggcggctacagccggaagtacgccagcaaagccaagaatctggcagacgatatggtgagaaacaccgctagagatctgctgtactacgccgtgacccaggatgccatgctgatcttcgccaacctgagccggggcttcggccggcagggcaagcggaccttcatggccgagagacagtacacacggatggaggactggctgaccgccaagctggcctacgagggcctgagcaagacctacctgtccaagacactggcccagtacacctccaagacatgcagcaactgtgggtttaccatcaccagcgccgactacgacagggtgctggagaagctgaagaagacagcaacaggctggatgaccacaattaacggcaaggagctgaaggtggagggccagattacctactacaacagatacaagagacagaacgtagtcaaggacctgtccgtcgagctggatagactgagcgaagaatctgtgaacaacgacatctcctcctggacaaagggcagaagcggagaagctctgagcctcctgaagaaaagattctcccatagacccgtgcaggagaagttcgtgtgcctgaactgcggcttcgagacacacgcagccgagcaagccgccctgaacatcgccagatcctggctgttcctgcggagccaggagtacaagaaataccagacaaacaagacaaccggcaacaccgataagagagccttcgtcgagacctggcagtccttttaccggaagaagcttaaggaggtgtggaaacctgccgtgcggtctggcggatctggcggaggctccaccagccccaagaaaaagagaaaagtctaagctgccttctgcggggcttgccttctggccatgcccttcttctctcccttgcacctgtacctcttggtctttgaataaagcctgagtaggaaggctagcaaaaaaaaaaaaaaaaaaaaaaaaaaaaaaaaaaaaaaaaaaaaaaaaaaaaaaaaaaaaaaaaaaaaaaaaaaaaaaaagcccagccggctccccaacctctaccgaggagggcacctctgagtccgccacccccgagagcggccctggcacctccaccgagcccagcgagggcagcgcacccggcagccctgccggcagccccacctccacagaggagggaaccagcaccgagcccagcgaaggcagcgccccaggcaccagcaccgagcctagtgagcaggagattaaacggatcaacaagatcagaagaagacttgtgaaagacagcaacaccaagaaggccggcaagacaggccccatgaaaaccctgctggttagagtgatgacacccgatctgagagagcggctggaaaacctgagaaagaagcctgaaaatatcccccagcccatcagcaatacatctagagccaacctgaataagctgctgaccgattacaccgaaatgaagaaggcgatcctgcatgtgtactgggaagagttccagaaggaccctgtgggcctgatgagccgggtggcccagcctgccagcaagaagatcgatcagaacaagctgaaacctgagatggacgagaagggcaacctgaccaccgccggctttgcctgctctcagtgtggccagcccctgttcgtgtacaagctggagcaggtgtctgagaagggcaaggcttacaccaactacttcggacggtgcaatgtggccgagcacgaaaagctgatcctgctggcccagctgaagcccgagaaggatagcgacgaagccgtgacatatagcctgggaaagtttgggcagagggccctggatttctacagcattcatgtgaccaaggagtccacccaccccgtgaagcccctggcccagatcgccggaaacagatacgcctccggacctgtgggaaaggccctgagcgacgcatgtatgggcacaatcgcctccttcctgtctaagtaccaggacatcatcatcgaacaccagaaggtggtgaagggcaaccagaagagactggagagcctgcgggagctggccggcaaggaaaacctggaataccctagcgtgaccctgccacctcagcctcacaccaaggagggcgttgatgcctacaacgaagtgatcgcccgggtgcgaatgtgggtgaacctgaacctgtggcagaagctgaagctaagcagagatgatgccaagcctctgctgagactgaagggattcccttcctttcctctggtcgagagacaggccaacgaagtggactggtgggacatggtgtgtaacgtgaagaagctgatcaacgagaaaaaggaggatggcaaggtgttttggcagaatctggctggctacaagagacaggaagccctgagaccatacctgagcagcgaggaagatcggaagaagggaaagaaattcgctcggtaccagctgggcgacctgctgctgcacctggaaaagaagcacggcgaggactggggaaaggtgtacgacgaggcctgggagcggattgacaagaaagtggaaggcctgagcaagcacatcaagctggaagaggaacggagaagcgaggacgcccagagcaaggccgccctgaccgactggctgcgggctaaggccagcttcgtgatcgagggcctgaaggaggccgacaaggacgagttctgcagatgcgagctgaagctgcagaagtggtacggggacctgcggggaaagcccttcgccatcgaagccgagaacagcatcctggacatcagcggcttcagcaagcagtacaactgtgccttcatctggcagaaggacggcgtgaagaagctgaacctgtacctgatcatcaactacttcaagggcggcaagctgcggttcaagaagatcaaacctgaagccttcgaagccaacagattctacaccgtgatcaacaaaaagagcggcgagatcgtgcccatggaggtgaacttcaacttcgacgaccccaacctgatcatcctgcctctggcctttggcaagagacagggcagagaattcatctggaacgacctgctgtccctggaaaccggcagcctgaagctggccaacggaagagtgatcgagaagacactgtacaacagaagaacccggcaggatgagcctgccctgttcgtggccctgaccttcgagcggcgggaggtcctggactcctccaatatcaaaccaatgaacctgatcggcgtggcaagaggcgaaaacatccccgccgtgatcgccctgaccgaccccgagggctgcccactgagccggtttaaggatagcctgggaaacccaacccacatcctgagaatcggcgagagctataaggagaagcagcggaccatccaggccaagaaggaggtggagcagcggagagccggcggctacagccggaagtacgccagcaaagccaagaatctggcagacgatatggtgagaaacaccgctagagatctgctgtactacgccgtgacccaggatgccatgctgatcttcgccaacctgagccggggcttcggccggcagggcaagcggaccttcatggccgagagacagtacacacggatggaggactggctgaccgccaagctggcctacgagggcctgagcaagacctacctgtccaagacactggcccagtacacctccaagacatgcagcaactgtgggtttaccatcaccagcgccgactacgacagggtgctggagaagctgaagaagacagcaacaggctggatgaccacaattaacggcaaggagctgaaggtggagggccagattacctactacaacagatacaagagacagaacgtagtcaaggacctgtccgtcgagctggatagactgagcgaagaatctgtgaacaacgacatctcctcctggacaaagggcagaagcggagaagctctgagcctcctgaagaaaagattctcccatagacccgtgcaggagaagttcgtgtgcctgaactgcggcttcgagacacacgcagccgagcaagccgccctgaacatcgccagatcctggctgttcctgcggagccaggagtacaagaaataccagacaaacaagacaaccggcaacaccgataagagagccttcgtcgagacctggcagtccttttaccggaagaagcttaaggaggtgtggaaacctgccgtgcggtctggcggatctggcggaggctccaccagccccaagaaaaagagaaaagtctaagctgccttctgcggggcttgccttctggccatgcccttcttctctcccttgcacctgtacctcttggtctttgaataaagcctgagtaggaaggctagcaaaaaaaaaaaaaaaaaaaaaaaaaaaaaaaaaaaaaaaaaaaaaaaaaaaaaaaaaaaaaaaaaaaaaaaaaaaaaaaa

SEQ ID NO: 10248 - RNA, 8787 nt, synthetic construct
  source 1..8787: mol_type = other RNA
aggaaataagagagaaaagaagagtaagaagaaatataagagccaccatggcccctaagaagaagcgtaaagtgagccggatgaaccacgaccaggagttcgacccccctaaggtgtaccctcccgtccccgccgagaagagaaagcccatccgggtcctgagcctgttcgatggcatcgccaccggtctgctggtgctgaaggacctgggcatccaggtggataggtacattgcctccgaggtgtgcgaggactccatcaccgtgggaatggtgcgtcatcagggcaagatcatgtacgtgggcgacgtgcggagcgtgacacagaagcatatccaggagtggggccctttcgacctggtgatcggcggcagcccttgcaatgacctgagcatcgtgaacccagcccggaagggcctgtacgagggaaccggcagactgttcttcgagttttacagactgctgcacgacgcccggcctaaggaaggcgacgaccggcccttcttttggctgttcgagaatgtggtggccatgggagtcagcgacaagcgggatattagccggttcctggagagcaaccccgtgatgatcgatgccaaggaagtgagcgccgcccaccgggccagatacttctggggcaatctgcctggcatgaacagacccctggccagcaccgtgaacgacaagctggagctgcaggagtgcctggagcacggccggatcgccaagttcagcaaggtgagaaccatcaccacccgaagcaacagcatcaaacaaggcaaggaccagcactttcctgtgttcatgaacgagaaggaggacatcctgtggtgtaccgagatggagagagtgttcgggttcccagtccactacacagatgtcagcaacatgtctagactggccagacagagactgctgggaagaagctggtccgtccctgtgatcagacacctgttcgcccctctgaaggagtacttcgcctgcgtgagcagcggcaacagcaacgccaacagccggggccccagcttctctagcggcctggtgccactgtccctgagagggagccacatgggccccatggagatctacaaaaccgtgagcgcctggaagcggcagcctgtgcgcgtgctgagcctgtttcggaatatcgataaagtcctgaaaagcctgggattcctggagagcggctctggctccggcggtggcaccctgaagtacgtggaggatgtgacaaacgtggtcagacgggatgtggagaagtggggccccttcgatctggtgtacggcagcacccaacccctgggcagctcttgtgaccggtgccctggctggtacatgtttcagttccaccggatcctgcagtacgccctgccgagacaggagtcccagcggccattcttttggattttcatggacaacttgctgctgaccgaggatgaccaggaaactaccactcggttcctgcagaccgaagccgtgaccctgcaggacgtgagaggccgggactaccagaacgccatgcgggtgtggtccaacatccctggactgaaaagcaagcacgcacctctgacccctaaagaagaggagtacctgcaggcccaggtgcggagcagaagcaagctggacgcccctaaggtggatctgctggtgaagaattgcctcctgcccctgagagagtacttcaagtatttcagccagaatagtctgcccctgggaggcagcggcggcggccagggcagcgtgaccttcgaggacgtggccgtgcacttcagctgggacgagtggcacctgctggacaaggcccagaggtgcctgtacagggacgtgatggccgagaacctggccctgatcaccagcctgggcctgtggcccggcgtgggcgacgccgaggccagcagcgagcagagcgccagcctgaagggcatgagccaggtgaggaccttcagggagggcctgagcccccagagggcccagggcggcccaagcagcggcgcccctcctcccagcggcggcaggcggcccaagcagcggcgcccctcctcccagcggcggcagcccagccggctccccaacctctaccgaggagggcacctctgagtccgccacccccgagagcggccctggcacctccaccgagcccagcgagggcagcgcacccggcagccctgccggcagccccacctccacagaggagggaaccagcaccgagcccagcgaaggcagcgccccaggcaccagcaccgagcctagtgagcaggagattaaacggatcaacaagatcagaagaagacttgtgaaagacagcaacaccaagaaggccggcaagacaggccccatgaaaaccctgctggttagagtgatgacacccgatctgagagagcggctggaaaacctgagaaagaagcctgaaaatatcccccagcccatcagcaatacatctagagccaacctgaataagctgctgaccgattacaccgaaatgaagaaggcgatcctgcatgtgtactgggaagagttccagaaggaccctgtgggcctgatgagccgggtggcccagcctgccagcaagaagatcgatcagaacaagctgaaacctgagatggacgagaagggcaacctgaccaccgccggctttgcctgctctcagtgtggccagcccctgttcgtgtacaagctggagcaggtgtctgagaagggcaaggcttacaccaactacttcggacggtgcaatgtggccgagcacgaaaagctgatcctgctggcccagctgaagcccgagaaggatagcgacgaagccgtgacatatagcctgggaaagtttgggcagagggccctggatttctacagcattcatgtgaccaaggagtccacccaccccgtgaagcccctggcccagatcgccggaaacagatacgcctccggacctgtgggaaaggccctgagcgacgcatgtatgggcacaatcgcctccttcctgtctaagtaccaggacatcatcatcgaacaccagaaggtggtgaagggcaaccagaagagactggagagcctgcgggagctggccggcaaggaaaacctggaataccctagcgtgaccctgccacctcagcctcacaccaaggagggcgttgatgcctacaacgaagtgatcgcccgggtgcgaatgtgggtgaacctgaacctgtggcagaagctgaagctaagcagagatgatgccaagcctctgctgagactgaagggattcccttcctttcctctggtcgagagacaggccaacgaagtggactggtgggacatggtgtgtaacgtgaagaagctgatcaacgagaaaaaggaggatggcaaggtgttttggcagaatctggctggctacaagagacaggaagccctgagaccatacctgagcagcgaggaagatcggaagaagggaaagaaattcgctcggtaccagctgggcgacctgctgctgcacctggaaaagaagcacggcgaggactggggaaaggtgtacgacgaggcctgggagcggattgacaagaaagtggaaggcctgagcaagcacatcaagctggaagaggaacggagaagcgaggacgcccagagcaaggccgccctgaccgactggctgcgggctaaggccagcttcgtgatcgagggcctgaaggaggccgacaaggacgagttctgcagatgcgagctgaagctgcagaagtggtacggggacctgcggggaaagcccttcgccatcgaagccgagaacagcatcctggacatcagcggcttcagcaagcagtacaactgtgccttcatctggcagaaggacggcgtgaagaagctgaacctgtacctgatcatcaactacttcaagggcggcaagctgcggttcaagaagatcaaacctgaagccttcgaagccaacagattctacaccgtgatcaacaaaaagagcggcgagatcgtgcccatggaggtgaacttcaacttcgacgaccccaacctgatcatcctgcctctggcctttggcaagagacagggcagagaattcatctggaacgacctgctgtccctggaaaccggcagcctgaagctggccaacggaagagtgatcgagaagacactgtacaacagaagaacccggcaggatgagcctgccctgttcgtggccctgaccttcgagcggcgggaggtcctggactcctccaatatcaaaccaatgaacctgatcggcgtggcaagaggcgaaaacatccccgccgtgatcgccctgaccgaccccgagggctgcccactgagccggtttaaggatagcctgggaaacccaacccacatcctgagaatcggcgagagctataaggagaagcagcggaccatccaggccaagaaggaggtggagcagcggagagccggcggctacagccggaagtacgccagcaaagccaagaatctggcagacgatatggtgagaaacaccgctagagatctgctgtactacgccgtgacccaggatgccatgctgatcttcgccaacctgagccggggcttcggccggcagggcaagcggaccttcatggccgagagacagtacacacggatggaggactggctgaccgccaagctggcctacgagggcctgagcaagacctacctgtccaagacactggcccagtacacctccaagacatgcagcaactgtgggtttaccatcaccagcgccgactacgacagggtgctggagaagctgaagaagacagcaacaggctggatgaccacaattaacggcaaggagctgaaggtggagggccagattacctactacaacagatacaagagacagaacgtagtcaaggacctgtccgtcgagctggatagactgagcgaagaatctgtgaacaacgacatctcctcctggacaaagggcagaagcggagaagctctgagcctcctgaagaaaagattctcccatagacccgtgcaggagaagttcgtgtgcctgaactgcggcttcgagacacacgcagccgagcaagccgccctgaacatcgccagatcctggctgttcctgcggagccaggagtacaagaaataccagacaaacaagacaaccggcaacaccgataagagagccttcgtcgagacctggcagtccttttaccggaagaagcttaaggaggtgtggaaacctgccgtgcggtctggcggatctggcggaggctccaccagccccaagaaaaagagaaaagtctaagctgccttctgcggggcttgccttctggccatgcccttcttctctcccttgcacctgtacctcttggtctttgaataaagcctgagtaggaaggctagcaaaaaaaaaaaaaaaaaaaaaaaaaaaaaaaaaaaaaaaaaaaaaaaaaaaaaaaaaaaaaaaaaaaaaaaaaaaaaaaagcccagccggctccccaacctctaccgaggagggcacctctgagtccgccacccccgagagcggccctggcacctccaccgagcccagcgagggcagcgcacccggcagccctgccggcagccccacctccacagaggagggaaccagcaccgagcccagcgaaggcagcgccccaggcaccagcaccgagcctagtgagcaggagattaaacggatcaacaagatcagaagaagacttgtgaaagacagcaacaccaagaaggccggcaagacaggccccatgaaaaccctgctggttagagtgatgacacccgatctgagagagcggctggaaaacctgagaaagaagcctgaaaatatcccccagcccatcagcaatacatctagagccaacctgaataagctgctgaccgattacaccgaaatgaagaaggcgatcctgcatgtgtactgggaagagttccagaaggaccctgtgggcctgatgagccgggtggcccagcctgccagcaagaagatcgatcagaacaagctgaaacctgagatggacgagaagggcaacctgaccaccgccggctttgcctgctctcagtgtggccagcccctgttcgtgtacaagctggagcaggtgtctgagaagggcaaggcttacaccaactacttcggacggtgcaatgtggccgagcacgaaaagctgatcctgctggcccagctgaagcccgagaaggatagcgacgaagccgtgacatatagcctgggaaagtttgggcagagggccctggatttctacagcattcatgtgaccaaggagtccacccaccccgtgaagcccctggcccagatcgccggaaacagatacgcctccggacctgtgggaaaggccctgagcgacgcatgtatgggcacaatcgcctccttcctgtctaagtaccaggacatcatcatcgaacaccagaaggtggtgaagggcaaccagaagagactggagagcctgcgggagctggccggcaaggaaaacctggaataccctagcgtgaccctgccacctcagcctcacaccaaggagggcgttgatgcctacaacgaagtgatcgcccgggtgcgaatgtgggtgaacctgaacctgtggcagaagctgaagctaagcagagatgatgccaagcctctgctgagactgaagggattcccttcctttcctctggtcgagagacaggccaacgaagtggactggtgggacatggtgtgtaacgtgaagaagctgatcaacgagaaaaaggaggatggcaaggtgttttggcagaatctggctggctacaagagacaggaagccctgagaccatacctgagcagcgaggaagatcggaagaagggaaagaaattcgctcggtaccagctgggcgacctgctgctgcacctggaaaagaagcacggcgaggactggggaaaggtgtacgacgaggcctgggagcggattgacaagaaagtggaaggcctgagcaagcacatcaagctggaagaggaacggagaagcgaggacgcccagagcaaggccgccctgaccgactggctgcgggctaaggccagcttcgtgatcgagggcctgaaggaggccgacaaggacgagttctgcagatgcgagctgaagctgcagaagtggtacggggacctgcggggaaagcccttcgccatcgaagccgagaacagcatcctggacatcagcggcttcagcaagcagtacaactgtgccttcatctggcagaaggacggcgtgaagaagctgaacctgtacctgatcatcaactacttcaagggcggcaagctgcggttcaagaagatcaaacctgaagccttcgaagccaacagattctacaccgtgatcaacaaaaagagcggcgagatcgtgcccatggaggtgaacttcaacttcgacgaccccaacctgatcatcctgcctctggcctttggcaagagacagggcagagaattcatctggaacgacctgctgtccctggaaaccggcagcctgaagctggccaacggaagagtgatcgagaagacactgtacaacagaagaacccggcaggatgagcctgccctgttcgtggccctgaccttcgagcggcgggaggtcctggactcctccaatatcaaaccaatgaacctgatcggcgtggcaagaggcgaaaacatccccgccgtgatcgccctgaccgaccccgagggctgcccactgagccggtttaaggatagcctgggaaacccaacccacatcctgagaatcggcgagagctataaggagaagcagcggaccatccaggccaagaaggaggtggagcagcggagagccggcggctacagccggaagtacgccagcaaagccaagaatctggcagacgatatggtgagaaacaccgctagagatctgctgtactacgccgtgacccaggatgccatgctgatcttcgccaacctgagccggggcttcggccggcagggcaagcggaccttcatggccgagagacagtacacacggatggaggactggctgaccgccaagctggcctacgagggcctgagcaagacctacctgtccaagacactggcccagtacacctccaagacatgcagcaactgtgggtttaccatcaccagcgccgactacgacagggtgctggagaagctgaagaagacagcaacaggctggatgaccacaattaacggcaaggagctgaaggtggagggccagattacctactacaacagatacaagagacagaacgtagtcaaggacctgtccgtcgagctggatagactgagcgaagaatctgtgaacaacgacatctcctcctggacaaagggcagaagcggagaagctctgagcctcctgaagaaaagattctcccatagacccgtgcaggagaagttcgtgtgcctgaactgcggcttcgagacacacgcagccgagcaagccgccctgaacatcgccagatcctggctgttcctgcggagccaggagtacaagaaataccagacaaacaagacaaccggcaacaccgataagagagccttcgtcgagacctggcagtccttttaccggaagaagcttaaggaggtgtggaaacctgccgtgcggtctggcggatctggcggaggctccaccagccccaagaaaaagagaaaagtctaagctgccttctgcggggcttgccttctggccatgcccttcttctctcccttgcacctgtacctcttggtctttgaataaagcctgagtaggaaggctagcaaaaaaaaaaaaaaaaaaaaaaaaaaaaaaaaaaaaaaaaaaaaaaaaaaaaaaaaaaaaaaaaaaaaaaaaaaaaaaaa

SEQ ID NO: 10249 - RNA, 8787 nt, synthetic construct
  source 1..8787: mol_type = other RNA
aggaaataagagagaaaagaagagtaagaagaaatataagagccaccatggcccctaagaagaagcgtaaagtgagccggatgaaccacgaccaggagttcgacccccctaaggtgtaccctcccgtccccgccgagaagagaaagcccatccgggtcctgagcctgttcgatggcatcgccaccggtctgctggtgctgaaggacctgggcatccaggtggataggtacattgcctccgaggtgtgcgaggactccatcaccgtgggaatggtgcgtcatcagggcaagatcatgtacgtgggcgacgtgcggagcgtgacacagaagcatatccaggagtggggccctttcgacctggtgatcggcggcagcccttgcaatgacctgagcatcgtgaacccagcccggaagggcctgtacgagggaaccggcagactgttcttcgagttttacagactgctgcacgacgcccggcctaaggaaggcgacgaccggcccttcttttggctgttcgagaatgtggtggccatgggagtcagcgacaagcgggatattagccggttcctggagagcaaccccgtgatgatcgatgccaaggaagtgagcgccgcccaccgggccagatacttctggggcaatctgcctggcatgaacagacccctggccagcaccgtgaacgacaagctggagctgcaggagtgcctggagcacggccggatcgccaagttcagcaaggtgagaaccatcaccacccgaagcaacagcatcaaacaaggcaaggaccagcactttcctgtgttcatgaacgagaaggaggacatcctgtggtgtaccgagatggagagagtgttcgggttcccagtccactacacagatgtcagcaacatgtctagactggccagacagagactgctgggaagaagctggtccgtccctgtgatcagacacctgttcgcccctctgaaggagtacttcgcctgcgtgagcagcggcaacagcaacgccaacagccggggccccagcttctctagcggcctggtgccactgtccctgagagggagccacatgggccccatggagatctacaaaaccgtgagcgcctggaagcggcagcctgtgcgcgtgctgagcctgtttcggaatatcgataaagtcctgaaaagcctgggattcctggagagcggctctggctccggcggtggcaccctgaagtacgtggaggatgtgacaaacgtggtcagacgggatgtggagaagtggggccccttcgatctggtgtacggcagcacccaacccctgggcagctcttgtgaccggtgccctggctggtacatgtttcagttccaccggatcctgcagtacgccctgccgagacaggagtcccagcggccattcttttggattttcatggacaacttgctgctgaccgaggatgaccaggaaactaccactcggttcctgcagaccgaagccgtgaccctgcaggacgtgagaggccgggactaccagaacgccatgcgggtgtggtccaacatccctggactgaaaagcaagcacgcacctctgacccctaaagaagaggagtacctgcaggcccaggtgcggagcagaagcaagctggacgcccctaaggtggatctgctggtgaagaattgcctcctgcccctgagagagtacttcaagtatttcagccagaatagtctgcccctgggaggcagcggcggcggccaccagatcagcgtgaccttcgacgacgtggccctggacttcacccaggaggagtggatcctgctggacctgagccagaggaacctgtacaggaacgtgatgctggagaactaccagaacctggtgaccgtggagtaccagctgagcaagcccaagctgatcgcctggctggagcagcaggagctgagggccgtggagcagggcatcctgcaggagtgggagaccggcctgcagaccaagggcggcggcccaagcagcggcgcccctcctcccagcggcggcaggcggcccaagcagcggcgcccctcctcccagcggcggcagcccagccggctccccaacctctaccgaggagggcacctctgagtccgccacccccgagagcggccctggcacctccaccgagcccagcgagggcagcgcacccggcagccctgccggcagccccacctccacagaggagggaaccagcaccgagcccagcgaaggcagcgccccaggcaccagcaccgagcctagtgagcaggagattaaacggatcaacaagatcagaagaagacttgtgaaagacagcaacaccaagaaggccggcaagacaggccccatgaaaaccctgctggttagagtgatgacacccgatctgagagagcggctggaaaacctgagaaagaagcctgaaaatatcccccagcccatcagcaatacatctagagccaacctgaataagctgctgaccgattacaccgaaatgaagaaggcgatcctgcatgtgtactgggaagagttccagaaggaccctgtgggcctgatgagccgggtggcccagcctgccagcaagaagatcgatcagaacaagctgaaacctgagatggacgagaagggcaacctgaccaccgccggctttgcctgctctcagtgtggccagcccctgttcgtgtacaagctggagcaggtgtctgagaagggcaaggcttacaccaactacttcggacggtgcaatgtggccgagcacgaaaagctgatcctgctggcccagctgaagcccgagaaggatagcgacgaagccgtgacatatagcctgggaaagtttgggcagagggccctggatttctacagcattcatgtgaccaaggagtccacccaccccgtgaagcccctggcccagatcgccggaaacagatacgcctccggacctgtgggaaaggccctgagcgacgcatgtatgggcacaatcgcctccttcctgtctaagtaccaggacatcatcatcgaacaccagaaggtggtgaagggcaaccagaagagactggagagcctgcgggagctggccggcaaggaaaacctggaataccctagcgtgaccctgccacctcagcctcacaccaaggagggcgttgatgcctacaacgaagtgatcgcccgggtgcgaatgtgggtgaacctgaacctgtggcagaagctgaagctaagcagagatgatgccaagcctctgctgagactgaagggattcccttcctttcctctggtcgagagacaggccaacgaagtggactggtgggacatggtgtgtaacgtgaagaagctgatcaacgagaaaaaggaggatggcaaggtgttttggcagaatctggctggctacaagagacaggaagccctgagaccatacctgagcagcgaggaagatcggaagaagggaaagaaattcgctcggtaccagctgggcgacctgctgctgcacctggaaaagaagcacggcgaggactggggaaaggtgtacgacgaggcctgggagcggattgacaagaaagtggaaggcctgagcaagcacatcaagctggaagaggaacggagaagcgaggacgcccagagcaaggccgccctgaccgactggctgcgggctaaggccagcttcgtgatcgagggcctgaaggaggccgacaaggacgagttctgcagatgcgagctgaagctgcagaagtggtacggggacctgcggggaaagcccttcgccatcgaagccgagaacagcatcctggacatcagcggcttcagcaagcagtacaactgtgccttcatctggcagaaggacggcgtgaagaagctgaacctgtacctgatcatcaactacttcaagggcggcaagctgcggttcaagaagatcaaacctgaagccttcgaagccaacagattctacaccgtgatcaacaaaaagagcggcgagatcgtgcccatggaggtgaacttcaacttcgacgaccccaacctgatcatcctgcctctggcctttggcaagagacagggcagagaattcatctggaacgacctgctgtccctggaaaccggcagcctgaagctggccaacggaagagtgatcgagaagacactgtacaacagaagaacccggcaggatgagcctgccctgttcgtggccctgaccttcgagcggcgggaggtcctggactcctccaatatcaaaccaatgaacctgatcggcgtggcaagaggcgaaaacatccccgccgtgatcgccctgaccgaccccgagggctgcccactgagccggtttaaggatagcctgggaaacccaacccacatcctgagaatcggcgagagctataaggagaagcagcggaccatccaggccaagaaggaggtggagcagcggagagccggcggctacagccggaagtacgccagcaaagccaagaatctggcagacgatatggtgagaaacaccgctagagatctgctgtactacgccgtgacccaggatgccatgctgatcttcgccaacctgagccggggcttcggccggcagggcaagcggaccttcatggccgagagacagtacacacggatggaggactggctgaccgccaagctggcctacgagggcctgagcaagacctacctgtccaagacactggcccagtacacctccaagacatgcagcaactgtgggtttaccatcaccagcgccgactacgacagggtgctggagaagctgaagaagacagcaacaggctggatgaccacaattaacggcaaggagctgaaggtggagggccagattacctactacaacagatacaagagacagaacgtagtcaaggacctgtccgtcgagctggatagactgagcgaagaatctgtgaacaacgacatctcctcctggacaaagggcagaagcggagaagctctgagcctcctgaagaaaagattctcccatagacccgtgcaggagaagttcgtgtgcctgaactgcggcttcgagacacacgcagccgagcaagccgccctgaacatcgccagatcctggctgttcctgcggagccaggagtacaagaaataccagacaaacaagacaaccggcaacaccgataagagagccttcgtcgagacctggcagtccttttaccggaagaagcttaaggaggtgtggaaacctgccgtgcggtctggcggatctggcggaggctccaccagccccaagaaaaagagaaaagtctaagctgccttctgcggggcttgccttctggccatgcccttcttctctcccttgcacctgtacctcttggtctttgaataaagcctgagtaggaaggctagcaaaaaaaaaaaaaaaaaaaaaaaaaaaaaaaaaaaaaaaaaaaaaaaaaaaaaaaaaaaaaaaaaaaaaaaaaaaaaaaagcccagccggctccccaacctctaccgaggagggcacctctgagtccgccacccccgagagcggccctggcacctccaccgagcccagcgagggcagcgcacccggcagccctgccggcagccccacctccacagaggagggaaccagcaccgagcccagcgaaggcagcgccccaggcaccagcaccgagcctagtgagcaggagattaaacggatcaacaagatcagaagaagacttgtgaaagacagcaacaccaagaaggccggcaagacaggccccatgaaaaccctgctggttagagtgatgacacccgatctgagagagcggctggaaaacctgagaaagaagcctgaaaatatcccccagcccatcagcaatacatctagagccaacctgaataagctgctgaccgattacaccgaaatgaagaaggcgatcctgcatgtgtactgggaagagttccagaaggaccctgtgggcctgatgagccgggtggcccagcctgccagcaagaagatcgatcagaacaagctgaaacctgagatggacgagaagggcaacctgaccaccgccggctttgcctgctctcagtgtggccagcccctgttcgtgtacaagctggagcaggtgtctgagaagggcaaggcttacaccaactacttcggacggtgcaatgtggccgagcacgaaaagctgatcctgctggcccagctgaagcccgagaaggatagcgacgaagccgtgacatatagcctgggaaagtttgggcagagggccctggatttctacagcattcatgtgaccaaggagtccacccaccccgtgaagcccctggcccagatcgccggaaacagatacgcctccggacctgtgggaaaggccctgagcgacgcatgtatgggcacaatcgcctccttcctgtctaagtaccaggacatcatcatcgaacaccagaaggtggtgaagggcaaccagaagagactggagagcctgcgggagctggccggcaaggaaaacctggaataccctagcgtgaccctgccacctcagcctcacaccaaggagggcgttgatgcctacaacgaagtgatcgcccgggtgcgaatgtgggtgaacctgaacctgtggcagaagctgaagctaagcagagatgatgccaagcctctgctgagactgaagggattcccttcctttcctctggtcgagagacaggccaacgaagtggactggtgggacatggtgtgtaacgtgaagaagctgatcaacgagaaaaaggaggatggcaaggtgttttggcagaatctggctggctacaagagacaggaagccctgagaccatacctgagcagcgaggaagatcggaagaagggaaagaaattcgctcggtaccagctgggcgacctgctgctgcacctggaaaagaagcacggcgaggactggggaaaggtgtacgacgaggcctgggagcggattgacaagaaagtggaaggcctgagcaagcacatcaagctggaagaggaacggagaagcgaggacgcccagagcaaggccgccctgaccgactggctgcgggctaaggccagcttcgtgatcgagggcctgaaggaggccgacaaggacgagttctgcagatgcgagctgaagctgcagaagtggtacggggacctgcggggaaagcccttcgccatcgaagccgagaacagcatcctggacatcagcggcttcagcaagcagtacaactgtgccttcatctggcagaaggacggcgtgaagaagctgaacctgtacctgatcatcaactacttcaagggcggcaagctgcggttcaagaagatcaaacctgaagccttcgaagccaacagattctacaccgtgatcaacaaaaagagcggcgagatcgtgcccatggaggtgaacttcaacttcgacgaccccaacctgatcatcctgcctctggcctttggcaagagacagggcagagaattcatctggaacgacctgctgtccctggaaaccggcagcctgaagctggccaacggaagagtgatcgagaagacactgtacaacagaagaacccggcaggatgagcctgccctgttcgtggccctgaccttcgagcggcgggaggtcctggactcctccaatatcaaaccaatgaacctgatcggcgtggcaagaggcgaaaacatccccgccgtgatcgccctgaccgaccccgagggctgcccactgagccggtttaaggatagcctgggaaacccaacccacatcctgagaatcggcgagagctataaggagaagcagcggaccatccaggccaagaaggaggtggagcagcggagagccggcggctacagccggaagtacgccagcaaagccaagaatctggcagacgatatggtgagaaacaccgctagagatctgctgtactacgccgtgacccaggatgccatgctgatcttcgccaacctgagccggggcttcggccggcagggcaagcggaccttcatggccgagagacagtacacacggatggaggactggctgaccgccaagctggcctacgagggcctgagcaagacctacctgtccaagacactggcccagtacacctccaagacatgcagcaactgtgggtttaccatcaccagcgccgactacgacagggtgctggagaagctgaagaagacagcaacaggctggatgaccacaattaacggcaaggagctgaaggtggagggccagattacctactacaacagatacaagagacagaacgtagtcaaggacctgtccgtcgagctggatagactgagcgaagaatctgtgaacaacgacatctcctcctggacaaagggcagaagcggagaagctctgagcctcctgaagaaaagattctcccatagacccgtgcaggagaagttcgtgtgcctgaactgcggcttcgagacacacgcagccgagcaagccgccctgaacatcgccagatcctggctgttcctgcggagccaggagtacaagaaataccagacaaacaagacaaccggcaacaccgataagagagccttcgtcgagacctggcagtccttttaccggaagaagcttaaggaggtgtggaaacctgccgtgcggtctggcggatctggcggaggctccaccagccccaagaaaaagagaaaagtctaagctgccttctgcggggcttgccttctggccatgcccttcttctctcccttgcacctgtacctcttggtctttgaataaagcctgagtaggaaggctagcaaaaaaaaaaaaaaaaaaaaaaaaaaaaaaaaaaaaaaaaaaaaaaaaaaaaaaaaaaaaaaaaaaaaaaaaaaaaaaaa

SEQ ID NO: 10250 - RNA, 8787 nt, synthetic construct
  source 1..8787: mol_type = other RNA
aggaaataagagagaaaagaagagtaagaagaaatataagagccaccatggcccctaagaagaagcgtaaagtgagccggatgaaccacgaccaggagttcgacccccctaaggtgtaccctcccgtccccgccgagaagagaaagcccatccgggtcctgagcctgttcgatggcatcgccaccggtctgctggtgctgaaggacctgggcatccaggtggataggtacattgcctccgaggtgtgcgaggactccatcaccgtgggaatggtgcgtcatcagggcaagatcatgtacgtgggcgacgtgcggagcgtgacacagaagcatatccaggagtggggccctttcgacctggtgatcggcggcagcccttgcaatgacctgagcatcgtgaacccagcccggaagggcctgtacgagggaaccggcagactgttcttcgagttttacagactgctgcacgacgcccggcctaaggaaggcgacgaccggcccttcttttggctgttcgagaatgtggtggccatgggagtcagcgacaagcgggatattagccggttcctggagagcaaccccgtgatgatcgatgccaaggaagtgagcgccgcccaccgggccagatacttctggggcaatctgcctggcatgaacagacccctggccagcaccgtgaacgacaagctggagctgcaggagtgcctggagcacggccggatcgccaagttcagcaaggtgagaaccatcaccacccgaagcaacagcatcaaacaaggcaaggaccagcactttcctgtgttcatgaacgagaaggaggacatcctgtggtgtaccgagatggagagagtgttcgggttcccagtccactacacagatgtcagcaacatgtctagactggccagacagagactgctgggaagaagctggtccgtccctgtgatcagacacctgttcgcccctctgaaggagtacttcgcctgcgtgagcagcggcaacagcaacgccaacagccggggccccagcttctctagcggcctggtgccactgtccctgagagggagccacatgggccccatggagatctacaaaaccgtgagcgcctggaagcggcagcctgtgcgcgtgctgagcctgtttcggaatatcgataaagtcctgaaaagcctgggattcctggagagcggctctggctccggcggtggcaccctgaagtacgtggaggatgtgacaaacgtggtcagacgggatgtggagaagtggggccccttcgatctggtgtacggcagcacccaacccctgggcagctcttgtgaccggtgccctggctggtacatgtttcagttccaccggatcctgcagtacgccctgccgagacaggagtcccagcggccattcttttggattttcatggacaacttgctgctgaccgaggatgaccaggaaactaccactcggttcctgcagaccgaagccgtgaccctgcaggacgtgagaggccgggactaccagaacgccatgcgggtgtggtccaacatccctggactgaaaagcaagcacgcacctctgacccctaaagaagaggagtacctgcaggcccaggtgcggagcagaagcaagctggacgcccctaaggtggatctgctggtgaagaattgcctcctgcccctgagagagtacttcaagtatttcagccagaatagtctgcccctgggaggcagcggcggcggcgccagctgcggcctgctgaccttcagggacgtggccatcgagttcagccaggaggagtggaggtgcctgagccacacccagagggagctgtacagggacgtgatgctggagaactacggccacctgctgttcctgggcctgatcgtgagcaagcccgacctggtgagcttcctggagctgaggaaggacccctgggacgtgaagaggaggaagaccgccggcttcgaccccggcaggtggcagggcggcccaagcagcggcgcccctcctcccagcggcggcaggcggcccaagcagcggcgcccctcctcccagcggcggcagcccagccggctccccaacctctaccgaggagggcacctctgagtccgccacccccgagagcggccctggcacctccaccgagcccagcgagggcagcgcacccggcagccctgccggcagccccacctccacagaggagggaaccagcaccgagcccagcgaaggcagcgccccaggcaccagcaccgagcctagtgagcaggagattaaacggatcaacaagatcagaagaagacttgtgaaagacagcaacaccaagaaggccggcaagacaggccccatgaaaaccctgctggttagagtgatgacacccgatctgagagagcggctggaaaacctgagaaagaagcctgaaaatatcccccagcccatcagcaatacatctagagccaacctgaataagctgctgaccgattacaccgaaatgaagaaggcgatcctgcatgtgtactgggaagagttccagaaggaccctgtgggcctgatgagccgggtggcccagcctgccagcaagaagatcgatcagaacaagctgaaacctgagatggacgagaagggcaacctgaccaccgccggctttgcctgctctcagtgtggccagcccctgttcgtgtacaagctggagcaggtgtctgagaagggcaaggcttacaccaactacttcggacggtgcaatgtggccgagcacgaaaagctgatcctgctggcccagctgaagcccgagaaggatagcgacgaagccgtgacatatagcctgggaaagtttgggcagagggccctggatttctacagcattcatgtgaccaaggagtccacccaccccgtgaagcccctggcccagatcgccggaaacagatacgcctccggacctgtgggaaaggccctgagcgacgcatgtatgggcacaatcgcctccttcctgtctaagtaccaggacatcatcatcgaacaccagaaggtggtgaagggcaaccagaagagactggagagcctgcgggagctggccggcaaggaaaacctggaataccctagcgtgaccctgccacctcagcctcacaccaaggagggcgttgatgcctacaacgaagtgatcgcccgggtgcgaatgtgggtgaacctgaacctgtggcagaagctgaagctaagcagagatgatgccaagcctctgctgagactgaagggattcccttcctttcctctggtcgagagacaggccaacgaagtggactggtgggacatggtgtgtaacgtgaagaagctgatcaacgagaaaaaggaggatggcaaggtgttttggcagaatctggctggctacaagagacaggaagccctgagaccatacctgagcagcgaggaagatcggaagaagggaaagaaattcgctcggtaccagctgggcgacctgctgctgcacctggaaaagaagcacggcgaggactggggaaaggtgtacgacgaggcctgggagcggattgacaagaaagtggaaggcctgagcaagcacatcaagctggaagaggaacggagaagcgaggacgcccagagcaaggccgccctgaccgactggctgcgggctaaggccagcttcgtgatcgagggcctgaaggaggccgacaaggacgagttctgcagatgcgagctgaagctgcagaagtggtacggggacctgcggggaaagcccttcgccatcgaagccgagaacagcatcctggacatcagcggcttcagcaagcagtacaactgtgccttcatctggcagaaggacggcgtgaagaagctgaacctgtacctgatcatcaactacttcaagggcggcaagctgcggttcaagaagatcaaacctgaagccttcgaagccaacagattctacaccgtgatcaacaaaaagagcggcgagatcgtgcccatggaggtgaacttcaacttcgacgaccccaacctgatcatcctgcctctggcctttggcaagagacagggcagagaattcatctggaacgacctgctgtccctggaaaccggcagcctgaagctggccaacggaagagtgatcgagaagacactgtacaacagaagaacccggcaggatgagcctgccctgttcgtggccctgaccttcgagcggcgggaggtcctggactcctccaatatcaaaccaatgaacctgatcggcgtggcaagaggcgaaaacatccccgccgtgatcgccctgaccgaccccgagggctgcccactgagccggtttaaggatagcctgggaaacccaacccacatcctgagaatcggcgagagctataaggagaagcagcggaccatccaggccaagaaggaggtggagcagcggagagccggcggctacagccggaagtacgccagcaaagccaagaatctggcagacgatatggtgagaaacaccgctagagatctgctgtactacgccgtgacccaggatgccatgctgatcttcgccaacctgagccggggcttcggccggcagggcaagcggaccttcatggccgagagacagtacacacggatggaggactggctgaccgccaagctggcctacgagggcctgagcaagacctacctgtccaagacactggcccagtacacctccaagacatgcagcaactgtgggtttaccatcaccagcgccgactacgacagggtgctggagaagctgaagaagacagcaacaggctggatgaccacaattaacggcaaggagctgaaggtggagggccagattacctactacaacagatacaagagacagaacgtagtcaaggacctgtccgtcgagctggatagactgagcgaagaatctgtgaacaacgacatctcctcctggacaaagggcagaagcggagaagctctgagcctcctgaagaaaagattctcccatagacccgtgcaggagaagttcgtgtgcctgaactgcggcttcgagacacacgcagccgagcaagccgccctgaacatcgccagatcctggctgttcctgcggagccaggagtacaagaaataccagacaaacaagacaaccggcaacaccgataagagagccttcgtcgagacctggcagtccttttaccggaagaagcttaaggaggtgtggaaacctgccgtgcggtctggcggatctggcggaggctccaccagccccaagaaaaagagaaaagtctaagctgccttctgcggggcttgccttctggccatgcccttcttctctcccttgcacctgtacctcttggtctttgaataaagcctgagtaggaaggctagcaaaaaaaaaaaaaaaaaaaaaaaaaaaaaaaaaaaaaaaaaaaaaaaaaaaaaaaaaaaaaaaaaaaaaaaaaaaaaaaagcccagccggctccccaacctctaccgaggagggcacctctgagtccgccacccccgagagcggccctggcacctccaccgagcccagcgagggcagcgcacccggcagccctgccggcagccccacctccacagaggagggaaccagcaccgagcccagcgaaggcagcgccccaggcaccagcaccgagcctagtgagcaggagattaaacggatcaacaagatcagaagaagacttgtgaaagacagcaacaccaagaaggccggcaagacaggccccatgaaaaccctgctggttagagtgatgacacccgatctgagagagcggctggaaaacctgagaaagaagcctgaaaatatcccccagcccatcagcaatacatctagagccaacctgaataagctgctgaccgattacaccgaaatgaagaaggcgatcctgcatgtgtactgggaagagttccagaaggaccctgtgggcctgatgagccgggtggcccagcctgccagcaagaagatcgatcagaacaagctgaaacctgagatggacgagaagggcaacctgaccaccgccggctttgcctgctctcagtgtggccagcccctgttcgtgtacaagctggagcaggtgtctgagaagggcaaggcttacaccaactacttcggacggtgcaatgtggccgagcacgaaaagctgatcctgctggcccagctgaagcccgagaaggatagcgacgaagccgtgacatatagcctgggaaagtttgggcagagggccctggatttctacagcattcatgtgaccaaggagtccacccaccccgtgaagcccctggcccagatcgccggaaacagatacgcctccggacctgtgggaaaggccctgagcgacgcatgtatgggcacaatcgcctccttcctgtctaagtaccaggacatcatcatcgaacaccagaaggtggtgaagggcaaccagaagagactggagagcctgcgggagctggccggcaaggaaaacctggaataccctagcgtgaccctgccacctcagcctcacaccaaggagggcgttgatgcctacaacgaagtgatcgcccgggtgcgaatgtgggtgaacctgaacctgtggcagaagctgaagctaagcagagatgatgccaagcctctgctgagactgaagggattcccttcctttcctctggtcgagagacaggccaacgaagtggactggtgggacatggtgtgtaacgtgaagaagctgatcaacgagaaaaaggaggatggcaaggtgttttggcagaatctggctggctacaagagacaggaagccctgagaccatacctgagcagcgaggaagatcggaagaagggaaagaaattcgctcggtaccagctgggcgacctgctgctgcacctggaaaagaagcacggcgaggactggggaaaggtgtacgacgaggcctgggagcggattgacaagaaagtggaaggcctgagcaagcacatcaagctggaagaggaacggagaagcgaggacgcccagagcaaggccgccctgaccgactggctgcgggctaaggccagcttcgtgatcgagggcctgaaggaggccgacaaggacgagttctgcagatgcgagctgaagctgcagaagtggtacggggacctgcggggaaagcccttcgccatcgaagccgagaacagcatcctggacatcagcggcttcagcaagcagtacaactgtgccttcatctggcagaaggacggcgtgaagaagctgaacctgtacctgatcatcaactacttcaagggcggcaagctgcggttcaagaagatcaaacctgaagccttcgaagccaacagattctacaccgtgatcaacaaaaagagcggcgagatcgtgcccatggaggtgaacttcaacttcgacgaccccaacctgatcatcctgcctctggcctttggcaagagacagggcagagaattcatctggaacgacctgctgtccctggaaaccggcagcctgaagctggccaacggaagagtgatcgagaagacactgtacaacagaagaacccggcaggatgagcctgccctgttcgtggccctgaccttcgagcggcgggaggtcctggactcctccaatatcaaaccaatgaacctgatcggcgtggcaagaggcgaaaacatccccgccgtgatcgccctgaccgaccccgagggctgcccactgagccggtttaaggatagcctgggaaacccaacccacatcctgagaatcggcgagagctataaggagaagcagcggaccatccaggccaagaaggaggtggagcagcggagagccggcggctacagccggaagtacgccagcaaagccaagaatctggcagacgatatggtgagaaacaccgctagagatctgctgtactacgccgtgacccaggatgccatgctgatcttcgccaacctgagccggggcttcggccggcagggcaagcggaccttcatggccgagagacagtacacacggatggaggactggctgaccgccaagctggcctacgagggcctgagcaagacctacctgtccaagacactggcccagtacacctccaagacatgcagcaactgtgggtttaccatcaccagcgccgactacgacagggtgctggagaagctgaagaagacagcaacaggctggatgaccacaattaacggcaaggagctgaaggtggagggccagattacctactacaacagatacaagagacagaacgtagtcaaggacctgtccgtcgagctggatagactgagcgaagaatctgtgaacaacgacatctcctcctggacaaagggcagaagcggagaagctctgagcctcctgaagaaaagattctcccatagacccgtgcaggagaagttcgtgtgcctgaactgcggcttcgagacacacgcagccgagcaagccgccctgaacatcgccagatcctggctgttcctgcggagccaggagtacaagaaataccagacaaacaagacaaccggcaacaccgataagagagccttcgtcgagacctggcagtccttttaccggaagaagcttaaggaggtgtggaaacctgccgtgcggtctggcggatctggcggaggctccaccagccccaagaaaaagagaaaagtctaagctgccttctgcggggcttgccttctggccatgcccttcttctctcccttgcacctgtacctcttggtctttgaataaagcctgagtaggaaggctagcaaaaaaaaaaaaaaaaaaaaaaaaaaaaaaaaaaaaaaaaaaaaaaaaaaaaaaaaaaaaaaaaaaaaaaaaaaaaaaaa

SEQ ID NO: 10251 - RNA, 8823 nt, synthetic construct
  source 1..8823: mol_type = other RNA
aggaaataagagagaaaagaagagtaagaagaaatataagagccaccatggcccctaagaagaagcgtaaagtgagccggatgaaccacgaccaggagttcgacccccctaaggtgtaccctcccgtccccgccgagaagagaaagcccatccgggtcctgagcctgttcgatggcatcgccaccggtctgctggtgctgaaggacctgggcatccaggtggataggtacattgcctccgaggtgtgcgaggactccatcaccgtgggaatggtgcgtcatcagggcaagatcatgtacgtgggcgacgtgcggagcgtgacacagaagcatatccaggagtggggccctttcgacctggtgatcggcggcagcccttgcaatgacctgagcatcgtgaacccagcccggaagggcctgtacgagggaaccggcagactgttcttcgagttttacagactgctgcacgacgcccggcctaaggaaggcgacgaccggcccttcttttggctgttcgagaatgtggtggccatgggagtcagcgacaagcgggatattagccggttcctggagagcaaccccgtgatgatcgatgccaaggaagtgagcgccgcccaccgggccagatacttctggggcaatctgcctggcatgaacagacccctggccagcaccgtgaacgacaagctggagctgcaggagtgcctggagcacggccggatcgccaagttcagcaaggtgagaaccatcaccacccgaagcaacagcatcaaacaaggcaaggaccagcactttcctgtgttcatgaacgagaaggaggacatcctgtggtgtaccgagatggagagagtgttcgggttcccagtccactacacagatgtcagcaacatgtctagactggccagacagagactgctgggaagaagctggtccgtccctgtgatcagacacctgttcgcccctctgaaggagtacttcgcctgcgtgagcagcggcaacagcaacgccaacagccggggccccagcttctctagcggcctggtgccactgtccctgagagggagccacatgggccccatggagatctacaaaaccgtgagcgcctggaagcggcagcctgtgcgcgtgctgagcctgtttcggaatatcgataaagtcctgaaaagcctgggattcctggagagcggctctggctccggcggtggcaccctgaagtacgtggaggatgtgacaaacgtggtcagacgggatgtggagaagtggggccccttcgatctggtgtacggcagcacccaacccctgggcagctcttgtgaccggtgccctggctggtacatgtttcagttccaccggatcctgcagtacgccctgccgagacaggagtcccagcggccattcttttggattttcatggacaacttgctgctgaccgaggatgaccaggaaactaccactcggttcctgcagaccgaagccgtgaccctgcaggacgtgagaggccgggactaccagaacgccatgcgggtgtggtccaacatccctggactgaaaagcaagcacgcacctctgacccctaaagaagaggagtacctgcaggcccaggtgcggagcagaagcaagctggacgcccctaaggtggatctgctggtgaagaattgcctcctgcccctgagagagtacttcaagtatttcagccagaatagtctgcccctgggaggcagcggcggcggcgtgaccttccaggaggtggccgtgtgcttcaccgaggaggagtgggccctgctggaccccggccagagggccctgtacagggtggtgatgcaggagaactacgaggccgtgaccagcctggtggccaagggcaacaagaacagcctgtgccagaccttctgcctgtgctggggcagccccagcagcatgctgttctgcagccccagcctgctgcagggcctgcagaagccccaggactgcaggggcctgtacggcggcgccccccagtgccagaccgtgggcggcccaagcagcggcgcccctcctcccagcggcggcaggcggcccaagcagcggcgcccctcctcccagcggcggcagcccagccggctccccaacctctaccgaggagggcacctctgagtccgccacccccgagagcggccctggcacctccaccgagcccagcgagggcagcgcacccggcagccctgccggcagccccacctccacagaggagggaaccagcaccgagcccagcgaaggcagcgccccaggcaccagcaccgagcctagtgagcaggagattaaacggatcaacaagatcagaagaagacttgtgaaagacagcaacaccaagaaggccggcaagacaggccccatgaaaaccctgctggttagagtgatgacacccgatctgagagagcggctggaaaacctgagaaagaagcctgaaaatatcccccagcccatcagcaatacatctagagccaacctgaataagctgctgaccgattacaccgaaatgaagaaggcgatcctgcatgtgtactgggaagagttccagaaggaccctgtgggcctgatgagccgggtggcccagcctgccagcaagaagatcgatcagaacaagctgaaacctgagatggacgagaagggcaacctgaccaccgccggctttgcctgctctcagtgtggccagcccctgttcgtgtacaagctggagcaggtgtctgagaagggcaaggcttacaccaactacttcggacggtgcaatgtggccgagcacgaaaagctgatcctgctggcccagctgaagcccgagaaggatagcgacgaagccgtgacatatagcctgggaaagtttgggcagagggccctggatttctacagcattcatgtgaccaaggagtccacccaccccgtgaagcccctggcccagatcgccggaaacagatacgcctccggacctgtgggaaaggccctgagcgacgcatgtatgggcacaatcgcctccttcctgtctaagtaccaggacatcatcatcgaacaccagaaggtggtgaagggcaaccagaagagactggagagcctgcgggagctggccggcaaggaaaacctggaataccctagcgtgaccctgccacctcagcctcacaccaaggagggcgttgatgcctacaacgaagtgatcgcccgggtgcgaatgtgggtgaacctgaacctgtggcagaagctgaagctaagcagagatgatgccaagcctctgctgagactgaagggattcccttcctttcctctggtcgagagacaggccaacgaagtggactggtgggacatggtgtgtaacgtgaagaagctgatcaacgagaaaaaggaggatggcaaggtgttttggcagaatctggctggctacaagagacaggaagccctgagaccatacctgagcagcgaggaagatcggaagaagggaaagaaattcgctcggtaccagctgggcgacctgctgctgcacctggaaaagaagcacggcgaggactggggaaaggtgtacgacgaggcctgggagcggattgacaagaaagtggaaggcctgagcaagcacatcaagctggaagaggaacggagaagcgaggacgcccagagcaaggccgccctgaccgactggctgcgggctaaggccagcttcgtgatcgagggcctgaaggaggccgacaaggacgagttctgcagatgcgagctgaagctgcagaagtggtacggggacctgcggggaaagcccttcgccatcgaagccgagaacagcatcctggacatcagcggcttcagcaagcagtacaactgtgccttcatctggcagaaggacggcgtgaagaagctgaacctgtacctgatcatcaactacttcaagggcggcaagctgcggttcaagaagatcaaacctgaagccttcgaagccaacagattctacaccgtgatcaacaaaaagagcggcgagatcgtgcccatggaggtgaacttcaacttcgacgaccccaacctgatcatcctgcctctggcctttggcaagagacagggcagagaattcatctggaacgacctgctgtccctggaaaccggcagcctgaagctggccaacggaagagtgatcgagaagacactgtacaacagaagaacccggcaggatgagcctgccctgttcgtggccctgaccttcgagcggcgggaggtcctggactcctccaatatcaaaccaatgaacctgatcggcgtggcaagaggcgaaaacatccccgccgtgatcgccctgaccgaccccgagggctgcccactgagccggtttaaggatagcctgggaaacccaacccacatcctgagaatcggcgagagctataaggagaagcagcggaccatccaggccaagaaggaggtggagcagcggagagccggcggctacagccggaagtacgccagcaaagccaagaatctggcagacgatatggtgagaaacaccgctagagatctgctgtactacgccgtgacccaggatgccatgctgatcttcgccaacctgagccggggcttcggccggcagggcaagcggaccttcatggccgagagacagtacacacggatggaggactggctgaccgccaagctggcctacgagggcctgagcaagacctacctgtccaagacactggcccagtacacctccaagacatgcagcaactgtgggtttaccatcaccagcgccgactacgacagggtgctggagaagctgaagaagacagcaacaggctggatgaccacaattaacggcaaggagctgaaggtggagggccagattacctactacaacagatacaagagacagaacgtagtcaaggacctgtccgtcgagctggatagactgagcgaagaatctgtgaacaacgacatctcctcctggacaaagggcagaagcggagaagctctgagcctcctgaagaaaagattctcccatagacccgtgcaggagaagttcgtgtgcctgaactgcggcttcgagacacacgcagccgagcaagccgccctgaacatcgccagatcctggctgttcctgcggagccaggagtacaagaaataccagacaaacaagacaaccggcaacaccgataagagagccttcgtcgagacctggcagtccttttaccggaagaagcttaaggaggtgtggaaacctgccgtgcggtctggcggatctggcggaggctccaccagccccaagaaaaagagaaaagtctaagctgccttctgcggggcttgccttctggccatgcccttcttctctcccttgcacctgtacctcttggtctttgaataaagcctgagtaggaaggctagcaaaaaaaaaaaaaaaaaaaaaaaaaaaaaaaaaaaaaaaaaaaaaaaaaaaaaaaaaaaaaaaaaaaaaaaaaaaaaaaagcccagccggctccccaacctctaccgaggagggcacctctgagtccgccacccccgagagcggccctggcacctccaccgagcccagcgagggcagcgcacccggcagccctgccggcagccccacctccacagaggagggaaccagcaccgagcccagcgaaggcagcgccccaggcaccagcaccgagcctagtgagcaggagattaaacggatcaacaagatcagaagaagacttgtgaaagacagcaacaccaagaaggccggcaagacaggccccatgaaaaccctgctggttagagtgatgacacccgatctgagagagcggctggaaaacctgagaaagaagcctgaaaatatcccccagcccatcagcaatacatctagagccaacctgaataagctgctgaccgattacaccgaaatgaagaaggcgatcctgcatgtgtactgggaagagttccagaaggaccctgtgggcctgatgagccgggtggcccagcctgccagcaagaagatcgatcagaacaagctgaaacctgagatggacgagaagggcaacctgaccaccgccggctttgcctgctctcagtgtggccagcccctgttcgtgtacaagctggagcaggtgtctgagaagggcaaggcttacaccaactacttcggacggtgcaatgtggccgagcacgaaaagctgatcctgctggcccagctgaagcccgagaaggatagcgacgaagccgtgacatatagcctgggaaagtttgggcagagggccctggatttctacagcattcatgtgaccaaggagtccacccaccccgtgaagcccctggcccagatcgccggaaacagatacgcctccggacctgtgggaaaggccctgagcgacgcatgtatgggcacaatcgcctccttcctgtctaagtaccaggacatcatcatcgaacaccagaaggtggtgaagggcaaccagaagagactggagagcctgcgggagctggccggcaaggaaaacctggaataccctagcgtgaccctgccacctcagcctcacaccaaggagggcgttgatgcctacaacgaagtgatcgcccgggtgcgaatgtgggtgaacctgaacctgtggcagaagctgaagctaagcagagatgatgccaagcctctgctgagactgaagggattcccttcctttcctctggtcgagagacaggccaacgaagtggactggtgggacatggtgtgtaacgtgaagaagctgatcaacgagaaaaaggaggatggcaaggtgttttggcagaatctggctggctacaagagacaggaagccctgagaccatacctgagcagcgaggaagatcggaagaagggaaagaaattcgctcggtaccagctgggcgacctgctgctgcacctggaaaagaagcacggcgaggactggggaaaggtgtacgacgaggcctgggagcggattgacaagaaagtggaaggcctgagcaagcacatcaagctggaagaggaacggagaagcgaggacgcccagagcaaggccgccctgaccgactggctgcgggctaaggccagcttcgtgatcgagggcctgaaggaggccgacaaggacgagttctgcagatgcgagctgaagctgcagaagtggtacggggacctgcggggaaagcccttcgccatcgaagccgagaacagcatcctggacatcagcggcttcagcaagcagtacaactgtgccttcatctggcagaaggacggcgtgaagaagctgaacctgtacctgatcatcaactacttcaagggcggcaagctgcggttcaagaagatcaaacctgaagccttcgaagccaacagattctacaccgtgatcaacaaaaagagcggcgagatcgtgcccatggaggtgaacttcaacttcgacgaccccaacctgatcatcctgcctctggcctttggcaagagacagggcagagaattcatctggaacgacctgctgtccctggaaaccggcagcctgaagctggccaacggaagagtgatcgagaagacactgtacaacagaagaacccggcaggatgagcctgccctgttcgtggccctgaccttcgagcggcgggaggtcctggactcctccaatatcaaaccaatgaacctgatcggcgtggcaagaggcgaaaacatccccgccgtgatcgccctgaccgaccccgagggctgcccactgagccggtttaaggatagcctgggaaacccaacccacatcctgagaatcggcgagagctataaggagaagcagcggaccatccaggccaagaaggaggtggagcagcggagagccggcggctacagccggaagtacgccagcaaagccaagaatctggcagacgatatggtgagaaacaccgctagagatctgctgtactacgccgtgacccaggatgccatgctgatcttcgccaacctgagccggggcttcggccggcagggcaagcggaccttcatggccgagagacagtacacacggatggaggactggctgaccgccaagctggcctacgagggcctgagcaagacctacctgtccaagacactggcccagtacacctccaagacatgcagcaactgtgggtttaccatcaccagcgccgactacgacagggtgctggagaagctgaagaagacagcaacaggctggatgaccacaattaacggcaaggagctgaaggtggagggccagattacctactacaacagatacaagagacagaacgtagtcaaggacctgtccgtcgagctggatagactgagcgaagaatctgtgaacaacgacatctcctcctggacaaagggcagaagcggagaagctctgagcctcctgaagaaaagattctcccatagacccgtgcaggagaagttcgtgtgcctgaactgcggcttcgagacacacgcagccgagcaagccgccctgaacatcgccagatcctggctgttcctgcggagccaggagtacaagaaataccagacaaacaagacaaccggcaacaccgataagagagccttcgtcgagacctggcagtccttttaccggaagaagcttaaggaggtgtggaaacctgccgtgcggtctggcggatctggcggaggctccaccagccccaagaaaaagagaaaagtctaagctgccttctgcggggcttgccttctggccatgcccttcttctctcccttgcacctgtacctcttggtctttgaataaagcctgagtaggaaggctagcaaaaaaaaaaaaaaaaaaaaaaaaaaaaaaaaaaaaaaaaaaaaaaaaaaaaaaaaaaaaaaaaaaaaaaaaaaaaaaaa

SEQ ID NO: 10252 - RNA, 8787 nt, synthetic construct
  source 1..8787: mol_type = other RNA
aggaaataagagagaaaagaagagtaagaagaaatataagagccaccatggcccctaagaagaagcgtaaagtgagccggatgaaccacgaccaggagttcgacccccctaaggtgtaccctcccgtccccgccgagaagagaaagcccatccgggtcctgagcctgttcgatggcatcgccaccggtctgctggtgctgaaggacctgggcatccaggtggataggtacattgcctccgaggtgtgcgaggactccatcaccgtgggaatggtgcgtcatcagggcaagatcatgtacgtgggcgacgtgcggagcgtgacacagaagcatatccaggagtggggccctttcgacctggtgatcggcggcagcccttgcaatgacctgagcatcgtgaacccagcccggaagggcctgtacgagggaaccggcagactgttcttcgagttttacagactgctgcacgacgcccggcctaaggaaggcgacgaccggcccttcttttggctgttcgagaatgtggtggccatgggagtcagcgacaagcgggatattagccggttcctggagagcaaccccgtgatgatcgatgccaaggaagtgagcgccgcccaccgggccagatacttctggggcaatctgcctggcatgaacagacccctggccagcaccgtgaacgacaagctggagctgcaggagtgcctggagcacggccggatcgccaagttcagcaaggtgagaaccatcaccacccgaagcaacagcatcaaacaaggcaaggaccagcactttcctgtgttcatgaacgagaaggaggacatcctgtggtgtaccgagatggagagagtgttcgggttcccagtccactacacagatgtcagcaacatgtctagactggccagacagagactgctgggaagaagctggtccgtccctgtgatcagacacctgttcgcccctctgaaggagtacttcgcctgcgtgagcagcggcaacagcaacgccaacagccggggccccagcttctctagcggcctggtgccactgtccctgagagggagccacatgggccccatggagatctacaaaaccgtgagcgcctggaagcggcagcctgtgcgcgtgctgagcctgtttcggaatatcgataaagtcctgaaaagcctgggattcctggagagcggctctggctccggcggtggcaccctgaagtacgtggaggatgtgacaaacgtggtcagacgggatgtggagaagtggggccccttcgatctggtgtacggcagcacccaacccctgggcagctcttgtgaccggtgccctggctggtacatgtttcagttccaccggatcctgcagtacgccctgccgagacaggagtcccagcggccattcttttggattttcatggacaacttgctgctgaccgaggatgaccaggaaactaccactcggttcctgcagaccgaagccgtgaccctgcaggacgtgagaggccgggactaccagaacgccatgcgggtgtggtccaacatccctggactgaaaagcaagcacgcacctctgacccctaaagaagaggagtacctgcaggcccaggtgcggagcagaagcaagctggacgcccctaaggtggatctgctggtgaagaattgcctcctgcccctgagagagtacttcaagtatttcagccagaatagtctgcccctgggaggcagcggcggcggcagccacggccccctgagcttcgaggacgtggccatcgccttcaccaaggaggagtggcagcagctggaccccgcccagaggaccctgtacagggacgtgatgctggagaacttcagccacctggtgagcctgggccaccccgtgagcaagcccgacatcatcagcaagctggagcagggcgaggagccctggatcatcaagaggcacatcagcgactggatctgccccgagagggagaccaggggcggcccaagcagcggcgcccctcctcccagcggcggcaggcggcccaagcagcggcgcccctcctcccagcggcggcagcccagccggctccccaacctctaccgaggagggcacctctgagtccgccacccccgagagcggccctggcacctccaccgagcccagcgagggcagcgcacccggcagccctgccggcagccccacctccacagaggagggaaccagcaccgagcccagcgaaggcagcgccccaggcaccagcaccgagcctagtgagcaggagattaaacggatcaacaagatcagaagaagacttgtgaaagacagcaacaccaagaaggccggcaagacaggccccatgaaaaccctgctggttagagtgatgacacccgatctgagagagcggctggaaaacctgagaaagaagcctgaaaatatcccccagcccatcagcaatacatctagagccaacctgaataagctgctgaccgattacaccgaaatgaagaaggcgatcctgcatgtgtactgggaagagttccagaaggaccctgtgggcctgatgagccgggtggcccagcctgccagcaagaagatcgatcagaacaagctgaaacctgagatggacgagaagggcaacctgaccaccgccggctttgcctgctctcagtgtggccagcccctgttcgtgtacaagctggagcaggtgtctgagaagggcaaggcttacaccaactacttcggacggtgcaatgtggccgagcacgaaaagctgatcctgctggcccagctgaagcccgagaaggatagcgacgaagccgtgacatatagcctgggaaagtttgggcagagggccctggatttctacagcattcatgtgaccaaggagtccacccaccccgtgaagcccctggcccagatcgccggaaacagatacgcctccggacctgtgggaaaggccctgagcgacgcatgtatgggcacaatcgcctccttcctgtctaagtaccaggacatcatcatcgaacaccagaaggtggtgaagggcaaccagaagagactggagagcctgcgggagctggccggcaaggaaaacctggaataccctagcgtgaccctgccacctcagcctcacaccaaggagggcgttgatgcctacaacgaagtgatcgcccgggtgcgaatgtgggtgaacctgaacctgtggcagaagctgaagctaagcagagatgatgccaagcctctgctgagactgaagggattcccttcctttcctctggtcgagagacaggccaacgaagtggactggtgggacatggtgtgtaacgtgaagaagctgatcaacgagaaaaaggaggatggcaaggtgttttggcagaatctggctggctacaagagacaggaagccctgagaccatacctgagcagcgaggaagatcggaagaagggaaagaaattcgctcggtaccagctgggcgacctgctgctgcacctggaaaagaagcacggcgaggactggggaaaggtgtacgacgaggcctgggagcggattgacaagaaagtggaaggcctgagcaagcacatcaagctggaagaggaacggagaagcgaggacgcccagagcaaggccgccctgaccgactggctgcgggctaaggccagcttcgtgatcgagggcctgaaggaggccgacaaggacgagttctgcagatgcgagctgaagctgcagaagtggtacggggacctgcggggaaagcccttcgccatcgaagccgagaacagcatcctggacatcagcggcttcagcaagcagtacaactgtgccttcatctggcagaaggacggcgtgaagaagctgaacctgtacctgatcatcaactacttcaagggcggcaagctgcggttcaagaagatcaaacctgaagccttcgaagccaacagattctacaccgtgatcaacaaaaagagcggcgagatcgtgcccatggaggtgaacttcaacttcgacgaccccaacctgatcatcctgcctctggcctttggcaagagacagggcagagaattcatctggaacgacctgctgtccctggaaaccggcagcctgaagctggccaacggaagagtgatcgagaagacactgtacaacagaagaacccggcaggatgagcctgccctgttcgtggccctgaccttcgagcggcgggaggtcctggactcctccaatatcaaaccaatgaacctgatcggcgtggcaagaggcgaaaacatccccgccgtgatcgccctgaccgaccccgagggctgcccactgagccggtttaaggatagcctgggaaacccaacccacatcctgagaatcggcgagagctataaggagaagcagcggaccatccaggccaagaaggaggtggagcagcggagagccggcggctacagccggaagtacgccagcaaagccaagaatctggcagacgatatggtgagaaacaccgctagagatctgctgtactacgccgtgacccaggatgccatgctgatcttcgccaacctgagccggggcttcggccggcagggcaagcggaccttcatggccgagagacagtacacacggatggaggactggctgaccgccaagctggcctacgagggcctgagcaagacctacctgtccaagacactggcccagtacacctccaagacatgcagcaactgtgggtttaccatcaccagcgccgactacgacagggtgctggagaagctgaagaagacagcaacaggctggatgaccacaattaacggcaaggagctgaaggtggagggccagattacctactacaacagatacaagagacagaacgtagtcaaggacctgtccgtcgagctggatagactgagcgaagaatctgtgaacaacgacatctcctcctggacaaagggcagaagcggagaagctctgagcctcctgaagaaaagattctcccatagacccgtgcaggagaagttcgtgtgcctgaactgcggcttcgagacacacgcagccgagcaagccgccctgaacatcgccagatcctggctgttcctgcggagccaggagtacaagaaataccagacaaacaagacaaccggcaacaccgataagagagccttcgtcgagacctggcagtccttttaccggaagaagcttaaggaggtgtggaaacctgccgtgcggtctggcggatctggcggaggctccaccagccccaagaaaaagagaaaagtctaagctgccttctgcggggcttgccttctggccatgcccttcttctctcccttgcacctgtacctcttggtctttgaataaagcctgagtaggaaggctagcaaaaaaaaaaaaaaaaaaaaaaaaaaaaaaaaaaaaaaaaaaaaaaaaaaaaaaaaaaaaaaaaaaaaaaaaaaaaaaaagcccagccggctccccaacctctaccgaggagggcacctctgagtccgccacccccgagagcggccctggcacctccaccgagcccagcgagggcagcgcacccggcagccctgccggcagccccacctccacagaggagggaaccagcaccgagcccagcgaaggcagcgccccaggcaccagcaccgagcctagtgagcaggagattaaacggatcaacaagatcagaagaagacttgtgaaagacagcaacaccaagaaggccggcaagacaggccccatgaaaaccctgctggttagagtgatgacacccgatctgagagagcggctggaaaacctgagaaagaagcctgaaaatatcccccagcccatcagcaatacatctagagccaacctgaataagctgctgaccgattacaccgaaatgaagaaggcgatcctgcatgtgtactgggaagagttccagaaggaccctgtgggcctgatgagccgggtggcccagcctgccagcaagaagatcgatcagaacaagctgaaacctgagatggacgagaagggcaacctgaccaccgccggctttgcctgctctcagtgtggccagcccctgttcgtgtacaagctggagcaggtgtctgagaagggcaaggcttacaccaactacttcggacggtgcaatgtggccgagcacgaaaagctgatcctgctggcccagctgaagcccgagaaggatagcgacgaagccgtgacatatagcctgggaaagtttgggcagagggccctggatttctacagcattcatgtgaccaaggagtccacccaccccgtgaagcccctggcccagatcgccggaaacagatacgcctccggacctgtgggaaaggccctgagcgacgcatgtatgggcacaatcgcctccttcctgtctaagtaccaggacatcatcatcgaacaccagaaggtggtgaagggcaaccagaagagactggagagcctgcgggagctggccggcaaggaaaacctggaataccctagcgtgaccctgccacctcagcctcacaccaaggagggcgttgatgcctacaacgaagtgatcgcccgggtgcgaatgtgggtgaacctgaacctgtggcagaagctgaagctaagcagagatgatgccaagcctctgctgagactgaagggattcccttcctttcctctggtcgagagacaggccaacgaagtggactggtgggacatggtgtgtaacgtgaagaagctgatcaacgagaaaaaggaggatggcaaggtgttttggcagaatctggctggctacaagagacaggaagccctgagaccatacctgagcagcgaggaagatcggaagaagggaaagaaattcgctcggtaccagctgggcgacctgctgctgcacctggaaaagaagcacggcgaggactggggaaaggtgtacgacgaggcctgggagcggattgacaagaaagtggaaggcctgagcaagcacatcaagctggaagaggaacggagaagcgaggacgcccagagcaaggccgccctgaccgactggctgcgggctaaggccagcttcgtgatcgagggcctgaaggaggccgacaaggacgagttctgcagatgcgagctgaagctgcagaagtggtacggggacctgcggggaaagcccttcgccatcgaagccgagaacagcatcctggacatcagcggcttcagcaagcagtacaactgtgccttcatctggcagaaggacggcgtgaagaagctgaacctgtacctgatcatcaactacttcaagggcggcaagctgcggttcaagaagatcaaacctgaagccttcgaagccaacagattctacaccgtgatcaacaaaaagagcggcgagatcgtgcccatggaggtgaacttcaacttcgacgaccccaacctgatcatcctgcctctggcctttggcaagagacagggcagagaattcatctggaacgacctgctgtccctggaaaccggcagcctgaagctggccaacggaagagtgatcgagaagacactgtacaacagaagaacccggcaggatgagcctgccctgttcgtggccctgaccttcgagcggcgggaggtcctggactcctccaatatcaaaccaatgaacctgatcggcgtggcaagaggcgaaaacatccccgccgtgatcgccctgaccgaccccgagggctgcccactgagccggtttaaggatagcctgggaaacccaacccacatcctgagaatcggcgagagctataaggagaagcagcggaccatccaggccaagaaggaggtggagcagcggagagccggcggctacagccggaagtacgccagcaaagccaagaatctggcagacgatatggtgagaaacaccgctagagatctgctgtactacgccgtgacccaggatgccatgctgatcttcgccaacctgagccggggcttcggccggcagggcaagcggaccttcatggccgagagacagtacacacggatggaggactggctgaccgccaagctggcctacgagggcctgagcaagacctacctgtccaagacactggcccagtacacctccaagacatgcagcaactgtgggtttaccatcaccagcgccgactacgacagggtgctggagaagctgaagaagacagcaacaggctggatgaccacaattaacggcaaggagctgaaggtggagggccagattacctactacaacagatacaagagacagaacgtagtcaaggacctgtccgtcgagctggatagactgagcgaagaatctgtgaacaacgacatctcctcctggacaaagggcagaagcggagaagctctgagcctcctgaagaaaagattctcccatagacccgtgcaggagaagttcgtgtgcctgaactgcggcttcgagacacacgcagccgagcaagccgccctgaacatcgccagatcctggctgttcctgcggagccaggagtacaagaaataccagacaaacaagacaaccggcaacaccgataagagagccttcgtcgagacctggcagtccttttaccggaagaagcttaaggaggtgtggaaacctgccgtgcggtctggcggatctggcggaggctccaccagccccaagaaaaagagaaaagtctaagctgccttctgcggggcttgccttctggccatgcccttcttctctcccttgcacctgtacctcttggtctttgaataaagcctgagtaggaaggctagcaaaaaaaaaaaaaaaaaaaaaaaaaaaaaaaaaaaaaaaaaaaaaaaaaaaaaaaaaaaaaaaaaaaaaaaaaaaaaaaa

SEQ ID NO: 10253 - RNA, 8787 nt, synthetic construct
  source 1..8787: mol_type = other RNA
aggaaataagagagaaaagaagagtaagaagaaatataagagccaccatggcccctaagaagaagcgtaaagtgagccggatgaaccacgaccaggagttcgacccccctaaggtgtaccctcccgtccccgccgagaagagaaagcccatccgggtcctgagcctgttcgatggcatcgccaccggtctgctggtgctgaaggacctgggcatccaggtggataggtacattgcctccgaggtgtgcgaggactccatcaccgtgggaatggtgcgtcatcagggcaagatcatgtacgtgggcgacgtgcggagcgtgacacagaagcatatccaggagtggggccctttcgacctggtgatcggcggcagcccttgcaatgacctgagcatcgtgaacccagcccggaagggcctgtacgagggaaccggcagactgttcttcgagttttacagactgctgcacgacgcccggcctaaggaaggcgacgaccggcccttcttttggctgttcgagaatgtggtggccatgggagtcagcgacaagcgggatattagccggttcctggagagcaaccccgtgatgatcgatgccaaggaagtgagcgccgcccaccgggccagatacttctggggcaatctgcctggcatgaacagacccctggccagcaccgtgaacgacaagctggagctgcaggagtgcctggagcacggccggatcgccaagttcagcaaggtgagaaccatcaccacccgaagcaacagcatcaaacaaggcaaggaccagcactttcctgtgttcatgaacgagaaggaggacatcctgtggtgtaccgagatggagagagtgttcgggttcccagtccactacacagatgtcagcaacatgtctagactggccagacagagactgctgggaagaagctggtccgtccctgtgatcagacacctgttcgcccctctgaaggagtacttcgcctgcgtgagcagcggcaacagcaacgccaacagccggggccccagcttctctagcggcctggtgccactgtccctgagagggagccacatgggccccatggagatctacaaaaccgtgagcgcctggaagcggcagcctgtgcgcgtgctgagcctgtttcggaatatcgataaagtcctgaaaagcctgggattcctggagagcggctctggctccggcggtggcaccctgaagtacgtggaggatgtgacaaacgtggtcagacgggatgtggagaagtggggccccttcgatctggtgtacggcagcacccaacccctgggcagctcttgtgaccggtgccctggctggtacatgtttcagttccaccggatcctgcagtacgccctgccgagacaggagtcccagcggccattcttttggattttcatggacaacttgctgctgaccgaggatgaccaggaaactaccactcggttcctgcagaccgaagccgtgaccctgcaggacgtgagaggccgggactaccagaacgccatgcgggtgtggtccaacatccctggactgaaaagcaagcacgcacctctgacccctaaagaagaggagtacctgcaggcccaggtgcggagcagaagcaagctggacgcccctaaggtggatctgctggtgaagaattgcctcctgcccctgagagagtacttcaagtatttcagccagaatagtctgcccctgggaggcagcggcggcggcatgagccagggcagcgtgaccttcagggacgtggccatcgacttcagccaggaggagtggaagtggctgcagcccgcccagagggacctgtacaggtgcgtgatgctggagaactacggccacctggtgagcctgggcctgagcatcagcaagcccgacgtggtgagcctgctggagcagggcaaggagccctggctgggcaagagggaggtgaagagggacctgttcagcgtgagcgagagcggcggcccaagcagcggcgcccctcctcccagcggcggcaggcggcccaagcagcggcgcccctcctcccagcggcggcagcccagccggctccccaacctctaccgaggagggcacctctgagtccgccacccccgagagcggccctggcacctccaccgagcccagcgagggcagcgcacccggcagccctgccggcagccccacctccacagaggagggaaccagcaccgagcccagcgaaggcagcgccccaggcaccagcaccgagcctagtgagcaggagattaaacggatcaacaagatcagaagaagacttgtgaaagacagcaacaccaagaaggccggcaagacaggccccatgaaaaccctgctggttagagtgatgacacccgatctgagagagcggctggaaaacctgagaaagaagcctgaaaatatcccccagcccatcagcaatacatctagagccaacctgaataagctgctgaccgattacaccgaaatgaagaaggcgatcctgcatgtgtactgggaagagttccagaaggaccctgtgggcctgatgagccgggtggcccagcctgccagcaagaagatcgatcagaacaagctgaaacctgagatggacgagaagggcaacctgaccaccgccggctttgcctgctctcagtgtggccagcccctgttcgtgtacaagctggagcaggtgtctgagaagggcaaggcttacaccaactacttcggacggtgcaatgtggccgagcacgaaaagctgatcctgctggcccagctgaagcccgagaaggatagcgacgaagccgtgacatatagcctgggaaagtttgggcagagggccctggatttctacagcattcatgtgaccaaggagtccacccaccccgtgaagcccctggcccagatcgccggaaacagatacgcctccggacctgtgggaaaggccctgagcgacgcatgtatgggcacaatcgcctccttcctgtctaagtaccaggacatcatcatcgaacaccagaaggtggtgaagggcaaccagaagagactggagagcctgcgggagctggccggcaaggaaaacctggaataccctagcgtgaccctgccacctcagcctcacaccaaggagggcgttgatgcctacaacgaagtgatcgcccgggtgcgaatgtgggtgaacctgaacctgtggcagaagctgaagctaagcagagatgatgccaagcctctgctgagactgaagggattcccttcctttcctctggtcgagagacaggccaacgaagtggactggtgggacatggtgtgtaacgtgaagaagctgatcaacgagaaaaaggaggatggcaaggtgttttggcagaatctggctggctacaagagacaggaagccctgagaccatacctgagcagcgaggaagatcggaagaagggaaagaaattcgctcggtaccagctgggcgacctgctgctgcacctggaaaagaagcacggcgaggactggggaaaggtgtacgacgaggcctgggagcggattgacaagaaagtggaaggcctgagcaagcacatcaagctggaagaggaacggagaagcgaggacgcccagagcaaggccgccctgaccgactggctgcgggctaaggccagcttcgtgatcgagggcctgaaggaggccgacaaggacgagttctgcagatgcgagctgaagctgcagaagtggtacggggacctgcggggaaagcccttcgccatcgaagccgagaacagcatcctggacatcagcggcttcagcaagcagtacaactgtgccttcatctggcagaaggacggcgtgaagaagctgaacctgtacctgatcatcaactacttcaagggcggcaagctgcggttcaagaagatcaaacctgaagccttcgaagccaacagattctacaccgtgatcaacaaaaagagcggcgagatcgtgcccatggaggtgaacttcaacttcgacgaccccaacctgatcatcctgcctctggcctttggcaagagacagggcagagaattcatctggaacgacctgctgtccctggaaaccggcagcctgaagctggccaacggaagagtgatcgagaagacactgtacaacagaagaacccggcaggatgagcctgccctgttcgtggccctgaccttcgagcggcgggaggtcctggactcctccaatatcaaaccaatgaacctgatcggcgtggcaagaggcgaaaacatccccgccgtgatcgccctgaccgaccccgagggctgcccactgagccggtttaaggatagcctgggaaacccaacccacatcctgagaatcggcgagagctataaggagaagcagcggaccatccaggccaagaaggaggtggagcagcggagagccggcggctacagccggaagtacgccagcaaagccaagaatctggcagacgatatggtgagaaacaccgctagagatctgctgtactacgccgtgacccaggatgccatgctgatcttcgccaacctgagccggggcttcggccggcagggcaagcggaccttcatggccgagagacagtacacacggatggaggactggctgaccgccaagctggcctacgagggcctgagcaagacctacctgtccaagacactggcccagtacacctccaagacatgcagcaactgtgggtttaccatcaccagcgccgactacgacagggtgctggagaagctgaagaagacagcaacaggctggatgaccacaattaacggcaaggagctgaaggtggagggccagattacctactacaacagatacaagagacagaacgtagtcaaggacctgtccgtcgagctggatagactgagcgaagaatctgtgaacaacgacatctcctcctggacaaagggcagaagcggagaagctctgagcctcctgaagaaaagattctcccatagacccgtgcaggagaagttcgtgtgcctgaactgcggcttcgagacacacgcagccgagcaagccgccctgaacatcgccagatcctggctgttcctgcggagccaggagtacaagaaataccagacaaacaagacaaccggcaacaccgataagagagccttcgtcgagacctggcagtccttttaccggaagaagcttaaggaggtgtggaaacctgccgtgcggtctggcggatctggcggaggctccaccagccccaagaaaaagagaaaagtctaagctgccttctgcggggcttgccttctggccatgcccttcttctctcccttgcacctgtacctcttggtctttgaataaagcctgagtaggaaggctagcaaaaaaaaaaaaaaaaaaaaaaaaaaaaaaaaaaaaaaaaaaaaaaaaaaaaaaaaaaaaaaaaaaaaaaaaaaaaaaaagcccagccggctccccaacctctaccgaggagggcacctctgagtccgccacccccgagagcggccctggcacctccaccgagcccagcgagggcagcgcacccggcagccctgccggcagccccacctccacagaggagggaaccagcaccgagcccagcgaaggcagcgccccaggcaccagcaccgagcctagtgagcaggagattaaacggatcaacaagatcagaagaagacttgtgaaagacagcaacaccaagaaggccggcaagacaggccccatgaaaaccctgctggttagagtgatgacacccgatctgagagagcggctggaaaacctgagaaagaagcctgaaaatatcccccagcccatcagcaatacatctagagccaacctgaataagctgctgaccgattacaccgaaatgaagaaggcgatcctgcatgtgtactgggaagagttccagaaggaccctgtgggcctgatgagccgggtggcccagcctgccagcaagaagatcgatcagaacaagctgaaacctgagatggacgagaagggcaacctgaccaccgccggctttgcctgctctcagtgtggccagcccctgttcgtgtacaagctggagcaggtgtctgagaagggcaaggcttacaccaactacttcggacggtgcaatgtggccgagcacgaaaagctgatcctgctggcccagctgaagcccgagaaggatagcgacgaagccgtgacatatagcctgggaaagtttgggcagagggccctggatttctacagcattcatgtgaccaaggagtccacccaccccgtgaagcccctggcccagatcgccggaaacagatacgcctccggacctgtgggaaaggccctgagcgacgcatgtatgggcacaatcgcctccttcctgtctaagtaccaggacatcatcatcgaacaccagaaggtggtgaagggcaaccagaagagactggagagcctgcgggagctggccggcaaggaaaacctggaataccctagcgtgaccctgccacctcagcctcacaccaaggagggcgttgatgcctacaacgaagtgatcgcccgggtgcgaatgtgggtgaacctgaacctgtggcagaagctgaagctaagcagagatgatgccaagcctctgctgagactgaagggattcccttcctttcctctggtcgagagacaggccaacgaagtggactggtgggacatggtgtgtaacgtgaagaagctgatcaacgagaaaaaggaggatggcaaggtgttttggcagaatctggctggctacaagagacaggaagccctgagaccatacctgagcagcgaggaagatcggaagaagggaaagaaattcgctcggtaccagctgggcgacctgctgctgcacctggaaaagaagcacggcgaggactggggaaaggtgtacgacgaggcctgggagcggattgacaagaaagtggaaggcctgagcaagcacatcaagctggaagaggaacggagaagcgaggacgcccagagcaaggccgccctgaccgactggctgcgggctaaggccagcttcgtgatcgagggcctgaaggaggccgacaaggacgagttctgcagatgcgagctgaagctgcagaagtggtacggggacctgcggggaaagcccttcgccatcgaagccgagaacagcatcctggacatcagcggcttcagcaagcagtacaactgtgccttcatctggcagaaggacggcgtgaagaagctgaacctgtacctgatcatcaactacttcaagggcggcaagctgcggttcaagaagatcaaacctgaagccttcgaagccaacagattctacaccgtgatcaacaaaaagagcggcgagatcgtgcccatggaggtgaacttcaacttcgacgaccccaacctgatcatcctgcctctggcctttggcaagagacagggcagagaattcatctggaacgacctgctgtccctggaaaccggcagcctgaagctggccaacggaagagtgatcgagaagacactgtacaacagaagaacccggcaggatgagcctgccctgttcgtggccctgaccttcgagcggcgggaggtcctggactcctccaatatcaaaccaatgaacctgatcggcgtggcaagaggcgaaaacatccccgccgtgatcgccctgaccgaccccgagggctgcccactgagccggtttaaggatagcctgggaaacccaacccacatcctgagaatcggcgagagctataaggagaagcagcggaccatccaggccaagaaggaggtggagcagcggagagccggcggctacagccggaagtacgccagcaaagccaagaatctggcagacgatatggtgagaaacaccgctagagatctgctgtactacgccgtgacccaggatgccatgctgatcttcgccaacctgagccggggcttcggccggcagggcaagcggaccttcatggccgagagacagtacacacggatggaggactggctgaccgccaagctggcctacgagggcctgagcaagacctacctgtccaagacactggcccagtacacctccaagacatgcagcaactgtgggtttaccatcaccagcgccgactacgacagggtgctggagaagctgaagaagacagcaacaggctggatgaccacaattaacggcaaggagctgaaggtggagggccagattacctactacaacagatacaagagacagaacgtagtcaaggacctgtccgtcgagctggatagactgagcgaagaatctgtgaacaacgacatctcctcctggacaaagggcagaagcggagaagctctgagcctcctgaagaaaagattctcccatagacccgtgcaggagaagttcgtgtgcctgaactgcggcttcgagacacacgcagccgagcaagccgccctgaacatcgccagatcctggctgttcctgcggagccaggagtacaagaaataccagacaaacaagacaaccggcaacaccgataagagagccttcgtcgagacctggcagtccttttaccggaagaagcttaaggaggtgtggaaacctgccgtgcggtctggcggatctggcggaggctccaccagccccaagaaaaagagaaaagtctaagctgccttctgcggggcttgccttctggccatgcccttcttctctcccttgcacctgtacctcttggtctttgaataaagcctgagtaggaaggctagcaaaaaaaaaaaaaaaaaaaaaaaaaaaaaaaaaaaaaaaaaaaaaaaaaaaaaaaaaaaaaaaaaaaaaaaaaaaaaaaa

SEQ ID NO: 10254 - RNA, 8787 nt, synthetic construct
  source 1..8787: mol_type = other RNA
aggaaataagagagaaaagaagagtaagaagaaatataagagccaccatggcccctaagaagaagcgtaaagtgagccggatgaaccacgaccaggagttcgacccccctaaggtgtaccctcccgtccccgccgagaagagaaagcccatccgggtcctgagcctgttcgatggcatcgccaccggtctgctggtgctgaaggacctgggcatccaggtggataggtacattgcctccgaggtgtgcgaggactccatcaccgtgggaatggtgcgtcatcagggcaagatcatgtacgtgggcgacgtgcggagcgtgacacagaagcatatccaggagtggggccctttcgacctggtgatcggcggcagcccttgcaatgacctgagcatcgtgaacccagcccggaagggcctgtacgagggaaccggcagactgttcttcgagttttacagactgctgcacgacgcccggcctaaggaaggcgacgaccggcccttcttttggctgttcgagaatgtggtggccatgggagtcagcgacaagcgggatattagccggttcctggagagcaaccccgtgatgatcgatgccaaggaagtgagcgccgcccaccgggccagatacttctggggcaatctgcctggcatgaacagacccctggccagcaccgtgaacgacaagctggagctgcaggagtgcctggagcacggccggatcgccaagttcagcaaggtgagaaccatcaccacccgaagcaacagcatcaaacaaggcaaggaccagcactttcctgtgttcatgaacgagaaggaggacatcctgtggtgtaccgagatggagagagtgttcgggttcccagtccactacacagatgtcagcaacatgtctagactggccagacagagactgctgggaagaagctggtccgtccctgtgatcagacacctgttcgcccctctgaaggagtacttcgcctgcgtgagcagcggcaacagcaacgccaacagccggggccccagcttctctagcggcctggtgccactgtccctgagagggagccacatgggccccatggagatctacaaaaccgtgagcgcctggaagcggcagcctgtgcgcgtgctgagcctgtttcggaatatcgataaagtcctgaaaagcctgggattcctggagagcggctctggctccggcggtggcaccctgaagtacgtggaggatgtgacaaacgtggtcagacgggatgtggagaagtggggccccttcgatctggtgtacggcagcacccaacccctgggcagctcttgtgaccggtgccctggctggtacatgtttcagttccaccggatcctgcagtacgccctgccgagacaggagtcccagcggccattcttttggattttcatggacaacttgctgctgaccgaggatgaccaggaaactaccactcggttcctgcagaccgaagccgtgaccctgcaggacgtgagaggccgggactaccagaacgccatgcgggtgtggtccaacatccctggactgaaaagcaagcacgcacctctgacccctaaagaagaggagtacctgcaggcccaggtgcggagcagaagcaagctggacgcccctaaggtggatctgctggtgaagaattgcctcctgcccctgagagagtacttcaagtatttcagccagaatagtctgcccctgggaggcagcggcggcggcccccagggcagcgtgaccttcagggacgtggccgtgaacttcagccaggacgagtggggcaggctggaccccagccagaaggagctgtacagggaggtgatgctggagaactaccacaacctggtgtgcctgggcctggccgccagcaagcccgacgtgatcgaccagctggagaggggcgaggccccctggatgcccggcatcggctgccccgaccagaagatcaggagcgacacccaggagggcggcccaagcagcggcgcccctcctcccagcggcggcaggcggcccaagcagcggcgcccctcctcccagcggcggcagcccagccggctccccaacctctaccgaggagggcacctctgagtccgccacccccgagagcggccctggcacctccaccgagcccagcgagggcagcgcacccggcagccctgccggcagccccacctccacagaggagggaaccagcaccgagcccagcgaaggcagcgccccaggcaccagcaccgagcctagtgagcaggagattaaacggatcaacaagatcagaagaagacttgtgaaagacagcaacaccaagaaggccggcaagacaggccccatgaaaaccctgctggttagagtgatgacacccgatctgagagagcggctggaaaacctgagaaagaagcctgaaaatatcccccagcccatcagcaatacatctagagccaacctgaataagctgctgaccgattacaccgaaatgaagaaggcgatcctgcatgtgtactgggaagagttccagaaggaccctgtgggcctgatgagccgggtggcccagcctgccagcaagaagatcgatcagaacaagctgaaacctgagatggacgagaagggcaacctgaccaccgccggctttgcctgctctcagtgtggccagcccctgttcgtgtacaagctggagcaggtgtctgagaagggcaaggcttacaccaactacttcggacggtgcaatgtggccgagcacgaaaagctgatcctgctggcccagctgaagcccgagaaggatagcgacgaagccgtgacatatagcctgggaaagtttgggcagagggccctggatttctacagcattcatgtgaccaaggagtccacccaccccgtgaagcccctggcccagatcgccggaaacagatacgcctccggacctgtgggaaaggccctgagcgacgcatgtatgggcacaatcgcctccttcctgtctaagtaccaggacatcatcatcgaacaccagaaggtggtgaagggcaaccagaagagactggagagcctgcgggagctggccggcaaggaaaacctggaataccctagcgtgaccctgccacctcagcctcacaccaaggagggcgttgatgcctacaacgaagtgatcgcccgggtgcgaatgtgggtgaacctgaacctgtggcagaagctgaagctaagcagagatgatgccaagcctctgctgagactgaagggattcccttcctttcctctggtcgagagacaggccaacgaagtggactggtgggacatggtgtgtaacgtgaagaagctgatcaacgagaaaaaggaggatggcaaggtgttttggcagaatctggctggctacaagagacaggaagccctgagaccatacctgagcagcgaggaagatcggaagaagggaaagaaattcgctcggtaccagctgggcgacctgctgctgcacctggaaaagaagcacggcgaggactggggaaaggtgtacgacgaggcctgggagcggattgacaagaaagtggaaggcctgagcaagcacatcaagctggaagaggaacggagaagcgaggacgcccagagcaaggccgccctgaccgactggctgcgggctaaggccagcttcgtgatcgagggcctgaaggaggccgacaaggacgagttctgcagatgcgagctgaagctgcagaagtggtacggggacctgcggggaaagcccttcgccatcgaagccgagaacagcatcctggacatcagcggcttcagcaagcagtacaactgtgccttcatctggcagaaggacggcgtgaagaagctgaacctgtacctgatcatcaactacttcaagggcggcaagctgcggttcaagaagatcaaacctgaagccttcgaagccaacagattctacaccgtgatcaacaaaaagagcggcgagatcgtgcccatggaggtgaacttcaacttcgacgaccccaacctgatcatcctgcctctggcctttggcaagagacagggcagagaattcatctggaacgacctgctgtccctggaaaccggcagcctgaagctggccaacggaagagtgatcgagaagacactgtacaacagaagaacccggcaggatgagcctgccctgttcgtggccctgaccttcgagcggcgggaggtcctggactcctccaatatcaaaccaatgaacctgatcggcgtggcaagaggcgaaaacatccccgccgtgatcgccctgaccgaccccgagggctgcccactgagccggtttaaggatagcctgggaaacccaacccacatcctgagaatcggcgagagctataaggagaagcagcggaccatccaggccaagaaggaggtggagcagcggagagccggcggctacagccggaagtacgccagcaaagccaagaatctggcagacgatatggtgagaaacaccgctagagatctgctgtactacgccgtgacccaggatgccatgctgatcttcgccaacctgagccggggcttcggccggcagggcaagcggaccttcatggccgagagacagtacacacggatggaggactggctgaccgccaagctggcctacgagggcctgagcaagacctacctgtccaagacactggcccagtacacctccaagacatgcagcaactgtgggtttaccatcaccagcgccgactacgacagggtgctggagaagctgaagaagacagcaacaggctggatgaccacaattaacggcaaggagctgaaggtggagggccagattacctactacaacagatacaagagacagaacgtagtcaaggacctgtccgtcgagctggatagactgagcgaagaatctgtgaacaacgacatctcctcctggacaaagggcagaagcggagaagctctgagcctcctgaagaaaagattctcccatagacccgtgcaggagaagttcgtgtgcctgaactgcggcttcgagacacacgcagccgagcaagccgccctgaacatcgccagatcctggctgttcctgcggagccaggagtacaagaaataccagacaaacaagacaaccggcaacaccgataagagagccttcgtcgagacctggcagtccttttaccggaagaagcttaaggaggtgtggaaacctgccgtgcggtctggcggatctggcggaggctccaccagccccaagaaaaagagaaaagtctaagctgccttctgcggggcttgccttctggccatgcccttcttctctcccttgcacctgtacctcttggtctttgaataaagcctgagtaggaaggctagcaaaaaaaaaaaaaaaaaaaaaaaaaaaaaaaaaaaaaaaaaaaaaaaaaaaaaaaaaaaaaaaaaaaaaaaaaaaaaaaagcccagccggctccccaacctctaccgaggagggcacctctgagtccgccacccccgagagcggccctggcacctccaccgagcccagcgagggcagcgcacccggcagccctgccggcagccccacctccacagaggagggaaccagcaccgagcccagcgaaggcagcgccccaggcaccagcaccgagcctagtgagcaggagattaaacggatcaacaagatcagaagaagacttgtgaaagacagcaacaccaagaaggccggcaagacaggccccatgaaaaccctgctggttagagtgatgacacccgatctgagagagcggctggaaaacctgagaaagaagcctgaaaatatcccccagcccatcagcaatacatctagagccaacctgaataagctgctgaccgattacaccgaaatgaagaaggcgatcctgcatgtgtactgggaagagttccagaaggaccctgtgggcctgatgagccgggtggcccagcctgccagcaagaagatcgatcagaacaagctgaaacctgagatggacgagaagggcaacctgaccaccgccggctttgcctgctctcagtgtggccagcccctgttcgtgtacaagctggagcaggtgtctgagaagggcaaggcttacaccaactacttcggacggtgcaatgtggccgagcacgaaaagctgatcctgctggcccagctgaagcccgagaaggatagcgacgaagccgtgacatatagcctgggaaagtttgggcagagggccctggatttctacagcattcatgtgaccaaggagtccacccaccccgtgaagcccctggcccagatcgccggaaacagatacgcctccggacctgtgggaaaggccctgagcgacgcatgtatgggcacaatcgcctccttcctgtctaagtaccaggacatcatcatcgaacaccagaaggtggtgaagggcaaccagaagagactggagagcctgcgggagctggccggcaaggaaaacctggaataccctagcgtgaccctgccacctcagcctcacaccaaggagggcgttgatgcctacaacgaagtgatcgcccgggtgcgaatgtgggtgaacctgaacctgtggcagaagctgaagctaagcagagatgatgccaagcctctgctgagactgaagggattcccttcctttcctctggtcgagagacaggccaacgaagtggactggtgggacatggtgtgtaacgtgaagaagctgatcaacgagaaaaaggaggatggcaaggtgttttggcagaatctggctggctacaagagacaggaagccctgagaccatacctgagcagcgaggaagatcggaagaagggaaagaaattcgctcggtaccagctgggcgacctgctgctgcacctggaaaagaagcacggcgaggactggggaaaggtgtacgacgaggcctgggagcggattgacaagaaagtggaaggcctgagcaagcacatcaagctggaagaggaacggagaagcgaggacgcccagagcaaggccgccctgaccgactggctgcgggctaaggccagcttcgtgatcgagggcctgaaggaggccgacaaggacgagttctgcagatgcgagctgaagctgcagaagtggtacggggacctgcggggaaagcccttcgccatcgaagccgagaacagcatcctggacatcagcggcttcagcaagcagtacaactgtgccttcatctggcagaaggacggcgtgaagaagctgaacctgtacctgatcatcaactacttcaagggcggcaagctgcggttcaagaagatcaaacctgaagccttcgaagccaacagattctacaccgtgatcaacaaaaagagcggcgagatcgtgcccatggaggtgaacttcaacttcgacgaccccaacctgatcatcctgcctctggcctttggcaagagacagggcagagaattcatctggaacgacctgctgtccctggaaaccggcagcctgaagctggccaacggaagagtgatcgagaagacactgtacaacagaagaacccggcaggatgagcctgccctgttcgtggccctgaccttcgagcggcgggaggtcctggactcctccaatatcaaaccaatgaacctgatcggcgtggcaagaggcgaaaacatccccgccgtgatcgccctgaccgaccccgagggctgcccactgagccggtttaaggatagcctgggaaacccaacccacatcctgagaatcggcgagagctataaggagaagcagcggaccatccaggccaagaaggaggtggagcagcggagagccggcggctacagccggaagtacgccagcaaagccaagaatctggcagacgatatggtgagaaacaccgctagagatctgctgtactacgccgtgacccaggatgccatgctgatcttcgccaacctgagccggggcttcggccggcagggcaagcggaccttcatggccgagagacagtacacacggatggaggactggctgaccgccaagctggcctacgagggcctgagcaagacctacctgtccaagacactggcccagtacacctccaagacatgcagcaactgtgggtttaccatcaccagcgccgactacgacagggtgctggagaagctgaagaagacagcaacaggctggatgaccacaattaacggcaaggagctgaaggtggagggccagattacctactacaacagatacaagagacagaacgtagtcaaggacctgtccgtcgagctggatagactgagcgaagaatctgtgaacaacgacatctcctcctggacaaagggcagaagcggagaagctctgagcctcctgaagaaaagattctcccatagacccgtgcaggagaagttcgtgtgcctgaactgcggcttcgagacacacgcagccgagcaagccgccctgaacatcgccagatcctggctgttcctgcggagccaggagtacaagaaataccagacaaacaagacaaccggcaacaccgataagagagccttcgtcgagacctggcagtccttttaccggaagaagcttaaggaggtgtggaaacctgccgtgcggtctggcggatctggcggaggctccaccagccccaagaaaaagagaaaagtctaagctgccttctgcggggcttgccttctggccatgcccttcttctctcccttgcacctgtacctcttggtctttgaataaagcctgagtaggaaggctagcaaaaaaaaaaaaaaaaaaaaaaaaaaaaaaaaaaaaaaaaaaaaaaaaaaaaaaaaaaaaaaaaaaaaaaaaaaaaaaaa

SEQ ID NO: 10255 - RNA, 8787 nt, synthetic construct
  source 1..8787: mol_type = other RNA
aggaaataagagagaaaagaagagtaagaagaaatataagagccaccatggcccctaagaagaagcgtaaagtgagccggatgaaccacgaccaggagttcgacccccctaaggtgtaccctcccgtccccgccgagaagagaaagcccatccgggtcctgagcctgttcgatggcatcgccaccggtctgctggtgctgaaggacctgggcatccaggtggataggtacattgcctccgaggtgtgcgaggactccatcaccgtgggaatggtgcgtcatcagggcaagatcatgtacgtgggcgacgtgcggagcgtgacacagaagcatatccaggagtggggccctttcgacctggtgatcggcggcagcccttgcaatgacctgagcatcgtgaacccagcccggaagggcctgtacgagggaaccggcagactgttcttcgagttttacagactgctgcacgacgcccggcctaaggaaggcgacgaccggcccttcttttggctgttcgagaatgtggtggccatgggagtcagcgacaagcgggatattagccggttcctggagagcaaccccgtgatgatcgatgccaaggaagtgagcgccgcccaccgggccagatacttctggggcaatctgcctggcatgaacagacccctggccagcaccgtgaacgacaagctggagctgcaggagtgcctggagcacggccggatcgccaagttcagcaaggtgagaaccatcaccacccgaagcaacagcatcaaacaaggcaaggaccagcactttcctgtgttcatgaacgagaaggaggacatcctgtggtgtaccgagatggagagagtgttcgggttcccagtccactacacagatgtcagcaacatgtctagactggccagacagagactgctgggaagaagctggtccgtccctgtgatcagacacctgttcgcccctctgaaggagtacttcgcctgcgtgagcagcggcaacagcaacgccaacagccggggccccagcttctctagcggcctggtgccactgtccctgagagggagccacatgggccccatggagatctacaaaaccgtgagcgcctggaagcggcagcctgtgcgcgtgctgagcctgtttcggaatatcgataaagtcctgaaaagcctgggattcctggagagcggctctggctccggcggtggcaccctgaagtacgtggaggatgtgacaaacgtggtcagacgggatgtggagaagtggggccccttcgatctggtgtacggcagcacccaacccctgggcagctcttgtgaccggtgccctggctggtacatgtttcagttccaccggatcctgcagtacgccctgccgagacaggagtcccagcggccattcttttggattttcatggacaacttgctgctgaccgaggatgaccaggaaactaccactcggttcctgcagaccgaagccgtgaccctgcaggacgtgagaggccgggactaccagaacgccatgcgggtgtggtccaacatccctggactgaaaagcaagcacgcacctctgacccctaaagaagaggagtacctgcaggcccaggtgcggagcagaagcaagctggacgcccctaaggtggatctgctggtgaagaattgcctcctgcccctgagagagtacttcaagtatttcagccagaatagtctgcccctgggaggcagcggcggcggcatggacctggtgatgttcagggacgtggccgtggacttcagccaggaggagtgggagtgcctgaacagctaccagaggaacctgtacagggacgtgatcctggagaactacagcaacctggtgagcctggccggctgcagcatcagcaagcccgacgtgatcaccctgctggagcagggcaaggagccctggctggtggtgaggaacgagaagaggaggtggagcctggacctggagagcaggggcggcccaagcagcggcgcccctcctcccagcggcggcaggcggcccaagcagcggcgcccctcctcccagcggcggcagcccagccggctccccaacctctaccgaggagggcacctctgagtccgccacccccgagagcggccctggcacctccaccgagcccagcgagggcagcgcacccggcagccctgccggcagccccacctccacagaggagggaaccagcaccgagcccagcgaaggcagcgccccaggcaccagcaccgagcctagtgagcaggagattaaacggatcaacaagatcagaagaagacttgtgaaagacagcaacaccaagaaggccggcaagacaggccccatgaaaaccctgctggttagagtgatgacacccgatctgagagagcggctggaaaacctgagaaagaagcctgaaaatatcccccagcccatcagcaatacatctagagccaacctgaataagctgctgaccgattacaccgaaatgaagaaggcgatcctgcatgtgtactgggaagagttccagaaggaccctgtgggcctgatgagccgggtggcccagcctgccagcaagaagatcgatcagaacaagctgaaacctgagatggacgagaagggcaacctgaccaccgccggctttgcctgctctcagtgtggccagcccctgttcgtgtacaagctggagcaggtgtctgagaagggcaaggcttacaccaactacttcggacggtgcaatgtggccgagcacgaaaagctgatcctgctggcccagctgaagcccgagaaggatagcgacgaagccgtgacatatagcctgggaaagtttgggcagagggccctggatttctacagcattcatgtgaccaaggagtccacccaccccgtgaagcccctggcccagatcgccggaaacagatacgcctccggacctgtgggaaaggccctgagcgacgcatgtatgggcacaatcgcctccttcctgtctaagtaccaggacatcatcatcgaacaccagaaggtggtgaagggcaaccagaagagactggagagcctgcgggagctggccggcaaggaaaacctggaataccctagcgtgaccctgccacctcagcctcacaccaaggagggcgttgatgcctacaacgaagtgatcgcccgggtgcgaatgtgggtgaacctgaacctgtggcagaagctgaagctaagcagagatgatgccaagcctctgctgagactgaagggattcccttcctttcctctggtcgagagacaggccaacgaagtggactggtgggacatggtgtgtaacgtgaagaagctgatcaacgagaaaaaggaggatggcaaggtgttttggcagaatctggctggctacaagagacaggaagccctgagaccatacctgagcagcgaggaagatcggaagaagggaaagaaattcgctcggtaccagctgggcgacctgctgctgcacctggaaaagaagcacggcgaggactggggaaaggtgtacgacgaggcctgggagcggattgacaagaaagtggaaggcctgagcaagcacatcaagctggaagaggaacggagaagcgaggacgcccagagcaaggccgccctgaccgactggctgcgggctaaggccagcttcgtgatcgagggcctgaaggaggccgacaaggacgagttctgcagatgcgagctgaagctgcagaagtggtacggggacctgcggggaaagcccttcgccatcgaagccgagaacagcatcctggacatcagcggcttcagcaagcagtacaactgtgccttcatctggcagaaggacggcgtgaagaagctgaacctgtacctgatcatcaactacttcaagggcggcaagctgcggttcaagaagatcaaacctgaagccttcgaagccaacagattctacaccgtgatcaacaaaaagagcggcgagatcgtgcccatggaggtgaacttcaacttcgacgaccccaacctgatcatcctgcctctggcctttggcaagagacagggcagagaattcatctggaacgacctgctgtccctggaaaccggcagcctgaagctggccaacggaagagtgatcgagaagacactgtacaacagaagaacccggcaggatgagcctgccctgttcgtggccctgaccttcgagcggcgggaggtcctggactcctccaatatcaaaccaatgaacctgatcggcgtggcaagaggcgaaaacatccccgccgtgatcgccctgaccgaccccgagggctgcccactgagccggtttaaggatagcctgggaaacccaacccacatcctgagaatcggcgagagctataaggagaagcagcggaccatccaggccaagaaggaggtggagcagcggagagccggcggctacagccggaagtacgccagcaaagccaagaatctggcagacgatatggtgagaaacaccgctagagatctgctgtactacgccgtgacccaggatgccatgctgatcttcgccaacctgagccggggcttcggccggcagggcaagcggaccttcatggccgagagacagtacacacggatggaggactggctgaccgccaagctggcctacgagggcctgagcaagacctacctgtccaagacactggcccagtacacctccaagacatgcagcaactgtgggtttaccatcaccagcgccgactacgacagggtgctggagaagctgaagaagacagcaacaggctggatgaccacaattaacggcaaggagctgaaggtggagggccagattacctactacaacagatacaagagacagaacgtagtcaaggacctgtccgtcgagctggatagactgagcgaagaatctgtgaacaacgacatctcctcctggacaaagggcagaagcggagaagctctgagcctcctgaagaaaagattctcccatagacccgtgcaggagaagttcgtgtgcctgaactgcggcttcgagacacacgcagccgagcaagccgccctgaacatcgccagatcctggctgttcctgcggagccaggagtacaagaaataccagacaaacaagacaaccggcaacaccgataagagagccttcgtcgagacctggcagtccttttaccggaagaagcttaaggaggtgtggaaacctgccgtgcggtctggcggatctggcggaggctccaccagccccaagaaaaagagaaaagtctaagctgccttctgcggggcttgccttctggccatgcccttcttctctcccttgcacctgtacctcttggtctttgaataaagcctgagtaggaaggctagcaaaaaaaaaaaaaaaaaaaaaaaaaaaaaaaaaaaaaaaaaaaaaaaaaaaaaaaaaaaaaaaaaaaaaaaaaaaaaaaagcccagccggctccccaacctctaccgaggagggcacctctgagtccgccacccccgagagcggccctggcacctccaccgagcccagcgagggcagcgcacccggcagccctgccggcagccccacctccacagaggagggaaccagcaccgagcccagcgaaggcagcgccccaggcaccagcaccgagcctagtgagcaggagattaaacggatcaacaagatcagaagaagacttgtgaaagacagcaacaccaagaaggccggcaagacaggccccatgaaaaccctgctggttagagtgatgacacccgatctgagagagcggctggaaaacctgagaaagaagcctgaaaatatcccccagcccatcagcaatacatctagagccaacctgaataagctgctgaccgattacaccgaaatgaagaaggcgatcctgcatgtgtactgggaagagttccagaaggaccctgtgggcctgatgagccgggtggcccagcctgccagcaagaagatcgatcagaacaagctgaaacctgagatggacgagaagggcaacctgaccaccgccggctttgcctgctctcagtgtggccagcccctgttcgtgtacaagctggagcaggtgtctgagaagggcaaggcttacaccaactacttcggacggtgcaatgtggccgagcacgaaaagctgatcctgctggcccagctgaagcccgagaaggatagcgacgaagccgtgacatatagcctgggaaagtttgggcagagggccctggatttctacagcattcatgtgaccaaggagtccacccaccccgtgaagcccctggcccagatcgccggaaacagatacgcctccggacctgtgggaaaggccctgagcgacgcatgtatgggcacaatcgcctccttcctgtctaagtaccaggacatcatcatcgaacaccagaaggtggtgaagggcaaccagaagagactggagagcctgcgggagctggccggcaaggaaaacctggaataccctagcgtgaccctgccacctcagcctcacaccaaggagggcgttgatgcctacaacgaagtgatcgcccgggtgcgaatgtgggtgaacctgaacctgtggcagaagctgaagctaagcagagatgatgccaagcctctgctgagactgaagggattcccttcctttcctctggtcgagagacaggccaacgaagtggactggtgggacatggtgtgtaacgtgaagaagctgatcaacgagaaaaaggaggatggcaaggtgttttggcagaatctggctggctacaagagacaggaagccctgagaccatacctgagcagcgaggaagatcggaagaagggaaagaaattcgctcggtaccagctgggcgacctgctgctgcacctggaaaagaagcacggcgaggactggggaaaggtgtacgacgaggcctgggagcggattgacaagaaagtggaaggcctgagcaagcacatcaagctggaagaggaacggagaagcgaggacgcccagagcaaggccgccctgaccgactggctgcgggctaaggccagcttcgtgatcgagggcctgaaggaggccgacaaggacgagttctgcagatgcgagctgaagctgcagaagtggtacggggacctgcggggaaagcccttcgccatcgaagccgagaacagcatcctggacatcagcggcttcagcaagcagtacaactgtgccttcatctggcagaaggacggcgtgaagaagctgaacctgtacctgatcatcaactacttcaagggcggcaagctgcggttcaagaagatcaaacctgaagccttcgaagccaacagattctacaccgtgatcaacaaaaagagcggcgagatcgtgcccatggaggtgaacttcaacttcgacgaccccaacctgatcatcctgcctctggcctttggcaagagacagggcagagaattcatctggaacgacctgctgtccctggaaaccggcagcctgaagctggccaacggaagagtgatcgagaagacactgtacaacagaagaacccggcaggatgagcctgccctgttcgtggccctgaccttcgagcggcgggaggtcctggactcctccaatatcaaaccaatgaacctgatcggcgtggcaagaggcgaaaacatccccgccgtgatcgccctgaccgaccccgagggctgcccactgagccggtttaaggatagcctgggaaacccaacccacatcctgagaatcggcgagagctataaggagaagcagcggaccatccaggccaagaaggaggtggagcagcggagagccggcggctacagccggaagtacgccagcaaagccaagaatctggcagacgatatggtgagaaacaccgctagagatctgctgtactacgccgtgacccaggatgccatgctgatcttcgccaacctgagccggggcttcggccggcagggcaagcggaccttcatggccgagagacagtacacacggatggaggactggctgaccgccaagctggcctacgagggcctgagcaagacctacctgtccaagacactggcccagtacacctccaagacatgcagcaactgtgggtttaccatcaccagcgccgactacgacagggtgctggagaagctgaagaagacagcaacaggctggatgaccacaattaacggcaaggagctgaaggtggagggccagattacctactacaacagatacaagagacagaacgtagtcaaggacctgtccgtcgagctggatagactgagcgaagaatctgtgaacaacgacatctcctcctggacaaagggcagaagcggagaagctctgagcctcctgaagaaaagattctcccatagacccgtgcaggagaagttcgtgtgcctgaactgcggcttcgagacacacgcagccgagcaagccgccctgaacatcgccagatcctggctgttcctgcggagccaggagtacaagaaataccagacaaacaagacaaccggcaacaccgataagagagccttcgtcgagacctggcagtccttttaccggaagaagcttaaggaggtgtggaaacctgccgtgcggtctggcggatctggcggaggctccaccagccccaagaaaaagagaaaagtctaagctgccttctgcggggcttgccttctggccatgcccttcttctctcccttgcacctgtacctcttggtctttgaataaagcctgagtaggaaggctagcaaaaaaaaaaaaaaaaaaaaaaaaaaaaaaaaaaaaaaaaaaaaaaaaaaaaaaaaaaaaaaaaaaaaaaaaaaaaaaaa

SEQ ID NO: 10256 - RNA, 8787 nt, synthetic construct
  source 1..8787: mol_type = other RNA
aggaaataagagagaaaagaagagtaagaagaaatataagagccaccatggcccctaagaagaagcgtaaagtgagccggatgaaccacgaccaggagttcgacccccctaaggtgtaccctcccgtccccgccgagaagagaaagcccatccgggtcctgagcctgttcgatggcatcgccaccggtctgctggtgctgaaggacctgggcatccaggtggataggtacattgcctccgaggtgtgcgaggactccatcaccgtgggaatggtgcgtcatcagggcaagatcatgtacgtgggcgacgtgcggagcgtgacacagaagcatatccaggagtggggccctttcgacctggtgatcggcggcagcccttgcaatgacctgagcatcgtgaacccagcccggaagggcctgtacgagggaaccggcagactgttcttcgagttttacagactgctgcacgacgcccggcctaaggaaggcgacgaccggcccttcttttggctgttcgagaatgtggtggccatgggagtcagcgacaagcgggatattagccggttcctggagagcaaccccgtgatgatcgatgccaaggaagtgagcgccgcccaccgggccagatacttctggggcaatctgcctggcatgaacagacccctggccagcaccgtgaacgacaagctggagctgcaggagtgcctggagcacggccggatcgccaagttcagcaaggtgagaaccatcaccacccgaagcaacagcatcaaacaaggcaaggaccagcactttcctgtgttcatgaacgagaaggaggacatcctgtggtgtaccgagatggagagagtgttcgggttcccagtccactacacagatgtcagcaacatgtctagactggccagacagagactgctgggaagaagctggtccgtccctgtgatcagacacctgttcgcccctctgaaggagtacttcgcctgcgtgagcagcggcaacagcaacgccaacagccggggccccagcttctctagcggcctggtgccactgtccctgagagggagccacatgggccccatggagatctacaaaaccgtgagcgcctggaagcggcagcctgtgcgcgtgctgagcctgtttcggaatatcgataaagtcctgaaaagcctgggattcctggagagcggctctggctccggcggtggcaccctgaagtacgtggaggatgtgacaaacgtggtcagacgggatgtggagaagtggggccccttcgatctggtgtacggcagcacccaacccctgggcagctcttgtgaccggtgccctggctggtacatgtttcagttccaccggatcctgcagtacgccctgccgagacaggagtcccagcggccattcttttggattttcatggacaacttgctgctgaccgaggatgaccaggaaactaccactcggttcctgcagaccgaagccgtgaccctgcaggacgtgagaggccgggactaccagaacgccatgcgggtgtggtccaacatccctggactgaaaagcaagcacgcacctctgacccctaaagaagaggagtacctgcaggcccaggtgcggagcagaagcaagctggacgcccctaaggtggatctgctggtgaagaattgcctcctgcccctgagagagtacttcaagtatttcagccagaatagtctgcccctgggaggcagcggcggcggcagcgtgaccttcgaggacgtggccgtgaacttcagcctggaggagtggaacctgctgaacgaggcccagaggtgcctgtacagggacgtgatgctggagaccctgaccctgatcagcagcctgggcgcccccccccacaccctgttccccgccagggcctgcggccccgaggccccccccagcaggcactgccccaggcccagcctgtgcctgagcctgagccccctgcaccccaccggcgtgggcggcccaagcagcggcgcccctcctcccagcggcggcaggcggcccaagcagcggcgcccctcctcccagcggcggcagcccagccggctccccaacctctaccgaggagggcacctctgagtccgccacccccgagagcggccctggcacctccaccgagcccagcgagggcagcgcacccggcagccctgccggcagccccacctccacagaggagggaaccagcaccgagcccagcgaaggcagcgccccaggcaccagcaccgagcctagtgagcaggagattaaacggatcaacaagatcagaagaagacttgtgaaagacagcaacaccaagaaggccggcaagacaggccccatgaaaaccctgctggttagagtgatgacacccgatctgagagagcggctggaaaacctgagaaagaagcctgaaaatatcccccagcccatcagcaatacatctagagccaacctgaataagctgctgaccgattacaccgaaatgaagaaggcgatcctgcatgtgtactgggaagagttccagaaggaccctgtgggcctgatgagccgggtggcccagcctgccagcaagaagatcgatcagaacaagctgaaacctgagatggacgagaagggcaacctgaccaccgccggctttgcctgctctcagtgtggccagcccctgttcgtgtacaagctggagcaggtgtctgagaagggcaaggcttacaccaactacttcggacggtgcaatgtggccgagcacgaaaagctgatcctgctggcccagctgaagcccgagaaggatagcgacgaagccgtgacatatagcctgggaaagtttgggcagagggccctggatttctacagcattcatgtgaccaaggagtccacccaccccgtgaagcccctggcccagatcgccggaaacagatacgcctccggacctgtgggaaaggccctgagcgacgcatgtatgggcacaatcgcctccttcctgtctaagtaccaggacatcatcatcgaacaccagaaggtggtgaagggcaaccagaagagactggagagcctgcgggagctggccggcaaggaaaacctggaataccctagcgtgaccctgccacctcagcctcacaccaaggagggcgttgatgcctacaacgaagtgatcgcccgggtgcgaatgtgggtgaacctgaacctgtggcagaagctgaagctaagcagagatgatgccaagcctctgctgagactgaagggattcccttcctttcctctggtcgagagacaggccaacgaagtggactggtgggacatggtgtgtaacgtgaagaagctgatcaacgagaaaaaggaggatggcaaggtgttttggcagaatctggctggctacaagagacaggaagccctgagaccatacctgagcagcgaggaagatcggaagaagggaaagaaattcgctcggtaccagctgggcgacctgctgctgcacctggaaaagaagcacggcgaggactggggaaaggtgtacgacgaggcctgggagcggattgacaagaaagtggaaggcctgagcaagcacatcaagctggaagaggaacggagaagcgaggacgcccagagcaaggccgccctgaccgactggctgcgggctaaggccagcttcgtgatcgagggcctgaaggaggccgacaaggacgagttctgcagatgcgagctgaagctgcagaagtggtacggggacctgcggggaaagcccttcgccatcgaagccgagaacagcatcctggacatcagcggcttcagcaagcagtacaactgtgccttcatctggcagaaggacggcgtgaagaagctgaacctgtacctgatcatcaactacttcaagggcggcaagctgcggttcaagaagatcaaacctgaagccttcgaagccaacagattctacaccgtgatcaacaaaaagagcggcgagatcgtgcccatggaggtgaacttcaacttcgacgaccccaacctgatcatcctgcctctggcctttggcaagagacagggcagagaattcatctggaacgacctgctgtccctggaaaccggcagcctgaagctggccaacggaagagtgatcgagaagacactgtacaacagaagaacccggcaggatgagcctgccctgttcgtggccctgaccttcgagcggcgggaggtcctggactcctccaatatcaaaccaatgaacctgatcggcgtggcaagaggcgaaaacatccccgccgtgatcgccctgaccgaccccgagggctgcccactgagccggtttaaggatagcctgggaaacccaacccacatcctgagaatcggcgagagctataaggagaagcagcggaccatccaggccaagaaggaggtggagcagcggagagccggcggctacagccggaagtacgccagcaaagccaagaatctggcagacgatatggtgagaaacaccgctagagatctgctgtactacgccgtgacccaggatgccatgctgatcttcgccaacctgagccggggcttcggccggcagggcaagcggaccttcatggccgagagacagtacacacggatggaggactggctgaccgccaagctggcctacgagggcctgagcaagacctacctgtccaagacactggcccagtacacctccaagacatgcagcaactgtgggtttaccatcaccagcgccgactacgacagggtgctggagaagctgaagaagacagcaacaggctggatgaccacaattaacggcaaggagctgaaggtggagggccagattacctactacaacagatacaagagacagaacgtagtcaaggacctgtccgtcgagctggatagactgagcgaagaatctgtgaacaacgacatctcctcctggacaaagggcagaagcggagaagctctgagcctcctgaagaaaagattctcccatagacccgtgcaggagaagttcgtgtgcctgaactgcggcttcgagacacacgcagccgagcaagccgccctgaacatcgccagatcctggctgttcctgcggagccaggagtacaagaaataccagacaaacaagacaaccggcaacaccgataagagagccttcgtcgagacctggcagtccttttaccggaagaagcttaaggaggtgtggaaacctgccgtgcggtctggcggatctggcggaggctccaccagccccaagaaaaagagaaaagtctaagctgccttctgcggggcttgccttctggccatgcccttcttctctcccttgcacctgtacctcttggtctttgaataaagcctgagtaggaaggctagcaaaaaaaaaaaaaaaaaaaaaaaaaaaaaaaaaaaaaaaaaaaaaaaaaaaaaaaaaaaaaaaaaaaaaaaaaaaaaaaagcccagccggctccccaacctctaccgaggagggcacctctgagtccgccacccccgagagcggccctggcacctccaccgagcccagcgagggcagcgcacccggcagccctgccggcagccccacctccacagaggagggaaccagcaccgagcccagcgaaggcagcgccccaggcaccagcaccgagcctagtgagcaggagattaaacggatcaacaagatcagaagaagacttgtgaaagacagcaacaccaagaaggccggcaagacaggccccatgaaaaccctgctggttagagtgatgacacccgatctgagagagcggctggaaaacctgagaaagaagcctgaaaatatcccccagcccatcagcaatacatctagagccaacctgaataagctgctgaccgattacaccgaaatgaagaaggcgatcctgcatgtgtactgggaagagttccagaaggaccctgtgggcctgatgagccgggtggcccagcctgccagcaagaagatcgatcagaacaagctgaaacctgagatggacgagaagggcaacctgaccaccgccggctttgcctgctctcagtgtggccagcccctgttcgtgtacaagctggagcaggtgtctgagaagggcaaggcttacaccaactacttcggacggtgcaatgtggccgagcacgaaaagctgatcctgctggcccagctgaagcccgagaaggatagcgacgaagccgtgacatatagcctgggaaagtttgggcagagggccctggatttctacagcattcatgtgaccaaggagtccacccaccccgtgaagcccctggcccagatcgccggaaacagatacgcctccggacctgtgggaaaggccctgagcgacgcatgtatgggcacaatcgcctccttcctgtctaagtaccaggacatcatcatcgaacaccagaaggtggtgaagggcaaccagaagagactggagagcctgcgggagctggccggcaaggaaaacctggaataccctagcgtgaccctgccacctcagcctcacaccaaggagggcgttgatgcctacaacgaagtgatcgcccgggtgcgaatgtgggtgaacctgaacctgtggcagaagctgaagctaagcagagatgatgccaagcctctgctgagactgaagggattcccttcctttcctctggtcgagagacaggccaacgaagtggactggtgggacatggtgtgtaacgtgaagaagctgatcaacgagaaaaaggaggatggcaaggtgttttggcagaatctggctggctacaagagacaggaagccctgagaccatacctgagcagcgaggaagatcggaagaagggaaagaaattcgctcggtaccagctgggcgacctgctgctgcacctggaaaagaagcacggcgaggactggggaaaggtgtacgacgaggcctgggagcggattgacaagaaagtggaaggcctgagcaagcacatcaagctggaagaggaacggagaagcgaggacgcccagagcaaggccgccctgaccgactggctgcgggctaaggccagcttcgtgatcgagggcctgaaggaggccgacaaggacgagttctgcagatgcgagctgaagctgcagaagtggtacggggacctgcggggaaagcccttcgccatcgaagccgagaacagcatcctggacatcagcggcttcagcaagcagtacaactgtgccttcatctggcagaaggacggcgtgaagaagctgaacctgtacctgatcatcaactacttcaagggcggcaagctgcggttcaagaagatcaaacctgaagccttcgaagccaacagattctacaccgtgatcaacaaaaagagcggcgagatcgtgcccatggaggtgaacttcaacttcgacgaccccaacctgatcatcctgcctctggcctttggcaagagacagggcagagaattcatctggaacgacctgctgtccctggaaaccggcagcctgaagctggccaacggaagagtgatcgagaagacactgtacaacagaagaacccggcaggatgagcctgccctgttcgtggccctgaccttcgagcggcgggaggtcctggactcctccaatatcaaaccaatgaacctgatcggcgtggcaagaggcgaaaacatccccgccgtgatcgccctgaccgaccccgagggctgcccactgagccggtttaaggatagcctgggaaacccaacccacatcctgagaatcggcgagagctataaggagaagcagcggaccatccaggccaagaaggaggtggagcagcggagagccggcggctacagccggaagtacgccagcaaagccaagaatctggcagacgatatggtgagaaacaccgctagagatctgctgtactacgccgtgacccaggatgccatgctgatcttcgccaacctgagccggggcttcggccggcagggcaagcggaccttcatggccgagagacagtacacacggatggaggactggctgaccgccaagctggcctacgagggcctgagcaagacctacctgtccaagacactggcccagtacacctccaagacatgcagcaactgtgggtttaccatcaccagcgccgactacgacagggtgctggagaagctgaagaagacagcaacaggctggatgaccacaattaacggcaaggagctgaaggtggagggccagattacctactacaacagatacaagagacagaacgtagtcaaggacctgtccgtcgagctggatagactgagcgaagaatctgtgaacaacgacatctcctcctggacaaagggcagaagcggagaagctctgagcctcctgaagaaaagattctcccatagacccgtgcaggagaagttcgtgtgcctgaactgcggcttcgagacacacgcagccgagcaagccgccctgaacatcgccagatcctggctgttcctgcggagccaggagtacaagaaataccagacaaacaagacaaccggcaacaccgataagagagccttcgtcgagacctggcagtccttttaccggaagaagcttaaggaggtgtggaaacctgccgtgcggtctggcggatctggcggaggctccaccagccccaagaaaaagagaaaagtctaagctgccttctgcggggcttgccttctggccatgcccttcttctctcccttgcacctgtacctcttggtctttgaataaagcctgagtaggaaggctagcaaaaaaaaaaaaaaaaaaaaaaaaaaaaaaaaaaaaaaaaaaaaaaaaaaaaaaaaaaaaaaaaaaaaaaaaaaaaaaaa

SEQ ID NO: 10257 - RNA, 8787 nt, synthetic construct
  source 1..8787: mol_type = other RNA
aggaaataagagagaaaagaagagtaagaagaaatataagagccaccatggcccctaagaagaagcgtaaagtgagccggatgaaccacgaccaggagttcgacccccctaaggtgtaccctcccgtccccgccgagaagagaaagcccatccgggtcctgagcctgttcgatggcatcgccaccggtctgctggtgctgaaggacctgggcatccaggtggataggtacattgcctccgaggtgtgcgaggactccatcaccgtgggaatggtgcgtcatcagggcaagatcatgtacgtgggcgacgtgcggagcgtgacacagaagcatatccaggagtggggccctttcgacctggtgatcggcggcagcccttgcaatgacctgagcatcgtgaacccagcccggaagggcctgtacgagggaaccggcagactgttcttcgagttttacagactgctgcacgacgcccggcctaaggaaggcgacgaccggcccttcttttggctgttcgagaatgtggtggccatgggagtcagcgacaagcgggatattagccggttcctggagagcaaccccgtgatgatcgatgccaaggaagtgagcgccgcccaccgggccagatacttctggggcaatctgcctggcatgaacagacccctggccagcaccgtgaacgacaagctggagctgcaggagtgcctggagcacggccggatcgccaagttcagcaaggtgagaaccatcaccacccgaagcaacagcatcaaacaaggcaaggaccagcactttcctgtgttcatgaacgagaaggaggacatcctgtggtgtaccgagatggagagagtgttcgggttcccagtccactacacagatgtcagcaacatgtctagactggccagacagagactgctgggaagaagctggtccgtccctgtgatcagacacctgttcgcccctctgaaggagtacttcgcctgcgtgagcagcggcaacagcaacgccaacagccggggccccagcttctctagcggcctggtgccactgtccctgagagggagccacatgggccccatggagatctacaaaaccgtgagcgcctggaagcggcagcctgtgcgcgtgctgagcctgtttcggaatatcgataaagtcctgaaaagcctgggattcctggagagcggctctggctccggcggtggcaccctgaagtacgtggaggatgtgacaaacgtggtcagacgggatgtggagaagtggggccccttcgatctggtgtacggcagcacccaacccctgggcagctcttgtgaccggtgccctggctggtacatgtttcagttccaccggatcctgcagtacgccctgccgagacaggagtcccagcggccattcttttggattttcatggacaacttgctgctgaccgaggatgaccaggaaactaccactcggttcctgcagaccgaagccgtgaccctgcaggacgtgagaggccgggactaccagaacgccatgcgggtgtggtccaacatccctggactgaaaagcaagcacgcacctctgacccctaaagaagaggagtacctgcaggcccaggtgcggagcagaagcaagctggacgcccctaaggtggatctgctggtgaagaattgcctcctgcccctgagagagtacttcaagtatttcagccagaatagtctgcccctgggaggcagcggcggcggctgcagcaaggagcccctgtgcctgcaggagcccgtgagcttcgccgacgtggccgtgtacttcagcagggaggagtgggccctgctggaccccgcccagagggccctgtactgggacgtgatgctggagacctacgagtgcatcgccagcctgggcggcgaggacccctggatccccgacgtgcacggcctgaaggacatggccggcgacacctgccccggcgacggcatcgccgacctgaagggcggcccaagcagcggcgcccctcctcccagcggcggcaggcggcccaagcagcggcgcccctcctcccagcggcggcagcccagccggctccccaacctctaccgaggagggcacctctgagtccgccacccccgagagcggccctggcacctccaccgagcccagcgagggcagcgcacccggcagccctgccggcagccccacctccacagaggagggaaccagcaccgagcccagcgaaggcagcgccccaggcaccagcaccgagcctagtgagcaggagattaaacggatcaacaagatcagaagaagacttgtgaaagacagcaacaccaagaaggccggcaagacaggccccatgaaaaccctgctggttagagtgatgacacccgatctgagagagcggctggaaaacctgagaaagaagcctgaaaatatcccccagcccatcagcaatacatctagagccaacctgaataagctgctgaccgattacaccgaaatgaagaaggcgatcctgcatgtgtactgggaagagttccagaaggaccctgtgggcctgatgagccgggtggcccagcctgccagcaagaagatcgatcagaacaagctgaaacctgagatggacgagaagggcaacctgaccaccgccggctttgcctgctctcagtgtggccagcccctgttcgtgtacaagctggagcaggtgtctgagaagggcaaggcttacaccaactacttcggacggtgcaatgtggccgagcacgaaaagctgatcctgctggcccagctgaagcccgagaaggatagcgacgaagccgtgacatatagcctgggaaagtttgggcagagggccctggatttctacagcattcatgtgaccaaggagtccacccaccccgtgaagcccctggcccagatcgccggaaacagatacgcctccggacctgtgggaaaggccctgagcgacgcatgtatgggcacaatcgcctccttcctgtctaagtaccaggacatcatcatcgaacaccagaaggtggtgaagggcaaccagaagagactggagagcctgcgggagctggccggcaaggaaaacctggaataccctagcgtgaccctgccacctcagcctcacaccaaggagggcgttgatgcctacaacgaagtgatcgcccgggtgcgaatgtgggtgaacctgaacctgtggcagaagctgaagctaagcagagatgatgccaagcctctgctgagactgaagggattcccttcctttcctctggtcgagagacaggccaacgaagtggactggtgggacatggtgtgtaacgtgaagaagctgatcaacgagaaaaaggaggatggcaaggtgttttggcagaatctggctggctacaagagacaggaagccctgagaccatacctgagcagcgaggaagatcggaagaagggaaagaaattcgctcggtaccagctgggcgacctgctgctgcacctggaaaagaagcacggcgaggactggggaaaggtgtacgacgaggcctgggagcggattgacaagaaagtggaaggcctgagcaagcacatcaagctggaagaggaacggagaagcgaggacgcccagagcaaggccgccctgaccgactggctgcgggctaaggccagcttcgtgatcgagggcctgaaggaggccgacaaggacgagttctgcagatgcgagctgaagctgcagaagtggtacggggacctgcggggaaagcccttcgccatcgaagccgagaacagcatcctggacatcagcggcttcagcaagcagtacaactgtgccttcatctggcagaaggacggcgtgaagaagctgaacctgtacctgatcatcaactacttcaagggcggcaagctgcggttcaagaagatcaaacctgaagccttcgaagccaacagattctacaccgtgatcaacaaaaagagcggcgagatcgtgcccatggaggtgaacttcaacttcgacgaccccaacctgatcatcctgcctctggcctttggcaagagacagggcagagaattcatctggaacgacctgctgtccctggaaaccggcagcctgaagctggccaacggaagagtgatcgagaagacactgtacaacagaagaacccggcaggatgagcctgccctgttcgtggccctgaccttcgagcggcgggaggtcctggactcctccaatatcaaaccaatgaacctgatcggcgtggcaagaggcgaaaacatccccgccgtgatcgccctgaccgaccccgagggctgcccactgagccggtttaaggatagcctgggaaacccaacccacatcctgagaatcggcgagagctataaggagaagcagcggaccatccaggccaagaaggaggtggagcagcggagagccggcggctacagccggaagtacgccagcaaagccaagaatctggcagacgatatggtgagaaacaccgctagagatctgctgtactacgccgtgacccaggatgccatgctgatcttcgccaacctgagccggggcttcggccggcagggcaagcggaccttcatggccgagagacagtacacacggatggaggactggctgaccgccaagctggcctacgagggcctgagcaagacctacctgtccaagacactggcccagtacacctccaagacatgcagcaactgtgggtttaccatcaccagcgccgactacgacagggtgctggagaagctgaagaagacagcaacaggctggatgaccacaattaacggcaaggagctgaaggtggagggccagattacctactacaacagatacaagagacagaacgtagtcaaggacctgtccgtcgagctggatagactgagcgaagaatctgtgaacaacgacatctcctcctggacaaagggcagaagcggagaagctctgagcctcctgaagaaaagattctcccatagacccgtgcaggagaagttcgtgtgcctgaactgcggcttcgagacacacgcagccgagcaagccgccctgaacatcgccagatcctggctgttcctgcggagccaggagtacaagaaataccagacaaacaagacaaccggcaacaccgataagagagccttcgtcgagacctggcagtccttttaccggaagaagcttaaggaggtgtggaaacctgccgtgcggtctggcggatctggcggaggctccaccagccccaagaaaaagagaaaagtctaagctgccttctgcggggcttgccttctggccatgcccttcttctctcccttgcacctgtacctcttggtctttgaataaagcctgagtaggaaggctagcaaaaaaaaaaaaaaaaaaaaaaaaaaaaaaaaaaaaaaaaaaaaaaaaaaaaaaaaaaaaaaaaaaaaaaaaaaaaaaaagcccagccggctccccaacctctaccgaggagggcacctctgagtccgccacccccgagagcggccctggcacctccaccgagcccagcgagggcagcgcacccggcagccctgccggcagccccacctccacagaggagggaaccagcaccgagcccagcgaaggcagcgccccaggcaccagcaccgagcctagtgagcaggagattaaacggatcaacaagatcagaagaagacttgtgaaagacagcaacaccaagaaggccggcaagacaggccccatgaaaaccctgctggttagagtgatgacacccgatctgagagagcggctggaaaacctgagaaagaagcctgaaaatatcccccagcccatcagcaatacatctagagccaacctgaataagctgctgaccgattacaccgaaatgaagaaggcgatcctgcatgtgtactgggaagagttccagaaggaccctgtgggcctgatgagccgggtggcccagcctgccagcaagaagatcgatcagaacaagctgaaacctgagatggacgagaagggcaacctgaccaccgccggctttgcctgctctcagtgtggccagcccctgttcgtgtacaagctggagcaggtgtctgagaagggcaaggcttacaccaactacttcggacggtgcaatgtggccgagcacgaaaagctgatcctgctggcccagctgaagcccgagaaggatagcgacgaagccgtgacatatagcctgggaaagtttgggcagagggccctggatttctacagcattcatgtgaccaaggagtccacccaccccgtgaagcccctggcccagatcgccggaaacagatacgcctccggacctgtgggaaaggccctgagcgacgcatgtatgggcacaatcgcctccttcctgtctaagtaccaggacatcatcatcgaacaccagaaggtggtgaagggcaaccagaagagactggagagcctgcgggagctggccggcaaggaaaacctggaataccctagcgtgaccctgccacctcagcctcacaccaaggagggcgttgatgcctacaacgaagtgatcgcccgggtgcgaatgtgggtgaacctgaacctgtggcagaagctgaagctaagcagagatgatgccaagcctctgctgagactgaagggattcccttcctttcctctggtcgagagacaggccaacgaagtggactggtgggacatggtgtgtaacgtgaagaagctgatcaacgagaaaaaggaggatggcaaggtgttttggcagaatctggctggctacaagagacaggaagccctgagaccatacctgagcagcgaggaagatcggaagaagggaaagaaattcgctcggtaccagctgggcgacctgctgctgcacctggaaaagaagcacggcgaggactggggaaaggtgtacgacgaggcctgggagcggattgacaagaaagtggaaggcctgagcaagcacatcaagctggaagaggaacggagaagcgaggacgcccagagcaaggccgccctgaccgactggctgcgggctaaggccagcttcgtgatcgagggcctgaaggaggccgacaaggacgagttctgcagatgcgagctgaagctgcagaagtggtacggggacctgcggggaaagcccttcgccatcgaagccgagaacagcatcctggacatcagcggcttcagcaagcagtacaactgtgccttcatctggcagaaggacggcgtgaagaagctgaacctgtacctgatcatcaactacttcaagggcggcaagctgcggttcaagaagatcaaacctgaagccttcgaagccaacagattctacaccgtgatcaacaaaaagagcggcgagatcgtgcccatggaggtgaacttcaacttcgacgaccccaacctgatcatcctgcctctggcctttggcaagagacagggcagagaattcatctggaacgacctgctgtccctggaaaccggcagcctgaagctggccaacggaagagtgatcgagaagacactgtacaacagaagaacccggcaggatgagcctgccctgttcgtggccctgaccttcgagcggcgggaggtcctggactcctccaatatcaaaccaatgaacctgatcggcgtggcaagaggcgaaaacatccccgccgtgatcgccctgaccgaccccgagggctgcccactgagccggtttaaggatagcctgggaaacccaacccacatcctgagaatcggcgagagctataaggagaagcagcggaccatccaggccaagaaggaggtggagcagcggagagccggcggctacagccggaagtacgccagcaaagccaagaatctggcagacgatatggtgagaaacaccgctagagatctgctgtactacgccgtgacccaggatgccatgctgatcttcgccaacctgagccggggcttcggccggcagggcaagcggaccttcatggccgagagacagtacacacggatggaggactggctgaccgccaagctggcctacgagggcctgagcaagacctacctgtccaagacactggcccagtacacctccaagacatgcagcaactgtgggtttaccatcaccagcgccgactacgacagggtgctggagaagctgaagaagacagcaacaggctggatgaccacaattaacggcaaggagctgaaggtggagggccagattacctactacaacagatacaagagacagaacgtagtcaaggacctgtccgtcgagctggatagactgagcgaagaatctgtgaacaacgacatctcctcctggacaaagggcagaagcggagaagctctgagcctcctgaagaaaagattctcccatagacccgtgcaggagaagttcgtgtgcctgaactgcggcttcgagacacacgcagccgagcaagccgccctgaacatcgccagatcctggctgttcctgcggagccaggagtacaagaaataccagacaaacaagacaaccggcaacaccgataagagagccttcgtcgagacctggcagtccttttaccggaagaagcttaaggaggtgtggaaacctgccgtgcggtctggcggatctggcggaggctccaccagccccaagaaaaagagaaaagtctaagctgccttctgcggggcttgccttctggccatgcccttcttctctcccttgcacctgtacctcttggtctttgaataaagcctgagtaggaaggctagcaaaaaaaaaaaaaaaaaaaaaaaaaaaaaaaaaaaaaaaaaaaaaaaaaaaaaaaaaaaaaaaaaaaaaaaaaaaaaaaa

SEQ ID NO: 10258 - RNA, 8787 nt, synthetic construct
  source 1..8787: mol_type = other RNA
aggaaataagagagaaaagaagagtaagaagaaatataagagccaccatggcccctaagaagaagcgtaaagtgagccggatgaaccacgaccaggagttcgacccccctaaggtgtaccctcccgtccccgccgagaagagaaagcccatccgggtcctgagcctgttcgatggcatcgccaccggtctgctggtgctgaaggacctgggcatccaggtggataggtacattgcctccgaggtgtgcgaggactccatcaccgtgggaatggtgcgtcatcagggcaagatcatgtacgtgggcgacgtgcggagcgtgacacagaagcatatccaggagtggggccctttcgacctggtgatcggcggcagcccttgcaatgacctgagcatcgtgaacccagcccggaagggcctgtacgagggaaccggcagactgttcttcgagttttacagactgctgcacgacgcccggcctaaggaaggcgacgaccggcccttcttttggctgttcgagaatgtggtggccatgggagtcagcgacaagcgggatattagccggttcctggagagcaaccccgtgatgatcgatgccaaggaagtgagcgccgcccaccgggccagatacttctggggcaatctgcctggcatgaacagacccctggccagcaccgtgaacgacaagctggagctgcaggagtgcctggagcacggccggatcgccaagttcagcaaggtgagaaccatcaccacccgaagcaacagcatcaaacaaggcaaggaccagcactttcctgtgttcatgaacgagaaggaggacatcctgtggtgtaccgagatggagagagtgttcgggttcccagtccactacacagatgtcagcaacatgtctagactggccagacagagactgctgggaagaagctggtccgtccctgtgatcagacacctgttcgcccctctgaaggagtacttcgcctgcgtgagcagcggcaacagcaacgccaacagccggggccccagcttctctagcggcctggtgccactgtccctgagagggagccacatgggccccatggagatctacaaaaccgtgagcgcctggaagcggcagcctgtgcgcgtgctgagcctgtttcggaatatcgataaagtcctgaaaagcctgggattcctggagagcggctctggctccggcggtggcaccctgaagtacgtggaggatgtgacaaacgtggtcagacgggatgtggagaagtggggccccttcgatctggtgtacggcagcacccaacccctgggcagctcttgtgaccggtgccctggctggtacatgtttcagttccaccggatcctgcagtacgccctgccgagacaggagtcccagcggccattcttttggattttcatggacaacttgctgctgaccgaggatgaccaggaaactaccactcggttcctgcagaccgaagccgtgaccctgcaggacgtgagaggccgggactaccagaacgccatgcgggtgtggtccaacatccctggactgaaaagcaagcacgcacctctgacccctaaagaagaggagtacctgcaggcccaggtgcggagcagaagcaagctggacgcccctaaggtggatctgctggtgaagaattgcctcctgcccctgagagagtacttcaagtatttcagccagaatagtctgcccctgggaggcagcggcggcggctacaggggccccgtgaccttcaaggacatcaccgtggagttcaccagggaggagtggaagctgctggacaccgcccagaggaccctgtacagggaggtgatgcaggagaactacagccacctgatcagcgtgggctactgcgccaacaggcccaacgccatcttcaagctgaagcagggcaaggagccctggatcctggaggtgcagttccccaggcagaagaaccccgaggacctgtgcaacggcggcccaagcagcggcgcccctcctcccagcggcggcaggcggcccaagcagcggcgcccctcctcccagcggcggcagcccagccggctccccaacctctaccgaggagggcacctctgagtccgccacccccgagagcggccctggcacctccaccgagcccagcgagggcagcgcacccggcagccctgccggcagccccacctccacagaggagggaaccagcaccgagcccagcgaaggcagcgccccaggcaccagcaccgagcctagtgagcaggagattaaacggatcaacaagatcagaagaagacttgtgaaagacagcaacaccaagaaggccggcaagacaggccccatgaaaaccctgctggttagagtgatgacacccgatctgagagagcggctggaaaacctgagaaagaagcctgaaaatatcccccagcccatcagcaatacatctagagccaacctgaataagctgctgaccgattacaccgaaatgaagaaggcgatcctgcatgtgtactgggaagagttccagaaggaccctgtgggcctgatgagccgggtggcccagcctgccagcaagaagatcgatcagaacaagctgaaacctgagatggacgagaagggcaacctgaccaccgccggctttgcctgctctcagtgtggccagcccctgttcgtgtacaagctggagcaggtgtctgagaagggcaaggcttacaccaactacttcggacggtgcaatgtggccgagcacgaaaagctgatcctgctggcccagctgaagcccgagaaggatagcgacgaagccgtgacatatagcctgggaaagtttgggcagagggccctggatttctacagcattcatgtgaccaaggagtccacccaccccgtgaagcccctggcccagatcgccggaaacagatacgcctccggacctgtgggaaaggccctgagcgacgcatgtatgggcacaatcgcctccttcctgtctaagtaccaggacatcatcatcgaacaccagaaggtggtgaagggcaaccagaagagactggagagcctgcgggagctggccggcaaggaaaacctggaataccctagcgtgaccctgccacctcagcctcacaccaaggagggcgttgatgcctacaacgaagtgatcgcccgggtgcgaatgtgggtgaacctgaacctgtggcagaagctgaagctaagcagagatgatgccaagcctctgctgagactgaagggattcccttcctttcctctggtcgagagacaggccaacgaagtggactggtgggacatggtgtgtaacgtgaagaagctgatcaacgagaaaaaggaggatggcaaggtgttttggcagaatctggctggctacaagagacaggaagccctgagaccatacctgagcagcgaggaagatcggaagaagggaaagaaattcgctcggtaccagctgggcgacctgctgctgcacctggaaaagaagcacggcgaggactggggaaaggtgtacgacgaggcctgggagcggattgacaagaaagtggaaggcctgagcaagcacatcaagctggaagaggaacggagaagcgaggacgcccagagcaaggccgccctgaccgactggctgcgggctaaggccagcttcgtgatcgagggcctgaaggaggccgacaaggacgagttctgcagatgcgagctgaagctgcagaagtggtacggggacctgcggggaaagcccttcgccatcgaagccgagaacagcatcctggacatcagcggcttcagcaagcagtacaactgtgccttcatctggcagaaggacggcgtgaagaagctgaacctgtacctgatcatcaactacttcaagggcggcaagctgcggttcaagaagatcaaacctgaagccttcgaagccaacagattctacaccgtgatcaacaaaaagagcggcgagatcgtgcccatggaggtgaacttcaacttcgacgaccccaacctgatcatcctgcctctggcctttggcaagagacagggcagagaattcatctggaacgacctgctgtccctggaaaccggcagcctgaagctggccaacggaagagtgatcgagaagacactgtacaacagaagaacccggcaggatgagcctgccctgttcgtggccctgaccttcgagcggcgggaggtcctggactcctccaatatcaaaccaatgaacctgatcggcgtggcaagaggcgaaaacatccccgccgtgatcgccctgaccgaccccgagggctgcccactgagccggtttaaggatagcctgggaaacccaacccacatcctgagaatcggcgagagctataaggagaagcagcggaccatccaggccaagaaggaggtggagcagcggagagccggcggctacagccggaagtacgccagcaaagccaagaatctggcagacgatatggtgagaaacaccgctagagatctgctgtactacgccgtgacccaggatgccatgctgatcttcgccaacctgagccggggcttcggccggcagggcaagcggaccttcatggccgagagacagtacacacggatggaggactggctgaccgccaagctggcctacgagggcctgagcaagacctacctgtccaagacactggcccagtacacctccaagacatgcagcaactgtgggtttaccatcaccagcgccgactacgacagggtgctggagaagctgaagaagacagcaacaggctggatgaccacaattaacggcaaggagctgaaggtggagggccagattacctactacaacagatacaagagacagaacgtagtcaaggacctgtccgtcgagctggatagactgagcgaagaatctgtgaacaacgacatctcctcctggacaaagggcagaagcggagaagctctgagcctcctgaagaaaagattctcccatagacccgtgcaggagaagttcgtgtgcctgaactgcggcttcgagacacacgcagccgagcaagccgccctgaacatcgccagatcctggctgttcctgcggagccaggagtacaagaaataccagacaaacaagacaaccggcaacaccgataagagagccttcgtcgagacctggcagtccttttaccggaagaagcttaaggaggtgtggaaacctgccgtgcggtctggcggatctggcggaggctccaccagccccaagaaaaagagaaaagtctaagctgccttctgcggggcttgccttctggccatgcccttcttctctcccttgcacctgtacctcttggtctttgaataaagcctgagtaggaaggctagcaaaaaaaaaaaaaaaaaaaaaaaaaaaaaaaaaaaaaaaaaaaaaaaaaaaaaaaaaaaaaaaaaaaaaaaaaaaaaaaagcccagccggctccccaacctctaccgaggagggcacctctgagtccgccacccccgagagcggccctggcacctccaccgagcccagcgagggcagcgcacccggcagccctgccggcagccccacctccacagaggagggaaccagcaccgagcccagcgaaggcagcgccccaggcaccagcaccgagcctagtgagcaggagattaaacggatcaacaagatcagaagaagacttgtgaaagacagcaacaccaagaaggccggcaagacaggccccatgaaaaccctgctggttagagtgatgacacccgatctgagagagcggctggaaaacctgagaaagaagcctgaaaatatcccccagcccatcagcaatacatctagagccaacctgaataagctgctgaccgattacaccgaaatgaagaaggcgatcctgcatgtgtactgggaagagttccagaaggaccctgtgggcctgatgagccgggtggcccagcctgccagcaagaagatcgatcagaacaagctgaaacctgagatggacgagaagggcaacctgaccaccgccggctttgcctgctctcagtgtggccagcccctgttcgtgtacaagctggagcaggtgtctgagaagggcaaggcttacaccaactacttcggacggtgcaatgtggccgagcacgaaaagctgatcctgctggcccagctgaagcccgagaaggatagcgacgaagccgtgacatatagcctgggaaagtttgggcagagggccctggatttctacagcattcatgtgaccaaggagtccacccaccccgtgaagcccctggcccagatcgccggaaacagatacgcctccggacctgtgggaaaggccctgagcgacgcatgtatgggcacaatcgcctccttcctgtctaagtaccaggacatcatcatcgaacaccagaaggtggtgaagggcaaccagaagagactggagagcctgcgggagctggccggcaaggaaaacctggaataccctagcgtgaccctgccacctcagcctcacaccaaggagggcgttgatgcctacaacgaagtgatcgcccgggtgcgaatgtgggtgaacctgaacctgtggcagaagctgaagctaagcagagatgatgccaagcctctgctgagactgaagggattcccttcctttcctctggtcgagagacaggccaacgaagtggactggtgggacatggtgtgtaacgtgaagaagctgatcaacgagaaaaaggaggatggcaaggtgttttggcagaatctggctggctacaagagacaggaagccctgagaccatacctgagcagcgaggaagatcggaagaagggaaagaaattcgctcggtaccagctgggcgacctgctgctgcacctggaaaagaagcacggcgaggactggggaaaggtgtacgacgaggcctgggagcggattgacaagaaagtggaaggcctgagcaagcacatcaagctggaagaggaacggagaagcgaggacgcccagagcaaggccgccctgaccgactggctgcgggctaaggccagcttcgtgatcgagggcctgaaggaggccgacaaggacgagttctgcagatgcgagctgaagctgcagaagtggtacggggacctgcggggaaagcccttcgccatcgaagccgagaacagcatcctggacatcagcggcttcagcaagcagtacaactgtgccttcatctggcagaaggacggcgtgaagaagctgaacctgtacctgatcatcaactacttcaagggcggcaagctgcggttcaagaagatcaaacctgaagccttcgaagccaacagattctacaccgtgatcaacaaaaagagcggcgagatcgtgcccatggaggtgaacttcaacttcgacgaccccaacctgatcatcctgcctctggcctttggcaagagacagggcagagaattcatctggaacgacctgctgtccctggaaaccggcagcctgaagctggccaacggaagagtgatcgagaagacactgtacaacagaagaacccggcaggatgagcctgccctgttcgtggccctgaccttcgagcggcgggaggtcctggactcctccaatatcaaaccaatgaacctgatcggcgtggcaagaggcgaaaacatccccgccgtgatcgccctgaccgaccccgagggctgcccactgagccggtttaaggatagcctgggaaacccaacccacatcctgagaatcggcgagagctataaggagaagcagcggaccatccaggccaagaaggaggtggagcagcggagagccggcggctacagccggaagtacgccagcaaagccaagaatctggcagacgatatggtgagaaacaccgctagagatctgctgtactacgccgtgacccaggatgccatgctgatcttcgccaacctgagccggggcttcggccggcagggcaagcggaccttcatggccgagagacagtacacacggatggaggactggctgaccgccaagctggcctacgagggcctgagcaagacctacctgtccaagacactggcccagtacacctccaagacatgcagcaactgtgggtttaccatcaccagcgccgactacgacagggtgctggagaagctgaagaagacagcaacaggctggatgaccacaattaacggcaaggagctgaaggtggagggccagattacctactacaacagatacaagagacagaacgtagtcaaggacctgtccgtcgagctggatagactgagcgaagaatctgtgaacaacgacatctcctcctggacaaagggcagaagcggagaagctctgagcctcctgaagaaaagattctcccatagacccgtgcaggagaagttcgtgtgcctgaactgcggcttcgagacacacgcagccgagcaagccgccctgaacatcgccagatcctggctgttcctgcggagccaggagtacaagaaataccagacaaacaagacaaccggcaacaccgataagagagccttcgtcgagacctggcagtccttttaccggaagaagcttaaggaggtgtggaaacctgccgtgcggtctggcggatctggcggaggctccaccagccccaagaaaaagagaaaagtctaagctgccttctgcggggcttgccttctggccatgcccttcttctctcccttgcacctgtacctcttggtctttgaataaagcctgagtaggaaggctagcaaaaaaaaaaaaaaaaaaaaaaaaaaaaaaaaaaaaaaaaaaaaaaaaaaaaaaaaaaaaaaaaaaaaaaaaaaaaaaaa

SEQ ID NO: 10259 - RNA, 8787 nt, synthetic construct
  source 1..8787: mol_type = other RNA
aggaaataagagagaaaagaagagtaagaagaaatataagagccaccatggcccctaagaagaagcgtaaagtgagccggatgaaccacgaccaggagttcgacccccctaaggtgtaccctcccgtccccgccgagaagagaaagcccatccgggtcctgagcctgttcgatggcatcgccaccggtctgctggtgctgaaggacctgggcatccaggtggataggtacattgcctccgaggtgtgcgaggactccatcaccgtgggaatggtgcgtcatcagggcaagatcatgtacgtgggcgacgtgcggagcgtgacacagaagcatatccaggagtggggccctttcgacctggtgatcggcggcagcccttgcaatgacctgagcatcgtgaacccagcccggaagggcctgtacgagggaaccggcagactgttcttcgagttttacagactgctgcacgacgcccggcctaaggaaggcgacgaccggcccttcttttggctgttcgagaatgtggtggccatgggagtcagcgacaagcgggatattagccggttcctggagagcaaccccgtgatgatcgatgccaaggaagtgagcgccgcccaccgggccagatacttctggggcaatctgcctggcatgaacagacccctggccagcaccgtgaacgacaagctggagctgcaggagtgcctggagcacggccggatcgccaagttcagcaaggtgagaaccatcaccacccgaagcaacagcatcaaacaaggcaaggaccagcactttcctgtgttcatgaacgagaaggaggacatcctgtggtgtaccgagatggagagagtgttcgggttcccagtccactacacagatgtcagcaacatgtctagactggccagacagagactgctgggaagaagctggtccgtccctgtgatcagacacctgttcgcccctctgaaggagtacttcgcctgcgtgagcagcggcaacagcaacgccaacagccggggccccagcttctctagcggcctggtgccactgtccctgagagggagccacatgggccccatggagatctacaaaaccgtgagcgcctggaagcggcagcctgtgcgcgtgctgagcctgtttcggaatatcgataaagtcctgaaaagcctgggattcctggagagcggctctggctccggcggtggcaccctgaagtacgtggaggatgtgacaaacgtggtcagacgggatgtggagaagtggggccccttcgatctggtgtacggcagcacccaacccctgggcagctcttgtgaccggtgccctggctggtacatgtttcagttccaccggatcctgcagtacgccctgccgagacaggagtcccagcggccattcttttggattttcatggacaacttgctgctgaccgaggatgaccaggaaactaccactcggttcctgcagaccgaagccgtgaccctgcaggacgtgagaggccgggactaccagaacgccatgcgggtgtggtccaacatccctggactgaaaagcaagcacgcacctctgacccctaaagaagaggagtacctgcaggcccaggtgcggagcagaagcaagctggacgcccctaaggtggatctgctggtgaagaattgcctcctgcccctgagagagtacttcaagtatttcagccagaatagtctgcccctgggaggcagcggcggcggcaacagcggcctgctgaccttcagggacgtggccatcgagttcagcctggaggagtggcagtgcctggacaccgcccagaagaacctgtacaggaacgtgatgctggagaactacaggaacctggccttcctgggcgtggccgtgagcaagcccgacctgatcacctgcctggagaaggacaaggagccctggaacatgaagaggcacgagatggtggacgagccccccggcatctgcccccacggcggcccaagcagcggcgcccctcctcccagcggcggcaggcggcccaagcagcggcgcccctcctcccagcggcggcagcccagccggctccccaacctctaccgaggagggcacctctgagtccgccacccccgagagcggccctggcacctccaccgagcccagcgagggcagcgcacccggcagccctgccggcagccccacctccacagaggagggaaccagcaccgagcccagcgaaggcagcgccccaggcaccagcaccgagcctagtgagcaggagattaaacggatcaacaagatcagaagaagacttgtgaaagacagcaacaccaagaaggccggcaagacaggccccatgaaaaccctgctggttagagtgatgacacccgatctgagagagcggctggaaaacctgagaaagaagcctgaaaatatcccccagcccatcagcaatacatctagagccaacctgaataagctgctgaccgattacaccgaaatgaagaaggcgatcctgcatgtgtactgggaagagttccagaaggaccctgtgggcctgatgagccgggtggcccagcctgccagcaagaagatcgatcagaacaagctgaaacctgagatggacgagaagggcaacctgaccaccgccggctttgcctgctctcagtgtggccagcccctgttcgtgtacaagctggagcaggtgtctgagaagggcaaggcttacaccaactacttcggacggtgcaatgtggccgagcacgaaaagctgatcctgctggcccagctgaagcccgagaaggatagcgacgaagccgtgacatatagcctgggaaagtttgggcagagggccctggatttctacagcattcatgtgaccaaggagtccacccaccccgtgaagcccctggcccagatcgccggaaacagatacgcctccggacctgtgggaaaggccctgagcgacgcatgtatgggcacaatcgcctccttcctgtctaagtaccaggacatcatcatcgaacaccagaaggtggtgaagggcaaccagaagagactggagagcctgcgggagctggccggcaaggaaaacctggaataccctagcgtgaccctgccacctcagcctcacaccaaggagggcgttgatgcctacaacgaagtgatcgcccgggtgcgaatgtgggtgaacctgaacctgtggcagaagctgaagctaagcagagatgatgccaagcctctgctgagactgaagggattcccttcctttcctctggtcgagagacaggccaacgaagtggactggtgggacatggtgtgtaacgtgaagaagctgatcaacgagaaaaaggaggatggcaaggtgttttggcagaatctggctggctacaagagacaggaagccctgagaccatacctgagcagcgaggaagatcggaagaagggaaagaaattcgctcggtaccagctgggcgacctgctgctgcacctggaaaagaagcacggcgaggactggggaaaggtgtacgacgaggcctgggagcggattgacaagaaagtggaaggcctgagcaagcacatcaagctggaagaggaacggagaagcgaggacgcccagagcaaggccgccctgaccgactggctgcgggctaaggccagcttcgtgatcgagggcctgaaggaggccgacaaggacgagttctgcagatgcgagctgaagctgcagaagtggtacggggacctgcggggaaagcccttcgccatcgaagccgagaacagcatcctggacatcagcggcttcagcaagcagtacaactgtgccttcatctggcagaaggacggcgtgaagaagctgaacctgtacctgatcatcaactacttcaagggcggcaagctgcggttcaagaagatcaaacctgaagccttcgaagccaacagattctacaccgtgatcaacaaaaagagcggcgagatcgtgcccatggaggtgaacttcaacttcgacgaccccaacctgatcatcctgcctctggcctttggcaagagacagggcagagaattcatctggaacgacctgctgtccctggaaaccggcagcctgaagctggccaacggaagagtgatcgagaagacactgtacaacagaagaacccggcaggatgagcctgccctgttcgtggccctgaccttcgagcggcgggaggtcctggactcctccaatatcaaaccaatgaacctgatcggcgtggcaagaggcgaaaacatccccgccgtgatcgccctgaccgaccccgagggctgcccactgagccggtttaaggatagcctgggaaacccaacccacatcctgagaatcggcgagagctataaggagaagcagcggaccatccaggccaagaaggaggtggagcagcggagagccggcggctacagccggaagtacgccagcaaagccaagaatctggcagacgatatggtgagaaacaccgctagagatctgctgtactacgccgtgacccaggatgccatgctgatcttcgccaacctgagccggggcttcggccggcagggcaagcggaccttcatggccgagagacagtacacacggatggaggactggctgaccgccaagctggcctacgagggcctgagcaagacctacctgtccaagacactggcccagtacacctccaagacatgcagcaactgtgggtttaccatcaccagcgccgactacgacagggtgctggagaagctgaagaagacagcaacaggctggatgaccacaattaacggcaaggagctgaaggtggagggccagattacctactacaacagatacaagagacagaacgtagtcaaggacctgtccgtcgagctggatagactgagcgaagaatctgtgaacaacgacatctcctcctggacaaagggcagaagcggagaagctctgagcctcctgaagaaaagattctcccatagacccgtgcaggagaagttcgtgtgcctgaactgcggcttcgagacacacgcagccgagcaagccgccctgaacatcgccagatcctggctgttcctgcggagccaggagtacaagaaataccagacaaacaagacaaccggcaacaccgataagagagccttcgtcgagacctggcagtccttttaccggaagaagcttaaggaggtgtggaaacctgccgtgcggtctggcggatctggcggaggctccaccagccccaagaaaaagagaaaagtctaagctgccttctgcggggcttgccttctggccatgcccttcttctctcccttgcacctgtacctcttggtctttgaataaagcctgagtaggaaggctagcaaaaaaaaaaaaaaaaaaaaaaaaaaaaaaaaaaaaaaaaaaaaaaaaaaaaaaaaaaaaaaaaaaaaaaaaaaaaaaaagcccagccggctccccaacctctaccgaggagggcacctctgagtccgccacccccgagagcggccctggcacctccaccgagcccagcgagggcagcgcacccggcagccctgccggcagccccacctccacagaggagggaaccagcaccgagcccagcgaaggcagcgccccaggcaccagcaccgagcctagtgagcaggagattaaacggatcaacaagatcagaagaagacttgtgaaagacagcaacaccaagaaggccggcaagacaggccccatgaaaaccctgctggttagagtgatgacacccgatctgagagagcggctggaaaacctgagaaagaagcctgaaaatatcccccagcccatcagcaatacatctagagccaacctgaataagctgctgaccgattacaccgaaatgaagaaggcgatcctgcatgtgtactgggaagagttccagaaggaccctgtgggcctgatgagccgggtggcccagcctgccagcaagaagatcgatcagaacaagctgaaacctgagatggacgagaagggcaacctgaccaccgccggctttgcctgctctcagtgtggccagcccctgttcgtgtacaagctggagcaggtgtctgagaagggcaaggcttacaccaactacttcggacggtgcaatgtggccgagcacgaaaagctgatcctgctggcccagctgaagcccgagaaggatagcgacgaagccgtgacatatagcctgggaaagtttgggcagagggccctggatttctacagcattcatgtgaccaaggagtccacccaccccgtgaagcccctggcccagatcgccggaaacagatacgcctccggacctgtgggaaaggccctgagcgacgcatgtatgggcacaatcgcctccttcctgtctaagtaccaggacatcatcatcgaacaccagaaggtggtgaagggcaaccagaagagactggagagcctgcgggagctggccggcaaggaaaacctggaataccctagcgtgaccctgccacctcagcctcacaccaaggagggcgttgatgcctacaacgaagtgatcgcccgggtgcgaatgtgggtgaacctgaacctgtggcagaagctgaagctaagcagagatgatgccaagcctctgctgagactgaagggattcccttcctttcctctggtcgagagacaggccaacgaagtggactggtgggacatggtgtgtaacgtgaagaagctgatcaacgagaaaaaggaggatggcaaggtgttttggcagaatctggctggctacaagagacaggaagccctgagaccatacctgagcagcgaggaagatcggaagaagggaaagaaattcgctcggtaccagctgggcgacctgctgctgcacctggaaaagaagcacggcgaggactggggaaaggtgtacgacgaggcctgggagcggattgacaagaaagtggaaggcctgagcaagcacatcaagctggaagaggaacggagaagcgaggacgcccagagcaaggccgccctgaccgactggctgcgggctaaggccagcttcgtgatcgagggcctgaaggaggccgacaaggacgagttctgcagatgcgagctgaagctgcagaagtggtacggggacctgcggggaaagcccttcgccatcgaagccgagaacagcatcctggacatcagcggcttcagcaagcagtacaactgtgccttcatctggcagaaggacggcgtgaagaagctgaacctgtacctgatcatcaactacttcaagggcggcaagctgcggttcaagaagatcaaacctgaagccttcgaagccaacagattctacaccgtgatcaacaaaaagagcggcgagatcgtgcccatggaggtgaacttcaacttcgacgaccccaacctgatcatcctgcctctggcctttggcaagagacagggcagagaattcatctggaacgacctgctgtccctggaaaccggcagcctgaagctggccaacggaagagtgatcgagaagacactgtacaacagaagaacccggcaggatgagcctgccctgttcgtggccctgaccttcgagcggcgggaggtcctggactcctccaatatcaaaccaatgaacctgatcggcgtggcaagaggcgaaaacatccccgccgtgatcgccctgaccgaccccgagggctgcccactgagccggtttaaggatagcctgggaaacccaacccacatcctgagaatcggcgagagctataaggagaagcagcggaccatccaggccaagaaggaggtggagcagcggagagccggcggctacagccggaagtacgccagcaaagccaagaatctggcagacgatatggtgagaaacaccgctagagatctgctgtactacgccgtgacccaggatgccatgctgatcttcgccaacctgagccggggcttcggccggcagggcaagcggaccttcatggccgagagacagtacacacggatggaggactggctgaccgccaagctggcctacgagggcctgagcaagacctacctgtccaagacactggcccagtacacctccaagacatgcagcaactgtgggtttaccatcaccagcgccgactacgacagggtgctggagaagctgaagaagacagcaacaggctggatgaccacaattaacggcaaggagctgaaggtggagggccagattacctactacaacagatacaagagacagaacgtagtcaaggacctgtccgtcgagctggatagactgagcgaagaatctgtgaacaacgacatctcctcctggacaaagggcagaagcggagaagctctgagcctcctgaagaaaagattctcccatagacccgtgcaggagaagttcgtgtgcctgaactgcggcttcgagacacacgcagccgagcaagccgccctgaacatcgccagatcctggctgttcctgcggagccaggagtacaagaaataccagacaaacaagacaaccggcaacaccgataagagagccttcgtcgagacctggcagtccttttaccggaagaagcttaaggaggtgtggaaacctgccgtgcggtctggcggatctggcggaggctccaccagccccaagaaaaagagaaaagtctaagctgccttctgcggggcttgccttctggccatgcccttcttctctcccttgcacctgtacctcttggtctttgaataaagcctgagtaggaaggctagcaaaaaaaaaaaaaaaaaaaaaaaaaaaaaaaaaaaaaaaaaaaaaaaaaaaaaaaaaaaaaaaaaaaaaaaaaaaaaaaa

SEQ ID NO: 10260 - RNA, 8787 nt, synthetic construct
  source 1..8787: mol_type = other RNA
aggaaataagagagaaaagaagagtaagaagaaatataagagccaccatggcccctaagaagaagcgtaaagtgagccggatgaaccacgaccaggagttcgacccccctaaggtgtaccctcccgtccccgccgagaagagaaagcccatccgggtcctgagcctgttcgatggcatcgccaccggtctgctggtgctgaaggacctgggcatccaggtggataggtacattgcctccgaggtgtgcgaggactccatcaccgtgggaatggtgcgtcatcagggcaagatcatgtacgtgggcgacgtgcggagcgtgacacagaagcatatccaggagtggggccctttcgacctggtgatcggcggcagcccttgcaatgacctgagcatcgtgaacccagcccggaagggcctgtacgagggaaccggcagactgttcttcgagttttacagactgctgcacgacgcccggcctaaggaaggcgacgaccggcccttcttttggctgttcgagaatgtggtggccatgggagtcagcgacaagcgggatattagccggttcctggagagcaaccccgtgatgatcgatgccaaggaagtgagcgccgcccaccgggccagatacttctggggcaatctgcctggcatgaacagacccctggccagcaccgtgaacgacaagctggagctgcaggagtgcctggagcacggccggatcgccaagttcagcaaggtgagaaccatcaccacccgaagcaacagcatcaaacaaggcaaggaccagcactttcctgtgttcatgaacgagaaggaggacatcctgtggtgtaccgagatggagagagtgttcgggttcccagtccactacacagatgtcagcaacatgtctagactggccagacagagactgctgggaagaagctggtccgtccctgtgatcagacacctgttcgcccctctgaaggagtacttcgcctgcgtgagcagcggcaacagcaacgccaacagccggggccccagcttctctagcggcctggtgccactgtccctgagagggagccacatgggccccatggagatctacaaaaccgtgagcgcctggaagcggcagcctgtgcgcgtgctgagcctgtttcggaatatcgataaagtcctgaaaagcctgggattcctggagagcggctctggctccggcggtggcaccctgaagtacgtggaggatgtgacaaacgtggtcagacgggatgtggagaagtggggccccttcgatctggtgtacggcagcacccaacccctgggcagctcttgtgaccggtgccctggctggtacatgtttcagttccaccggatcctgcagtacgccctgccgagacaggagtcccagcggccattcttttggattttcatggacaacttgctgctgaccgaggatgaccaggaaactaccactcggttcctgcagaccgaagccgtgaccctgcaggacgtgagaggccgggactaccagaacgccatgcgggtgtggtccaacatccctggactgaaaagcaagcacgcacctctgacccctaaagaagaggagtacctgcaggcccaggtgcggagcagaagcaagctggacgcccctaaggtggatctgctggtgaagaattgcctcctgcccctgagagagtacttcaagtatttcagccagaatagtctgcccctgggaggcagcggcggcggcagccacggccccctgagcttcgaggacgtggccgtggccttcaccaaggaggagtggcagcagctggaccccgcccagaggaccctgtacagggacgtgatgctggagaacttcagccacgtgatcagcctgggccaccccgtgagcaagcccgacgtgatcagcaagctggagcagggcgaggagccctggatcatcaagagggacgtgagcgactggatctaccccgagagggagaccaggggcggcccaagcagcggcgcccctcctcccagcggcggcaggcggcccaagcagcggcgcccctcctcccagcggcggcagcccagccggctccccaacctctaccgaggagggcacctctgagtccgccacccccgagagcggccctggcacctccaccgagcccagcgagggcagcgcacccggcagccctgccggcagccccacctccacagaggagggaaccagcaccgagcccagcgaaggcagcgccccaggcaccagcaccgagcctagtgagcaggagattaaacggatcaacaagatcagaagaagacttgtgaaagacagcaacaccaagaaggccggcaagacaggccccatgaaaaccctgctggttagagtgatgacacccgatctgagagagcggctggaaaacctgagaaagaagcctgaaaatatcccccagcccatcagcaatacatctagagccaacctgaataagctgctgaccgattacaccgaaatgaagaaggcgatcctgcatgtgtactgggaagagttccagaaggaccctgtgggcctgatgagccgggtggcccagcctgccagcaagaagatcgatcagaacaagctgaaacctgagatggacgagaagggcaacctgaccaccgccggctttgcctgctctcagtgtggccagcccctgttcgtgtacaagctggagcaggtgtctgagaagggcaaggcttacaccaactacttcggacggtgcaatgtggccgagcacgaaaagctgatcctgctggcccagctgaagcccgagaaggatagcgacgaagccgtgacatatagcctgggaaagtttgggcagagggccctggatttctacagcattcatgtgaccaaggagtccacccaccccgtgaagcccctggcccagatcgccggaaacagatacgcctccggacctgtgggaaaggccctgagcgacgcatgtatgggcacaatcgcctccttcctgtctaagtaccaggacatcatcatcgaacaccagaaggtggtgaagggcaaccagaagagactggagagcctgcgggagctggccggcaaggaaaacctggaataccctagcgtgaccctgccacctcagcctcacaccaaggagggcgttgatgcctacaacgaagtgatcgcccgggtgcgaatgtgggtgaacctgaacctgtggcagaagctgaagctaagcagagatgatgccaagcctctgctgagactgaagggattcccttcctttcctctggtcgagagacaggccaacgaagtggactggtgggacatggtgtgtaacgtgaagaagctgatcaacgagaaaaaggaggatggcaaggtgttttggcagaatctggctggctacaagagacaggaagccctgagaccatacctgagcagcgaggaagatcggaagaagggaaagaaattcgctcggtaccagctgggcgacctgctgctgcacctggaaaagaagcacggcgaggactggggaaaggtgtacgacgaggcctgggagcggattgacaagaaagtggaaggcctgagcaagcacatcaagctggaagaggaacggagaagcgaggacgcccagagcaaggccgccctgaccgactggctgcgggctaaggccagcttcgtgatcgagggcctgaaggaggccgacaaggacgagttctgcagatgcgagctgaagctgcagaagtggtacggggacctgcggggaaagcccttcgccatcgaagccgagaacagcatcctggacatcagcggcttcagcaagcagtacaactgtgccttcatctggcagaaggacggcgtgaagaagctgaacctgtacctgatcatcaactacttcaagggcggcaagctgcggttcaagaagatcaaacctgaagccttcgaagccaacagattctacaccgtgatcaacaaaaagagcggcgagatcgtgcccatggaggtgaacttcaacttcgacgaccccaacctgatcatcctgcctctggcctttggcaagagacagggcagagaattcatctggaacgacctgctgtccctggaaaccggcagcctgaagctggccaacggaagagtgatcgagaagacactgtacaacagaagaacccggcaggatgagcctgccctgttcgtggccctgaccttcgagcggcgggaggtcctggactcctccaatatcaaaccaatgaacctgatcggcgtggcaagaggcgaaaacatccccgccgtgatcgccctgaccgaccccgagggctgcccactgagccggtttaaggatagcctgggaaacccaacccacatcctgagaatcggcgagagctataaggagaagcagcggaccatccaggccaagaaggaggtggagcagcggagagccggcggctacagccggaagtacgccagcaaagccaagaatctggcagacgatatggtgagaaacaccgctagagatctgctgtactacgccgtgacccaggatgccatgctgatcttcgccaacctgagccggggcttcggccggcagggcaagcggaccttcatggccgagagacagtacacacggatggaggactggctgaccgccaagctggcctacgagggcctgagcaagacctacctgtccaagacactggcccagtacacctccaagacatgcagcaactgtgggtttaccatcaccagcgccgactacgacagggtgctggagaagctgaagaagacagcaacaggctggatgaccacaattaacggcaaggagctgaaggtggagggccagattacctactacaacagatacaagagacagaacgtagtcaaggacctgtccgtcgagctggatagactgagcgaagaatctgtgaacaacgacatctcctcctggacaaagggcagaagcggagaagctctgagcctcctgaagaaaagattctcccatagacccgtgcaggagaagttcgtgtgcctgaactgcggcttcgagacacacgcagccgagcaagccgccctgaacatcgccagatcctggctgttcctgcggagccaggagtacaagaaataccagacaaacaagacaaccggcaacaccgataagagagccttcgtcgagacctggcagtccttttaccggaagaagcttaaggaggtgtggaaacctgccgtgcggtctggcggatctggcggaggctccaccagccccaagaaaaagagaaaagtctaagctgccttctgcggggcttgccttctggccatgcccttcttctctcccttgcacctgtacctcttggtctttgaataaagcctgagtaggaaggctagcaaaaaaaaaaaaaaaaaaaaaaaaaaaaaaaaaaaaaaaaaaaaaaaaaaaaaaaaaaaaaaaaaaaaaaaaaaaaaaaagcccagccggctccccaacctctaccgaggagggcacctctgagtccgccacccccgagagcggccctggcacctccaccgagcccagcgagggcagcgcacccggcagccctgccggcagccccacctccacagaggagggaaccagcaccgagcccagcgaaggcagcgccccaggcaccagcaccgagcctagtgagcaggagattaaacggatcaacaagatcagaagaagacttgtgaaagacagcaacaccaagaaggccggcaagacaggccccatgaaaaccctgctggttagagtgatgacacccgatctgagagagcggctggaaaacctgagaaagaagcctgaaaatatcccccagcccatcagcaatacatctagagccaacctgaataagctgctgaccgattacaccgaaatgaagaaggcgatcctgcatgtgtactgggaagagttccagaaggaccctgtgggcctgatgagccgggtggcccagcctgccagcaagaagatcgatcagaacaagctgaaacctgagatggacgagaagggcaacctgaccaccgccggctttgcctgctctcagtgtggccagcccctgttcgtgtacaagctggagcaggtgtctgagaagggcaaggcttacaccaactacttcggacggtgcaatgtggccgagcacgaaaagctgatcctgctggcccagctgaagcccgagaaggatagcgacgaagccgtgacatatagcctgggaaagtttgggcagagggccctggatttctacagcattcatgtgaccaaggagtccacccaccccgtgaagcccctggcccagatcgccggaaacagatacgcctccggacctgtgggaaaggccctgagcgacgcatgtatgggcacaatcgcctccttcctgtctaagtaccaggacatcatcatcgaacaccagaaggtggtgaagggcaaccagaagagactggagagcctgcgggagctggccggcaaggaaaacctggaataccctagcgtgaccctgccacctcagcctcacaccaaggagggcgttgatgcctacaacgaagtgatcgcccgggtgcgaatgtgggtgaacctgaacctgtggcagaagctgaagctaagcagagatgatgccaagcctctgctgagactgaagggattcccttcctttcctctggtcgagagacaggccaacgaagtggactggtgggacatggtgtgtaacgtgaagaagctgatcaacgagaaaaaggaggatggcaaggtgttttggcagaatctggctggctacaagagacaggaagccctgagaccatacctgagcagcgaggaagatcggaagaagggaaagaaattcgctcggtaccagctgggcgacctgctgctgcacctggaaaagaagcacggcgaggactggggaaaggtgtacgacgaggcctgggagcggattgacaagaaagtggaaggcctgagcaagcacatcaagctggaagaggaacggagaagcgaggacgcccagagcaaggccgccctgaccgactggctgcgggctaaggccagcttcgtgatcgagggcctgaaggaggccgacaaggacgagttctgcagatgcgagctgaagctgcagaagtggtacggggacctgcggggaaagcccttcgccatcgaagccgagaacagcatcctggacatcagcggcttcagcaagcagtacaactgtgccttcatctggcagaaggacggcgtgaagaagctgaacctgtacctgatcatcaactacttcaagggcggcaagctgcggttcaagaagatcaaacctgaagccttcgaagccaacagattctacaccgtgatcaacaaaaagagcggcgagatcgtgcccatggaggtgaacttcaacttcgacgaccccaacctgatcatcctgcctctggcctttggcaagagacagggcagagaattcatctggaacgacctgctgtccctggaaaccggcagcctgaagctggccaacggaagagtgatcgagaagacactgtacaacagaagaacccggcaggatgagcctgccctgttcgtggccctgaccttcgagcggcgggaggtcctggactcctccaatatcaaaccaatgaacctgatcggcgtggcaagaggcgaaaacatccccgccgtgatcgccctgaccgaccccgagggctgcccactgagccggtttaaggatagcctgggaaacccaacccacatcctgagaatcggcgagagctataaggagaagcagcggaccatccaggccaagaaggaggtggagcagcggagagccggcggctacagccggaagtacgccagcaaagccaagaatctggcagacgatatggtgagaaacaccgctagagatctgctgtactacgccgtgacccaggatgccatgctgatcttcgccaacctgagccggggcttcggccggcagggcaagcggaccttcatggccgagagacagtacacacggatggaggactggctgaccgccaagctggcctacgagggcctgagcaagacctacctgtccaagacactggcccagtacacctccaagacatgcagcaactgtgggtttaccatcaccagcgccgactacgacagggtgctggagaagctgaagaagacagcaacaggctggatgaccacaattaacggcaaggagctgaaggtggagggccagattacctactacaacagatacaagagacagaacgtagtcaaggacctgtccgtcgagctggatagactgagcgaagaatctgtgaacaacgacatctcctcctggacaaagggcagaagcggagaagctctgagcctcctgaagaaaagattctcccatagacccgtgcaggagaagttcgtgtgcctgaactgcggcttcgagacacacgcagccgagcaagccgccctgaacatcgccagatcctggctgttcctgcggagccaggagtacaagaaataccagacaaacaagacaaccggcaacaccgataagagagccttcgtcgagacctggcagtccttttaccggaagaagcttaaggaggtgtggaaacctgccgtgcggtctggcggatctggcggaggctccaccagccccaagaaaaagagaaaagtctaagctgccttctgcggggcttgccttctggccatgcccttcttctctcccttgcacctgtacctcttggtctttgaataaagcctgagtaggaaggctagcaaaaaaaaaaaaaaaaaaaaaaaaaaaaaaaaaaaaaaaaaaaaaaaaaaaaaaaaaaaaaaaaaaaaaaaaaaaaaaaa

SEQ ID NO: 10261 - RNA, 8787 nt, synthetic construct
  source 1..8787: mol_type = other RNA
aggaaataagagagaaaagaagagtaagaagaaatataagagccaccatggcccctaagaagaagcgtaaagtgagccggatgaaccacgaccaggagttcgacccccctaaggtgtaccctcccgtccccgccgagaagagaaagcccatccgggtcctgagcctgttcgatggcatcgccaccggtctgctggtgctgaaggacctgggcatccaggtggataggtacattgcctccgaggtgtgcgaggactccatcaccgtgggaatggtgcgtcatcagggcaagatcatgtacgtgggcgacgtgcggagcgtgacacagaagcatatccaggagtggggccctttcgacctggtgatcggcggcagcccttgcaatgacctgagcatcgtgaacccagcccggaagggcctgtacgagggaaccggcagactgttcttcgagttttacagactgctgcacgacgcccggcctaaggaaggcgacgaccggcccttcttttggctgttcgagaatgtggtggccatgggagtcagcgacaagcgggatattagccggttcctggagagcaaccccgtgatgatcgatgccaaggaagtgagcgccgcccaccgggccagatacttctggggcaatctgcctggcatgaacagacccctggccagcaccgtgaacgacaagctggagctgcaggagtgcctggagcacggccggatcgccaagttcagcaaggtgagaaccatcaccacccgaagcaacagcatcaaacaaggcaaggaccagcactttcctgtgttcatgaacgagaaggaggacatcctgtggtgtaccgagatggagagagtgttcgggttcccagtccactacacagatgtcagcaacatgtctagactggccagacagagactgctgggaagaagctggtccgtccctgtgatcagacacctgttcgcccctctgaaggagtacttcgcctgcgtgagcagcggcaacagcaacgccaacagccggggccccagcttctctagcggcctggtgccactgtccctgagagggagccacatgggccccatggagatctacaaaaccgtgagcgcctggaagcggcagcctgtgcgcgtgctgagcctgtttcggaatatcgataaagtcctgaaaagcctgggattcctggagagcggctctggctccggcggtggcaccctgaagtacgtggaggatgtgacaaacgtggtcagacgggatgtggagaagtggggccccttcgatctggtgtacggcagcacccaacccctgggcagctcttgtgaccggtgccctggctggtacatgtttcagttccaccggatcctgcagtacgccctgccgagacaggagtcccagcggccattcttttggattttcatggacaacttgctgctgaccgaggatgaccaggaaactaccactcggttcctgcagaccgaagccgtgaccctgcaggacgtgagaggccgggactaccagaacgccatgcgggtgtggtccaacatccctggactgaaaagcaagcacgcacctctgacccctaaagaagaggagtacctgcaggcccaggtgcggagcagaagcaagctggacgcccctaaggtggatctgctggtgaagaattgcctcctgcccctgagagagtacttcaagtatttcagccagaatagtctgcccctgggaggcagcggcggcggccagcagggcagcgtgaccttcagggacgtggccgtggacttcaccctggaggagtggggccacctggaccccttccagaaggagctgtacagggacgtgatgctggagaacttcaggaacctggtgtgcctgggcctgaccgtgagcaagcccgacgtgatccaccagctggagcagggcgaggccccctggatccccgagggcgagagccccaggaacagcttcgccggctgcgccagcgacggcggcccaagcagcggcgcccctcctcccagcggcggcaggcggcccaagcagcggcgcccctcctcccagcggcggcagcccagccggctccccaacctctaccgaggagggcacctctgagtccgccacccccgagagcggccctggcacctccaccgagcccagcgagggcagcgcacccggcagccctgccggcagccccacctccacagaggagggaaccagcaccgagcccagcgaaggcagcgccccaggcaccagcaccgagcctagtgagcaggagattaaacggatcaacaagatcagaagaagacttgtgaaagacagcaacaccaagaaggccggcaagacaggccccatgaaaaccctgctggttagagtgatgacacccgatctgagagagcggctggaaaacctgagaaagaagcctgaaaatatcccccagcccatcagcaatacatctagagccaacctgaataagctgctgaccgattacaccgaaatgaagaaggcgatcctgcatgtgtactgggaagagttccagaaggaccctgtgggcctgatgagccgggtggcccagcctgccagcaagaagatcgatcagaacaagctgaaacctgagatggacgagaagggcaacctgaccaccgccggctttgcctgctctcagtgtggccagcccctgttcgtgtacaagctggagcaggtgtctgagaagggcaaggcttacaccaactacttcggacggtgcaatgtggccgagcacgaaaagctgatcctgctggcccagctgaagcccgagaaggatagcgacgaagccgtgacatatagcctgggaaagtttgggcagagggccctggatttctacagcattcatgtgaccaaggagtccacccaccccgtgaagcccctggcccagatcgccggaaacagatacgcctccggacctgtgggaaaggccctgagcgacgcatgtatgggcacaatcgcctccttcctgtctaagtaccaggacatcatcatcgaacaccagaaggtggtgaagggcaaccagaagagactggagagcctgcgggagctggccggcaaggaaaacctggaataccctagcgtgaccctgccacctcagcctcacaccaaggagggcgttgatgcctacaacgaagtgatcgcccgggtgcgaatgtgggtgaacctgaacctgtggcagaagctgaagctaagcagagatgatgccaagcctctgctgagactgaagggattcccttcctttcctctggtcgagagacaggccaacgaagtggactggtgggacatggtgtgtaacgtgaagaagctgatcaacgagaaaaaggaggatggcaaggtgttttggcagaatctggctggctacaagagacaggaagccctgagaccatacctgagcagcgaggaagatcggaagaagggaaagaaattcgctcggtaccagctgggcgacctgctgctgcacctggaaaagaagcacggcgaggactggggaaaggtgtacgacgaggcctgggagcggattgacaagaaagtggaaggcctgagcaagcacatcaagctggaagaggaacggagaagcgaggacgcccagagcaaggccgccctgaccgactggctgcgggctaaggccagcttcgtgatcgagggcctgaaggaggccgacaaggacgagttctgcagatgcgagctgaagctgcagaagtggtacggggacctgcggggaaagcccttcgccatcgaagccgagaacagcatcctggacatcagcggcttcagcaagcagtacaactgtgccttcatctggcagaaggacggcgtgaagaagctgaacctgtacctgatcatcaactacttcaagggcggcaagctgcggttcaagaagatcaaacctgaagccttcgaagccaacagattctacaccgtgatcaacaaaaagagcggcgagatcgtgcccatggaggtgaacttcaacttcgacgaccccaacctgatcatcctgcctctggcctttggcaagagacagggcagagaattcatctggaacgacctgctgtccctggaaaccggcagcctgaagctggccaacggaagagtgatcgagaagacactgtacaacagaagaacccggcaggatgagcctgccctgttcgtggccctgaccttcgagcggcgggaggtcctggactcctccaatatcaaaccaatgaacctgatcggcgtggcaagaggcgaaaacatccccgccgtgatcgccctgaccgaccccgagggctgcccactgagccggtttaaggatagcctgggaaacccaacccacatcctgagaatcggcgagagctataaggagaagcagcggaccatccaggccaagaaggaggtggagcagcggagagccggcggctacagccggaagtacgccagcaaagccaagaatctggcagacgatatggtgagaaacaccgctagagatctgctgtactacgccgtgacccaggatgccatgctgatcttcgccaacctgagccggggcttcggccggcagggcaagcggaccttcatggccgagagacagtacacacggatggaggactggctgaccgccaagctggcctacgagggcctgagcaagacctacctgtccaagacactggcccagtacacctccaagacatgcagcaactgtgggtttaccatcaccagcgccgactacgacagggtgctggagaagctgaagaagacagcaacaggctggatgaccacaattaacggcaaggagctgaaggtggagggccagattacctactacaacagatacaagagacagaacgtagtcaaggacctgtccgtcgagctggatagactgagcgaagaatctgtgaacaacgacatctcctcctggacaaagggcagaagcggagaagctctgagcctcctgaagaaaagattctcccatagacccgtgcaggagaagttcgtgtgcctgaactgcggcttcgagacacacgcagccgagcaagccgccctgaacatcgccagatcctggctgttcctgcggagccaggagtacaagaaataccagacaaacaagacaaccggcaacaccgataagagagccttcgtcgagacctggcagtccttttaccggaagaagcttaaggaggtgtggaaacctgccgtgcggtctggcggatctggcggaggctccaccagccccaagaaaaagagaaaagtctaagctgccttctgcggggcttgccttctggccatgcccttcttctctcccttgcacctgtacctcttggtctttgaataaagcctgagtaggaaggctagcaaaaaaaaaaaaaaaaaaaaaaaaaaaaaaaaaaaaaaaaaaaaaaaaaaaaaaaaaaaaaaaaaaaaaaaaaaaaaaaagcccagccggctccccaacctctaccgaggagggcacctctgagtccgccacccccgagagcggccctggcacctccaccgagcccagcgagggcagcgcacccggcagccctgccggcagccccacctccacagaggagggaaccagcaccgagcccagcgaaggcagcgccccaggcaccagcaccgagcctagtgagcaggagattaaacggatcaacaagatcagaagaagacttgtgaaagacagcaacaccaagaaggccggcaagacaggccccatgaaaaccctgctggttagagtgatgacacccgatctgagagagcggctggaaaacctgagaaagaagcctgaaaatatcccccagcccatcagcaatacatctagagccaacctgaataagctgctgaccgattacaccgaaatgaagaaggcgatcctgcatgtgtactgggaagagttccagaaggaccctgtgggcctgatgagccgggtggcccagcctgccagcaagaagatcgatcagaacaagctgaaacctgagatggacgagaagggcaacctgaccaccgccggctttgcctgctctcagtgtggccagcccctgttcgtgtacaagctggagcaggtgtctgagaagggcaaggcttacaccaactacttcggacggtgcaatgtggccgagcacgaaaagctgatcctgctggcccagctgaagcccgagaaggatagcgacgaagccgtgacatatagcctgggaaagtttgggcagagggccctggatttctacagcattcatgtgaccaaggagtccacccaccccgtgaagcccctggcccagatcgccggaaacagatacgcctccggacctgtgggaaaggccctgagcgacgcatgtatgggcacaatcgcctccttcctgtctaagtaccaggacatcatcatcgaacaccagaaggtggtgaagggcaaccagaagagactggagagcctgcgggagctggccggcaaggaaaacctggaataccctagcgtgaccctgccacctcagcctcacaccaaggagggcgttgatgcctacaacgaagtgatcgcccgggtgcgaatgtgggtgaacctgaacctgtggcagaagctgaagctaagcagagatgatgccaagcctctgctgagactgaagggattcccttcctttcctctggtcgagagacaggccaacgaagtggactggtgggacatggtgtgtaacgtgaagaagctgatcaacgagaaaaaggaggatggcaaggtgttttggcagaatctggctggctacaagagacaggaagccctgagaccatacctgagcagcgaggaagatcggaagaagggaaagaaattcgctcggtaccagctgggcgacctgctgctgcacctggaaaagaagcacggcgaggactggggaaaggtgtacgacgaggcctgggagcggattgacaagaaagtggaaggcctgagcaagcacatcaagctggaagaggaacggagaagcgaggacgcccagagcaaggccgccctgaccgactggctgcgggctaaggccagcttcgtgatcgagggcctgaaggaggccgacaaggacgagttctgcagatgcgagctgaagctgcagaagtggtacggggacctgcggggaaagcccttcgccatcgaagccgagaacagcatcctggacatcagcggcttcagcaagcagtacaactgtgccttcatctggcagaaggacggcgtgaagaagctgaacctgtacctgatcatcaactacttcaagggcggcaagctgcggttcaagaagatcaaacctgaagccttcgaagccaacagattctacaccgtgatcaacaaaaagagcggcgagatcgtgcccatggaggtgaacttcaacttcgacgaccccaacctgatcatcctgcctctggcctttggcaagagacagggcagagaattcatctggaacgacctgctgtccctggaaaccggcagcctgaagctggccaacggaagagtgatcgagaagacactgtacaacagaagaacccggcaggatgagcctgccctgttcgtggccctgaccttcgagcggcgggaggtcctggactcctccaatatcaaaccaatgaacctgatcggcgtggcaagaggcgaaaacatccccgccgtgatcgccctgaccgaccccgagggctgcccactgagccggtttaaggatagcctgggaaacccaacccacatcctgagaatcggcgagagctataaggagaagcagcggaccatccaggccaagaaggaggtggagcagcggagagccggcggctacagccggaagtacgccagcaaagccaagaatctggcagacgatatggtgagaaacaccgctagagatctgctgtactacgccgtgacccaggatgccatgctgatcttcgccaacctgagccggggcttcggccggcagggcaagcggaccttcatggccgagagacagtacacacggatggaggactggctgaccgccaagctggcctacgagggcctgagcaagacctacctgtccaagacactggcccagtacacctccaagacatgcagcaactgtgggtttaccatcaccagcgccgactacgacagggtgctggagaagctgaagaagacagcaacaggctggatgaccacaattaacggcaaggagctgaaggtggagggccagattacctactacaacagatacaagagacagaacgtagtcaaggacctgtccgtcgagctggatagactgagcgaagaatctgtgaacaacgacatctcctcctggacaaagggcagaagcggagaagctctgagcctcctgaagaaaagattctcccatagacccgtgcaggagaagttcgtgtgcctgaactgcggcttcgagacacacgcagccgagcaagccgccctgaacatcgccagatcctggctgttcctgcggagccaggagtacaagaaataccagacaaacaagacaaccggcaacaccgataagagagccttcgtcgagacctggcagtccttttaccggaagaagcttaaggaggtgtggaaacctgccgtgcggtctggcggatctggcggaggctccaccagccccaagaaaaagagaaaagtctaagctgccttctgcggggcttgccttctggccatgcccttcttctctcccttgcacctgtacctcttggtctttgaataaagcctgagtaggaaggctagcaaaaaaaaaaaaaaaaaaaaaaaaaaaaaaaaaaaaaaaaaaaaaaaaaaaaaaaaaaaaaaaaaaaaaaaaaaaaaaaa

SEQ ID NO: 10262 - RNA, 8886 nt, synthetic construct
  source 1..8886: mol_type = other RNA
aggaaataagagagaaaagaagagtaagaagaaatataagagccaccatggcccctaagaagaagcgtaaagtgagccggatgaaccacgaccaggagttcgacccccctaaggtgtaccctcccgtccccgccgagaagagaaagcccatccgggtcctgagcctgttcgatggcatcgccaccggtctgctggtgctgaaggacctgggcatccaggtggataggtacattgcctccgaggtgtgcgaggactccatcaccgtgggaatggtgcgtcatcagggcaagatcatgtacgtgggcgacgtgcggagcgtgacacagaagcatatccaggagtggggccctttcgacctggtgatcggcggcagcccttgcaatgacctgagcatcgtgaacccagcccggaagggcctgtacgagggaaccggcagactgttcttcgagttttacagactgctgcacgacgcccggcctaaggaaggcgacgaccggcccttcttttggctgttcgagaatgtggtggccatgggagtcagcgacaagcgggatattagccggttcctggagagcaaccccgtgatgatcgatgccaaggaagtgagcgccgcccaccgggccagatacttctggggcaatctgcctggcatgaacagacccctggccagcaccgtgaacgacaagctggagctgcaggagtgcctggagcacggccggatcgccaagttcagcaaggtgagaaccatcaccacccgaagcaacagcatcaaacaaggcaaggaccagcactttcctgtgttcatgaacgagaaggaggacatcctgtggtgtaccgagatggagagagtgttcgggttcccagtccactacacagatgtcagcaacatgtctagactggccagacagagactgctgggaagaagctggtccgtccctgtgatcagacacctgttcgcccctctgaaggagtacttcgcctgcgtgagcagcggcaacagcaacgccaacagccggggccccagcttctctagcggcctggtgccactgtccctgagagggagccacatgggccccatggagatctacaaaaccgtgagcgcctggaagcggcagcctgtgcgcgtgctgagcctgtttcggaatatcgataaagtcctgaaaagcctgggattcctggagagcggctctggctccggcggtggcaccctgaagtacgtggaggatgtgacaaacgtggtcagacgggatgtggagaagtggggccccttcgatctggtgtacggcagcacccaacccctgggcagctcttgtgaccggtgccctggctggtacatgtttcagttccaccggatcctgcagtacgccctgccgagacaggagtcccagcggccattcttttggattttcatggacaacttgctgctgaccgaggatgaccaggaaactaccactcggttcctgcagaccgaagccgtgaccctgcaggacgtgagaggccgggactaccagaacgccatgcgggtgtggtccaacatccctggactgaaaagcaagcacgcacctctgacccctaaagaagaggagtacctgcaggcccaggtgcggagcagaagcaagctggacgcccctaaggtggatctgctggtgaagaattgcctcctgcccctgagagagtacttcaagtatttcagccagaatagtctgcccctgggaggcagcggcggcggcgtgaccttcgaggacatcgccgtgtacttcagcagggaggagtggggcctgctggacgaggcccagaggtgcctgtaccacgacgtgatgctggagaacttcagcctgatgaccagcgtgggctgcctgcacggcatcggcgccgaggaggcccccagcgagcagatcgtgagcgtggagaccgtgagccaggccaggacccccaagcccagcagcagcatccccaacgcccacagctgcgagatgtgcatcctggtgatgaaggacatcctgtacctgaccgagcaccagggcaccctgccctggcagaagccctacaccagcgccgccagcggcaagtggggcggcccaagcagcggcgcccctcctcccagcggcggcaggcggcccaagcagcggcgcccctcctcccagcggcggcagcccagccggctccccaacctctaccgaggagggcacctctgagtccgccacccccgagagcggccctggcacctccaccgagcccagcgagggcagcgcacccggcagccctgccggcagccccacctccacagaggagggaaccagcaccgagcccagcgaaggcagcgccccaggcaccagcaccgagcctagtgagcaggagattaaacggatcaacaagatcagaagaagacttgtgaaagacagcaacaccaagaaggccggcaagacaggccccatgaaaaccctgctggttagagtgatgacacccgatctgagagagcggctggaaaacctgagaaagaagcctgaaaatatcccccagcccatcagcaatacatctagagccaacctgaataagctgctgaccgattacaccgaaatgaagaaggcgatcctgcatgtgtactgggaagagttccagaaggaccctgtgggcctgatgagccgggtggcccagcctgccagcaagaagatcgatcagaacaagctgaaacctgagatggacgagaagggcaacctgaccaccgccggctttgcctgctctcagtgtggccagcccctgttcgtgtacaagctggagcaggtgtctgagaagggcaaggcttacaccaactacttcggacggtgcaatgtggccgagcacgaaaagctgatcctgctggcccagctgaagcccgagaaggatagcgacgaagccgtgacatatagcctgggaaagtttgggcagagggccctggatttctacagcattcatgtgaccaaggagtccacccaccccgtgaagcccctggcccagatcgccggaaacagatacgcctccggacctgtgggaaaggccctgagcgacgcatgtatgggcacaatcgcctccttcctgtctaagtaccaggacatcatcatcgaacaccagaaggtggtgaagggcaaccagaagagactggagagcctgcgggagctggccggcaaggaaaacctggaataccctagcgtgaccctgccacctcagcctcacaccaaggagggcgttgatgcctacaacgaagtgatcgcccgggtgcgaatgtgggtgaacctgaacctgtggcagaagctgaagctaagcagagatgatgccaagcctctgctgagactgaagggattcccttcctttcctctggtcgagagacaggccaacgaagtggactggtgggacatggtgtgtaacgtgaagaagctgatcaacgagaaaaaggaggatggcaaggtgttttggcagaatctggctggctacaagagacaggaagccctgagaccatacctgagcagcgaggaagatcggaagaagggaaagaaattcgctcggtaccagctgggcgacctgctgctgcacctggaaaagaagcacggcgaggactggggaaaggtgtacgacgaggcctgggagcggattgacaagaaagtggaaggcctgagcaagcacatcaagctggaagaggaacggagaagcgaggacgcccagagcaaggccgccctgaccgactggctgcgggctaaggccagcttcgtgatcgagggcctgaaggaggccgacaaggacgagttctgcagatgcgagctgaagctgcagaagtggtacggggacctgcggggaaagcccttcgccatcgaagccgagaacagcatcctggacatcagcggcttcagcaagcagtacaactgtgccttcatctggcagaaggacggcgtgaagaagctgaacctgtacctgatcatcaactacttcaagggcggcaagctgcggttcaagaagatcaaacctgaagccttcgaagccaacagattctacaccgtgatcaacaaaaagagcggcgagatcgtgcccatggaggtgaacttcaacttcgacgaccccaacctgatcatcctgcctctggcctttggcaagagacagggcagagaattcatctggaacgacctgctgtccctggaaaccggcagcctgaagctggccaacggaagagtgatcgagaagacactgtacaacagaagaacccggcaggatgagcctgccctgttcgtggccctgaccttcgagcggcgggaggtcctggactcctccaatatcaaaccaatgaacctgatcggcgtggcaagaggcgaaaacatccccgccgtgatcgccctgaccgaccccgagggctgcccactgagccggtttaaggatagcctgggaaacccaacccacatcctgagaatcggcgagagctataaggagaagcagcggaccatccaggccaagaaggaggtggagcagcggagagccggcggctacagccggaagtacgccagcaaagccaagaatctggcagacgatatggtgagaaacaccgctagagatctgctgtactacgccgtgacccaggatgccatgctgatcttcgccaacctgagccggggcttcggccggcagggcaagcggaccttcatggccgagagacagtacacacggatggaggactggctgaccgccaagctggcctacgagggcctgagcaagacctacctgtccaagacactggcccagtacacctccaagacatgcagcaactgtgggtttaccatcaccagcgccgactacgacagggtgctggagaagctgaagaagacagcaacaggctggatgaccacaattaacggcaaggagctgaaggtggagggccagattacctactacaacagatacaagagacagaacgtagtcaaggacctgtccgtcgagctggatagactgagcgaagaatctgtgaacaacgacatctcctcctggacaaagggcagaagcggagaagctctgagcctcctgaagaaaagattctcccatagacccgtgcaggagaagttcgtgtgcctgaactgcggcttcgagacacacgcagccgagcaagccgccctgaacatcgccagatcctggctgttcctgcggagccaggagtacaagaaataccagacaaacaagacaaccggcaacaccgataagagagccttcgtcgagacctggcagtccttttaccggaagaagcttaaggaggtgtggaaacctgccgtgcggtctggcggatctggcggaggctccaccagccccaagaaaaagagaaaagtctaagctgccttctgcggggcttgccttctggccatgcccttcttctctcccttgcacctgtacctcttggtctttgaataaagcctgagtaggaaggctagcaaaaaaaaaaaaaaaaaaaaaaaaaaaaaaaaaaaaaaaaaaaaaaaaaaaaaaaaaaaaaaaaaaaaaaaaaaaaaaaagcccagccggctccccaacctctaccgaggagggcacctctgagtccgccacccccgagagcggccctggcacctccaccgagcccagcgagggcagcgcacccggcagccctgccggcagccccacctccacagaggagggaaccagcaccgagcccagcgaaggcagcgccccaggcaccagcaccgagcctagtgagcaggagattaaacggatcaacaagatcagaagaagacttgtgaaagacagcaacaccaagaaggccggcaagacaggccccatgaaaaccctgctggttagagtgatgacacccgatctgagagagcggctggaaaacctgagaaagaagcctgaaaatatcccccagcccatcagcaatacatctagagccaacctgaataagctgctgaccgattacaccgaaatgaagaaggcgatcctgcatgtgtactgggaagagttccagaaggaccctgtgggcctgatgagccgggtggcccagcctgccagcaagaagatcgatcagaacaagctgaaacctgagatggacgagaagggcaacctgaccaccgccggctttgcctgctctcagtgtggccagcccctgttcgtgtacaagctggagcaggtgtctgagaagggcaaggcttacaccaactacttcggacggtgcaatgtggccgagcacgaaaagctgatcctgctggcccagctgaagcccgagaaggatagcgacgaagccgtgacatatagcctgggaaagtttgggcagagggccctggatttctacagcattcatgtgaccaaggagtccacccaccccgtgaagcccctggcccagatcgccggaaacagatacgcctccggacctgtgggaaaggccctgagcgacgcatgtatgggcacaatcgcctccttcctgtctaagtaccaggacatcatcatcgaacaccagaaggtggtgaagggcaaccagaagagactggagagcctgcgggagctggccggcaaggaaaacctggaataccctagcgtgaccctgccacctcagcctcacaccaaggagggcgttgatgcctacaacgaagtgatcgcccgggtgcgaatgtgggtgaacctgaacctgtggcagaagctgaagctaagcagagatgatgccaagcctctgctgagactgaagggattcccttcctttcctctggtcgagagacaggccaacgaagtggactggtgggacatggtgtgtaacgtgaagaagctgatcaacgagaaaaaggaggatggcaaggtgttttggcagaatctggctggctacaagagacaggaagccctgagaccatacctgagcagcgaggaagatcggaagaagggaaagaaattcgctcggtaccagctgggcgacctgctgctgcacctggaaaagaagcacggcgaggactggggaaaggtgtacgacgaggcctgggagcggattgacaagaaagtggaaggcctgagcaagcacatcaagctggaagaggaacggagaagcgaggacgcccagagcaaggccgccctgaccgactggctgcgggctaaggccagcttcgtgatcgagggcctgaaggaggccgacaaggacgagttctgcagatgcgagctgaagctgcagaagtggtacggggacctgcggggaaagcccttcgccatcgaagccgagaacagcatcctggacatcagcggcttcagcaagcagtacaactgtgccttcatctggcagaaggacggcgtgaagaagctgaacctgtacctgatcatcaactacttcaagggcggcaagctgcggttcaagaagatcaaacctgaagccttcgaagccaacagattctacaccgtgatcaacaaaaagagcggcgagatcgtgcccatggaggtgaacttcaacttcgacgaccccaacctgatcatcctgcctctggcctttggcaagagacagggcagagaattcatctggaacgacctgctgtccctggaaaccggcagcctgaagctggccaacggaagagtgatcgagaagacactgtacaacagaagaacccggcaggatgagcctgccctgttcgtggccctgaccttcgagcggcgggaggtcctggactcctccaatatcaaaccaatgaacctgatcggcgtggcaagaggcgaaaacatccccgccgtgatcgccctgaccgaccccgagggctgcccactgagccggtttaaggatagcctgggaaacccaacccacatcctgagaatcggcgagagctataaggagaagcagcggaccatccaggccaagaaggaggtggagcagcggagagccggcggctacagccggaagtacgccagcaaagccaagaatctggcagacgatatggtgagaaacaccgctagagatctgctgtactacgccgtgacccaggatgccatgctgatcttcgccaacctgagccggggcttcggccggcagggcaagcggaccttcatggccgagagacagtacacacggatggaggactggctgaccgccaagctggcctacgagggcctgagcaagacctacctgtccaagacactggcccagtacacctccaagacatgcagcaactgtgggtttaccatcaccagcgccgactacgacagggtgctggagaagctgaagaagacagcaacaggctggatgaccacaattaacggcaaggagctgaaggtggagggccagattacctactacaacagatacaagagacagaacgtagtcaaggacctgtccgtcgagctggatagactgagcgaagaatctgtgaacaacgacatctcctcctggacaaagggcagaagcggagaagctctgagcctcctgaagaaaagattctcccatagacccgtgcaggagaagttcgtgtgcctgaactgcggcttcgagacacacgcagccgagcaagccgccctgaacatcgccagatcctggctgttcctgcggagccaggagtacaagaaataccagacaaacaagacaaccggcaacaccgataagagagccttcgtcgagacctggcagtccttttaccggaagaagcttaaggaggtgtggaaacctgccgtgcggtctggcggatctggcggaggctccaccagccccaagaaaaagagaaaagtctaagctgccttctgcggggcttgccttctggccatgcccttcttctctcccttgcacctgtacctcttggtctttgaataaagcctgagtaggaaggctagcaaaaaaaaaaaaaaaaaaaaaaaaaaaaaaaaaaaaaaaaaaaaaaaaaaaaaaaaaaaaaaaaaaaaaaaaaaaaaaaa

SEQ ID NO: 10263 - RNA, 8787 nt, synthetic construct
  source 1..8787: mol_type = other RNA
aggaaataagagagaaaagaagagtaagaagaaatataagagccaccatggcccctaagaagaagcgtaaagtgagccggatgaaccacgaccaggagttcgacccccctaaggtgtaccctcccgtccccgccgagaagagaaagcccatccgggtcctgagcctgttcgatggcatcgccaccggtctgctggtgctgaaggacctgggcatccaggtggataggtacattgcctccgaggtgtgcgaggactccatcaccgtgggaatggtgcgtcatcagggcaagatcatgtacgtgggcgacgtgcggagcgtgacacagaagcatatccaggagtggggccctttcgacctggtgatcggcggcagcccttgcaatgacctgagcatcgtgaacccagcccggaagggcctgtacgagggaaccggcagactgttcttcgagttttacagactgctgcacgacgcccggcctaaggaaggcgacgaccggcccttcttttggctgttcgagaatgtggtggccatgggagtcagcgacaagcgggatattagccggttcctggagagcaaccccgtgatgatcgatgccaaggaagtgagcgccgcccaccgggccagatacttctggggcaatctgcctggcatgaacagacccctggccagcaccgtgaacgacaagctggagctgcaggagtgcctggagcacggccggatcgccaagttcagcaaggtgagaaccatcaccacccgaagcaacagcatcaaacaaggcaaggaccagcactttcctgtgttcatgaacgagaaggaggacatcctgtggtgtaccgagatggagagagtgttcgggttcccagtccactacacagatgtcagcaacatgtctagactggccagacagagactgctgggaagaagctggtccgtccctgtgatcagacacctgttcgcccctctgaaggagtacttcgcctgcgtgagcagcggcaacagcaacgccaacagccggggccccagcttctctagcggcctggtgccactgtccctgagagggagccacatgggccccatggagatctacaaaaccgtgagcgcctggaagcggcagcctgtgcgcgtgctgagcctgtttcggaatatcgataaagtcctgaaaagcctgggattcctggagagcggctctggctccggcggtggcaccctgaagtacgtggaggatgtgacaaacgtggtcagacgggatgtggagaagtggggccccttcgatctggtgtacggcagcacccaacccctgggcagctcttgtgaccggtgccctggctggtacatgtttcagttccaccggatcctgcagtacgccctgccgagacaggagtcccagcggccattcttttggattttcatggacaacttgctgctgaccgaggatgaccaggaaactaccactcggttcctgcagaccgaagccgtgaccctgcaggacgtgagaggccgggactaccagaacgccatgcgggtgtggtccaacatccctggactgaaaagcaagcacgcacctctgacccctaaagaagaggagtacctgcaggcccaggtgcggagcagaagcaagctggacgcccctaaggtggatctgctggtgaagaattgcctcctgcccctgagagagtacttcaagtatttcagccagaatagtctgcccctgggaggcagcggcggcggctggcaggagagcctgaccttcaaggacgtggccgtggacttcacccaggaggagtggggcctgctggaccacagccagaagaggctgtacaaggaggtgatgctggagaacagccagaacctgctgagcctgggcatcccccccctgagggaggacctgatcagccacctggaggagggcgaggccagctggatcctggacaggaagggccccaggaagagctgccccgacgccgagaccaggggcggcccaagcagcggcgcccctcctcccagcggcggcaggcggcccaagcagcggcgcccctcctcccagcggcggcagcccagccggctccccaacctctaccgaggagggcacctctgagtccgccacccccgagagcggccctggcacctccaccgagcccagcgagggcagcgcacccggcagccctgccggcagccccacctccacagaggagggaaccagcaccgagcccagcgaaggcagcgccccaggcaccagcaccgagcctagtgagcaggagattaaacggatcaacaagatcagaagaagacttgtgaaagacagcaacaccaagaaggccggcaagacaggccccatgaaaaccctgctggttagagtgatgacacccgatctgagagagcggctggaaaacctgagaaagaagcctgaaaatatcccccagcccatcagcaatacatctagagccaacctgaataagctgctgaccgattacaccgaaatgaagaaggcgatcctgcatgtgtactgggaagagttccagaaggaccctgtgggcctgatgagccgggtggcccagcctgccagcaagaagatcgatcagaacaagctgaaacctgagatggacgagaagggcaacctgaccaccgccggctttgcctgctctcagtgtggccagcccctgttcgtgtacaagctggagcaggtgtctgagaagggcaaggcttacaccaactacttcggacggtgcaatgtggccgagcacgaaaagctgatcctgctggcccagctgaagcccgagaaggatagcgacgaagccgtgacatatagcctgggaaagtttgggcagagggccctggatttctacagcattcatgtgaccaaggagtccacccaccccgtgaagcccctggcccagatcgccggaaacagatacgcctccggacctgtgggaaaggccctgagcgacgcatgtatgggcacaatcgcctccttcctgtctaagtaccaggacatcatcatcgaacaccagaaggtggtgaagggcaaccagaagagactggagagcctgcgggagctggccggcaaggaaaacctggaataccctagcgtgaccctgccacctcagcctcacaccaaggagggcgttgatgcctacaacgaagtgatcgcccgggtgcgaatgtgggtgaacctgaacctgtggcagaagctgaagctaagcagagatgatgccaagcctctgctgagactgaagggattcccttcctttcctctggtcgagagacaggccaacgaagtggactggtgggacatggtgtgtaacgtgaagaagctgatcaacgagaaaaaggaggatggcaaggtgttttggcagaatctggctggctacaagagacaggaagccctgagaccatacctgagcagcgaggaagatcggaagaagggaaagaaattcgctcggtaccagctgggcgacctgctgctgcacctggaaaagaagcacggcgaggactggggaaaggtgtacgacgaggcctgggagcggattgacaagaaagtggaaggcctgagcaagcacatcaagctggaagaggaacggagaagcgaggacgcccagagcaaggccgccctgaccgactggctgcgggctaaggccagcttcgtgatcgagggcctgaaggaggccgacaaggacgagttctgcagatgcgagctgaagctgcagaagtggtacggggacctgcggggaaagcccttcgccatcgaagccgagaacagcatcctggacatcagcggcttcagcaagcagtacaactgtgccttcatctggcagaaggacggcgtgaagaagctgaacctgtacctgatcatcaactacttcaagggcggcaagctgcggttcaagaagatcaaacctgaagccttcgaagccaacagattctacaccgtgatcaacaaaaagagcggcgagatcgtgcccatggaggtgaacttcaacttcgacgaccccaacctgatcatcctgcctctggcctttggcaagagacagggcagagaattcatctggaacgacctgctgtccctggaaaccggcagcctgaagctggccaacggaagagtgatcgagaagacactgtacaacagaagaacccggcaggatgagcctgccctgttcgtggccctgaccttcgagcggcgggaggtcctggactcctccaatatcaaaccaatgaacctgatcggcgtggcaagaggcgaaaacatccccgccgtgatcgccctgaccgaccccgagggctgcccactgagccggtttaaggatagcctgggaaacccaacccacatcctgagaatcggcgagagctataaggagaagcagcggaccatccaggccaagaaggaggtggagcagcggagagccggcggctacagccggaagtacgccagcaaagccaagaatctggcagacgatatggtgagaaacaccgctagagatctgctgtactacgccgtgacccaggatgccatgctgatcttcgccaacctgagccggggcttcggccggcagggcaagcggaccttcatggccgagagacagtacacacggatggaggactggctgaccgccaagctggcctacgagggcctgagcaagacctacctgtccaagacactggcccagtacacctccaagacatgcagcaactgtgggtttaccatcaccagcgccgactacgacagggtgctggagaagctgaagaagacagcaacaggctggatgaccacaattaacggcaaggagctgaaggtggagggccagattacctactacaacagatacaagagacagaacgtagtcaaggacctgtccgtcgagctggatagactgagcgaagaatctgtgaacaacgacatctcctcctggacaaagggcagaagcggagaagctctgagcctcctgaagaaaagattctcccatagacccgtgcaggagaagttcgtgtgcctgaactgcggcttcgagacacacgcagccgagcaagccgccctgaacatcgccagatcctggctgttcctgcggagccaggagtacaagaaataccagacaaacaagacaaccggcaacaccgataagagagccttcgtcgagacctggcagtccttttaccggaagaagcttaaggaggtgtggaaacctgccgtgcggtctggcggatctggcggaggctccaccagccccaagaaaaagagaaaagtctaagctgccttctgcggggcttgccttctggccatgcccttcttctctcccttgcacctgtacctcttggtctttgaataaagcctgagtaggaaggctagcaaaaaaaaaaaaaaaaaaaaaaaaaaaaaaaaaaaaaaaaaaaaaaaaaaaaaaaaaaaaaaaaaaaaaaaaaaaaaaaagcccagccggctccccaacctctaccgaggagggcacctctgagtccgccacccccgagagcggccctggcacctccaccgagcccagcgagggcagcgcacccggcagccctgccggcagccccacctccacagaggagggaaccagcaccgagcccagcgaaggcagcgccccaggcaccagcaccgagcctagtgagcaggagattaaacggatcaacaagatcagaagaagacttgtgaaagacagcaacaccaagaaggccggcaagacaggccccatgaaaaccctgctggttagagtgatgacacccgatctgagagagcggctggaaaacctgagaaagaagcctgaaaatatcccccagcccatcagcaatacatctagagccaacctgaataagctgctgaccgattacaccgaaatgaagaaggcgatcctgcatgtgtactgggaagagttccagaaggaccctgtgggcctgatgagccgggtggcccagcctgccagcaagaagatcgatcagaacaagctgaaacctgagatggacgagaagggcaacctgaccaccgccggctttgcctgctctcagtgtggccagcccctgttcgtgtacaagctggagcaggtgtctgagaagggcaaggcttacaccaactacttcggacggtgcaatgtggccgagcacgaaaagctgatcctgctggcccagctgaagcccgagaaggatagcgacgaagccgtgacatatagcctgggaaagtttgggcagagggccctggatttctacagcattcatgtgaccaaggagtccacccaccccgtgaagcccctggcccagatcgccggaaacagatacgcctccggacctgtgggaaaggccctgagcgacgcatgtatgggcacaatcgcctccttcctgtctaagtaccaggacatcatcatcgaacaccagaaggtggtgaagggcaaccagaagagactggagagcctgcgggagctggccggcaaggaaaacctggaataccctagcgtgaccctgccacctcagcctcacaccaaggagggcgttgatgcctacaacgaagtgatcgcccgggtgcgaatgtgggtgaacctgaacctgtggcagaagctgaagctaagcagagatgatgccaagcctctgctgagactgaagggattcccttcctttcctctggtcgagagacaggccaacgaagtggactggtgggacatggtgtgtaacgtgaagaagctgatcaacgagaaaaaggaggatggcaaggtgttttggcagaatctggctggctacaagagacaggaagccctgagaccatacctgagcagcgaggaagatcggaagaagggaaagaaattcgctcggtaccagctgggcgacctgctgctgcacctggaaaagaagcacggcgaggactggggaaaggtgtacgacgaggcctgggagcggattgacaagaaagtggaaggcctgagcaagcacatcaagctggaagaggaacggagaagcgaggacgcccagagcaaggccgccctgaccgactggctgcgggctaaggccagcttcgtgatcgagggcctgaaggaggccgacaaggacgagttctgcagatgcgagctgaagctgcagaagtggtacggggacctgcggggaaagcccttcgccatcgaagccgagaacagcatcctggacatcagcggcttcagcaagcagtacaactgtgccttcatctggcagaaggacggcgtgaagaagctgaacctgtacctgatcatcaactacttcaagggcggcaagctgcggttcaagaagatcaaacctgaagccttcgaagccaacagattctacaccgtgatcaacaaaaagagcggcgagatcgtgcccatggaggtgaacttcaacttcgacgaccccaacctgatcatcctgcctctggcctttggcaagagacagggcagagaattcatctggaacgacctgctgtccctggaaaccggcagcctgaagctggccaacggaagagtgatcgagaagacactgtacaacagaagaacccggcaggatgagcctgccctgttcgtggccctgaccttcgagcggcgggaggtcctggactcctccaatatcaaaccaatgaacctgatcggcgtggcaagaggcgaaaacatccccgccgtgatcgccctgaccgaccccgagggctgcccactgagccggtttaaggatagcctgggaaacccaacccacatcctgagaatcggcgagagctataaggagaagcagcggaccatccaggccaagaaggaggtggagcagcggagagccggcggctacagccggaagtacgccagcaaagccaagaatctggcagacgatatggtgagaaacaccgctagagatctgctgtactacgccgtgacccaggatgccatgctgatcttcgccaacctgagccggggcttcggccggcagggcaagcggaccttcatggccgagagacagtacacacggatggaggactggctgaccgccaagctggcctacgagggcctgagcaagacctacctgtccaagacactggcccagtacacctccaagacatgcagcaactgtgggtttaccatcaccagcgccgactacgacagggtgctggagaagctgaagaagacagcaacaggctggatgaccacaattaacggcaaggagctgaaggtggagggccagattacctactacaacagatacaagagacagaacgtagtcaaggacctgtccgtcgagctggatagactgagcgaagaatctgtgaacaacgacatctcctcctggacaaagggcagaagcggagaagctctgagcctcctgaagaaaagattctcccatagacccgtgcaggagaagttcgtgtgcctgaactgcggcttcgagacacacgcagccgagcaagccgccctgaacatcgccagatcctggctgttcctgcggagccaggagtacaagaaataccagacaaacaagacaaccggcaacaccgataagagagccttcgtcgagacctggcagtccttttaccggaagaagcttaaggaggtgtggaaacctgccgtgcggtctggcggatctggcggaggctccaccagccccaagaaaaagagaaaagtctaagctgccttctgcggggcttgccttctggccatgcccttcttctctcccttgcacctgtacctcttggtctttgaataaagcctgagtaggaaggctagcaaaaaaaaaaaaaaaaaaaaaaaaaaaaaaaaaaaaaaaaaaaaaaaaaaaaaaaaaaaaaaaaaaaaaaaaaaaaaaaa

SEQ ID NO: 10264 - RNA, 8787 nt, synthetic construct
  source 1..8787: mol_type = other RNA
aggaaataagagagaaaagaagagtaagaagaaatataagagccaccatggcccctaagaagaagcgtaaagtgagccggatgaaccacgaccaggagttcgacccccctaaggtgtaccctcccgtccccgccgagaagagaaagcccatccgggtcctgagcctgttcgatggcatcgccaccggtctgctggtgctgaaggacctgggcatccaggtggataggtacattgcctccgaggtgtgcgaggactccatcaccgtgggaatggtgcgtcatcagggcaagatcatgtacgtgggcgacgtgcggagcgtgacacagaagcatatccaggagtggggccctttcgacctggtgatcggcggcagcccttgcaatgacctgagcatcgtgaacccagcccggaagggcctgtacgagggaaccggcagactgttcttcgagttttacagactgctgcacgacgcccggcctaaggaaggcgacgaccggcccttcttttggctgttcgagaatgtggtggccatgggagtcagcgacaagcgggatattagccggttcctggagagcaaccccgtgatgatcgatgccaaggaagtgagcgccgcccaccgggccagatacttctggggcaatctgcctggcatgaacagacccctggccagcaccgtgaacgacaagctggagctgcaggagtgcctggagcacggccggatcgccaagttcagcaaggtgagaaccatcaccacccgaagcaacagcatcaaacaaggcaaggaccagcactttcctgtgttcatgaacgagaaggaggacatcctgtggtgtaccgagatggagagagtgttcgggttcccagtccactacacagatgtcagcaacatgtctagactggccagacagagactgctgggaagaagctggtccgtccctgtgatcagacacctgttcgcccctctgaaggagtacttcgcctgcgtgagcagcggcaacagcaacgccaacagccggggccccagcttctctagcggcctggtgccactgtccctgagagggagccacatgggccccatggagatctacaaaaccgtgagcgcctggaagcggcagcctgtgcgcgtgctgagcctgtttcggaatatcgataaagtcctgaaaagcctgggattcctggagagcggctctggctccggcggtggcaccctgaagtacgtggaggatgtgacaaacgtggtcagacgggatgtggagaagtggggccccttcgatctggtgtacggcagcacccaacccctgggcagctcttgtgaccggtgccctggctggtacatgtttcagttccaccggatcctgcagtacgccctgccgagacaggagtcccagcggccattcttttggattttcatggacaacttgctgctgaccgaggatgaccaggaaactaccactcggttcctgcagaccgaagccgtgaccctgcaggacgtgagaggccgggactaccagaacgccatgcgggtgtggtccaacatccctggactgaaaagcaagcacgcacctctgacccctaaagaagaggagtacctgcaggcccaggtgcggagcagaagcaagctggacgcccctaaggtggatctgctggtgaagaattgcctcctgcccctgagagagtacttcaagtatttcagccagaatagtctgcccctgggaggcagcggcggcggcagccagggcagcctgagcttcagggacgtgaccgtgggcttcacctgggaggagtggcagcagctggaccccgcccagagggccctgtacagggacgtgatgctggagacctacagccacctgctgagcgtgggctactgcatccccaagcccgaggtgatcctgaagctggagcagggcgaggagccctggatcctggaggaggagagcagcagccagagcgtgcccgagctgatcaacagcggcggcccaagcagcggcgcccctcctcccagcggcggcaggcggcccaagcagcggcgcccctcctcccagcggcggcagcccagccggctccccaacctctaccgaggagggcacctctgagtccgccacccccgagagcggccctggcacctccaccgagcccagcgagggcagcgcacccggcagccctgccggcagccccacctccacagaggagggaaccagcaccgagcccagcgaaggcagcgccccaggcaccagcaccgagcctagtgagcaggagattaaacggatcaacaagatcagaagaagacttgtgaaagacagcaacaccaagaaggccggcaagacaggccccatgaaaaccctgctggttagagtgatgacacccgatctgagagagcggctggaaaacctgagaaagaagcctgaaaatatcccccagcccatcagcaatacatctagagccaacctgaataagctgctgaccgattacaccgaaatgaagaaggcgatcctgcatgtgtactgggaagagttccagaaggaccctgtgggcctgatgagccgggtggcccagcctgccagcaagaagatcgatcagaacaagctgaaacctgagatggacgagaagggcaacctgaccaccgccggctttgcctgctctcagtgtggccagcccctgttcgtgtacaagctggagcaggtgtctgagaagggcaaggcttacaccaactacttcggacggtgcaatgtggccgagcacgaaaagctgatcctgctggcccagctgaagcccgagaaggatagcgacgaagccgtgacatatagcctgggaaagtttgggcagagggccctggatttctacagcattcatgtgaccaaggagtccacccaccccgtgaagcccctggcccagatcgccggaaacagatacgcctccggacctgtgggaaaggccctgagcgacgcatgtatgggcacaatcgcctccttcctgtctaagtaccaggacatcatcatcgaacaccagaaggtggtgaagggcaaccagaagagactggagagcctgcgggagctggccggcaaggaaaacctggaataccctagcgtgaccctgccacctcagcctcacaccaaggagggcgttgatgcctacaacgaagtgatcgcccgggtgcgaatgtgggtgaacctgaacctgtggcagaagctgaagctaagcagagatgatgccaagcctctgctgagactgaagggattcccttcctttcctctggtcgagagacaggccaacgaagtggactggtgggacatggtgtgtaacgtgaagaagctgatcaacgagaaaaaggaggatggcaaggtgttttggcagaatctggctggctacaagagacaggaagccctgagaccatacctgagcagcgaggaagatcggaagaagggaaagaaattcgctcggtaccagctgggcgacctgctgctgcacctggaaaagaagcacggcgaggactggggaaaggtgtacgacgaggcctgggagcggattgacaagaaagtggaaggcctgagcaagcacatcaagctggaagaggaacggagaagcgaggacgcccagagcaaggccgccctgaccgactggctgcgggctaaggccagcttcgtgatcgagggcctgaaggaggccgacaaggacgagttctgcagatgcgagctgaagctgcagaagtggtacggggacctgcggggaaagcccttcgccatcgaagccgagaacagcatcctggacatcagcggcttcagcaagcagtacaactgtgccttcatctggcagaaggacggcgtgaagaagctgaacctgtacctgatcatcaactacttcaagggcggcaagctgcggttcaagaagatcaaacctgaagccttcgaagccaacagattctacaccgtgatcaacaaaaagagcggcgagatcgtgcccatggaggtgaacttcaacttcgacgaccccaacctgatcatcctgcctctggcctttggcaagagacagggcagagaattcatctggaacgacctgctgtccctggaaaccggcagcctgaagctggccaacggaagagtgatcgagaagacactgtacaacagaagaacccggcaggatgagcctgccctgttcgtggccctgaccttcgagcggcgggaggtcctggactcctccaatatcaaaccaatgaacctgatcggcgtggcaagaggcgaaaacatccccgccgtgatcgccctgaccgaccccgagggctgcccactgagccggtttaaggatagcctgggaaacccaacccacatcctgagaatcggcgagagctataaggagaagcagcggaccatccaggccaagaaggaggtggagcagcggagagccggcggctacagccggaagtacgccagcaaagccaagaatctggcagacgatatggtgagaaacaccgctagagatctgctgtactacgccgtgacccaggatgccatgctgatcttcgccaacctgagccggggcttcggccggcagggcaagcggaccttcatggccgagagacagtacacacggatggaggactggctgaccgccaagctggcctacgagggcctgagcaagacctacctgtccaagacactggcccagtacacctccaagacatgcagcaactgtgggtttaccatcaccagcgccgactacgacagggtgctggagaagctgaagaagacagcaacaggctggatgaccacaattaacggcaaggagctgaaggtggagggccagattacctactacaacagatacaagagacagaacgtagtcaaggacctgtccgtcgagctggatagactgagcgaagaatctgtgaacaacgacatctcctcctggacaaagggcagaagcggagaagctctgagcctcctgaagaaaagattctcccatagacccgtgcaggagaagttcgtgtgcctgaactgcggcttcgagacacacgcagccgagcaagccgccctgaacatcgccagatcctggctgttcctgcggagccaggagtacaagaaataccagacaaacaagacaaccggcaacaccgataagagagccttcgtcgagacctggcagtccttttaccggaagaagcttaaggaggtgtggaaacctgccgtgcggtctggcggatctggcggaggctccaccagccccaagaaaaagagaaaagtctaagctgccttctgcggggcttgccttctggccatgcccttcttctctcccttgcacctgtacctcttggtctttgaataaagcctgagtaggaaggctagcaaaaaaaaaaaaaaaaaaaaaaaaaaaaaaaaaaaaaaaaaaaaaaaaaaaaaaaaaaaaaaaaaaaaaaaaaaaaaaaagcccagccggctccccaacctctaccgaggagggcacctctgagtccgccacccccgagagcggccctggcacctccaccgagcccagcgagggcagcgcacccggcagccctgccggcagccccacctccacagaggagggaaccagcaccgagcccagcgaaggcagcgccccaggcaccagcaccgagcctagtgagcaggagattaaacggatcaacaagatcagaagaagacttgtgaaagacagcaacaccaagaaggccggcaagacaggccccatgaaaaccctgctggttagagtgatgacacccgatctgagagagcggctggaaaacctgagaaagaagcctgaaaatatcccccagcccatcagcaatacatctagagccaacctgaataagctgctgaccgattacaccgaaatgaagaaggcgatcctgcatgtgtactgggaagagttccagaaggaccctgtgggcctgatgagccgggtggcccagcctgccagcaagaagatcgatcagaacaagctgaaacctgagatggacgagaagggcaacctgaccaccgccggctttgcctgctctcagtgtggccagcccctgttcgtgtacaagctggagcaggtgtctgagaagggcaaggcttacaccaactacttcggacggtgcaatgtggccgagcacgaaaagctgatcctgctggcccagctgaagcccgagaaggatagcgacgaagccgtgacatatagcctgggaaagtttgggcagagggccctggatttctacagcattcatgtgaccaaggagtccacccaccccgtgaagcccctggcccagatcgccggaaacagatacgcctccggacctgtgggaaaggccctgagcgacgcatgtatgggcacaatcgcctccttcctgtctaagtaccaggacatcatcatcgaacaccagaaggtggtgaagggcaaccagaagagactggagagcctgcgggagctggccggcaaggaaaacctggaataccctagcgtgaccctgccacctcagcctcacaccaaggagggcgttgatgcctacaacgaagtgatcgcccgggtgcgaatgtgggtgaacctgaacctgtggcagaagctgaagctaagcagagatgatgccaagcctctgctgagactgaagggattcccttcctttcctctggtcgagagacaggccaacgaagtggactggtgggacatggtgtgtaacgtgaagaagctgatcaacgagaaaaaggaggatggcaaggtgttttggcagaatctggctggctacaagagacaggaagccctgagaccatacctgagcagcgaggaagatcggaagaagggaaagaaattcgctcggtaccagctgggcgacctgctgctgcacctggaaaagaagcacggcgaggactggggaaaggtgtacgacgaggcctgggagcggattgacaagaaagtggaaggcctgagcaagcacatcaagctggaagaggaacggagaagcgaggacgcccagagcaaggccgccctgaccgactggctgcgggctaaggccagcttcgtgatcgagggcctgaaggaggccgacaaggacgagttctgcagatgcgagctgaagctgcagaagtggtacggggacctgcggggaaagcccttcgccatcgaagccgagaacagcatcctggacatcagcggcttcagcaagcagtacaactgtgccttcatctggcagaaggacggcgtgaagaagctgaacctgtacctgatcatcaactacttcaagggcggcaagctgcggttcaagaagatcaaacctgaagccttcgaagccaacagattctacaccgtgatcaacaaaaagagcggcgagatcgtgcccatggaggtgaacttcaacttcgacgaccccaacctgatcatcctgcctctggcctttggcaagagacagggcagagaattcatctggaacgacctgctgtccctggaaaccggcagcctgaagctggccaacggaagagtgatcgagaagacactgtacaacagaagaacccggcaggatgagcctgccctgttcgtggccctgaccttcgagcggcgggaggtcctggactcctccaatatcaaaccaatgaacctgatcggcgtggcaagaggcgaaaacatccccgccgtgatcgccctgaccgaccccgagggctgcccactgagccggtttaaggatagcctgggaaacccaacccacatcctgagaatcggcgagagctataaggagaagcagcggaccatccaggccaagaaggaggtggagcagcggagagccggcggctacagccggaagtacgccagcaaagccaagaatctggcagacgatatggtgagaaacaccgctagagatctgctgtactacgccgtgacccaggatgccatgctgatcttcgccaacctgagccggggcttcggccggcagggcaagcggaccttcatggccgagagacagtacacacggatggaggactggctgaccgccaagctggcctacgagggcctgagcaagacctacctgtccaagacactggcccagtacacctccaagacatgcagcaactgtgggtttaccatcaccagcgccgactacgacagggtgctggagaagctgaagaagacagcaacaggctggatgaccacaattaacggcaaggagctgaaggtggagggccagattacctactacaacagatacaagagacagaacgtagtcaaggacctgtccgtcgagctggatagactgagcgaagaatctgtgaacaacgacatctcctcctggacaaagggcagaagcggagaagctctgagcctcctgaagaaaagattctcccatagacccgtgcaggagaagttcgtgtgcctgaactgcggcttcgagacacacgcagccgagcaagccgccctgaacatcgccagatcctggctgttcctgcggagccaggagtacaagaaataccagacaaacaagacaaccggcaacaccgataagagagccttcgtcgagacctggcagtccttttaccggaagaagcttaaggaggtgtggaaacctgccgtgcggtctggcggatctggcggaggctccaccagccccaagaaaaagagaaaagtctaagctgccttctgcggggcttgccttctggccatgcccttcttctctcccttgcacctgtacctcttggtctttgaataaagcctgagtaggaaggctagcaaaaaaaaaaaaaaaaaaaaaaaaaaaaaaaaaaaaaaaaaaaaaaaaaaaaaaaaaaaaaaaaaaaaaaaaaaaaaaaa

SEQ ID NO: 10265 - RNA, 8787 nt, synthetic construct
  source 1..8787: mol_type = other RNA
aggaaataagagagaaaagaagagtaagaagaaatataagagccaccatggcccctaagaagaagcgtaaagtgagccggatgaaccacgaccaggagttcgacccccctaaggtgtaccctcccgtccccgccgagaagagaaagcccatccgggtcctgagcctgttcgatggcatcgccaccggtctgctggtgctgaaggacctgggcatccaggtggataggtacattgcctccgaggtgtgcgaggactccatcaccgtgggaatggtgcgtcatcagggcaagatcatgtacgtgggcgacgtgcggagcgtgacacagaagcatatccaggagtggggccctttcgacctggtgatcggcggcagcccttgcaatgacctgagcatcgtgaacccagcccggaagggcctgtacgagggaaccggcagactgttcttcgagttttacagactgctgcacgacgcccggcctaaggaaggcgacgaccggcccttcttttggctgttcgagaatgtggtggccatgggagtcagcgacaagcgggatattagccggttcctggagagcaaccccgtgatgatcgatgccaaggaagtgagcgccgcccaccgggccagatacttctggggcaatctgcctggcatgaacagacccctggccagcaccgtgaacgacaagctggagctgcaggagtgcctggagcacggccggatcgccaagttcagcaaggtgagaaccatcaccacccgaagcaacagcatcaaacaaggcaaggaccagcactttcctgtgttcatgaacgagaaggaggacatcctgtggtgtaccgagatggagagagtgttcgggttcccagtccactacacagatgtcagcaacatgtctagactggccagacagagactgctgggaagaagctggtccgtccctgtgatcagacacctgttcgcccctctgaaggagtacttcgcctgcgtgagcagcggcaacagcaacgccaacagccggggccccagcttctctagcggcctggtgccactgtccctgagagggagccacatgggccccatggagatctacaaaaccgtgagcgcctggaagcggcagcctgtgcgcgtgctgagcctgtttcggaatatcgataaagtcctgaaaagcctgggattcctggagagcggctctggctccggcggtggcaccctgaagtacgtggaggatgtgacaaacgtggtcagacgggatgtggagaagtggggccccttcgatctggtgtacggcagcacccaacccctgggcagctcttgtgaccggtgccctggctggtacatgtttcagttccaccggatcctgcagtacgccctgccgagacaggagtcccagcggccattcttttggattttcatggacaacttgctgctgaccgaggatgaccaggaaactaccactcggttcctgcagaccgaagccgtgaccctgcaggacgtgagaggccgggactaccagaacgccatgcgggtgtggtccaacatccctggactgaaaagcaagcacgcacctctgacccctaaagaagaggagtacctgcaggcccaggtgcggagcagaagcaagctggacgcccctaaggtggatctgctggtgaagaattgcctcctgcccctgagagagtacttcaagtatttcagccagaatagtctgcccctgggaggcagcggcggcggcatggccggcgaggccgaggcccagctggaccccagcctgcagggcctggtgatgttcgaggacgtgaccgtgtacttcagcagggaggagtggggcctgctgaacgtgacccagaagggcctgtacagggacgtgatgctggagaacttcgccctggtgagcagcctgggcctggcccccagcaggagccccgtgttcacccagctggaggacgacgagcagagctgggtgcccagctgggtgggcggcccaagcagcggcgcccctcctcccagcggcggcaggcggcccaagcagcggcgcccctcctcccagcggcggcagcccagccggctccccaacctctaccgaggagggcacctctgagtccgccacccccgagagcggccctggcacctccaccgagcccagcgagggcagcgcacccggcagccctgccggcagccccacctccacagaggagggaaccagcaccgagcccagcgaaggcagcgccccaggcaccagcaccgagcctagtgagcaggagattaaacggatcaacaagatcagaagaagacttgtgaaagacagcaacaccaagaaggccggcaagacaggccccatgaaaaccctgctggttagagtgatgacacccgatctgagagagcggctggaaaacctgagaaagaagcctgaaaatatcccccagcccatcagcaatacatctagagccaacctgaataagctgctgaccgattacaccgaaatgaagaaggcgatcctgcatgtgtactgggaagagttccagaaggaccctgtgggcctgatgagccgggtggcccagcctgccagcaagaagatcgatcagaacaagctgaaacctgagatggacgagaagggcaacctgaccaccgccggctttgcctgctctcagtgtggccagcccctgttcgtgtacaagctggagcaggtgtctgagaagggcaaggcttacaccaactacttcggacggtgcaatgtggccgagcacgaaaagctgatcctgctggcccagctgaagcccgagaaggatagcgacgaagccgtgacatatagcctgggaaagtttgggcagagggccctggatttctacagcattcatgtgaccaaggagtccacccaccccgtgaagcccctggcccagatcgccggaaacagatacgcctccggacctgtgggaaaggccctgagcgacgcatgtatgggcacaatcgcctccttcctgtctaagtaccaggacatcatcatcgaacaccagaaggtggtgaagggcaaccagaagagactggagagcctgcgggagctggccggcaaggaaaacctggaataccctagcgtgaccctgccacctcagcctcacaccaaggagggcgttgatgcctacaacgaagtgatcgcccgggtgcgaatgtgggtgaacctgaacctgtggcagaagctgaagctaagcagagatgatgccaagcctctgctgagactgaagggattcccttcctttcctctggtcgagagacaggccaacgaagtggactggtgggacatggtgtgtaacgtgaagaagctgatcaacgagaaaaaggaggatggcaaggtgttttggcagaatctggctggctacaagagacaggaagccctgagaccatacctgagcagcgaggaagatcggaagaagggaaagaaattcgctcggtaccagctgggcgacctgctgctgcacctggaaaagaagcacggcgaggactggggaaaggtgtacgacgaggcctgggagcggattgacaagaaagtggaaggcctgagcaagcacatcaagctggaagaggaacggagaagcgaggacgcccagagcaaggccgccctgaccgactggctgcgggctaaggccagcttcgtgatcgagggcctgaaggaggccgacaaggacgagttctgcagatgcgagctgaagctgcagaagtggtacggggacctgcggggaaagcccttcgccatcgaagccgagaacagcatcctggacatcagcggcttcagcaagcagtacaactgtgccttcatctggcagaaggacggcgtgaagaagctgaacctgtacctgatcatcaactacttcaagggcggcaagctgcggttcaagaagatcaaacctgaagccttcgaagccaacagattctacaccgtgatcaacaaaaagagcggcgagatcgtgcccatggaggtgaacttcaacttcgacgaccccaacctgatcatcctgcctctggcctttggcaagagacagggcagagaattcatctggaacgacctgctgtccctggaaaccggcagcctgaagctggccaacggaagagtgatcgagaagacactgtacaacagaagaacccggcaggatgagcctgccctgttcgtggccctgaccttcgagcggcgggaggtcctggactcctccaatatcaaaccaatgaacctgatcggcgtggcaagaggcgaaaacatccccgccgtgatcgccctgaccgaccccgagggctgcccactgagccggtttaaggatagcctgggaaacccaacccacatcctgagaatcggcgagagctataaggagaagcagcggaccatccaggccaagaaggaggtggagcagcggagagccggcggctacagccggaagtacgccagcaaagccaagaatctggcagacgatatggtgagaaacaccgctagagatctgctgtactacgccgtgacccaggatgccatgctgatcttcgccaacctgagccggggcttcggccggcagggcaagcggaccttcatggccgagagacagtacacacggatggaggactggctgaccgccaagctggcctacgagggcctgagcaagacctacctgtccaagacactggcccagtacacctccaagacatgcagcaactgtgggtttaccatcaccagcgccgactacgacagggtgctggagaagctgaagaagacagcaacaggctggatgaccacaattaacggcaaggagctgaaggtggagggccagattacctactacaacagatacaagagacagaacgtagtcaaggacctgtccgtcgagctggatagactgagcgaagaatctgtgaacaacgacatctcctcctggacaaagggcagaagcggagaagctctgagcctcctgaagaaaagattctcccatagacccgtgcaggagaagttcgtgtgcctgaactgcggcttcgagacacacgcagccgagcaagccgccctgaacatcgccagatcctggctgttcctgcggagccaggagtacaagaaataccagacaaacaagacaaccggcaacaccgataagagagccttcgtcgagacctggcagtccttttaccggaagaagcttaaggaggtgtggaaacctgccgtgcggtctggcggatctggcggaggctccaccagccccaagaaaaagagaaaagtctaagctgccttctgcggggcttgccttctggccatgcccttcttctctcccttgcacctgtacctcttggtctttgaataaagcctgagtaggaaggctagcaaaaaaaaaaaaaaaaaaaaaaaaaaaaaaaaaaaaaaaaaaaaaaaaaaaaaaaaaaaaaaaaaaaaaaaaaaaaaaaagcccagccggctccccaacctctaccgaggagggcacctctgagtccgccacccccgagagcggccctggcacctccaccgagcccagcgagggcagcgcacccggcagccctgccggcagccccacctccacagaggagggaaccagcaccgagcccagcgaaggcagcgccccaggcaccagcaccgagcctagtgagcaggagattaaacggatcaacaagatcagaagaagacttgtgaaagacagcaacaccaagaaggccggcaagacaggccccatgaaaaccctgctggttagagtgatgacacccgatctgagagagcggctggaaaacctgagaaagaagcctgaaaatatcccccagcccatcagcaatacatctagagccaacctgaataagctgctgaccgattacaccgaaatgaagaaggcgatcctgcatgtgtactgggaagagttccagaaggaccctgtgggcctgatgagccgggtggcccagcctgccagcaagaagatcgatcagaacaagctgaaacctgagatggacgagaagggcaacctgaccaccgccggctttgcctgctctcagtgtggccagcccctgttcgtgtacaagctggagcaggtgtctgagaagggcaaggcttacaccaactacttcggacggtgcaatgtggccgagcacgaaaagctgatcctgctggcccagctgaagcccgagaaggatagcgacgaagccgtgacatatagcctgggaaagtttgggcagagggccctggatttctacagcattcatgtgaccaaggagtccacccaccccgtgaagcccctggcccagatcgccggaaacagatacgcctccggacctgtgggaaaggccctgagcgacgcatgtatgggcacaatcgcctccttcctgtctaagtaccaggacatcatcatcgaacaccagaaggtggtgaagggcaaccagaagagactggagagcctgcgggagctggccggcaaggaaaacctggaataccctagcgtgaccctgccacctcagcctcacaccaaggagggcgttgatgcctacaacgaagtgatcgcccgggtgcgaatgtgggtgaacctgaacctgtggcagaagctgaagctaagcagagatgatgccaagcctctgctgagactgaagggattcccttcctttcctctggtcgagagacaggccaacgaagtggactggtgggacatggtgtgtaacgtgaagaagctgatcaacgagaaaaaggaggatggcaaggtgttttggcagaatctggctggctacaagagacaggaagccctgagaccatacctgagcagcgaggaagatcggaagaagggaaagaaattcgctcggtaccagctgggcgacctgctgctgcacctggaaaagaagcacggcgaggactggggaaaggtgtacgacgaggcctgggagcggattgacaagaaagtggaaggcctgagcaagcacatcaagctggaagaggaacggagaagcgaggacgcccagagcaaggccgccctgaccgactggctgcgggctaaggccagcttcgtgatcgagggcctgaaggaggccgacaaggacgagttctgcagatgcgagctgaagctgcagaagtggtacggggacctgcggggaaagcccttcgccatcgaagccgagaacagcatcctggacatcagcggcttcagcaagcagtacaactgtgccttcatctggcagaaggacggcgtgaagaagctgaacctgtacctgatcatcaactacttcaagggcggcaagctgcggttcaagaagatcaaacctgaagccttcgaagccaacagattctacaccgtgatcaacaaaaagagcggcgagatcgtgcccatggaggtgaacttcaacttcgacgaccccaacctgatcatcctgcctctggcctttggcaagagacagggcagagaattcatctggaacgacctgctgtccctggaaaccggcagcctgaagctggccaacggaagagtgatcgagaagacactgtacaacagaagaacccggcaggatgagcctgccctgttcgtggccctgaccttcgagcggcgggaggtcctggactcctccaatatcaaaccaatgaacctgatcggcgtggcaagaggcgaaaacatccccgccgtgatcgccctgaccgaccccgagggctgcccactgagccggtttaaggatagcctgggaaacccaacccacatcctgagaatcggcgagagctataaggagaagcagcggaccatccaggccaagaaggaggtggagcagcggagagccggcggctacagccggaagtacgccagcaaagccaagaatctggcagacgatatggtgagaaacaccgctagagatctgctgtactacgccgtgacccaggatgccatgctgatcttcgccaacctgagccggggcttcggccggcagggcaagcggaccttcatggccgagagacagtacacacggatggaggactggctgaccgccaagctggcctacgagggcctgagcaagacctacctgtccaagacactggcccagtacacctccaagacatgcagcaactgtgggtttaccatcaccagcgccgactacgacagggtgctggagaagctgaagaagacagcaacaggctggatgaccacaattaacggcaaggagctgaaggtggagggccagattacctactacaacagatacaagagacagaacgtagtcaaggacctgtccgtcgagctggatagactgagcgaagaatctgtgaacaacgacatctcctcctggacaaagggcagaagcggagaagctctgagcctcctgaagaaaagattctcccatagacccgtgcaggagaagttcgtgtgcctgaactgcggcttcgagacacacgcagccgagcaagccgccctgaacatcgccagatcctggctgttcctgcggagccaggagtacaagaaataccagacaaacaagacaaccggcaacaccgataagagagccttcgtcgagacctggcagtccttttaccggaagaagcttaaggaggtgtggaaacctgccgtgcggtctggcggatctggcggaggctccaccagccccaagaaaaagagaaaagtctaagctgccttctgcggggcttgccttctggccatgcccttcttctctcccttgcacctgtacctcttggtctttgaataaagcctgagtaggaaggctagcaaaaaaaaaaaaaaaaaaaaaaaaaaaaaaaaaaaaaaaaaaaaaaaaaaaaaaaaaaaaaaaaaaaaaaaaaaaaaaaa

SEQ ID NO: 10266 - RNA, 8787 nt, synthetic construct
  source 1..8787: mol_type = other RNA
aggaaataagagagaaaagaagagtaagaagaaatataagagccaccatggcccctaagaagaagcgtaaagtgagccggatgaaccacgaccaggagttcgacccccctaaggtgtaccctcccgtccccgccgagaagagaaagcccatccgggtcctgagcctgttcgatggcatcgccaccggtctgctggtgctgaaggacctgggcatccaggtggataggtacattgcctccgaggtgtgcgaggactccatcaccgtgggaatggtgcgtcatcagggcaagatcatgtacgtgggcgacgtgcggagcgtgacacagaagcatatccaggagtggggccctttcgacctggtgatcggcggcagcccttgcaatgacctgagcatcgtgaacccagcccggaagggcctgtacgagggaaccggcagactgttcttcgagttttacagactgctgcacgacgcccggcctaaggaaggcgacgaccggcccttcttttggctgttcgagaatgtggtggccatgggagtcagcgacaagcgggatattagccggttcctggagagcaaccccgtgatgatcgatgccaaggaagtgagcgccgcccaccgggccagatacttctggggcaatctgcctggcatgaacagacccctggccagcaccgtgaacgacaagctggagctgcaggagtgcctggagcacggccggatcgccaagttcagcaaggtgagaaccatcaccacccgaagcaacagcatcaaacaaggcaaggaccagcactttcctgtgttcatgaacgagaaggaggacatcctgtggtgtaccgagatggagagagtgttcgggttcccagtccactacacagatgtcagcaacatgtctagactggccagacagagactgctgggaagaagctggtccgtccctgtgatcagacacctgttcgcccctctgaaggagtacttcgcctgcgtgagcagcggcaacagcaacgccaacagccggggccccagcttctctagcggcctggtgccactgtccctgagagggagccacatgggccccatggagatctacaaaaccgtgagcgcctggaagcggcagcctgtgcgcgtgctgagcctgtttcggaatatcgataaagtcctgaaaagcctgggattcctggagagcggctctggctccggcggtggcaccctgaagtacgtggaggatgtgacaaacgtggtcagacgggatgtggagaagtggggccccttcgatctggtgtacggcagcacccaacccctgggcagctcttgtgaccggtgccctggctggtacatgtttcagttccaccggatcctgcagtacgccctgccgagacaggagtcccagcggccattcttttggattttcatggacaacttgctgctgaccgaggatgaccaggaaactaccactcggttcctgcagaccgaagccgtgaccctgcaggacgtgagaggccgggactaccagaacgccatgcgggtgtggtccaacatccctggactgaaaagcaagcacgcacctctgacccctaaagaagaggagtacctgcaggcccaggtgcggagcagaagcaagctggacgcccctaaggtggatctgctggtgaagaattgcctcctgcccctgagagagtacttcaagtatttcagccagaatagtctgcccctgggaggcagcggcggcggcatggagctgctgagcttcgaggacgtggccatgtacttcaccagggaggagtggggccacctggactggggccagaaggacctgtacagggacgtgatgctggagaactacaggaacatggtgctgctgggcttccagttccccaagcccgaggtgatctgccagctggagaactgggacgagcagtggatcctggacctgcccagggccggcagcaggaaggccagcggcagcgcctgccccggcggcccaagcagcggcgcccctcctcccagcggcggcaggcggcccaagcagcggcgcccctcctcccagcggcggcagcccagccggctccccaacctctaccgaggagggcacctctgagtccgccacccccgagagcggccctggcacctccaccgagcccagcgagggcagcgcacccggcagccctgccggcagccccacctccacagaggagggaaccagcaccgagcccagcgaaggcagcgccccaggcaccagcaccgagcctagtgagcaggagattaaacggatcaacaagatcagaagaagacttgtgaaagacagcaacaccaagaaggccggcaagacaggccccatgaaaaccctgctggttagagtgatgacacccgatctgagagagcggctggaaaacctgagaaagaagcctgaaaatatcccccagcccatcagcaatacatctagagccaacctgaataagctgctgaccgattacaccgaaatgaagaaggcgatcctgcatgtgtactgggaagagttccagaaggaccctgtgggcctgatgagccgggtggcccagcctgccagcaagaagatcgatcagaacaagctgaaacctgagatggacgagaagggcaacctgaccaccgccggctttgcctgctctcagtgtggccagcccctgttcgtgtacaagctggagcaggtgtctgagaagggcaaggcttacaccaactacttcggacggtgcaatgtggccgagcacgaaaagctgatcctgctggcccagctgaagcccgagaaggatagcgacgaagccgtgacatatagcctgggaaagtttgggcagagggccctggatttctacagcattcatgtgaccaaggagtccacccaccccgtgaagcccctggcccagatcgccggaaacagatacgcctccggacctgtgggaaaggccctgagcgacgcatgtatgggcacaatcgcctccttcctgtctaagtaccaggacatcatcatcgaacaccagaaggtggtgaagggcaaccagaagagactggagagcctgcgggagctggccggcaaggaaaacctggaataccctagcgtgaccctgccacctcagcctcacaccaaggagggcgttgatgcctacaacgaagtgatcgcccgggtgcgaatgtgggtgaacctgaacctgtggcagaagctgaagctaagcagagatgatgccaagcctctgctgagactgaagggattcccttcctttcctctggtcgagagacaggccaacgaagtggactggtgggacatggtgtgtaacgtgaagaagctgatcaacgagaaaaaggaggatggcaaggtgttttggcagaatctggctggctacaagagacaggaagccctgagaccatacctgagcagcgaggaagatcggaagaagggaaagaaattcgctcggtaccagctgggcgacctgctgctgcacctggaaaagaagcacggcgaggactggggaaaggtgtacgacgaggcctgggagcggattgacaagaaagtggaaggcctgagcaagcacatcaagctggaagaggaacggagaagcgaggacgcccagagcaaggccgccctgaccgactggctgcgggctaaggccagcttcgtgatcgagggcctgaaggaggccgacaaggacgagttctgcagatgcgagctgaagctgcagaagtggtacggggacctgcggggaaagcccttcgccatcgaagccgagaacagcatcctggacatcagcggcttcagcaagcagtacaactgtgccttcatctggcagaaggacggcgtgaagaagctgaacctgtacctgatcatcaactacttcaagggcggcaagctgcggttcaagaagatcaaacctgaagccttcgaagccaacagattctacaccgtgatcaacaaaaagagcggcgagatcgtgcccatggaggtgaacttcaacttcgacgaccccaacctgatcatcctgcctctggcctttggcaagagacagggcagagaattcatctggaacgacctgctgtccctggaaaccggcagcctgaagctggccaacggaagagtgatcgagaagacactgtacaacagaagaacccggcaggatgagcctgccctgttcgtggccctgaccttcgagcggcgggaggtcctggactcctccaatatcaaaccaatgaacctgatcggcgtggcaagaggcgaaaacatccccgccgtgatcgccctgaccgaccccgagggctgcccactgagccggtttaaggatagcctgggaaacccaacccacatcctgagaatcggcgagagctataaggagaagcagcggaccatccaggccaagaaggaggtggagcagcggagagccggcggctacagccggaagtacgccagcaaagccaagaatctggcagacgatatggtgagaaacaccgctagagatctgctgtactacgccgtgacccaggatgccatgctgatcttcgccaacctgagccggggcttcggccggcagggcaagcggaccttcatggccgagagacagtacacacggatggaggactggctgaccgccaagctggcctacgagggcctgagcaagacctacctgtccaagacactggcccagtacacctccaagacatgcagcaactgtgggtttaccatcaccagcgccgactacgacagggtgctggagaagctgaagaagacagcaacaggctggatgaccacaattaacggcaaggagctgaaggtggagggccagattacctactacaacagatacaagagacagaacgtagtcaaggacctgtccgtcgagctggatagactgagcgaagaatctgtgaacaacgacatctcctcctggacaaagggcagaagcggagaagctctgagcctcctgaagaaaagattctcccatagacccgtgcaggagaagttcgtgtgcctgaactgcggcttcgagacacacgcagccgagcaagccgccctgaacatcgccagatcctggctgttcctgcggagccaggagtacaagaaataccagacaaacaagacaaccggcaacaccgataagagagccttcgtcgagacctggcagtccttttaccggaagaagcttaaggaggtgtggaaacctgccgtgcggtctggcggatctggcggaggctccaccagccccaagaaaaagagaaaagtctaagctgccttctgcggggcttgccttctggccatgcccttcttctctcccttgcacctgtacctcttggtctttgaataaagcctgagtaggaaggctagcaaaaaaaaaaaaaaaaaaaaaaaaaaaaaaaaaaaaaaaaaaaaaaaaaaaaaaaaaaaaaaaaaaaaaaaaaaaaaaaagcccagccggctccccaacctctaccgaggagggcacctctgagtccgccacccccgagagcggccctggcacctccaccgagcccagcgagggcagcgcacccggcagccctgccggcagccccacctccacagaggagggaaccagcaccgagcccagcgaaggcagcgccccaggcaccagcaccgagcctagtgagcaggagattaaacggatcaacaagatcagaagaagacttgtgaaagacagcaacaccaagaaggccggcaagacaggccccatgaaaaccctgctggttagagtgatgacacccgatctgagagagcggctggaaaacctgagaaagaagcctgaaaatatcccccagcccatcagcaatacatctagagccaacctgaataagctgctgaccgattacaccgaaatgaagaaggcgatcctgcatgtgtactgggaagagttccagaaggaccctgtgggcctgatgagccgggtggcccagcctgccagcaagaagatcgatcagaacaagctgaaacctgagatggacgagaagggcaacctgaccaccgccggctttgcctgctctcagtgtggccagcccctgttcgtgtacaagctggagcaggtgtctgagaagggcaaggcttacaccaactacttcggacggtgcaatgtggccgagcacgaaaagctgatcctgctggcccagctgaagcccgagaaggatagcgacgaagccgtgacatatagcctgggaaagtttgggcagagggccctggatttctacagcattcatgtgaccaaggagtccacccaccccgtgaagcccctggcccagatcgccggaaacagatacgcctccggacctgtgggaaaggccctgagcgacgcatgtatgggcacaatcgcctccttcctgtctaagtaccaggacatcatcatcgaacaccagaaggtggtgaagggcaaccagaagagactggagagcctgcgggagctggccggcaaggaaaacctggaataccctagcgtgaccctgccacctcagcctcacaccaaggagggcgttgatgcctacaacgaagtgatcgcccgggtgcgaatgtgggtgaacctgaacctgtggcagaagctgaagctaagcagagatgatgccaagcctctgctgagactgaagggattcccttcctttcctctggtcgagagacaggccaacgaagtggactggtgggacatggtgtgtaacgtgaagaagctgatcaacgagaaaaaggaggatggcaaggtgttttggcagaatctggctggctacaagagacaggaagccctgagaccatacctgagcagcgaggaagatcggaagaagggaaagaaattcgctcggtaccagctgggcgacctgctgctgcacctggaaaagaagcacggcgaggactggggaaaggtgtacgacgaggcctgggagcggattgacaagaaagtggaaggcctgagcaagcacatcaagctggaagaggaacggagaagcgaggacgcccagagcaaggccgccctgaccgactggctgcgggctaaggccagcttcgtgatcgagggcctgaaggaggccgacaaggacgagttctgcagatgcgagctgaagctgcagaagtggtacggggacctgcggggaaagcccttcgccatcgaagccgagaacagcatcctggacatcagcggcttcagcaagcagtacaactgtgccttcatctggcagaaggacggcgtgaagaagctgaacctgtacctgatcatcaactacttcaagggcggcaagctgcggttcaagaagatcaaacctgaagccttcgaagccaacagattctacaccgtgatcaacaaaaagagcggcgagatcgtgcccatggaggtgaacttcaacttcgacgaccccaacctgatcatcctgcctctggcctttggcaagagacagggcagagaattcatctggaacgacctgctgtccctggaaaccggcagcctgaagctggccaacggaagagtgatcgagaagacactgtacaacagaagaacccggcaggatgagcctgccctgttcgtggccctgaccttcgagcggcgggaggtcctggactcctccaatatcaaaccaatgaacctgatcggcgtggcaagaggcgaaaacatccccgccgtgatcgccctgaccgaccccgagggctgcccactgagccggtttaaggatagcctgggaaacccaacccacatcctgagaatcggcgagagctataaggagaagcagcggaccatccaggccaagaaggaggtggagcagcggagagccggcggctacagccggaagtacgccagcaaagccaagaatctggcagacgatatggtgagaaacaccgctagagatctgctgtactacgccgtgacccaggatgccatgctgatcttcgccaacctgagccggggcttcggccggcagggcaagcggaccttcatggccgagagacagtacacacggatggaggactggctgaccgccaagctggcctacgagggcctgagcaagacctacctgtccaagacactggcccagtacacctccaagacatgcagcaactgtgggtttaccatcaccagcgccgactacgacagggtgctggagaagctgaagaagacagcaacaggctggatgaccacaattaacggcaaggagctgaaggtggagggccagattacctactacaacagatacaagagacagaacgtagtcaaggacctgtccgtcgagctggatagactgagcgaagaatctgtgaacaacgacatctcctcctggacaaagggcagaagcggagaagctctgagcctcctgaagaaaagattctcccatagacccgtgcaggagaagttcgtgtgcctgaactgcggcttcgagacacacgcagccgagcaagccgccctgaacatcgccagatcctggctgttcctgcggagccaggagtacaagaaataccagacaaacaagacaaccggcaacaccgataagagagccttcgtcgagacctggcagtccttttaccggaagaagcttaaggaggtgtggaaacctgccgtgcggtctggcggatctggcggaggctccaccagccccaagaaaaagagaaaagtctaagctgccttctgcggggcttgccttctggccatgcccttcttctctcccttgcacctgtacctcttggtctttgaataaagcctgagtaggaaggctagcaaaaaaaaaaaaaaaaaaaaaaaaaaaaaaaaaaaaaaaaaaaaaaaaaaaaaaaaaaaaaaaaaaaaaaaaaaaaaaaa

SEQ ID NO: 10267 - RNA, 8787 nt, synthetic construct
  source 1..8787: mol_type = other RNA
aggaaataagagagaaaagaagagtaagaagaaatataagagccaccatggcccctaagaagaagcgtaaagtgagccggatgaaccacgaccaggagttcgacccccctaaggtgtaccctcccgtccccgccgagaagagaaagcccatccgggtcctgagcctgttcgatggcatcgccaccggtctgctggtgctgaaggacctgggcatccaggtggataggtacattgcctccgaggtgtgcgaggactccatcaccgtgggaatggtgcgtcatcagggcaagatcatgtacgtgggcgacgtgcggagcgtgacacagaagcatatccaggagtggggccctttcgacctggtgatcggcggcagcccttgcaatgacctgagcatcgtgaacccagcccggaagggcctgtacgagggaaccggcagactgttcttcgagttttacagactgctgcacgacgcccggcctaaggaaggcgacgaccggcccttcttttggctgttcgagaatgtggtggccatgggagtcagcgacaagcgggatattagccggttcctggagagcaaccccgtgatgatcgatgccaaggaagtgagcgccgcccaccgggccagatacttctggggcaatctgcctggcatgaacagacccctggccagcaccgtgaacgacaagctggagctgcaggagtgcctggagcacggccggatcgccaagttcagcaaggtgagaaccatcaccacccgaagcaacagcatcaaacaaggcaaggaccagcactttcctgtgttcatgaacgagaaggaggacatcctgtggtgtaccgagatggagagagtgttcgggttcccagtccactacacagatgtcagcaacatgtctagactggccagacagagactgctgggaagaagctggtccgtccctgtgatcagacacctgttcgcccctctgaaggagtacttcgcctgcgtgagcagcggcaacagcaacgccaacagccggggccccagcttctctagcggcctggtgccactgtccctgagagggagccacatgggccccatggagatctacaaaaccgtgagcgcctggaagcggcagcctgtgcgcgtgctgagcctgtttcggaatatcgataaagtcctgaaaagcctgggattcctggagagcggctctggctccggcggtggcaccctgaagtacgtggaggatgtgacaaacgtggtcagacgggatgtggagaagtggggccccttcgatctggtgtacggcagcacccaacccctgggcagctcttgtgaccggtgccctggctggtacatgtttcagttccaccggatcctgcagtacgccctgccgagacaggagtcccagcggccattcttttggattttcatggacaacttgctgctgaccgaggatgaccaggaaactaccactcggttcctgcagaccgaagccgtgaccctgcaggacgtgagaggccgggactaccagaacgccatgcgggtgtggtccaacatccctggactgaaaagcaagcacgcacctctgacccctaaagaagaggagtacctgcaggcccaggtgcggagcagaagcaagctggacgcccctaaggtggatctgctggtgaagaattgcctcctgcccctgagagagtacttcaagtatttcagccagaatagtctgcccctgggaggcagcggcggcggccagatccccgtgatcttcgaggacatcgtgatctacttcagccaggaggagtggaaggacctggaggagtggcagaaggagctgtacaaggacgtgatgaaggagaactaccagaccctgatcagcctgggcaccggcttccccacccccccccccgacatcatcagccacatcgagaggggcgaggagccctacatcagggacgagctggagagcgagaagagggagaccggcaagaggggcggcggcccaagcagcggcgcccctcctcccagcggcggcaggcggcccaagcagcggcgcccctcctcccagcggcggcagcccagccggctccccaacctctaccgaggagggcacctctgagtccgccacccccgagagcggccctggcacctccaccgagcccagcgagggcagcgcacccggcagccctgccggcagccccacctccacagaggagggaaccagcaccgagcccagcgaaggcagcgccccaggcaccagcaccgagcctagtgagcaggagattaaacggatcaacaagatcagaagaagacttgtgaaagacagcaacaccaagaaggccggcaagacaggccccatgaaaaccctgctggttagagtgatgacacccgatctgagagagcggctggaaaacctgagaaagaagcctgaaaatatcccccagcccatcagcaatacatctagagccaacctgaataagctgctgaccgattacaccgaaatgaagaaggcgatcctgcatgtgtactgggaagagttccagaaggaccctgtgggcctgatgagccgggtggcccagcctgccagcaagaagatcgatcagaacaagctgaaacctgagatggacgagaagggcaacctgaccaccgccggctttgcctgctctcagtgtggccagcccctgttcgtgtacaagctggagcaggtgtctgagaagggcaaggcttacaccaactacttcggacggtgcaatgtggccgagcacgaaaagctgatcctgctggcccagctgaagcccgagaaggatagcgacgaagccgtgacatatagcctgggaaagtttgggcagagggccctggatttctacagcattcatgtgaccaaggagtccacccaccccgtgaagcccctggcccagatcgccggaaacagatacgcctccggacctgtgggaaaggccctgagcgacgcatgtatgggcacaatcgcctccttcctgtctaagtaccaggacatcatcatcgaacaccagaaggtggtgaagggcaaccagaagagactggagagcctgcgggagctggccggcaaggaaaacctggaataccctagcgtgaccctgccacctcagcctcacaccaaggagggcgttgatgcctacaacgaagtgatcgcccgggtgcgaatgtgggtgaacctgaacctgtggcagaagctgaagctaagcagagatgatgccaagcctctgctgagactgaagggattcccttcctttcctctggtcgagagacaggccaacgaagtggactggtgggacatggtgtgtaacgtgaagaagctgatcaacgagaaaaaggaggatggcaaggtgttttggcagaatctggctggctacaagagacaggaagccctgagaccatacctgagcagcgaggaagatcggaagaagggaaagaaattcgctcggtaccagctgggcgacctgctgctgcacctggaaaagaagcacggcgaggactggggaaaggtgtacgacgaggcctgggagcggattgacaagaaagtggaaggcctgagcaagcacatcaagctggaagaggaacggagaagcgaggacgcccagagcaaggccgccctgaccgactggctgcgggctaaggccagcttcgtgatcgagggcctgaaggaggccgacaaggacgagttctgcagatgcgagctgaagctgcagaagtggtacggggacctgcggggaaagcccttcgccatcgaagccgagaacagcatcctggacatcagcggcttcagcaagcagtacaactgtgccttcatctggcagaaggacggcgtgaagaagctgaacctgtacctgatcatcaactacttcaagggcggcaagctgcggttcaagaagatcaaacctgaagccttcgaagccaacagattctacaccgtgatcaacaaaaagagcggcgagatcgtgcccatggaggtgaacttcaacttcgacgaccccaacctgatcatcctgcctctggcctttggcaagagacagggcagagaattcatctggaacgacctgctgtccctggaaaccggcagcctgaagctggccaacggaagagtgatcgagaagacactgtacaacagaagaacccggcaggatgagcctgccctgttcgtggccctgaccttcgagcggcgggaggtcctggactcctccaatatcaaaccaatgaacctgatcggcgtggcaagaggcgaaaacatccccgccgtgatcgccctgaccgaccccgagggctgcccactgagccggtttaaggatagcctgggaaacccaacccacatcctgagaatcggcgagagctataaggagaagcagcggaccatccaggccaagaaggaggtggagcagcggagagccggcggctacagccggaagtacgccagcaaagccaagaatctggcagacgatatggtgagaaacaccgctagagatctgctgtactacgccgtgacccaggatgccatgctgatcttcgccaacctgagccggggcttcggccggcagggcaagcggaccttcatggccgagagacagtacacacggatggaggactggctgaccgccaagctggcctacgagggcctgagcaagacctacctgtccaagacactggcccagtacacctccaagacatgcagcaactgtgggtttaccatcaccagcgccgactacgacagggtgctggagaagctgaagaagacagcaacaggctggatgaccacaattaacggcaaggagctgaaggtggagggccagattacctactacaacagatacaagagacagaacgtagtcaaggacctgtccgtcgagctggatagactgagcgaagaatctgtgaacaacgacatctcctcctggacaaagggcagaagcggagaagctctgagcctcctgaagaaaagattctcccatagacccgtgcaggagaagttcgtgtgcctgaactgcggcttcgagacacacgcagccgagcaagccgccctgaacatcgccagatcctggctgttcctgcggagccaggagtacaagaaataccagacaaacaagacaaccggcaacaccgataagagagccttcgtcgagacctggcagtccttttaccggaagaagcttaaggaggtgtggaaacctgccgtgcggtctggcggatctggcggaggctccaccagccccaagaaaaagagaaaagtctaagctgccttctgcggggcttgccttctggccatgcccttcttctctcccttgcacctgtacctcttggtctttgaataaagcctgagtaggaaggctagcaaaaaaaaaaaaaaaaaaaaaaaaaaaaaaaaaaaaaaaaaaaaaaaaaaaaaaaaaaaaaaaaaaaaaaaaaaaaaaaagcccagccggctccccaacctctaccgaggagggcacctctgagtccgccacccccgagagcggccctggcacctccaccgagcccagcgagggcagcgcacccggcagccctgccggcagccccacctccacagaggagggaaccagcaccgagcccagcgaaggcagcgccccaggcaccagcaccgagcctagtgagcaggagattaaacggatcaacaagatcagaagaagacttgtgaaagacagcaacaccaagaaggccggcaagacaggccccatgaaaaccctgctggttagagtgatgacacccgatctgagagagcggctggaaaacctgagaaagaagcctgaaaatatcccccagcccatcagcaatacatctagagccaacctgaataagctgctgaccgattacaccgaaatgaagaaggcgatcctgcatgtgtactgggaagagttccagaaggaccctgtgggcctgatgagccgggtggcccagcctgccagcaagaagatcgatcagaacaagctgaaacctgagatggacgagaagggcaacctgaccaccgccggctttgcctgctctcagtgtggccagcccctgttcgtgtacaagctggagcaggtgtctgagaagggcaaggcttacaccaactacttcggacggtgcaatgtggccgagcacgaaaagctgatcctgctggcccagctgaagcccgagaaggatagcgacgaagccgtgacatatagcctgggaaagtttgggcagagggccctggatttctacagcattcatgtgaccaaggagtccacccaccccgtgaagcccctggcccagatcgccggaaacagatacgcctccggacctgtgggaaaggccctgagcgacgcatgtatgggcacaatcgcctccttcctgtctaagtaccaggacatcatcatcgaacaccagaaggtggtgaagggcaaccagaagagactggagagcctgcgggagctggccggcaaggaaaacctggaataccctagcgtgaccctgccacctcagcctcacaccaaggagggcgttgatgcctacaacgaagtgatcgcccgggtgcgaatgtgggtgaacctgaacctgtggcagaagctgaagctaagcagagatgatgccaagcctctgctgagactgaagggattcccttcctttcctctggtcgagagacaggccaacgaagtggactggtgggacatggtgtgtaacgtgaagaagctgatcaacgagaaaaaggaggatggcaaggtgttttggcagaatctggctggctacaagagacaggaagccctgagaccatacctgagcagcgaggaagatcggaagaagggaaagaaattcgctcggtaccagctgggcgacctgctgctgcacctggaaaagaagcacggcgaggactggggaaaggtgtacgacgaggcctgggagcggattgacaagaaagtggaaggcctgagcaagcacatcaagctggaagaggaacggagaagcgaggacgcccagagcaaggccgccctgaccgactggctgcgggctaaggccagcttcgtgatcgagggcctgaaggaggccgacaaggacgagttctgcagatgcgagctgaagctgcagaagtggtacggggacctgcggggaaagcccttcgccatcgaagccgagaacagcatcctggacatcagcggcttcagcaagcagtacaactgtgccttcatctggcagaaggacggcgtgaagaagctgaacctgtacctgatcatcaactacttcaagggcggcaagctgcggttcaagaagatcaaacctgaagccttcgaagccaacagattctacaccgtgatcaacaaaaagagcggcgagatcgtgcccatggaggtgaacttcaacttcgacgaccccaacctgatcatcctgcctctggcctttggcaagagacagggcagagaattcatctggaacgacctgctgtccctggaaaccggcagcctgaagctggccaacggaagagtgatcgagaagacactgtacaacagaagaacccggcaggatgagcctgccctgttcgtggccctgaccttcgagcggcgggaggtcctggactcctccaatatcaaaccaatgaacctgatcggcgtggcaagaggcgaaaacatccccgccgtgatcgccctgaccgaccccgagggctgcccactgagccggtttaaggatagcctgggaaacccaacccacatcctgagaatcggcgagagctataaggagaagcagcggaccatccaggccaagaaggaggtggagcagcggagagccggcggctacagccggaagtacgccagcaaagccaagaatctggcagacgatatggtgagaaacaccgctagagatctgctgtactacgccgtgacccaggatgccatgctgatcttcgccaacctgagccggggcttcggccggcagggcaagcggaccttcatggccgagagacagtacacacggatggaggactggctgaccgccaagctggcctacgagggcctgagcaagacctacctgtccaagacactggcccagtacacctccaagacatgcagcaactgtgggtttaccatcaccagcgccgactacgacagggtgctggagaagctgaagaagacagcaacaggctggatgaccacaattaacggcaaggagctgaaggtggagggccagattacctactacaacagatacaagagacagaacgtagtcaaggacctgtccgtcgagctggatagactgagcgaagaatctgtgaacaacgacatctcctcctggacaaagggcagaagcggagaagctctgagcctcctgaagaaaagattctcccatagacccgtgcaggagaagttcgtgtgcctgaactgcggcttcgagacacacgcagccgagcaagccgccctgaacatcgccagatcctggctgttcctgcggagccaggagtacaagaaataccagacaaacaagacaaccggcaacaccgataagagagccttcgtcgagacctggcagtccttttaccggaagaagcttaaggaggtgtggaaacctgccgtgcggtctggcggatctggcggaggctccaccagccccaagaaaaagagaaaagtctaagctgccttctgcggggcttgccttctggccatgcccttcttctctcccttgcacctgtacctcttggtctttgaataaagcctgagtaggaaggctagcaaaaaaaaaaaaaaaaaaaaaaaaaaaaaaaaaaaaaaaaaaaaaaaaaaaaaaaaaaaaaaaaaaaaaaaaaaaaaaaa

SEQ ID NO: 10268 - RNA, 8787 nt, synthetic construct
  source 1..8787: mol_type = other RNA
aggaaataagagagaaaagaagagtaagaagaaatataagagccaccatggcccctaagaagaagcgtaaagtgagccggatgaaccacgaccaggagttcgacccccctaaggtgtaccctcccgtccccgccgagaagagaaagcccatccgggtcctgagcctgttcgatggcatcgccaccggtctgctggtgctgaaggacctgggcatccaggtggataggtacattgcctccgaggtgtgcgaggactccatcaccgtgggaatggtgcgtcatcagggcaagatcatgtacgtgggcgacgtgcggagcgtgacacagaagcatatccaggagtggggccctttcgacctggtgatcggcggcagcccttgcaatgacctgagcatcgtgaacccagcccggaagggcctgtacgagggaaccggcagactgttcttcgagttttacagactgctgcacgacgcccggcctaaggaaggcgacgaccggcccttcttttggctgttcgagaatgtggtggccatgggagtcagcgacaagcgggatattagccggttcctggagagcaaccccgtgatgatcgatgccaaggaagtgagcgccgcccaccgggccagatacttctggggcaatctgcctggcatgaacagacccctggccagcaccgtgaacgacaagctggagctgcaggagtgcctggagcacggccggatcgccaagttcagcaaggtgagaaccatcaccacccgaagcaacagcatcaaacaaggcaaggaccagcactttcctgtgttcatgaacgagaaggaggacatcctgtggtgtaccgagatggagagagtgttcgggttcccagtccactacacagatgtcagcaacatgtctagactggccagacagagactgctgggaagaagctggtccgtccctgtgatcagacacctgttcgcccctctgaaggagtacttcgcctgcgtgagcagcggcaacagcaacgccaacagccggggccccagcttctctagcggcctggtgccactgtccctgagagggagccacatgggccccatggagatctacaaaaccgtgagcgcctggaagcggcagcctgtgcgcgtgctgagcctgtttcggaatatcgataaagtcctgaaaagcctgggattcctggagagcggctctggctccggcggtggcaccctgaagtacgtggaggatgtgacaaacgtggtcagacgggatgtggagaagtggggccccttcgatctggtgtacggcagcacccaacccctgggcagctcttgtgaccggtgccctggctggtacatgtttcagttccaccggatcctgcagtacgccctgccgagacaggagtcccagcggccattcttttggattttcatggacaacttgctgctgaccgaggatgaccaggaaactaccactcggttcctgcagaccgaagccgtgaccctgcaggacgtgagaggccgggactaccagaacgccatgcgggtgtggtccaacatccctggactgaaaagcaagcacgcacctctgacccctaaagaagaggagtacctgcaggcccaggtgcggagcagaagcaagctggacgcccctaaggtggatctgctggtgaagaattgcctcctgcccctgagagagtacttcaagtatttcagccagaatagtctgcccctgggaggcagcggcggcggcttccaggagcccgtgagcttcaaggacgtgagcgtggtgttcaccgaggaggagctgggcctgctggacagcgcccagaggaagctgtacagggacgtgatgctggagaacttccagaacctgctgagcgtgggcaaccagcccttcaagcccgagctgatcttccagctggagagggaggaggagctgctgatgatggagaccgagacccagagggacggctgcagcggcaccaagagccagggcggcccaagcagcggcgcccctcctcccagcggcggcaggcggcccaagcagcggcgcccctcctcccagcggcggcagcccagccggctccccaacctctaccgaggagggcacctctgagtccgccacccccgagagcggccctggcacctccaccgagcccagcgagggcagcgcacccggcagccctgccggcagccccacctccacagaggagggaaccagcaccgagcccagcgaaggcagcgccccaggcaccagcaccgagcctagtgagcaggagattaaacggatcaacaagatcagaagaagacttgtgaaagacagcaacaccaagaaggccggcaagacaggccccatgaaaaccctgctggttagagtgatgacacccgatctgagagagcggctggaaaacctgagaaagaagcctgaaaatatcccccagcccatcagcaatacatctagagccaacctgaataagctgctgaccgattacaccgaaatgaagaaggcgatcctgcatgtgtactgggaagagttccagaaggaccctgtgggcctgatgagccgggtggcccagcctgccagcaagaagatcgatcagaacaagctgaaacctgagatggacgagaagggcaacctgaccaccgccggctttgcctgctctcagtgtggccagcccctgttcgtgtacaagctggagcaggtgtctgagaagggcaaggcttacaccaactacttcggacggtgcaatgtggccgagcacgaaaagctgatcctgctggcccagctgaagcccgagaaggatagcgacgaagccgtgacatatagcctgggaaagtttgggcagagggccctggatttctacagcattcatgtgaccaaggagtccacccaccccgtgaagcccctggcccagatcgccggaaacagatacgcctccggacctgtgggaaaggccctgagcgacgcatgtatgggcacaatcgcctccttcctgtctaagtaccaggacatcatcatcgaacaccagaaggtggtgaagggcaaccagaagagactggagagcctgcgggagctggccggcaaggaaaacctggaataccctagcgtgaccctgccacctcagcctcacaccaaggagggcgttgatgcctacaacgaagtgatcgcccgggtgcgaatgtgggtgaacctgaacctgtggcagaagctgaagctaagcagagatgatgccaagcctctgctgagactgaagggattcccttcctttcctctggtcgagagacaggccaacgaagtggactggtgggacatggtgtgtaacgtgaagaagctgatcaacgagaaaaaggaggatggcaaggtgttttggcagaatctggctggctacaagagacaggaagccctgagaccatacctgagcagcgaggaagatcggaagaagggaaagaaattcgctcggtaccagctgggcgacctgctgctgcacctggaaaagaagcacggcgaggactggggaaaggtgtacgacgaggcctgggagcggattgacaagaaagtggaaggcctgagcaagcacatcaagctggaagaggaacggagaagcgaggacgcccagagcaaggccgccctgaccgactggctgcgggctaaggccagcttcgtgatcgagggcctgaaggaggccgacaaggacgagttctgcagatgcgagctgaagctgcagaagtggtacggggacctgcggggaaagcccttcgccatcgaagccgagaacagcatcctggacatcagcggcttcagcaagcagtacaactgtgccttcatctggcagaaggacggcgtgaagaagctgaacctgtacctgatcatcaactacttcaagggcggcaagctgcggttcaagaagatcaaacctgaagccttcgaagccaacagattctacaccgtgatcaacaaaaagagcggcgagatcgtgcccatggaggtgaacttcaacttcgacgaccccaacctgatcatcctgcctctggcctttggcaagagacagggcagagaattcatctggaacgacctgctgtccctggaaaccggcagcctgaagctggccaacggaagagtgatcgagaagacactgtacaacagaagaacccggcaggatgagcctgccctgttcgtggccctgaccttcgagcggcgggaggtcctggactcctccaatatcaaaccaatgaacctgatcggcgtggcaagaggcgaaaacatccccgccgtgatcgccctgaccgaccccgagggctgcccactgagccggtttaaggatagcctgggaaacccaacccacatcctgagaatcggcgagagctataaggagaagcagcggaccatccaggccaagaaggaggtggagcagcggagagccggcggctacagccggaagtacgccagcaaagccaagaatctggcagacgatatggtgagaaacaccgctagagatctgctgtactacgccgtgacccaggatgccatgctgatcttcgccaacctgagccggggcttcggccggcagggcaagcggaccttcatggccgagagacagtacacacggatggaggactggctgaccgccaagctggcctacgagggcctgagcaagacctacctgtccaagacactggcccagtacacctccaagacatgcagcaactgtgggtttaccatcaccagcgccgactacgacagggtgctggagaagctgaagaagacagcaacaggctggatgaccacaattaacggcaaggagctgaaggtggagggccagattacctactacaacagatacaagagacagaacgtagtcaaggacctgtccgtcgagctggatagactgagcgaagaatctgtgaacaacgacatctcctcctggacaaagggcagaagcggagaagctctgagcctcctgaagaaaagattctcccatagacccgtgcaggagaagttcgtgtgcctgaactgcggcttcgagacacacgcagccgagcaagccgccctgaacatcgccagatcctggctgttcctgcggagccaggagtacaagaaataccagacaaacaagacaaccggcaacaccgataagagagccttcgtcgagacctggcagtccttttaccggaagaagcttaaggaggtgtggaaacctgccgtgcggtctggcggatctggcggaggctccaccagccccaagaaaaagagaaaagtctaagctgccttctgcggggcttgccttctggccatgcccttcttctctcccttgcacctgtacctcttggtctttgaataaagcctgagtaggaaggctagcaaaaaaaaaaaaaaaaaaaaaaaaaaaaaaaaaaaaaaaaaaaaaaaaaaaaaaaaaaaaaaaaaaaaaaaaaaaaaaaagcccagccggctccccaacctctaccgaggagggcacctctgagtccgccacccccgagagcggccctggcacctccaccgagcccagcgagggcagcgcacccggcagccctgccggcagccccacctccacagaggagggaaccagcaccgagcccagcgaaggcagcgccccaggcaccagcaccgagcctagtgagcaggagattaaacggatcaacaagatcagaagaagacttgtgaaagacagcaacaccaagaaggccggcaagacaggccccatgaaaaccctgctggttagagtgatgacacccgatctgagagagcggctggaaaacctgagaaagaagcctgaaaatatcccccagcccatcagcaatacatctagagccaacctgaataagctgctgaccgattacaccgaaatgaagaaggcgatcctgcatgtgtactgggaagagttccagaaggaccctgtgggcctgatgagccgggtggcccagcctgccagcaagaagatcgatcagaacaagctgaaacctgagatggacgagaagggcaacctgaccaccgccggctttgcctgctctcagtgtggccagcccctgttcgtgtacaagctggagcaggtgtctgagaagggcaaggcttacaccaactacttcggacggtgcaatgtggccgagcacgaaaagctgatcctgctggcccagctgaagcccgagaaggatagcgacgaagccgtgacatatagcctgggaaagtttgggcagagggccctggatttctacagcattcatgtgaccaaggagtccacccaccccgtgaagcccctggcccagatcgccggaaacagatacgcctccggacctgtgggaaaggccctgagcgacgcatgtatgggcacaatcgcctccttcctgtctaagtaccaggacatcatcatcgaacaccagaaggtggtgaagggcaaccagaagagactggagagcctgcgggagctggccggcaaggaaaacctggaataccctagcgtgaccctgccacctcagcctcacaccaaggagggcgttgatgcctacaacgaagtgatcgcccgggtgcgaatgtgggtgaacctgaacctgtggcagaagctgaagctaagcagagatgatgccaagcctctgctgagactgaagggattcccttcctttcctctggtcgagagacaggccaacgaagtggactggtgggacatggtgtgtaacgtgaagaagctgatcaacgagaaaaaggaggatggcaaggtgttttggcagaatctggctggctacaagagacaggaagccctgagaccatacctgagcagcgaggaagatcggaagaagggaaagaaattcgctcggtaccagctgggcgacctgctgctgcacctggaaaagaagcacggcgaggactggggaaaggtgtacgacgaggcctgggagcggattgacaagaaagtggaaggcctgagcaagcacatcaagctggaagaggaacggagaagcgaggacgcccagagcaaggccgccctgaccgactggctgcgggctaaggccagcttcgtgatcgagggcctgaaggaggccgacaaggacgagttctgcagatgcgagctgaagctgcagaagtggtacggggacctgcggggaaagcccttcgccatcgaagccgagaacagcatcctggacatcagcggcttcagcaagcagtacaactgtgccttcatctggcagaaggacggcgtgaagaagctgaacctgtacctgatcatcaactacttcaagggcggcaagctgcggttcaagaagatcaaacctgaagccttcgaagccaacagattctacaccgtgatcaacaaaaagagcggcgagatcgtgcccatggaggtgaacttcaacttcgacgaccccaacctgatcatcctgcctctggcctttggcaagagacagggcagagaattcatctggaacgacctgctgtccctggaaaccggcagcctgaagctggccaacggaagagtgatcgagaagacactgtacaacagaagaacccggcaggatgagcctgccctgttcgtggccctgaccttcgagcggcgggaggtcctggactcctccaatatcaaaccaatgaacctgatcggcgtggcaagaggcgaaaacatccccgccgtgatcgccctgaccgaccccgagggctgcccactgagccggtttaaggatagcctgggaaacccaacccacatcctgagaatcggcgagagctataaggagaagcagcggaccatccaggccaagaaggaggtggagcagcggagagccggcggctacagccggaagtacgccagcaaagccaagaatctggcagacgatatggtgagaaacaccgctagagatctgctgtactacgccgtgacccaggatgccatgctgatcttcgccaacctgagccggggcttcggccggcagggcaagcggaccttcatggccgagagacagtacacacggatggaggactggctgaccgccaagctggcctacgagggcctgagcaagacctacctgtccaagacactggcccagtacacctccaagacatgcagcaactgtgggtttaccatcaccagcgccgactacgacagggtgctggagaagctgaagaagacagcaacaggctggatgaccacaattaacggcaaggagctgaaggtggagggccagattacctactacaacagatacaagagacagaacgtagtcaaggacctgtccgtcgagctggatagactgagcgaagaatctgtgaacaacgacatctcctcctggacaaagggcagaagcggagaagctctgagcctcctgaagaaaagattctcccatagacccgtgcaggagaagttcgtgtgcctgaactgcggcttcgagacacacgcagccgagcaagccgccctgaacatcgccagatcctggctgttcctgcggagccaggagtacaagaaataccagacaaacaagacaaccggcaacaccgataagagagccttcgtcgagacctggcagtccttttaccggaagaagcttaaggaggtgtggaaacctgccgtgcggtctggcggatctggcggaggctccaccagccccaagaaaaagagaaaagtctaagctgccttctgcggggcttgccttctggccatgcccttcttctctcccttgcacctgtacctcttggtctttgaataaagcctgagtaggaaggctagcaaaaaaaaaaaaaaaaaaaaaaaaaaaaaaaaaaaaaaaaaaaaaaaaaaaaaaaaaaaaaaaaaaaaaaaaaaaaaaaa

SEQ ID NO: 10269 - RNA, 8787 nt, synthetic construct
  source 1..8787: mol_type = other RNA
aggaaataagagagaaaagaagagtaagaagaaatataagagccaccatggcccctaagaagaagcgtaaagtgagccggatgaaccacgaccaggagttcgacccccctaaggtgtaccctcccgtccccgccgagaagagaaagcccatccgggtcctgagcctgttcgatggcatcgccaccggtctgctggtgctgaaggacctgggcatccaggtggataggtacattgcctccgaggtgtgcgaggactccatcaccgtgggaatggtgcgtcatcagggcaagatcatgtacgtgggcgacgtgcggagcgtgacacagaagcatatccaggagtggggccctttcgacctggtgatcggcggcagcccttgcaatgacctgagcatcgtgaacccagcccggaagggcctgtacgagggaaccggcagactgttcttcgagttttacagactgctgcacgacgcccggcctaaggaaggcgacgaccggcccttcttttggctgttcgagaatgtggtggccatgggagtcagcgacaagcgggatattagccggttcctggagagcaaccccgtgatgatcgatgccaaggaagtgagcgccgcccaccgggccagatacttctggggcaatctgcctggcatgaacagacccctggccagcaccgtgaacgacaagctggagctgcaggagtgcctggagcacggccggatcgccaagttcagcaaggtgagaaccatcaccacccgaagcaacagcatcaaacaaggcaaggaccagcactttcctgtgttcatgaacgagaaggaggacatcctgtggtgtaccgagatggagagagtgttcgggttcccagtccactacacagatgtcagcaacatgtctagactggccagacagagactgctgggaagaagctggtccgtccctgtgatcagacacctgttcgcccctctgaaggagtacttcgcctgcgtgagcagcggcaacagcaacgccaacagccggggccccagcttctctagcggcctggtgccactgtccctgagagggagccacatgggccccatggagatctacaaaaccgtgagcgcctggaagcggcagcctgtgcgcgtgctgagcctgtttcggaatatcgataaagtcctgaaaagcctgggattcctggagagcggctctggctccggcggtggcaccctgaagtacgtggaggatgtgacaaacgtggtcagacgggatgtggagaagtggggccccttcgatctggtgtacggcagcacccaacccctgggcagctcttgtgaccggtgccctggctggtacatgtttcagttccaccggatcctgcagtacgccctgccgagacaggagtcccagcggccattcttttggattttcatggacaacttgctgctgaccgaggatgaccaggaaactaccactcggttcctgcagaccgaagccgtgaccctgcaggacgtgagaggccgggactaccagaacgccatgcgggtgtggtccaacatccctggactgaaaagcaagcacgcacctctgacccctaaagaagaggagtacctgcaggcccaggtgcggagcagaagcaagctggacgcccctaaggtggatctgctggtgaagaattgcctcctgcccctgagagagtacttcaagtatttcagccagaatagtctgcccctgggaggcagcggcggcggcccccaggagagcgtgaccttcgaggacgtggccgtggacttcacctgggaggagtggggctacctggacaccagccagaaggagctgtactgggaggtgatgctggagaactacaagaacctggtgagcctgggcttcgtggtggccaagcccgacgccatcagccagctggagcaggaggaggccccctggaggcccgaggtgctgttccccaggagcagctgcagcgacctggacaccaagggcggcccaagcagcggcgcccctcctcccagcggcggcaggcggcccaagcagcggcgcccctcctcccagcggcggcagcccagccggctccccaacctctaccgaggagggcacctctgagtccgccacccccgagagcggccctggcacctccaccgagcccagcgagggcagcgcacccggcagccctgccggcagccccacctccacagaggagggaaccagcaccgagcccagcgaaggcagcgccccaggcaccagcaccgagcctagtgagcaggagattaaacggatcaacaagatcagaagaagacttgtgaaagacagcaacaccaagaaggccggcaagacaggccccatgaaaaccctgctggttagagtgatgacacccgatctgagagagcggctggaaaacctgagaaagaagcctgaaaatatcccccagcccatcagcaatacatctagagccaacctgaataagctgctgaccgattacaccgaaatgaagaaggcgatcctgcatgtgtactgggaagagttccagaaggaccctgtgggcctgatgagccgggtggcccagcctgccagcaagaagatcgatcagaacaagctgaaacctgagatggacgagaagggcaacctgaccaccgccggctttgcctgctctcagtgtggccagcccctgttcgtgtacaagctggagcaggtgtctgagaagggcaaggcttacaccaactacttcggacggtgcaatgtggccgagcacgaaaagctgatcctgctggcccagctgaagcccgagaaggatagcgacgaagccgtgacatatagcctgggaaagtttgggcagagggccctggatttctacagcattcatgtgaccaaggagtccacccaccccgtgaagcccctggcccagatcgccggaaacagatacgcctccggacctgtgggaaaggccctgagcgacgcatgtatgggcacaatcgcctccttcctgtctaagtaccaggacatcatcatcgaacaccagaaggtggtgaagggcaaccagaagagactggagagcctgcgggagctggccggcaaggaaaacctggaataccctagcgtgaccctgccacctcagcctcacaccaaggagggcgttgatgcctacaacgaagtgatcgcccgggtgcgaatgtgggtgaacctgaacctgtggcagaagctgaagctaagcagagatgatgccaagcctctgctgagactgaagggattcccttcctttcctctggtcgagagacaggccaacgaagtggactggtgggacatggtgtgtaacgtgaagaagctgatcaacgagaaaaaggaggatggcaaggtgttttggcagaatctggctggctacaagagacaggaagccctgagaccatacctgagcagcgaggaagatcggaagaagggaaagaaattcgctcggtaccagctgggcgacctgctgctgcacctggaaaagaagcacggcgaggactggggaaaggtgtacgacgaggcctgggagcggattgacaagaaagtggaaggcctgagcaagcacatcaagctggaagaggaacggagaagcgaggacgcccagagcaaggccgccctgaccgactggctgcgggctaaggccagcttcgtgatcgagggcctgaaggaggccgacaaggacgagttctgcagatgcgagctgaagctgcagaagtggtacggggacctgcggggaaagcccttcgccatcgaagccgagaacagcatcctggacatcagcggcttcagcaagcagtacaactgtgccttcatctggcagaaggacggcgtgaagaagctgaacctgtacctgatcatcaactacttcaagggcggcaagctgcggttcaagaagatcaaacctgaagccttcgaagccaacagattctacaccgtgatcaacaaaaagagcggcgagatcgtgcccatggaggtgaacttcaacttcgacgaccccaacctgatcatcctgcctctggcctttggcaagagacagggcagagaattcatctggaacgacctgctgtccctggaaaccggcagcctgaagctggccaacggaagagtgatcgagaagacactgtacaacagaagaacccggcaggatgagcctgccctgttcgtggccctgaccttcgagcggcgggaggtcctggactcctccaatatcaaaccaatgaacctgatcggcgtggcaagaggcgaaaacatccccgccgtgatcgccctgaccgaccccgagggctgcccactgagccggtttaaggatagcctgggaaacccaacccacatcctgagaatcggcgagagctataaggagaagcagcggaccatccaggccaagaaggaggtggagcagcggagagccggcggctacagccggaagtacgccagcaaagccaagaatctggcagacgatatggtgagaaacaccgctagagatctgctgtactacgccgtgacccaggatgccatgctgatcttcgccaacctgagccggggcttcggccggcagggcaagcggaccttcatggccgagagacagtacacacggatggaggactggctgaccgccaagctggcctacgagggcctgagcaagacctacctgtccaagacactggcccagtacacctccaagacatgcagcaactgtgggtttaccatcaccagcgccgactacgacagggtgctggagaagctgaagaagacagcaacaggctggatgaccacaattaacggcaaggagctgaaggtggagggccagattacctactacaacagatacaagagacagaacgtagtcaaggacctgtccgtcgagctggatagactgagcgaagaatctgtgaacaacgacatctcctcctggacaaagggcagaagcggagaagctctgagcctcctgaagaaaagattctcccatagacccgtgcaggagaagttcgtgtgcctgaactgcggcttcgagacacacgcagccgagcaagccgccctgaacatcgccagatcctggctgttcctgcggagccaggagtacaagaaataccagacaaacaagacaaccggcaacaccgataagagagccttcgtcgagacctggcagtccttttaccggaagaagcttaaggaggtgtggaaacctgccgtgcggtctggcggatctggcggaggctccaccagccccaagaaaaagagaaaagtctaagctgccttctgcggggcttgccttctggccatgcccttcttctctcccttgcacctgtacctcttggtctttgaataaagcctgagtaggaaggctagcaaaaaaaaaaaaaaaaaaaaaaaaaaaaaaaaaaaaaaaaaaaaaaaaaaaaaaaaaaaaaaaaaaaaaaaaaaaaaaaagcccagccggctccccaacctctaccgaggagggcacctctgagtccgccacccccgagagcggccctggcacctccaccgagcccagcgagggcagcgcacccggcagccctgccggcagccccacctccacagaggagggaaccagcaccgagcccagcgaaggcagcgccccaggcaccagcaccgagcctagtgagcaggagattaaacggatcaacaagatcagaagaagacttgtgaaagacagcaacaccaagaaggccggcaagacaggccccatgaaaaccctgctggttagagtgatgacacccgatctgagagagcggctggaaaacctgagaaagaagcctgaaaatatcccccagcccatcagcaatacatctagagccaacctgaataagctgctgaccgattacaccgaaatgaagaaggcgatcctgcatgtgtactgggaagagttccagaaggaccctgtgggcctgatgagccgggtggcccagcctgccagcaagaagatcgatcagaacaagctgaaacctgagatggacgagaagggcaacctgaccaccgccggctttgcctgctctcagtgtggccagcccctgttcgtgtacaagctggagcaggtgtctgagaagggcaaggcttacaccaactacttcggacggtgcaatgtggccgagcacgaaaagctgatcctgctggcccagctgaagcccgagaaggatagcgacgaagccgtgacatatagcctgggaaagtttgggcagagggccctggatttctacagcattcatgtgaccaaggagtccacccaccccgtgaagcccctggcccagatcgccggaaacagatacgcctccggacctgtgggaaaggccctgagcgacgcatgtatgggcacaatcgcctccttcctgtctaagtaccaggacatcatcatcgaacaccagaaggtggtgaagggcaaccagaagagactggagagcctgcgggagctggccggcaaggaaaacctggaataccctagcgtgaccctgccacctcagcctcacaccaaggagggcgttgatgcctacaacgaagtgatcgcccgggtgcgaatgtgggtgaacctgaacctgtggcagaagctgaagctaagcagagatgatgccaagcctctgctgagactgaagggattcccttcctttcctctggtcgagagacaggccaacgaagtggactggtgggacatggtgtgtaacgtgaagaagctgatcaacgagaaaaaggaggatggcaaggtgttttggcagaatctggctggctacaagagacaggaagccctgagaccatacctgagcagcgaggaagatcggaagaagggaaagaaattcgctcggtaccagctgggcgacctgctgctgcacctggaaaagaagcacggcgaggactggggaaaggtgtacgacgaggcctgggagcggattgacaagaaagtggaaggcctgagcaagcacatcaagctggaagaggaacggagaagcgaggacgcccagagcaaggccgccctgaccgactggctgcgggctaaggccagcttcgtgatcgagggcctgaaggaggccgacaaggacgagttctgcagatgcgagctgaagctgcagaagtggtacggggacctgcggggaaagcccttcgccatcgaagccgagaacagcatcctggacatcagcggcttcagcaagcagtacaactgtgccttcatctggcagaaggacggcgtgaagaagctgaacctgtacctgatcatcaactacttcaagggcggcaagctgcggttcaagaagatcaaacctgaagccttcgaagccaacagattctacaccgtgatcaacaaaaagagcggcgagatcgtgcccatggaggtgaacttcaacttcgacgaccccaacctgatcatcctgcctctggcctttggcaagagacagggcagagaattcatctggaacgacctgctgtccctggaaaccggcagcctgaagctggccaacggaagagtgatcgagaagacactgtacaacagaagaacccggcaggatgagcctgccctgttcgtggccctgaccttcgagcggcgggaggtcctggactcctccaatatcaaaccaatgaacctgatcggcgtggcaagaggcgaaaacatccccgccgtgatcgccctgaccgaccccgagggctgcccactgagccggtttaaggatagcctgggaaacccaacccacatcctgagaatcggcgagagctataaggagaagcagcggaccatccaggccaagaaggaggtggagcagcggagagccggcggctacagccggaagtacgccagcaaagccaagaatctggcagacgatatggtgagaaacaccgctagagatctgctgtactacgccgtgacccaggatgccatgctgatcttcgccaacctgagccggggcttcggccggcagggcaagcggaccttcatggccgagagacagtacacacggatggaggactggctgaccgccaagctggcctacgagggcctgagcaagacctacctgtccaagacactggcccagtacacctccaagacatgcagcaactgtgggtttaccatcaccagcgccgactacgacagggtgctggagaagctgaagaagacagcaacaggctggatgaccacaattaacggcaaggagctgaaggtggagggccagattacctactacaacagatacaagagacagaacgtagtcaaggacctgtccgtcgagctggatagactgagcgaagaatctgtgaacaacgacatctcctcctggacaaagggcagaagcggagaagctctgagcctcctgaagaaaagattctcccatagacccgtgcaggagaagttcgtgtgcctgaactgcggcttcgagacacacgcagccgagcaagccgccctgaacatcgccagatcctggctgttcctgcggagccaggagtacaagaaataccagacaaacaagacaaccggcaacaccgataagagagccttcgtcgagacctggcagtccttttaccggaagaagcttaaggaggtgtggaaacctgccgtgcggtctggcggatctggcggaggctccaccagccccaagaaaaagagaaaagtctaagctgccttctgcggggcttgccttctggccatgcccttcttctctcccttgcacctgtacctcttggtctttgaataaagcctgagtaggaaggctagcaaaaaaaaaaaaaaaaaaaaaaaaaaaaaaaaaaaaaaaaaaaaaaaaaaaaaaaaaaaaaaaaaaaaaaaaaaaaaaaa

SEQ ID NO: 10270 - RNA, 8787 nt, synthetic construct
  source 1..8787: mol_type = other RNA
aggaaataagagagaaaagaagagtaagaagaaatataagagccaccatggcccctaagaagaagcgtaaagtgagccggatgaaccacgaccaggagttcgacccccctaaggtgtaccctcccgtccccgccgagaagagaaagcccatccgggtcctgagcctgttcgatggcatcgccaccggtctgctggtgctgaaggacctgggcatccaggtggataggtacattgcctccgaggtgtgcgaggactccatcaccgtgggaatggtgcgtcatcagggcaagatcatgtacgtgggcgacgtgcggagcgtgacacagaagcatatccaggagtggggccctttcgacctggtgatcggcggcagcccttgcaatgacctgagcatcgtgaacccagcccggaagggcctgtacgagggaaccggcagactgttcttcgagttttacagactgctgcacgacgcccggcctaaggaaggcgacgaccggcccttcttttggctgttcgagaatgtggtggccatgggagtcagcgacaagcgggatattagccggttcctggagagcaaccccgtgatgatcgatgccaaggaagtgagcgccgcccaccgggccagatacttctggggcaatctgcctggcatgaacagacccctggccagcaccgtgaacgacaagctggagctgcaggagtgcctggagcacggccggatcgccaagttcagcaaggtgagaaccatcaccacccgaagcaacagcatcaaacaaggcaaggaccagcactttcctgtgttcatgaacgagaaggaggacatcctgtggtgtaccgagatggagagagtgttcgggttcccagtccactacacagatgtcagcaacatgtctagactggccagacagagactgctgggaagaagctggtccgtccctgtgatcagacacctgttcgcccctctgaaggagtacttcgcctgcgtgagcagcggcaacagcaacgccaacagccggggccccagcttctctagcggcctggtgccactgtccctgagagggagccacatgggccccatggagatctacaaaaccgtgagcgcctggaagcggcagcctgtgcgcgtgctgagcctgtttcggaatatcgataaagtcctgaaaagcctgggattcctggagagcggctctggctccggcggtggcaccctgaagtacgtggaggatgtgacaaacgtggtcagacgggatgtggagaagtggggccccttcgatctggtgtacggcagcacccaacccctgggcagctcttgtgaccggtgccctggctggtacatgtttcagttccaccggatcctgcagtacgccctgccgagacaggagtcccagcggccattcttttggattttcatggacaacttgctgctgaccgaggatgaccaggaaactaccactcggttcctgcagaccgaagccgtgaccctgcaggacgtgagaggccgggactaccagaacgccatgcgggtgtggtccaacatccctggactgaaaagcaagcacgcacctctgacccctaaagaagaggagtacctgcaggcccaggtgcggagcagaagcaagctggacgcccctaaggtggatctgctggtgaagaattgcctcctgcccctgagagagtacttcaagtatttcagccagaatagtctgcccctgggaggcagcggcggcggcagcaagggcagcctgatgttcagggacgtgagcatcgacttcagccaggaggagtgggagtgcctggacagcggccagatgaacctgtacaaggaggtgatgctggagaacttcagcaacctggtgagcgtgggcctgagcagcagcaagcccgccgtgatcagcctgctggagcagggcaaggagccctggatggtggacagggagctgaccaggggcctgtgcagcgacctggagagcatgggcggcccaagcagcggcgcccctcctcccagcggcggcaggcggcccaagcagcggcgcccctcctcccagcggcggcagcccagccggctccccaacctctaccgaggagggcacctctgagtccgccacccccgagagcggccctggcacctccaccgagcccagcgagggcagcgcacccggcagccctgccggcagccccacctccacagaggagggaaccagcaccgagcccagcgaaggcagcgccccaggcaccagcaccgagcctagtgagcaggagattaaacggatcaacaagatcagaagaagacttgtgaaagacagcaacaccaagaaggccggcaagacaggccccatgaaaaccctgctggttagagtgatgacacccgatctgagagagcggctggaaaacctgagaaagaagcctgaaaatatcccccagcccatcagcaatacatctagagccaacctgaataagctgctgaccgattacaccgaaatgaagaaggcgatcctgcatgtgtactgggaagagttccagaaggaccctgtgggcctgatgagccgggtggcccagcctgccagcaagaagatcgatcagaacaagctgaaacctgagatggacgagaagggcaacctgaccaccgccggctttgcctgctctcagtgtggccagcccctgttcgtgtacaagctggagcaggtgtctgagaagggcaaggcttacaccaactacttcggacggtgcaatgtggccgagcacgaaaagctgatcctgctggcccagctgaagcccgagaaggatagcgacgaagccgtgacatatagcctgggaaagtttgggcagagggccctggatttctacagcattcatgtgaccaaggagtccacccaccccgtgaagcccctggcccagatcgccggaaacagatacgcctccggacctgtgggaaaggccctgagcgacgcatgtatgggcacaatcgcctccttcctgtctaagtaccaggacatcatcatcgaacaccagaaggtggtgaagggcaaccagaagagactggagagcctgcgggagctggccggcaaggaaaacctggaataccctagcgtgaccctgccacctcagcctcacaccaaggagggcgttgatgcctacaacgaagtgatcgcccgggtgcgaatgtgggtgaacctgaacctgtggcagaagctgaagctaagcagagatgatgccaagcctctgctgagactgaagggattcccttcctttcctctggtcgagagacaggccaacgaagtggactggtgggacatggtgtgtaacgtgaagaagctgatcaacgagaaaaaggaggatggcaaggtgttttggcagaatctggctggctacaagagacaggaagccctgagaccatacctgagcagcgaggaagatcggaagaagggaaagaaattcgctcggtaccagctgggcgacctgctgctgcacctggaaaagaagcacggcgaggactggggaaaggtgtacgacgaggcctgggagcggattgacaagaaagtggaaggcctgagcaagcacatcaagctggaagaggaacggagaagcgaggacgcccagagcaaggccgccctgaccgactggctgcgggctaaggccagcttcgtgatcgagggcctgaaggaggccgacaaggacgagttctgcagatgcgagctgaagctgcagaagtggtacggggacctgcggggaaagcccttcgccatcgaagccgagaacagcatcctggacatcagcggcttcagcaagcagtacaactgtgccttcatctggcagaaggacggcgtgaagaagctgaacctgtacctgatcatcaactacttcaagggcggcaagctgcggttcaagaagatcaaacctgaagccttcgaagccaacagattctacaccgtgatcaacaaaaagagcggcgagatcgtgcccatggaggtgaacttcaacttcgacgaccccaacctgatcatcctgcctctggcctttggcaagagacagggcagagaattcatctggaacgacctgctgtccctggaaaccggcagcctgaagctggccaacggaagagtgatcgagaagacactgtacaacagaagaacccggcaggatgagcctgccctgttcgtggccctgaccttcgagcggcgggaggtcctggactcctccaatatcaaaccaatgaacctgatcggcgtggcaagaggcgaaaacatccccgccgtgatcgccctgaccgaccccgagggctgcccactgagccggtttaaggatagcctgggaaacccaacccacatcctgagaatcggcgagagctataaggagaagcagcggaccatccaggccaagaaggaggtggagcagcggagagccggcggctacagccggaagtacgccagcaaagccaagaatctggcagacgatatggtgagaaacaccgctagagatctgctgtactacgccgtgacccaggatgccatgctgatcttcgccaacctgagccggggcttcggccggcagggcaagcggaccttcatggccgagagacagtacacacggatggaggactggctgaccgccaagctggcctacgagggcctgagcaagacctacctgtccaagacactggcccagtacacctccaagacatgcagcaactgtgggtttaccatcaccagcgccgactacgacagggtgctggagaagctgaagaagacagcaacaggctggatgaccacaattaacggcaaggagctgaaggtggagggccagattacctactacaacagatacaagagacagaacgtagtcaaggacctgtccgtcgagctggatagactgagcgaagaatctgtgaacaacgacatctcctcctggacaaagggcagaagcggagaagctctgagcctcctgaagaaaagattctcccatagacccgtgcaggagaagttcgtgtgcctgaactgcggcttcgagacacacgcagccgagcaagccgccctgaacatcgccagatcctggctgttcctgcggagccaggagtacaagaaataccagacaaacaagacaaccggcaacaccgataagagagccttcgtcgagacctggcagtccttttaccggaagaagcttaaggaggtgtggaaacctgccgtgcggtctggcggatctggcggaggctccaccagccccaagaaaaagagaaaagtctaagctgccttctgcggggcttgccttctggccatgcccttcttctctcccttgcacctgtacctcttggtctttgaataaagcctgagtaggaaggctagcaaaaaaaaaaaaaaaaaaaaaaaaaaaaaaaaaaaaaaaaaaaaaaaaaaaaaaaaaaaaaaaaaaaaaaaaaaaaaaaagcccagccggctccccaacctctaccgaggagggcacctctgagtccgccacccccgagagcggccctggcacctccaccgagcccagcgagggcagcgcacccggcagccctgccggcagccccacctccacagaggagggaaccagcaccgagcccagcgaaggcagcgccccaggcaccagcaccgagcctagtgagcaggagattaaacggatcaacaagatcagaagaagacttgtgaaagacagcaacaccaagaaggccggcaagacaggccccatgaaaaccctgctggttagagtgatgacacccgatctgagagagcggctggaaaacctgagaaagaagcctgaaaatatcccccagcccatcagcaatacatctagagccaacctgaataagctgctgaccgattacaccgaaatgaagaaggcgatcctgcatgtgtactgggaagagttccagaaggaccctgtgggcctgatgagccgggtggcccagcctgccagcaagaagatcgatcagaacaagctgaaacctgagatggacgagaagggcaacctgaccaccgccggctttgcctgctctcagtgtggccagcccctgttcgtgtacaagctggagcaggtgtctgagaagggcaaggcttacaccaactacttcggacggtgcaatgtggccgagcacgaaaagctgatcctgctggcccagctgaagcccgagaaggatagcgacgaagccgtgacatatagcctgggaaagtttgggcagagggccctggatttctacagcattcatgtgaccaaggagtccacccaccccgtgaagcccctggcccagatcgccggaaacagatacgcctccggacctgtgggaaaggccctgagcgacgcatgtatgggcacaatcgcctccttcctgtctaagtaccaggacatcatcatcgaacaccagaaggtggtgaagggcaaccagaagagactggagagcctgcgggagctggccggcaaggaaaacctggaataccctagcgtgaccctgccacctcagcctcacaccaaggagggcgttgatgcctacaacgaagtgatcgcccgggtgcgaatgtgggtgaacctgaacctgtggcagaagctgaagctaagcagagatgatgccaagcctctgctgagactgaagggattcccttcctttcctctggtcgagagacaggccaacgaagtggactggtgggacatggtgtgtaacgtgaagaagctgatcaacgagaaaaaggaggatggcaaggtgttttggcagaatctggctggctacaagagacaggaagccctgagaccatacctgagcagcgaggaagatcggaagaagggaaagaaattcgctcggtaccagctgggcgacctgctgctgcacctggaaaagaagcacggcgaggactggggaaaggtgtacgacgaggcctgggagcggattgacaagaaagtggaaggcctgagcaagcacatcaagctggaagaggaacggagaagcgaggacgcccagagcaaggccgccctgaccgactggctgcgggctaaggccagcttcgtgatcgagggcctgaaggaggccgacaaggacgagttctgcagatgcgagctgaagctgcagaagtggtacggggacctgcggggaaagcccttcgccatcgaagccgagaacagcatcctggacatcagcggcttcagcaagcagtacaactgtgccttcatctggcagaaggacggcgtgaagaagctgaacctgtacctgatcatcaactacttcaagggcggcaagctgcggttcaagaagatcaaacctgaagccttcgaagccaacagattctacaccgtgatcaacaaaaagagcggcgagatcgtgcccatggaggtgaacttcaacttcgacgaccccaacctgatcatcctgcctctggcctttggcaagagacagggcagagaattcatctggaacgacctgctgtccctggaaaccggcagcctgaagctggccaacggaagagtgatcgagaagacactgtacaacagaagaacccggcaggatgagcctgccctgttcgtggccctgaccttcgagcggcgggaggtcctggactcctccaatatcaaaccaatgaacctgatcggcgtggcaagaggcgaaaacatccccgccgtgatcgccctgaccgaccccgagggctgcccactgagccggtttaaggatagcctgggaaacccaacccacatcctgagaatcggcgagagctataaggagaagcagcggaccatccaggccaagaaggaggtggagcagcggagagccggcggctacagccggaagtacgccagcaaagccaagaatctggcagacgatatggtgagaaacaccgctagagatctgctgtactacgccgtgacccaggatgccatgctgatcttcgccaacctgagccggggcttcggccggcagggcaagcggaccttcatggccgagagacagtacacacggatggaggactggctgaccgccaagctggcctacgagggcctgagcaagacctacctgtccaagacactggcccagtacacctccaagacatgcagcaactgtgggtttaccatcaccagcgccgactacgacagggtgctggagaagctgaagaagacagcaacaggctggatgaccacaattaacggcaaggagctgaaggtggagggccagattacctactacaacagatacaagagacagaacgtagtcaaggacctgtccgtcgagctggatagactgagcgaagaatctgtgaacaacgacatctcctcctggacaaagggcagaagcggagaagctctgagcctcctgaagaaaagattctcccatagacccgtgcaggagaagttcgtgtgcctgaactgcggcttcgagacacacgcagccgagcaagccgccctgaacatcgccagatcctggctgttcctgcggagccaggagtacaagaaataccagacaaacaagacaaccggcaacaccgataagagagccttcgtcgagacctggcagtccttttaccggaagaagcttaaggaggtgtggaaacctgccgtgcggtctggcggatctggcggaggctccaccagccccaagaaaaagagaaaagtctaagctgccttctgcggggcttgccttctggccatgcccttcttctctcccttgcacctgtacctcttggtctttgaataaagcctgagtaggaaggctagcaaaaaaaaaaaaaaaaaaaaaaaaaaaaaaaaaaaaaaaaaaaaaaaaaaaaaaaaaaaaaaaaaaaaaaaaaaaaaaaa

SEQ ID NO: 10271 - RNA, 8787 nt, synthetic construct
  source 1..8787: mol_type = other RNA
aggaaataagagagaaaagaagagtaagaagaaatataagagccaccatggcccctaagaagaagcgtaaagtgagccggatgaaccacgaccaggagttcgacccccctaaggtgtaccctcccgtccccgccgagaagagaaagcccatccgggtcctgagcctgttcgatggcatcgccaccggtctgctggtgctgaaggacctgggcatccaggtggataggtacattgcctccgaggtgtgcgaggactccatcaccgtgggaatggtgcgtcatcagggcaagatcatgtacgtgggcgacgtgcggagcgtgacacagaagcatatccaggagtggggccctttcgacctggtgatcggcggcagcccttgcaatgacctgagcatcgtgaacccagcccggaagggcctgtacgagggaaccggcagactgttcttcgagttttacagactgctgcacgacgcccggcctaaggaaggcgacgaccggcccttcttttggctgttcgagaatgtggtggccatgggagtcagcgacaagcgggatattagccggttcctggagagcaaccccgtgatgatcgatgccaaggaagtgagcgccgcccaccgggccagatacttctggggcaatctgcctggcatgaacagacccctggccagcaccgtgaacgacaagctggagctgcaggagtgcctggagcacggccggatcgccaagttcagcaaggtgagaaccatcaccacccgaagcaacagcatcaaacaaggcaaggaccagcactttcctgtgttcatgaacgagaaggaggacatcctgtggtgtaccgagatggagagagtgttcgggttcccagtccactacacagatgtcagcaacatgtctagactggccagacagagactgctgggaagaagctggtccgtccctgtgatcagacacctgttcgcccctctgaaggagtacttcgcctgcgtgagcagcggcaacagcaacgccaacagccggggccccagcttctctagcggcctggtgccactgtccctgagagggagccacatgggccccatggagatctacaaaaccgtgagcgcctggaagcggcagcctgtgcgcgtgctgagcctgtttcggaatatcgataaagtcctgaaaagcctgggattcctggagagcggctctggctccggcggtggcaccctgaagtacgtggaggatgtgacaaacgtggtcagacgggatgtggagaagtggggccccttcgatctggtgtacggcagcacccaacccctgggcagctcttgtgaccggtgccctggctggtacatgtttcagttccaccggatcctgcagtacgccctgccgagacaggagtcccagcggccattcttttggattttcatggacaacttgctgctgaccgaggatgaccaggaaactaccactcggttcctgcagaccgaagccgtgaccctgcaggacgtgagaggccgggactaccagaacgccatgcgggtgtggtccaacatccctggactgaaaagcaagcacgcacctctgacccctaaagaagaggagtacctgcaggcccaggtgcggagcagaagcaagctggacgcccctaaggtggatctgctggtgaagaattgcctcctgcccctgagagagtacttcaagtatttcagccagaatagtctgcccctgggaggcagcggcggcggccagatgagggtgaccttcgaggacatcagcgtgagcttcagccaggaggagtggggctacctgaacgaggagcagaaggagctgtacagggaggtgatgaaggagaactaccagaccctgatcagcctggccaccgacagccccatcatcgaccccgacatcatcagcaggatcgagaggggcgaggagccctacgtgagggacgagcccgccagcgaggagagggagaccggcaggagcaacggcggcccaagcagcggcgcccctcctcccagcggcggcaggcggcccaagcagcggcgcccctcctcccagcggcggcagcccagccggctccccaacctctaccgaggagggcacctctgagtccgccacccccgagagcggccctggcacctccaccgagcccagcgagggcagcgcacccggcagccctgccggcagccccacctccacagaggagggaaccagcaccgagcccagcgaaggcagcgccccaggcaccagcaccgagcctagtgagcaggagattaaacggatcaacaagatcagaagaagacttgtgaaagacagcaacaccaagaaggccggcaagacaggccccatgaaaaccctgctggttagagtgatgacacccgatctgagagagcggctggaaaacctgagaaagaagcctgaaaatatcccccagcccatcagcaatacatctagagccaacctgaataagctgctgaccgattacaccgaaatgaagaaggcgatcctgcatgtgtactgggaagagttccagaaggaccctgtgggcctgatgagccgggtggcccagcctgccagcaagaagatcgatcagaacaagctgaaacctgagatggacgagaagggcaacctgaccaccgccggctttgcctgctctcagtgtggccagcccctgttcgtgtacaagctggagcaggtgtctgagaagggcaaggcttacaccaactacttcggacggtgcaatgtggccgagcacgaaaagctgatcctgctggcccagctgaagcccgagaaggatagcgacgaagccgtgacatatagcctgggaaagtttgggcagagggccctggatttctacagcattcatgtgaccaaggagtccacccaccccgtgaagcccctggcccagatcgccggaaacagatacgcctccggacctgtgggaaaggccctgagcgacgcatgtatgggcacaatcgcctccttcctgtctaagtaccaggacatcatcatcgaacaccagaaggtggtgaagggcaaccagaagagactggagagcctgcgggagctggccggcaaggaaaacctggaataccctagcgtgaccctgccacctcagcctcacaccaaggagggcgttgatgcctacaacgaagtgatcgcccgggtgcgaatgtgggtgaacctgaacctgtggcagaagctgaagctaagcagagatgatgccaagcctctgctgagactgaagggattcccttcctttcctctggtcgagagacaggccaacgaagtggactggtgggacatggtgtgtaacgtgaagaagctgatcaacgagaaaaaggaggatggcaaggtgttttggcagaatctggctggctacaagagacaggaagccctgagaccatacctgagcagcgaggaagatcggaagaagggaaagaaattcgctcggtaccagctgggcgacctgctgctgcacctggaaaagaagcacggcgaggactggggaaaggtgtacgacgaggcctgggagcggattgacaagaaagtggaaggcctgagcaagcacatcaagctggaagaggaacggagaagcgaggacgcccagagcaaggccgccctgaccgactggctgcgggctaaggccagcttcgtgatcgagggcctgaaggaggccgacaaggacgagttctgcagatgcgagctgaagctgcagaagtggtacggggacctgcggggaaagcccttcgccatcgaagccgagaacagcatcctggacatcagcggcttcagcaagcagtacaactgtgccttcatctggcagaaggacggcgtgaagaagctgaacctgtacctgatcatcaactacttcaagggcggcaagctgcggttcaagaagatcaaacctgaagccttcgaagccaacagattctacaccgtgatcaacaaaaagagcggcgagatcgtgcccatggaggtgaacttcaacttcgacgaccccaacctgatcatcctgcctctggcctttggcaagagacagggcagagaattcatctggaacgacctgctgtccctggaaaccggcagcctgaagctggccaacggaagagtgatcgagaagacactgtacaacagaagaacccggcaggatgagcctgccctgttcgtggccctgaccttcgagcggcgggaggtcctggactcctccaatatcaaaccaatgaacctgatcggcgtggcaagaggcgaaaacatccccgccgtgatcgccctgaccgaccccgagggctgcccactgagccggtttaaggatagcctgggaaacccaacccacatcctgagaatcggcgagagctataaggagaagcagcggaccatccaggccaagaaggaggtggagcagcggagagccggcggctacagccggaagtacgccagcaaagccaagaatctggcagacgatatggtgagaaacaccgctagagatctgctgtactacgccgtgacccaggatgccatgctgatcttcgccaacctgagccggggcttcggccggcagggcaagcggaccttcatggccgagagacagtacacacggatggaggactggctgaccgccaagctggcctacgagggcctgagcaagacctacctgtccaagacactggcccagtacacctccaagacatgcagcaactgtgggtttaccatcaccagcgccgactacgacagggtgctggagaagctgaagaagacagcaacaggctggatgaccacaattaacggcaaggagctgaaggtggagggccagattacctactacaacagatacaagagacagaacgtagtcaaggacctgtccgtcgagctggatagactgagcgaagaatctgtgaacaacgacatctcctcctggacaaagggcagaagcggagaagctctgagcctcctgaagaaaagattctcccatagacccgtgcaggagaagttcgtgtgcctgaactgcggcttcgagacacacgcagccgagcaagccgccctgaacatcgccagatcctggctgttcctgcggagccaggagtacaagaaataccagacaaacaagacaaccggcaacaccgataagagagccttcgtcgagacctggcagtccttttaccggaagaagcttaaggaggtgtggaaacctgccgtgcggtctggcggatctggcggaggctccaccagccccaagaaaaagagaaaagtctaagctgccttctgcggggcttgccttctggccatgcccttcttctctcccttgcacctgtacctcttggtctttgaataaagcctgagtaggaaggctagcaaaaaaaaaaaaaaaaaaaaaaaaaaaaaaaaaaaaaaaaaaaaaaaaaaaaaaaaaaaaaaaaaaaaaaaaaaaaaaaagcccagccggctccccaacctctaccgaggagggcacctctgagtccgccacccccgagagcggccctggcacctccaccgagcccagcgagggcagcgcacccggcagccctgccggcagccccacctccacagaggagggaaccagcaccgagcccagcgaaggcagcgccccaggcaccagcaccgagcctagtgagcaggagattaaacggatcaacaagatcagaagaagacttgtgaaagacagcaacaccaagaaggccggcaagacaggccccatgaaaaccctgctggttagagtgatgacacccgatctgagagagcggctggaaaacctgagaaagaagcctgaaaatatcccccagcccatcagcaatacatctagagccaacctgaataagctgctgaccgattacaccgaaatgaagaaggcgatcctgcatgtgtactgggaagagttccagaaggaccctgtgggcctgatgagccgggtggcccagcctgccagcaagaagatcgatcagaacaagctgaaacctgagatggacgagaagggcaacctgaccaccgccggctttgcctgctctcagtgtggccagcccctgttcgtgtacaagctggagcaggtgtctgagaagggcaaggcttacaccaactacttcggacggtgcaatgtggccgagcacgaaaagctgatcctgctggcccagctgaagcccgagaaggatagcgacgaagccgtgacatatagcctgggaaagtttgggcagagggccctggatttctacagcattcatgtgaccaaggagtccacccaccccgtgaagcccctggcccagatcgccggaaacagatacgcctccggacctgtgggaaaggccctgagcgacgcatgtatgggcacaatcgcctccttcctgtctaagtaccaggacatcatcatcgaacaccagaaggtggtgaagggcaaccagaagagactggagagcctgcgggagctggccggcaaggaaaacctggaataccctagcgtgaccctgccacctcagcctcacaccaaggagggcgttgatgcctacaacgaagtgatcgcccgggtgcgaatgtgggtgaacctgaacctgtggcagaagctgaagctaagcagagatgatgccaagcctctgctgagactgaagggattcccttcctttcctctggtcgagagacaggccaacgaagtggactggtgggacatggtgtgtaacgtgaagaagctgatcaacgagaaaaaggaggatggcaaggtgttttggcagaatctggctggctacaagagacaggaagccctgagaccatacctgagcagcgaggaagatcggaagaagggaaagaaattcgctcggtaccagctgggcgacctgctgctgcacctggaaaagaagcacggcgaggactggggaaaggtgtacgacgaggcctgggagcggattgacaagaaagtggaaggcctgagcaagcacatcaagctggaagaggaacggagaagcgaggacgcccagagcaaggccgccctgaccgactggctgcgggctaaggccagcttcgtgatcgagggcctgaaggaggccgacaaggacgagttctgcagatgcgagctgaagctgcagaagtggtacggggacctgcggggaaagcccttcgccatcgaagccgagaacagcatcctggacatcagcggcttcagcaagcagtacaactgtgccttcatctggcagaaggacggcgtgaagaagctgaacctgtacctgatcatcaactacttcaagggcggcaagctgcggttcaagaagatcaaacctgaagccttcgaagccaacagattctacaccgtgatcaacaaaaagagcggcgagatcgtgcccatggaggtgaacttcaacttcgacgaccccaacctgatcatcctgcctctggcctttggcaagagacagggcagagaattcatctggaacgacctgctgtccctggaaaccggcagcctgaagctggccaacggaagagtgatcgagaagacactgtacaacagaagaacccggcaggatgagcctgccctgttcgtggccctgaccttcgagcggcgggaggtcctggactcctccaatatcaaaccaatgaacctgatcggcgtggcaagaggcgaaaacatccccgccgtgatcgccctgaccgaccccgagggctgcccactgagccggtttaaggatagcctgggaaacccaacccacatcctgagaatcggcgagagctataaggagaagcagcggaccatccaggccaagaaggaggtggagcagcggagagccggcggctacagccggaagtacgccagcaaagccaagaatctggcagacgatatggtgagaaacaccgctagagatctgctgtactacgccgtgacccaggatgccatgctgatcttcgccaacctgagccggggcttcggccggcagggcaagcggaccttcatggccgagagacagtacacacggatggaggactggctgaccgccaagctggcctacgagggcctgagcaagacctacctgtccaagacactggcccagtacacctccaagacatgcagcaactgtgggtttaccatcaccagcgccgactacgacagggtgctggagaagctgaagaagacagcaacaggctggatgaccacaattaacggcaaggagctgaaggtggagggccagattacctactacaacagatacaagagacagaacgtagtcaaggacctgtccgtcgagctggatagactgagcgaagaatctgtgaacaacgacatctcctcctggacaaagggcagaagcggagaagctctgagcctcctgaagaaaagattctcccatagacccgtgcaggagaagttcgtgtgcctgaactgcggcttcgagacacacgcagccgagcaagccgccctgaacatcgccagatcctggctgttcctgcggagccaggagtacaagaaataccagacaaacaagacaaccggcaacaccgataagagagccttcgtcgagacctggcagtccttttaccggaagaagcttaaggaggtgtggaaacctgccgtgcggtctggcggatctggcggaggctccaccagccccaagaaaaagagaaaagtctaagctgccttctgcggggcttgccttctggccatgcccttcttctctcccttgcacctgtacctcttggtctttgaataaagcctgagtaggaaggctagcaaaaaaaaaaaaaaaaaaaaaaaaaaaaaaaaaaaaaaaaaaaaaaaaaaaaaaaaaaaaaaaaaaaaaaaaaaaaaaaa

SEQ ID NO: 10272 - RNA, 8787 nt, synthetic construct
  source 1..8787: mol_type = other RNA
aggaaataagagagaaaagaagagtaagaagaaatataagagccaccatggcccctaagaagaagcgtaaagtgagccggatgaaccacgaccaggagttcgacccccctaaggtgtaccctcccgtccccgccgagaagagaaagcccatccgggtcctgagcctgttcgatggcatcgccaccggtctgctggtgctgaaggacctgggcatccaggtggataggtacattgcctccgaggtgtgcgaggactccatcaccgtgggaatggtgcgtcatcagggcaagatcatgtacgtgggcgacgtgcggagcgtgacacagaagcatatccaggagtggggccctttcgacctggtgatcggcggcagcccttgcaatgacctgagcatcgtgaacccagcccggaagggcctgtacgagggaaccggcagactgttcttcgagttttacagactgctgcacgacgcccggcctaaggaaggcgacgaccggcccttcttttggctgttcgagaatgtggtggccatgggagtcagcgacaagcgggatattagccggttcctggagagcaaccccgtgatgatcgatgccaaggaagtgagcgccgcccaccgggccagatacttctggggcaatctgcctggcatgaacagacccctggccagcaccgtgaacgacaagctggagctgcaggagtgcctggagcacggccggatcgccaagttcagcaaggtgagaaccatcaccacccgaagcaacagcatcaaacaaggcaaggaccagcactttcctgtgttcatgaacgagaaggaggacatcctgtggtgtaccgagatggagagagtgttcgggttcccagtccactacacagatgtcagcaacatgtctagactggccagacagagactgctgggaagaagctggtccgtccctgtgatcagacacctgttcgcccctctgaaggagtacttcgcctgcgtgagcagcggcaacagcaacgccaacagccggggccccagcttctctagcggcctggtgccactgtccctgagagggagccacatgggccccatggagatctacaaaaccgtgagcgcctggaagcggcagcctgtgcgcgtgctgagcctgtttcggaatatcgataaagtcctgaaaagcctgggattcctggagagcggctctggctccggcggtggcaccctgaagtacgtggaggatgtgacaaacgtggtcagacgggatgtggagaagtggggccccttcgatctggtgtacggcagcacccaacccctgggcagctcttgtgaccggtgccctggctggtacatgtttcagttccaccggatcctgcagtacgccctgccgagacaggagtcccagcggccattcttttggattttcatggacaacttgctgctgaccgaggatgaccaggaaactaccactcggttcctgcagaccgaagccgtgaccctgcaggacgtgagaggccgggactaccagaacgccatgcgggtgtggtccaacatccctggactgaaaagcaagcacgcacctctgacccctaaagaagaggagtacctgcaggcccaggtgcggagcagaagcaagctggacgcccctaaggtggatctgctggtgaagaattgcctcctgcccctgagagagtacttcaagtatttcagccagaatagtctgcccctgggaggcagcggcggcggcctggtgttcgaggacgtggccatcaacttcacccccgaggagtgggccctgctggaccccgcccagaggaggctgtacagggacgtgatgctggagaccttcaagaacctggccttcgtgggcagctgcctgcacgtgaagaccagcggcagcagcgcccagagggacatcctggagaacgtgctgtgcagcgaggagaagatcgtgaggttcaagaggaacgacagcaagagcgtgctgggcggcggcccaagcagcggcgcccctcctcccagcggcggcaggcggcccaagcagcggcgcccctcctcccagcggcggcagcccagccggctccccaacctctaccgaggagggcacctctgagtccgccacccccgagagcggccctggcacctccaccgagcccagcgagggcagcgcacccggcagccctgccggcagccccacctccacagaggagggaaccagcaccgagcccagcgaaggcagcgccccaggcaccagcaccgagcctagtgagcaggagattaaacggatcaacaagatcagaagaagacttgtgaaagacagcaacaccaagaaggccggcaagacaggccccatgaaaaccctgctggttagagtgatgacacccgatctgagagagcggctggaaaacctgagaaagaagcctgaaaatatcccccagcccatcagcaatacatctagagccaacctgaataagctgctgaccgattacaccgaaatgaagaaggcgatcctgcatgtgtactgggaagagttccagaaggaccctgtgggcctgatgagccgggtggcccagcctgccagcaagaagatcgatcagaacaagctgaaacctgagatggacgagaagggcaacctgaccaccgccggctttgcctgctctcagtgtggccagcccctgttcgtgtacaagctggagcaggtgtctgagaagggcaaggcttacaccaactacttcggacggtgcaatgtggccgagcacgaaaagctgatcctgctggcccagctgaagcccgagaaggatagcgacgaagccgtgacatatagcctgggaaagtttgggcagagggccctggatttctacagcattcatgtgaccaaggagtccacccaccccgtgaagcccctggcccagatcgccggaaacagatacgcctccggacctgtgggaaaggccctgagcgacgcatgtatgggcacaatcgcctccttcctgtctaagtaccaggacatcatcatcgaacaccagaaggtggtgaagggcaaccagaagagactggagagcctgcgggagctggccggcaaggaaaacctggaataccctagcgtgaccctgccacctcagcctcacaccaaggagggcgttgatgcctacaacgaagtgatcgcccgggtgcgaatgtgggtgaacctgaacctgtggcagaagctgaagctaagcagagatgatgccaagcctctgctgagactgaagggattcccttcctttcctctggtcgagagacaggccaacgaagtggactggtgggacatggtgtgtaacgtgaagaagctgatcaacgagaaaaaggaggatggcaaggtgttttggcagaatctggctggctacaagagacaggaagccctgagaccatacctgagcagcgaggaagatcggaagaagggaaagaaattcgctcggtaccagctgggcgacctgctgctgcacctggaaaagaagcacggcgaggactggggaaaggtgtacgacgaggcctgggagcggattgacaagaaagtggaaggcctgagcaagcacatcaagctggaagaggaacggagaagcgaggacgcccagagcaaggccgccctgaccgactggctgcgggctaaggccagcttcgtgatcgagggcctgaaggaggccgacaaggacgagttctgcagatgcgagctgaagctgcagaagtggtacggggacctgcggggaaagcccttcgccatcgaagccgagaacagcatcctggacatcagcggcttcagcaagcagtacaactgtgccttcatctggcagaaggacggcgtgaagaagctgaacctgtacctgatcatcaactacttcaagggcggcaagctgcggttcaagaagatcaaacctgaagccttcgaagccaacagattctacaccgtgatcaacaaaaagagcggcgagatcgtgcccatggaggtgaacttcaacttcgacgaccccaacctgatcatcctgcctctggcctttggcaagagacagggcagagaattcatctggaacgacctgctgtccctggaaaccggcagcctgaagctggccaacggaagagtgatcgagaagacactgtacaacagaagaacccggcaggatgagcctgccctgttcgtggccctgaccttcgagcggcgggaggtcctggactcctccaatatcaaaccaatgaacctgatcggcgtggcaagaggcgaaaacatccccgccgtgatcgccctgaccgaccccgagggctgcccactgagccggtttaaggatagcctgggaaacccaacccacatcctgagaatcggcgagagctataaggagaagcagcggaccatccaggccaagaaggaggtggagcagcggagagccggcggctacagccggaagtacgccagcaaagccaagaatctggcagacgatatggtgagaaacaccgctagagatctgctgtactacgccgtgacccaggatgccatgctgatcttcgccaacctgagccggggcttcggccggcagggcaagcggaccttcatggccgagagacagtacacacggatggaggactggctgaccgccaagctggcctacgagggcctgagcaagacctacctgtccaagacactggcccagtacacctccaagacatgcagcaactgtgggtttaccatcaccagcgccgactacgacagggtgctggagaagctgaagaagacagcaacaggctggatgaccacaattaacggcaaggagctgaaggtggagggccagattacctactacaacagatacaagagacagaacgtagtcaaggacctgtccgtcgagctggatagactgagcgaagaatctgtgaacaacgacatctcctcctggacaaagggcagaagcggagaagctctgagcctcctgaagaaaagattctcccatagacccgtgcaggagaagttcgtgtgcctgaactgcggcttcgagacacacgcagccgagcaagccgccctgaacatcgccagatcctggctgttcctgcggagccaggagtacaagaaataccagacaaacaagacaaccggcaacaccgataagagagccttcgtcgagacctggcagtccttttaccggaagaagcttaaggaggtgtggaaacctgccgtgcggtctggcggatctggcggaggctccaccagccccaagaaaaagagaaaagtctaagctgccttctgcggggcttgccttctggccatgcccttcttctctcccttgcacctgtacctcttggtctttgaataaagcctgagtaggaaggctagcaaaaaaaaaaaaaaaaaaaaaaaaaaaaaaaaaaaaaaaaaaaaaaaaaaaaaaaaaaaaaaaaaaaaaaaaaaaaaaaagcccagccggctccccaacctctaccgaggagggcacctctgagtccgccacccccgagagcggccctggcacctccaccgagcccagcgagggcagcgcacccggcagccctgccggcagccccacctccacagaggagggaaccagcaccgagcccagcgaaggcagcgccccaggcaccagcaccgagcctagtgagcaggagattaaacggatcaacaagatcagaagaagacttgtgaaagacagcaacaccaagaaggccggcaagacaggccccatgaaaaccctgctggttagagtgatgacacccgatctgagagagcggctggaaaacctgagaaagaagcctgaaaatatcccccagcccatcagcaatacatctagagccaacctgaataagctgctgaccgattacaccgaaatgaagaaggcgatcctgcatgtgtactgggaagagttccagaaggaccctgtgggcctgatgagccgggtggcccagcctgccagcaagaagatcgatcagaacaagctgaaacctgagatggacgagaagggcaacctgaccaccgccggctttgcctgctctcagtgtggccagcccctgttcgtgtacaagctggagcaggtgtctgagaagggcaaggcttacaccaactacttcggacggtgcaatgtggccgagcacgaaaagctgatcctgctggcccagctgaagcccgagaaggatagcgacgaagccgtgacatatagcctgggaaagtttgggcagagggccctggatttctacagcattcatgtgaccaaggagtccacccaccccgtgaagcccctggcccagatcgccggaaacagatacgcctccggacctgtgggaaaggccctgagcgacgcatgtatgggcacaatcgcctccttcctgtctaagtaccaggacatcatcatcgaacaccagaaggtggtgaagggcaaccagaagagactggagagcctgcgggagctggccggcaaggaaaacctggaataccctagcgtgaccctgccacctcagcctcacaccaaggagggcgttgatgcctacaacgaagtgatcgcccgggtgcgaatgtgggtgaacctgaacctgtggcagaagctgaagctaagcagagatgatgccaagcctctgctgagactgaagggattcccttcctttcctctggtcgagagacaggccaacgaagtggactggtgggacatggtgtgtaacgtgaagaagctgatcaacgagaaaaaggaggatggcaaggtgttttggcagaatctggctggctacaagagacaggaagccctgagaccatacctgagcagcgaggaagatcggaagaagggaaagaaattcgctcggtaccagctgggcgacctgctgctgcacctggaaaagaagcacggcgaggactggggaaaggtgtacgacgaggcctgggagcggattgacaagaaagtggaaggcctgagcaagcacatcaagctggaagaggaacggagaagcgaggacgcccagagcaaggccgccctgaccgactggctgcgggctaaggccagcttcgtgatcgagggcctgaaggaggccgacaaggacgagttctgcagatgcgagctgaagctgcagaagtggtacggggacctgcggggaaagcccttcgccatcgaagccgagaacagcatcctggacatcagcggcttcagcaagcagtacaactgtgccttcatctggcagaaggacggcgtgaagaagctgaacctgtacctgatcatcaactacttcaagggcggcaagctgcggttcaagaagatcaaacctgaagccttcgaagccaacagattctacaccgtgatcaacaaaaagagcggcgagatcgtgcccatggaggtgaacttcaacttcgacgaccccaacctgatcatcctgcctctggcctttggcaagagacagggcagagaattcatctggaacgacctgctgtccctggaaaccggcagcctgaagctggccaacggaagagtgatcgagaagacactgtacaacagaagaacccggcaggatgagcctgccctgttcgtggccctgaccttcgagcggcgggaggtcctggactcctccaatatcaaaccaatgaacctgatcggcgtggcaagaggcgaaaacatccccgccgtgatcgccctgaccgaccccgagggctgcccactgagccggtttaaggatagcctgggaaacccaacccacatcctgagaatcggcgagagctataaggagaagcagcggaccatccaggccaagaaggaggtggagcagcggagagccggcggctacagccggaagtacgccagcaaagccaagaatctggcagacgatatggtgagaaacaccgctagagatctgctgtactacgccgtgacccaggatgccatgctgatcttcgccaacctgagccggggcttcggccggcagggcaagcggaccttcatggccgagagacagtacacacggatggaggactggctgaccgccaagctggcctacgagggcctgagcaagacctacctgtccaagacactggcccagtacacctccaagacatgcagcaactgtgggtttaccatcaccagcgccgactacgacagggtgctggagaagctgaagaagacagcaacaggctggatgaccacaattaacggcaaggagctgaaggtggagggccagattacctactacaacagatacaagagacagaacgtagtcaaggacctgtccgtcgagctggatagactgagcgaagaatctgtgaacaacgacatctcctcctggacaaagggcagaagcggagaagctctgagcctcctgaagaaaagattctcccatagacccgtgcaggagaagttcgtgtgcctgaactgcggcttcgagacacacgcagccgagcaagccgccctgaacatcgccagatcctggctgttcctgcggagccaggagtacaagaaataccagacaaacaagacaaccggcaacaccgataagagagccttcgtcgagacctggcagtccttttaccggaagaagcttaaggaggtgtggaaacctgccgtgcggtctggcggatctggcggaggctccaccagccccaagaaaaagagaaaagtctaagctgccttctgcggggcttgccttctggccatgcccttcttctctcccttgcacctgtacctcttggtctttgaataaagcctgagtaggaaggctagcaaaaaaaaaaaaaaaaaaaaaaaaaaaaaaaaaaaaaaaaaaaaaaaaaaaaaaaaaaaaaaaaaaaaaaaaaaaaaaaa

SEQ ID NO: 10273 - RNA, 8787 nt, synthetic construct
  source 1..8787: mol_type = other RNA
aggaaataagagagaaaagaagagtaagaagaaatataagagccaccatggcccctaagaagaagcgtaaagtgagccggatgaaccacgaccaggagttcgacccccctaaggtgtaccctcccgtccccgccgagaagagaaagcccatccgggtcctgagcctgttcgatggcatcgccaccggtctgctggtgctgaaggacctgggcatccaggtggataggtacattgcctccgaggtgtgcgaggactccatcaccgtgggaatggtgcgtcatcagggcaagatcatgtacgtgggcgacgtgcggagcgtgacacagaagcatatccaggagtggggccctttcgacctggtgatcggcggcagcccttgcaatgacctgagcatcgtgaacccagcccggaagggcctgtacgagggaaccggcagactgttcttcgagttttacagactgctgcacgacgcccggcctaaggaaggcgacgaccggcccttcttttggctgttcgagaatgtggtggccatgggagtcagcgacaagcgggatattagccggttcctggagagcaaccccgtgatgatcgatgccaaggaagtgagcgccgcccaccgggccagatacttctggggcaatctgcctggcatgaacagacccctggccagcaccgtgaacgacaagctggagctgcaggagtgcctggagcacggccggatcgccaagttcagcaaggtgagaaccatcaccacccgaagcaacagcatcaaacaaggcaaggaccagcactttcctgtgttcatgaacgagaaggaggacatcctgtggtgtaccgagatggagagagtgttcgggttcccagtccactacacagatgtcagcaacatgtctagactggccagacagagactgctgggaagaagctggtccgtccctgtgatcagacacctgttcgcccctctgaaggagtacttcgcctgcgtgagcagcggcaacagcaacgccaacagccggggccccagcttctctagcggcctggtgccactgtccctgagagggagccacatgggccccatggagatctacaaaaccgtgagcgcctggaagcggcagcctgtgcgcgtgctgagcctgtttcggaatatcgataaagtcctgaaaagcctgggattcctggagagcggctctggctccggcggtggcaccctgaagtacgtggaggatgtgacaaacgtggtcagacgggatgtggagaagtggggccccttcgatctggtgtacggcagcacccaacccctgggcagctcttgtgaccggtgccctggctggtacatgtttcagttccaccggatcctgcagtacgccctgccgagacaggagtcccagcggccattcttttggattttcatggacaacttgctgctgaccgaggatgaccaggaaactaccactcggttcctgcagaccgaagccgtgaccctgcaggacgtgagaggccgggactaccagaacgccatgcgggtgtggtccaacatccctggactgaaaagcaagcacgcacctctgacccctaaagaagaggagtacctgcaggcccaggtgcggagcagaagcaagctggacgcccctaaggtggatctgctggtgaagaattgcctcctgcccctgagagagtacttcaagtatttcagccagaatagtctgcccctgggaggcagcggcggcggcggcccctggaccctgctgaccttcagggacgtggccatcgagttcagccaggaggagtggggctgcctgaaccacagccagagggagctgtacagggacgtgatgctggagacctacggccacctgctgttcctgggcctggtgagcaagcccgacctggtgatcctgctggagcagaagaaggagctgtggggcgtgaagaggaaggagaccgtggccagccaccccggcaggtgggagatcggcggcccaagcagcggcgcccctcctcccagcggcggcaggcggcccaagcagcggcgcccctcctcccagcggcggcagcccagccggctccccaacctctaccgaggagggcacctctgagtccgccacccccgagagcggccctggcacctccaccgagcccagcgagggcagcgcacccggcagccctgccggcagccccacctccacagaggagggaaccagcaccgagcccagcgaaggcagcgccccaggcaccagcaccgagcctagtgagcaggagattaaacggatcaacaagatcagaagaagacttgtgaaagacagcaacaccaagaaggccggcaagacaggccccatgaaaaccctgctggttagagtgatgacacccgatctgagagagcggctggaaaacctgagaaagaagcctgaaaatatcccccagcccatcagcaatacatctagagccaacctgaataagctgctgaccgattacaccgaaatgaagaaggcgatcctgcatgtgtactgggaagagttccagaaggaccctgtgggcctgatgagccgggtggcccagcctgccagcaagaagatcgatcagaacaagctgaaacctgagatggacgagaagggcaacctgaccaccgccggctttgcctgctctcagtgtggccagcccctgttcgtgtacaagctggagcaggtgtctgagaagggcaaggcttacaccaactacttcggacggtgcaatgtggccgagcacgaaaagctgatcctgctggcccagctgaagcccgagaaggatagcgacgaagccgtgacatatagcctgggaaagtttgggcagagggccctggatttctacagcattcatgtgaccaaggagtccacccaccccgtgaagcccctggcccagatcgccggaaacagatacgcctccggacctgtgggaaaggccctgagcgacgcatgtatgggcacaatcgcctccttcctgtctaagtaccaggacatcatcatcgaacaccagaaggtggtgaagggcaaccagaagagactggagagcctgcgggagctggccggcaaggaaaacctggaataccctagcgtgaccctgccacctcagcctcacaccaaggagggcgttgatgcctacaacgaagtgatcgcccgggtgcgaatgtgggtgaacctgaacctgtggcagaagctgaagctaagcagagatgatgccaagcctctgctgagactgaagggattcccttcctttcctctggtcgagagacaggccaacgaagtggactggtgggacatggtgtgtaacgtgaagaagctgatcaacgagaaaaaggaggatggcaaggtgttttggcagaatctggctggctacaagagacaggaagccctgagaccatacctgagcagcgaggaagatcggaagaagggaaagaaattcgctcggtaccagctgggcgacctgctgctgcacctggaaaagaagcacggcgaggactggggaaaggtgtacgacgaggcctgggagcggattgacaagaaagtggaaggcctgagcaagcacatcaagctggaagaggaacggagaagcgaggacgcccagagcaaggccgccctgaccgactggctgcgggctaaggccagcttcgtgatcgagggcctgaaggaggccgacaaggacgagttctgcagatgcgagctgaagctgcagaagtggtacggggacctgcggggaaagcccttcgccatcgaagccgagaacagcatcctggacatcagcggcttcagcaagcagtacaactgtgccttcatctggcagaaggacggcgtgaagaagctgaacctgtacctgatcatcaactacttcaagggcggcaagctgcggttcaagaagatcaaacctgaagccttcgaagccaacagattctacaccgtgatcaacaaaaagagcggcgagatcgtgcccatggaggtgaacttcaacttcgacgaccccaacctgatcatcctgcctctggcctttggcaagagacagggcagagaattcatctggaacgacctgctgtccctggaaaccggcagcctgaagctggccaacggaagagtgatcgagaagacactgtacaacagaagaacccggcaggatgagcctgccctgttcgtggccctgaccttcgagcggcgggaggtcctggactcctccaatatcaaaccaatgaacctgatcggcgtggcaagaggcgaaaacatccccgccgtgatcgccctgaccgaccccgagggctgcccactgagccggtttaaggatagcctgggaaacccaacccacatcctgagaatcggcgagagctataaggagaagcagcggaccatccaggccaagaaggaggtggagcagcggagagccggcggctacagccggaagtacgccagcaaagccaagaatctggcagacgatatggtgagaaacaccgctagagatctgctgtactacgccgtgacccaggatgccatgctgatcttcgccaacctgagccggggcttcggccggcagggcaagcggaccttcatggccgagagacagtacacacggatggaggactggctgaccgccaagctggcctacgagggcctgagcaagacctacctgtccaagacactggcccagtacacctccaagacatgcagcaactgtgggtttaccatcaccagcgccgactacgacagggtgctggagaagctgaagaagacagcaacaggctggatgaccacaattaacggcaaggagctgaaggtggagggccagattacctactacaacagatacaagagacagaacgtagtcaaggacctgtccgtcgagctggatagactgagcgaagaatctgtgaacaacgacatctcctcctggacaaagggcagaagcggagaagctctgagcctcctgaagaaaagattctcccatagacccgtgcaggagaagttcgtgtgcctgaactgcggcttcgagacacacgcagccgagcaagccgccctgaacatcgccagatcctggctgttcctgcggagccaggagtacaagaaataccagacaaacaagacaaccggcaacaccgataagagagccttcgtcgagacctggcagtccttttaccggaagaagcttaaggaggtgtggaaacctgccgtgcggtctggcggatctggcggaggctccaccagccccaagaaaaagagaaaagtctaagctgccttctgcggggcttgccttctggccatgcccttcttctctcccttgcacctgtacctcttggtctttgaataaagcctgagtaggaaggctagcaaaaaaaaaaaaaaaaaaaaaaaaaaaaaaaaaaaaaaaaaaaaaaaaaaaaaaaaaaaaaaaaaaaaaaaaaaaaaaaagcccagccggctccccaacctctaccgaggagggcacctctgagtccgccacccccgagagcggccctggcacctccaccgagcccagcgagggcagcgcacccggcagccctgccggcagccccacctccacagaggagggaaccagcaccgagcccagcgaaggcagcgccccaggcaccagcaccgagcctagtgagcaggagattaaacggatcaacaagatcagaagaagacttgtgaaagacagcaacaccaagaaggccggcaagacaggccccatgaaaaccctgctggttagagtgatgacacccgatctgagagagcggctggaaaacctgagaaagaagcctgaaaatatcccccagcccatcagcaatacatctagagccaacctgaataagctgctgaccgattacaccgaaatgaagaaggcgatcctgcatgtgtactgggaagagttccagaaggaccctgtgggcctgatgagccgggtggcccagcctgccagcaagaagatcgatcagaacaagctgaaacctgagatggacgagaagggcaacctgaccaccgccggctttgcctgctctcagtgtggccagcccctgttcgtgtacaagctggagcaggtgtctgagaagggcaaggcttacaccaactacttcggacggtgcaatgtggccgagcacgaaaagctgatcctgctggcccagctgaagcccgagaaggatagcgacgaagccgtgacatatagcctgggaaagtttgggcagagggccctggatttctacagcattcatgtgaccaaggagtccacccaccccgtgaagcccctggcccagatcgccggaaacagatacgcctccggacctgtgggaaaggccctgagcgacgcatgtatgggcacaatcgcctccttcctgtctaagtaccaggacatcatcatcgaacaccagaaggtggtgaagggcaaccagaagagactggagagcctgcgggagctggccggcaaggaaaacctggaataccctagcgtgaccctgccacctcagcctcacaccaaggagggcgttgatgcctacaacgaagtgatcgcccgggtgcgaatgtgggtgaacctgaacctgtggcagaagctgaagctaagcagagatgatgccaagcctctgctgagactgaagggattcccttcctttcctctggtcgagagacaggccaacgaagtggactggtgggacatggtgtgtaacgtgaagaagctgatcaacgagaaaaaggaggatggcaaggtgttttggcagaatctggctggctacaagagacaggaagccctgagaccatacctgagcagcgaggaagatcggaagaagggaaagaaattcgctcggtaccagctgggcgacctgctgctgcacctggaaaagaagcacggcgaggactggggaaaggtgtacgacgaggcctgggagcggattgacaagaaagtggaaggcctgagcaagcacatcaagctggaagaggaacggagaagcgaggacgcccagagcaaggccgccctgaccgactggctgcgggctaaggccagcttcgtgatcgagggcctgaaggaggccgacaaggacgagttctgcagatgcgagctgaagctgcagaagtggtacggggacctgcggggaaagcccttcgccatcgaagccgagaacagcatcctggacatcagcggcttcagcaagcagtacaactgtgccttcatctggcagaaggacggcgtgaagaagctgaacctgtacctgatcatcaactacttcaagggcggcaagctgcggttcaagaagatcaaacctgaagccttcgaagccaacagattctacaccgtgatcaacaaaaagagcggcgagatcgtgcccatggaggtgaacttcaacttcgacgaccccaacctgatcatcctgcctctggcctttggcaagagacagggcagagaattcatctggaacgacctgctgtccctggaaaccggcagcctgaagctggccaacggaagagtgatcgagaagacactgtacaacagaagaacccggcaggatgagcctgccctgttcgtggccctgaccttcgagcggcgggaggtcctggactcctccaatatcaaaccaatgaacctgatcggcgtggcaagaggcgaaaacatccccgccgtgatcgccctgaccgaccccgagggctgcccactgagccggtttaaggatagcctgggaaacccaacccacatcctgagaatcggcgagagctataaggagaagcagcggaccatccaggccaagaaggaggtggagcagcggagagccggcggctacagccggaagtacgccagcaaagccaagaatctggcagacgatatggtgagaaacaccgctagagatctgctgtactacgccgtgacccaggatgccatgctgatcttcgccaacctgagccggggcttcggccggcagggcaagcggaccttcatggccgagagacagtacacacggatggaggactggctgaccgccaagctggcctacgagggcctgagcaagacctacctgtccaagacactggcccagtacacctccaagacatgcagcaactgtgggtttaccatcaccagcgccgactacgacagggtgctggagaagctgaagaagacagcaacaggctggatgaccacaattaacggcaaggagctgaaggtggagggccagattacctactacaacagatacaagagacagaacgtagtcaaggacctgtccgtcgagctggatagactgagcgaagaatctgtgaacaacgacatctcctcctggacaaagggcagaagcggagaagctctgagcctcctgaagaaaagattctcccatagacccgtgcaggagaagttcgtgtgcctgaactgcggcttcgagacacacgcagccgagcaagccgccctgaacatcgccagatcctggctgttcctgcggagccaggagtacaagaaataccagacaaacaagacaaccggcaacaccgataagagagccttcgtcgagacctggcagtccttttaccggaagaagcttaaggaggtgtggaaacctgccgtgcggtctggcggatctggcggaggctccaccagccccaagaaaaagagaaaagtctaagctgccttctgcggggcttgccttctggccatgcccttcttctctcccttgcacctgtacctcttggtctttgaataaagcctgagtaggaaggctagcaaaaaaaaaaaaaaaaaaaaaaaaaaaaaaaaaaaaaaaaaaaaaaaaaaaaaaaaaaaaaaaaaaaaaaaaaaaaaaaa

SEQ ID NO: 10274 - RNA, 8787 nt, synthetic construct
  source 1..8787: mol_type = other RNA
aggaaataagagagaaaagaagagtaagaagaaatataagagccaccatggcccctaagaagaagcgtaaagtgagccggatgaaccacgaccaggagttcgacccccctaaggtgtaccctcccgtccccgccgagaagagaaagcccatccgggtcctgagcctgttcgatggcatcgccaccggtctgctggtgctgaaggacctgggcatccaggtggataggtacattgcctccgaggtgtgcgaggactccatcaccgtgggaatggtgcgtcatcagggcaagatcatgtacgtgggcgacgtgcggagcgtgacacagaagcatatccaggagtggggccctttcgacctggtgatcggcggcagcccttgcaatgacctgagcatcgtgaacccagcccggaagggcctgtacgagggaaccggcagactgttcttcgagttttacagactgctgcacgacgcccggcctaaggaaggcgacgaccggcccttcttttggctgttcgagaatgtggtggccatgggagtcagcgacaagcgggatattagccggttcctggagagcaaccccgtgatgatcgatgccaaggaagtgagcgccgcccaccgggccagatacttctggggcaatctgcctggcatgaacagacccctggccagcaccgtgaacgacaagctggagctgcaggagtgcctggagcacggccggatcgccaagttcagcaaggtgagaaccatcaccacccgaagcaacagcatcaaacaaggcaaggaccagcactttcctgtgttcatgaacgagaaggaggacatcctgtggtgtaccgagatggagagagtgttcgggttcccagtccactacacagatgtcagcaacatgtctagactggccagacagagactgctgggaagaagctggtccgtccctgtgatcagacacctgttcgcccctctgaaggagtacttcgcctgcgtgagcagcggcaacagcaacgccaacagccggggccccagcttctctagcggcctggtgccactgtccctgagagggagccacatgggccccatggagatctacaaaaccgtgagcgcctggaagcggcagcctgtgcgcgtgctgagcctgtttcggaatatcgataaagtcctgaaaagcctgggattcctggagagcggctctggctccggcggtggcaccctgaagtacgtggaggatgtgacaaacgtggtcagacgggatgtggagaagtggggccccttcgatctggtgtacggcagcacccaacccctgggcagctcttgtgaccggtgccctggctggtacatgtttcagttccaccggatcctgcagtacgccctgccgagacaggagtcccagcggccattcttttggattttcatggacaacttgctgctgaccgaggatgaccaggaaactaccactcggttcctgcagaccgaagccgtgaccctgcaggacgtgagaggccgggactaccagaacgccatgcgggtgtggtccaacatccctggactgaaaagcaagcacgcacctctgacccctaaagaagaggagtacctgcaggcccaggtgcggagcagaagcaagctggacgcccctaaggtggatctgctggtgaagaattgcctcctgcccctgagagagtacttcaagtatttcagccagaatagtctgcccctgggaggcagcggcggcggcatggaggacctgctgagcttcaccgacgtggccatcgacttcagcgccgacgagtgcgagtgcctggacagcgcccagtggaacctgtacaaggaggtgatgctggagaactacagcaacctggtgttcctgggcctggccttcagcaagccccacctggtgaccttcctggagcagagcagcgacccctggagcgtgaagaggaaggccagcgccgccatcagcctgggcagcaagccccacggcggcccaagcagcggcgcccctcctcccagcggcggcaggcggcccaagcagcggcgcccctcctcccagcggcggcagcccagccggctccccaacctctaccgaggagggcacctctgagtccgccacccccgagagcggccctggcacctccaccgagcccagcgagggcagcgcacccggcagccctgccggcagccccacctccacagaggagggaaccagcaccgagcccagcgaaggcagcgccccaggcaccagcaccgagcctagtgagcaggagattaaacggatcaacaagatcagaagaagacttgtgaaagacagcaacaccaagaaggccggcaagacaggccccatgaaaaccctgctggttagagtgatgacacccgatctgagagagcggctggaaaacctgagaaagaagcctgaaaatatcccccagcccatcagcaatacatctagagccaacctgaataagctgctgaccgattacaccgaaatgaagaaggcgatcctgcatgtgtactgggaagagttccagaaggaccctgtgggcctgatgagccgggtggcccagcctgccagcaagaagatcgatcagaacaagctgaaacctgagatggacgagaagggcaacctgaccaccgccggctttgcctgctctcagtgtggccagcccctgttcgtgtacaagctggagcaggtgtctgagaagggcaaggcttacaccaactacttcggacggtgcaatgtggccgagcacgaaaagctgatcctgctggcccagctgaagcccgagaaggatagcgacgaagccgtgacatatagcctgggaaagtttgggcagagggccctggatttctacagcattcatgtgaccaaggagtccacccaccccgtgaagcccctggcccagatcgccggaaacagatacgcctccggacctgtgggaaaggccctgagcgacgcatgtatgggcacaatcgcctccttcctgtctaagtaccaggacatcatcatcgaacaccagaaggtggtgaagggcaaccagaagagactggagagcctgcgggagctggccggcaaggaaaacctggaataccctagcgtgaccctgccacctcagcctcacaccaaggagggcgttgatgcctacaacgaagtgatcgcccgggtgcgaatgtgggtgaacctgaacctgtggcagaagctgaagctaagcagagatgatgccaagcctctgctgagactgaagggattcccttcctttcctctggtcgagagacaggccaacgaagtggactggtgggacatggtgtgtaacgtgaagaagctgatcaacgagaaaaaggaggatggcaaggtgttttggcagaatctggctggctacaagagacaggaagccctgagaccatacctgagcagcgaggaagatcggaagaagggaaagaaattcgctcggtaccagctgggcgacctgctgctgcacctggaaaagaagcacggcgaggactggggaaaggtgtacgacgaggcctgggagcggattgacaagaaagtggaaggcctgagcaagcacatcaagctggaagaggaacggagaagcgaggacgcccagagcaaggccgccctgaccgactggctgcgggctaaggccagcttcgtgatcgagggcctgaaggaggccgacaaggacgagttctgcagatgcgagctgaagctgcagaagtggtacggggacctgcggggaaagcccttcgccatcgaagccgagaacagcatcctggacatcagcggcttcagcaagcagtacaactgtgccttcatctggcagaaggacggcgtgaagaagctgaacctgtacctgatcatcaactacttcaagggcggcaagctgcggttcaagaagatcaaacctgaagccttcgaagccaacagattctacaccgtgatcaacaaaaagagcggcgagatcgtgcccatggaggtgaacttcaacttcgacgaccccaacctgatcatcctgcctctggcctttggcaagagacagggcagagaattcatctggaacgacctgctgtccctggaaaccggcagcctgaagctggccaacggaagagtgatcgagaagacactgtacaacagaagaacccggcaggatgagcctgccctgttcgtggccctgaccttcgagcggcgggaggtcctggactcctccaatatcaaaccaatgaacctgatcggcgtggcaagaggcgaaaacatccccgccgtgatcgccctgaccgaccccgagggctgcccactgagccggtttaaggatagcctgggaaacccaacccacatcctgagaatcggcgagagctataaggagaagcagcggaccatccaggccaagaaggaggtggagcagcggagagccggcggctacagccggaagtacgccagcaaagccaagaatctggcagacgatatggtgagaaacaccgctagagatctgctgtactacgccgtgacccaggatgccatgctgatcttcgccaacctgagccggggcttcggccggcagggcaagcggaccttcatggccgagagacagtacacacggatggaggactggctgaccgccaagctggcctacgagggcctgagcaagacctacctgtccaagacactggcccagtacacctccaagacatgcagcaactgtgggtttaccatcaccagcgccgactacgacagggtgctggagaagctgaagaagacagcaacaggctggatgaccacaattaacggcaaggagctgaaggtggagggccagattacctactacaacagatacaagagacagaacgtagtcaaggacctgtccgtcgagctggatagactgagcgaagaatctgtgaacaacgacatctcctcctggacaaagggcagaagcggagaagctctgagcctcctgaagaaaagattctcccatagacccgtgcaggagaagttcgtgtgcctgaactgcggcttcgagacacacgcagccgagcaagccgccctgaacatcgccagatcctggctgttcctgcggagccaggagtacaagaaataccagacaaacaagacaaccggcaacaccgataagagagccttcgtcgagacctggcagtccttttaccggaagaagcttaaggaggtgtggaaacctgccgtgcggtctggcggatctggcggaggctccaccagccccaagaaaaagagaaaagtctaagctgccttctgcggggcttgccttctggccatgcccttcttctctcccttgcacctgtacctcttggtctttgaataaagcctgagtaggaaggctagcaaaaaaaaaaaaaaaaaaaaaaaaaaaaaaaaaaaaaaaaaaaaaaaaaaaaaaaaaaaaaaaaaaaaaaaaaaaaaaaagcccagccggctccccaacctctaccgaggagggcacctctgagtccgccacccccgagagcggccctggcacctccaccgagcccagcgagggcagcgcacccggcagccctgccggcagccccacctccacagaggagggaaccagcaccgagcccagcgaaggcagcgccccaggcaccagcaccgagcctagtgagcaggagattaaacggatcaacaagatcagaagaagacttgtgaaagacagcaacaccaagaaggccggcaagacaggccccatgaaaaccctgctggttagagtgatgacacccgatctgagagagcggctggaaaacctgagaaagaagcctgaaaatatcccccagcccatcagcaatacatctagagccaacctgaataagctgctgaccgattacaccgaaatgaagaaggcgatcctgcatgtgtactgggaagagttccagaaggaccctgtgggcctgatgagccgggtggcccagcctgccagcaagaagatcgatcagaacaagctgaaacctgagatggacgagaagggcaacctgaccaccgccggctttgcctgctctcagtgtggccagcccctgttcgtgtacaagctggagcaggtgtctgagaagggcaaggcttacaccaactacttcggacggtgcaatgtggccgagcacgaaaagctgatcctgctggcccagctgaagcccgagaaggatagcgacgaagccgtgacatatagcctgggaaagtttgggcagagggccctggatttctacagcattcatgtgaccaaggagtccacccaccccgtgaagcccctggcccagatcgccggaaacagatacgcctccggacctgtgggaaaggccctgagcgacgcatgtatgggcacaatcgcctccttcctgtctaagtaccaggacatcatcatcgaacaccagaaggtggtgaagggcaaccagaagagactggagagcctgcgggagctggccggcaaggaaaacctggaataccctagcgtgaccctgccacctcagcctcacaccaaggagggcgttgatgcctacaacgaagtgatcgcccgggtgcgaatgtgggtgaacctgaacctgtggcagaagctgaagctaagcagagatgatgccaagcctctgctgagactgaagggattcccttcctttcctctggtcgagagacaggccaacgaagtggactggtgggacatggtgtgtaacgtgaagaagctgatcaacgagaaaaaggaggatggcaaggtgttttggcagaatctggctggctacaagagacaggaagccctgagaccatacctgagcagcgaggaagatcggaagaagggaaagaaattcgctcggtaccagctgggcgacctgctgctgcacctggaaaagaagcacggcgaggactggggaaaggtgtacgacgaggcctgggagcggattgacaagaaagtggaaggcctgagcaagcacatcaagctggaagaggaacggagaagcgaggacgcccagagcaaggccgccctgaccgactggctgcgggctaaggccagcttcgtgatcgagggcctgaaggaggccgacaaggacgagttctgcagatgcgagctgaagctgcagaagtggtacggggacctgcggggaaagcccttcgccatcgaagccgagaacagcatcctggacatcagcggcttcagcaagcagtacaactgtgccttcatctggcagaaggacggcgtgaagaagctgaacctgtacctgatcatcaactacttcaagggcggcaagctgcggttcaagaagatcaaacctgaagccttcgaagccaacagattctacaccgtgatcaacaaaaagagcggcgagatcgtgcccatggaggtgaacttcaacttcgacgaccccaacctgatcatcctgcctctggcctttggcaagagacagggcagagaattcatctggaacgacctgctgtccctggaaaccggcagcctgaagctggccaacggaagagtgatcgagaagacactgtacaacagaagaacccggcaggatgagcctgccctgttcgtggccctgaccttcgagcggcgggaggtcctggactcctccaatatcaaaccaatgaacctgatcggcgtggcaagaggcgaaaacatccccgccgtgatcgccctgaccgaccccgagggctgcccactgagccggtttaaggatagcctgggaaacccaacccacatcctgagaatcggcgagagctataaggagaagcagcggaccatccaggccaagaaggaggtggagcagcggagagccggcggctacagccggaagtacgccagcaaagccaagaatctggcagacgatatggtgagaaacaccgctagagatctgctgtactacgccgtgacccaggatgccatgctgatcttcgccaacctgagccggggcttcggccggcagggcaagcggaccttcatggccgagagacagtacacacggatggaggactggctgaccgccaagctggcctacgagggcctgagcaagacctacctgtccaagacactggcccagtacacctccaagacatgcagcaactgtgggtttaccatcaccagcgccgactacgacagggtgctggagaagctgaagaagacagcaacaggctggatgaccacaattaacggcaaggagctgaaggtggagggccagattacctactacaacagatacaagagacagaacgtagtcaaggacctgtccgtcgagctggatagactgagcgaagaatctgtgaacaacgacatctcctcctggacaaagggcagaagcggagaagctctgagcctcctgaagaaaagattctcccatagacccgtgcaggagaagttcgtgtgcctgaactgcggcttcgagacacacgcagccgagcaagccgccctgaacatcgccagatcctggctgttcctgcggagccaggagtacaagaaataccagacaaacaagacaaccggcaacaccgataagagagccttcgtcgagacctggcagtccttttaccggaagaagcttaaggaggtgtggaaacctgccgtgcggtctggcggatctggcggaggctccaccagccccaagaaaaagagaaaagtctaagctgccttctgcggggcttgccttctggccatgcccttcttctctcccttgcacctgtacctcttggtctttgaataaagcctgagtaggaaggctagcaaaaaaaaaaaaaaaaaaaaaaaaaaaaaaaaaaaaaaaaaaaaaaaaaaaaaaaaaaaaaaaaaaaaaaaaaaaaaaaa

SEQ ID NO: 10275 - RNA, 8787 nt, synthetic construct
  source 1..8787: mol_type = other RNA
aggaaataagagagaaaagaagagtaagaagaaatataagagccaccatggcccctaagaagaagcgtaaagtgagccggatgaaccacgaccaggagttcgacccccctaaggtgtaccctcccgtccccgccgagaagagaaagcccatccgggtcctgagcctgttcgatggcatcgccaccggtctgctggtgctgaaggacctgggcatccaggtggataggtacattgcctccgaggtgtgcgaggactccatcaccgtgggaatggtgcgtcatcagggcaagatcatgtacgtgggcgacgtgcggagcgtgacacagaagcatatccaggagtggggccctttcgacctggtgatcggcggcagcccttgcaatgacctgagcatcgtgaacccagcccggaagggcctgtacgagggaaccggcagactgttcttcgagttttacagactgctgcacgacgcccggcctaaggaaggcgacgaccggcccttcttttggctgttcgagaatgtggtggccatgggagtcagcgacaagcgggatattagccggttcctggagagcaaccccgtgatgatcgatgccaaggaagtgagcgccgcccaccgggccagatacttctggggcaatctgcctggcatgaacagacccctggccagcaccgtgaacgacaagctggagctgcaggagtgcctggagcacggccggatcgccaagttcagcaaggtgagaaccatcaccacccgaagcaacagcatcaaacaaggcaaggaccagcactttcctgtgttcatgaacgagaaggaggacatcctgtggtgtaccgagatggagagagtgttcgggttcccagtccactacacagatgtcagcaacatgtctagactggccagacagagactgctgggaagaagctggtccgtccctgtgatcagacacctgttcgcccctctgaaggagtacttcgcctgcgtgagcagcggcaacagcaacgccaacagccggggccccagcttctctagcggcctggtgccactgtccctgagagggagccacatgggccccatggagatctacaaaaccgtgagcgcctggaagcggcagcctgtgcgcgtgctgagcctgtttcggaatatcgataaagtcctgaaaagcctgggattcctggagagcggctctggctccggcggtggcaccctgaagtacgtggaggatgtgacaaacgtggtcagacgggatgtggagaagtggggccccttcgatctggtgtacggcagcacccaacccctgggcagctcttgtgaccggtgccctggctggtacatgtttcagttccaccggatcctgcagtacgccctgccgagacaggagtcccagcggccattcttttggattttcatggacaacttgctgctgaccgaggatgaccaggaaactaccactcggttcctgcagaccgaagccgtgaccctgcaggacgtgagaggccgggactaccagaacgccatgcgggtgtggtccaacatccctggactgaaaagcaagcacgcacctctgacccctaaagaagaggagtacctgcaggcccaggtgcggagcagaagcaagctggacgcccctaaggtggatctgctggtgaagaattgcctcctgcccctgagagagtacttcaagtatttcagccagaatagtctgcccctgggaggcagcggcggcggcgcccacgacctggtggtgttcagggacgtgagcgtggacttcagccaggaggagtgggagtgcctgaacagctaccagaggaacctgtacagggacgtgatcctggagaactacagcaacctggtgagcctgggctgcagcatcagcaagcccgacgtgatcaccctgctggagcagggcaaggagccctggatggtggtgaggaacgagaagaggaggtggaacctggacctggagagcaagggcggcccaagcagcggcgcccctcctcccagcggcggcaggcggcccaagcagcggcgcccctcctcccagcggcggcagcccagccggctccccaacctctaccgaggagggcacctctgagtccgccacccccgagagcggccctggcacctccaccgagcccagcgagggcagcgcacccggcagccctgccggcagccccacctccacagaggagggaaccagcaccgagcccagcgaaggcagcgccccaggcaccagcaccgagcctagtgagcaggagattaaacggatcaacaagatcagaagaagacttgtgaaagacagcaacaccaagaaggccggcaagacaggccccatgaaaaccctgctggttagagtgatgacacccgatctgagagagcggctggaaaacctgagaaagaagcctgaaaatatcccccagcccatcagcaatacatctagagccaacctgaataagctgctgaccgattacaccgaaatgaagaaggcgatcctgcatgtgtactgggaagagttccagaaggaccctgtgggcctgatgagccgggtggcccagcctgccagcaagaagatcgatcagaacaagctgaaacctgagatggacgagaagggcaacctgaccaccgccggctttgcctgctctcagtgtggccagcccctgttcgtgtacaagctggagcaggtgtctgagaagggcaaggcttacaccaactacttcggacggtgcaatgtggccgagcacgaaaagctgatcctgctggcccagctgaagcccgagaaggatagcgacgaagccgtgacatatagcctgggaaagtttgggcagagggccctggatttctacagcattcatgtgaccaaggagtccacccaccccgtgaagcccctggcccagatcgccggaaacagatacgcctccggacctgtgggaaaggccctgagcgacgcatgtatgggcacaatcgcctccttcctgtctaagtaccaggacatcatcatcgaacaccagaaggtggtgaagggcaaccagaagagactggagagcctgcgggagctggccggcaaggaaaacctggaataccctagcgtgaccctgccacctcagcctcacaccaaggagggcgttgatgcctacaacgaagtgatcgcccgggtgcgaatgtgggtgaacctgaacctgtggcagaagctgaagctaagcagagatgatgccaagcctctgctgagactgaagggattcccttcctttcctctggtcgagagacaggccaacgaagtggactggtgggacatggtgtgtaacgtgaagaagctgatcaacgagaaaaaggaggatggcaaggtgttttggcagaatctggctggctacaagagacaggaagccctgagaccatacctgagcagcgaggaagatcggaagaagggaaagaaattcgctcggtaccagctgggcgacctgctgctgcacctggaaaagaagcacggcgaggactggggaaaggtgtacgacgaggcctgggagcggattgacaagaaagtggaaggcctgagcaagcacatcaagctggaagaggaacggagaagcgaggacgcccagagcaaggccgccctgaccgactggctgcgggctaaggccagcttcgtgatcgagggcctgaaggaggccgacaaggacgagttctgcagatgcgagctgaagctgcagaagtggtacggggacctgcggggaaagcccttcgccatcgaagccgagaacagcatcctggacatcagcggcttcagcaagcagtacaactgtgccttcatctggcagaaggacggcgtgaagaagctgaacctgtacctgatcatcaactacttcaagggcggcaagctgcggttcaagaagatcaaacctgaagccttcgaagccaacagattctacaccgtgatcaacaaaaagagcggcgagatcgtgcccatggaggtgaacttcaacttcgacgaccccaacctgatcatcctgcctctggcctttggcaagagacagggcagagaattcatctggaacgacctgctgtccctggaaaccggcagcctgaagctggccaacggaagagtgatcgagaagacactgtacaacagaagaacccggcaggatgagcctgccctgttcgtggccctgaccttcgagcggcgggaggtcctggactcctccaatatcaaaccaatgaacctgatcggcgtggcaagaggcgaaaacatccccgccgtgatcgccctgaccgaccccgagggctgcccactgagccggtttaaggatagcctgggaaacccaacccacatcctgagaatcggcgagagctataaggagaagcagcggaccatccaggccaagaaggaggtggagcagcggagagccggcggctacagccggaagtacgccagcaaagccaagaatctggcagacgatatggtgagaaacaccgctagagatctgctgtactacgccgtgacccaggatgccatgctgatcttcgccaacctgagccggggcttcggccggcagggcaagcggaccttcatggccgagagacagtacacacggatggaggactggctgaccgccaagctggcctacgagggcctgagcaagacctacctgtccaagacactggcccagtacacctccaagacatgcagcaactgtgggtttaccatcaccagcgccgactacgacagggtgctggagaagctgaagaagacagcaacaggctggatgaccacaattaacggcaaggagctgaaggtggagggccagattacctactacaacagatacaagagacagaacgtagtcaaggacctgtccgtcgagctggatagactgagcgaagaatctgtgaacaacgacatctcctcctggacaaagggcagaagcggagaagctctgagcctcctgaagaaaagattctcccatagacccgtgcaggagaagttcgtgtgcctgaactgcggcttcgagacacacgcagccgagcaagccgccctgaacatcgccagatcctggctgttcctgcggagccaggagtacaagaaataccagacaaacaagacaaccggcaacaccgataagagagccttcgtcgagacctggcagtccttttaccggaagaagcttaaggaggtgtggaaacctgccgtgcggtctggcggatctggcggaggctccaccagccccaagaaaaagagaaaagtctaagctgccttctgcggggcttgccttctggccatgcccttcttctctcccttgcacctgtacctcttggtctttgaataaagcctgagtaggaaggctagcaaaaaaaaaaaaaaaaaaaaaaaaaaaaaaaaaaaaaaaaaaaaaaaaaaaaaaaaaaaaaaaaaaaaaaaaaaaaaaaagcccagccggctccccaacctctaccgaggagggcacctctgagtccgccacccccgagagcggccctggcacctccaccgagcccagcgagggcagcgcacccggcagccctgccggcagccccacctccacagaggagggaaccagcaccgagcccagcgaaggcagcgccccaggcaccagcaccgagcctagtgagcaggagattaaacggatcaacaagatcagaagaagacttgtgaaagacagcaacaccaagaaggccggcaagacaggccccatgaaaaccctgctggttagagtgatgacacccgatctgagagagcggctggaaaacctgagaaagaagcctgaaaatatcccccagcccatcagcaatacatctagagccaacctgaataagctgctgaccgattacaccgaaatgaagaaggcgatcctgcatgtgtactgggaagagttccagaaggaccctgtgggcctgatgagccgggtggcccagcctgccagcaagaagatcgatcagaacaagctgaaacctgagatggacgagaagggcaacctgaccaccgccggctttgcctgctctcagtgtggccagcccctgttcgtgtacaagctggagcaggtgtctgagaagggcaaggcttacaccaactacttcggacggtgcaatgtggccgagcacgaaaagctgatcctgctggcccagctgaagcccgagaaggatagcgacgaagccgtgacatatagcctgggaaagtttgggcagagggccctggatttctacagcattcatgtgaccaaggagtccacccaccccgtgaagcccctggcccagatcgccggaaacagatacgcctccggacctgtgggaaaggccctgagcgacgcatgtatgggcacaatcgcctccttcctgtctaagtaccaggacatcatcatcgaacaccagaaggtggtgaagggcaaccagaagagactggagagcctgcgggagctggccggcaaggaaaacctggaataccctagcgtgaccctgccacctcagcctcacaccaaggagggcgttgatgcctacaacgaagtgatcgcccgggtgcgaatgtgggtgaacctgaacctgtggcagaagctgaagctaagcagagatgatgccaagcctctgctgagactgaagggattcccttcctttcctctggtcgagagacaggccaacgaagtggactggtgggacatggtgtgtaacgtgaagaagctgatcaacgagaaaaaggaggatggcaaggtgttttggcagaatctggctggctacaagagacaggaagccctgagaccatacctgagcagcgaggaagatcggaagaagggaaagaaattcgctcggtaccagctgggcgacctgctgctgcacctggaaaagaagcacggcgaggactggggaaaggtgtacgacgaggcctgggagcggattgacaagaaagtggaaggcctgagcaagcacatcaagctggaagaggaacggagaagcgaggacgcccagagcaaggccgccctgaccgactggctgcgggctaaggccagcttcgtgatcgagggcctgaaggaggccgacaaggacgagttctgcagatgcgagctgaagctgcagaagtggtacggggacctgcggggaaagcccttcgccatcgaagccgagaacagcatcctggacatcagcggcttcagcaagcagtacaactgtgccttcatctggcagaaggacggcgtgaagaagctgaacctgtacctgatcatcaactacttcaagggcggcaagctgcggttcaagaagatcaaacctgaagccttcgaagccaacagattctacaccgtgatcaacaaaaagagcggcgagatcgtgcccatggaggtgaacttcaacttcgacgaccccaacctgatcatcctgcctctggcctttggcaagagacagggcagagaattcatctggaacgacctgctgtccctggaaaccggcagcctgaagctggccaacggaagagtgatcgagaagacactgtacaacagaagaacccggcaggatgagcctgccctgttcgtggccctgaccttcgagcggcgggaggtcctggactcctccaatatcaaaccaatgaacctgatcggcgtggcaagaggcgaaaacatccccgccgtgatcgccctgaccgaccccgagggctgcccactgagccggtttaaggatagcctgggaaacccaacccacatcctgagaatcggcgagagctataaggagaagcagcggaccatccaggccaagaaggaggtggagcagcggagagccggcggctacagccggaagtacgccagcaaagccaagaatctggcagacgatatggtgagaaacaccgctagagatctgctgtactacgccgtgacccaggatgccatgctgatcttcgccaacctgagccggggcttcggccggcagggcaagcggaccttcatggccgagagacagtacacacggatggaggactggctgaccgccaagctggcctacgagggcctgagcaagacctacctgtccaagacactggcccagtacacctccaagacatgcagcaactgtgggtttaccatcaccagcgccgactacgacagggtgctggagaagctgaagaagacagcaacaggctggatgaccacaattaacggcaaggagctgaaggtggagggccagattacctactacaacagatacaagagacagaacgtagtcaaggacctgtccgtcgagctggatagactgagcgaagaatctgtgaacaacgacatctcctcctggacaaagggcagaagcggagaagctctgagcctcctgaagaaaagattctcccatagacccgtgcaggagaagttcgtgtgcctgaactgcggcttcgagacacacgcagccgagcaagccgccctgaacatcgccagatcctggctgttcctgcggagccaggagtacaagaaataccagacaaacaagacaaccggcaacaccgataagagagccttcgtcgagacctggcagtccttttaccggaagaagcttaaggaggtgtggaaacctgccgtgcggtctggcggatctggcggaggctccaccagccccaagaaaaagagaaaagtctaagctgccttctgcggggcttgccttctggccatgcccttcttctctcccttgcacctgtacctcttggtctttgaataaagcctgagtaggaaggctagcaaaaaaaaaaaaaaaaaaaaaaaaaaaaaaaaaaaaaaaaaaaaaaaaaaaaaaaaaaaaaaaaaaaaaaaaaaaaaaaa

SEQ ID NO: 10276 - RNA, 8787 nt, synthetic construct
  source 1..8787: mol_type = other RNA
aggaaataagagagaaaagaagagtaagaagaaatataagagccaccatggcccctaagaagaagcgtaaagtgagccggatgaaccacgaccaggagttcgacccccctaaggtgtaccctcccgtccccgccgagaagagaaagcccatccgggtcctgagcctgttcgatggcatcgccaccggtctgctggtgctgaaggacctgggcatccaggtggataggtacattgcctccgaggtgtgcgaggactccatcaccgtgggaatggtgcgtcatcagggcaagatcatgtacgtgggcgacgtgcggagcgtgacacagaagcatatccaggagtggggccctttcgacctggtgatcggcggcagcccttgcaatgacctgagcatcgtgaacccagcccggaagggcctgtacgagggaaccggcagactgttcttcgagttttacagactgctgcacgacgcccggcctaaggaaggcgacgaccggcccttcttttggctgttcgagaatgtggtggccatgggagtcagcgacaagcgggatattagccggttcctggagagcaaccccgtgatgatcgatgccaaggaagtgagcgccgcccaccgggccagatacttctggggcaatctgcctggcatgaacagacccctggccagcaccgtgaacgacaagctggagctgcaggagtgcctggagcacggccggatcgccaagttcagcaaggtgagaaccatcaccacccgaagcaacagcatcaaacaaggcaaggaccagcactttcctgtgttcatgaacgagaaggaggacatcctgtggtgtaccgagatggagagagtgttcgggttcccagtccactacacagatgtcagcaacatgtctagactggccagacagagactgctgggaagaagctggtccgtccctgtgatcagacacctgttcgcccctctgaaggagtacttcgcctgcgtgagcagcggcaacagcaacgccaacagccggggccccagcttctctagcggcctggtgccactgtccctgagagggagccacatgggccccatggagatctacaaaaccgtgagcgcctggaagcggcagcctgtgcgcgtgctgagcctgtttcggaatatcgataaagtcctgaaaagcctgggattcctggagagcggctctggctccggcggtggcaccctgaagtacgtggaggatgtgacaaacgtggtcagacgggatgtggagaagtggggccccttcgatctggtgtacggcagcacccaacccctgggcagctcttgtgaccggtgccctggctggtacatgtttcagttccaccggatcctgcagtacgccctgccgagacaggagtcccagcggccattcttttggattttcatggacaacttgctgctgaccgaggatgaccaggaaactaccactcggttcctgcagaccgaagccgtgaccctgcaggacgtgagaggccgggactaccagaacgccatgcgggtgtggtccaacatccctggactgaaaagcaagcacgcacctctgacccctaaagaagaggagtacctgcaggcccaggtgcggagcagaagcaagctggacgcccctaaggtggatctgctggtgaagaattgcctcctgcccctgagagagtacttcaagtatttcagccagaatagtctgcccctgggaggcagcggcggcggcatgctgcccatcgtgcagctgtacccccagggcctggtgagcttcaaggacgtggccgtggacttcacccaggaggagtggcagcagctggaccccagccagaggaccctgtacagggacgtgatgctggagaactacagccacctggtgagcatgggctaccccgtgagcaagcccgacgtgatcagcaagctggagcagggcgaggagccctggatcatcaagggcgacatcagcaactggggcggcccaagcagcggcgcccctcctcccagcggcggcaggcggcccaagcagcggcgcccctcctcccagcggcggcagcccagccggctccccaacctctaccgaggagggcacctctgagtccgccacccccgagagcggccctggcacctccaccgagcccagcgagggcagcgcacccggcagccctgccggcagccccacctccacagaggagggaaccagcaccgagcccagcgaaggcagcgccccaggcaccagcaccgagcctagtgagcaggagattaaacggatcaacaagatcagaagaagacttgtgaaagacagcaacaccaagaaggccggcaagacaggccccatgaaaaccctgctggttagagtgatgacacccgatctgagagagcggctggaaaacctgagaaagaagcctgaaaatatcccccagcccatcagcaatacatctagagccaacctgaataagctgctgaccgattacaccgaaatgaagaaggcgatcctgcatgtgtactgggaagagttccagaaggaccctgtgggcctgatgagccgggtggcccagcctgccagcaagaagatcgatcagaacaagctgaaacctgagatggacgagaagggcaacctgaccaccgccggctttgcctgctctcagtgtggccagcccctgttcgtgtacaagctggagcaggtgtctgagaagggcaaggcttacaccaactacttcggacggtgcaatgtggccgagcacgaaaagctgatcctgctggcccagctgaagcccgagaaggatagcgacgaagccgtgacatatagcctgggaaagtttgggcagagggccctggatttctacagcattcatgtgaccaaggagtccacccaccccgtgaagcccctggcccagatcgccggaaacagatacgcctccggacctgtgggaaaggccctgagcgacgcatgtatgggcacaatcgcctccttcctgtctaagtaccaggacatcatcatcgaacaccagaaggtggtgaagggcaaccagaagagactggagagcctgcgggagctggccggcaaggaaaacctggaataccctagcgtgaccctgccacctcagcctcacaccaaggagggcgttgatgcctacaacgaagtgatcgcccgggtgcgaatgtgggtgaacctgaacctgtggcagaagctgaagctaagcagagatgatgccaagcctctgctgagactgaagggattcccttcctttcctctggtcgagagacaggccaacgaagtggactggtgggacatggtgtgtaacgtgaagaagctgatcaacgagaaaaaggaggatggcaaggtgttttggcagaatctggctggctacaagagacaggaagccctgagaccatacctgagcagcgaggaagatcggaagaagggaaagaaattcgctcggtaccagctgggcgacctgctgctgcacctggaaaagaagcacggcgaggactggggaaaggtgtacgacgaggcctgggagcggattgacaagaaagtggaaggcctgagcaagcacatcaagctggaagaggaacggagaagcgaggacgcccagagcaaggccgccctgaccgactggctgcgggctaaggccagcttcgtgatcgagggcctgaaggaggccgacaaggacgagttctgcagatgcgagctgaagctgcagaagtggtacggggacctgcggggaaagcccttcgccatcgaagccgagaacagcatcctggacatcagcggcttcagcaagcagtacaactgtgccttcatctggcagaaggacggcgtgaagaagctgaacctgtacctgatcatcaactacttcaagggcggcaagctgcggttcaagaagatcaaacctgaagccttcgaagccaacagattctacaccgtgatcaacaaaaagagcggcgagatcgtgcccatggaggtgaacttcaacttcgacgaccccaacctgatcatcctgcctctggcctttggcaagagacagggcagagaattcatctggaacgacctgctgtccctggaaaccggcagcctgaagctggccaacggaagagtgatcgagaagacactgtacaacagaagaacccggcaggatgagcctgccctgttcgtggccctgaccttcgagcggcgggaggtcctggactcctccaatatcaaaccaatgaacctgatcggcgtggcaagaggcgaaaacatccccgccgtgatcgccctgaccgaccccgagggctgcccactgagccggtttaaggatagcctgggaaacccaacccacatcctgagaatcggcgagagctataaggagaagcagcggaccatccaggccaagaaggaggtggagcagcggagagccggcggctacagccggaagtacgccagcaaagccaagaatctggcagacgatatggtgagaaacaccgctagagatctgctgtactacgccgtgacccaggatgccatgctgatcttcgccaacctgagccggggcttcggccggcagggcaagcggaccttcatggccgagagacagtacacacggatggaggactggctgaccgccaagctggcctacgagggcctgagcaagacctacctgtccaagacactggcccagtacacctccaagacatgcagcaactgtgggtttaccatcaccagcgccgactacgacagggtgctggagaagctgaagaagacagcaacaggctggatgaccacaattaacggcaaggagctgaaggtggagggccagattacctactacaacagatacaagagacagaacgtagtcaaggacctgtccgtcgagctggatagactgagcgaagaatctgtgaacaacgacatctcctcctggacaaagggcagaagcggagaagctctgagcctcctgaagaaaagattctcccatagacccgtgcaggagaagttcgtgtgcctgaactgcggcttcgagacacacgcagccgagcaagccgccctgaacatcgccagatcctggctgttcctgcggagccaggagtacaagaaataccagacaaacaagacaaccggcaacaccgataagagagccttcgtcgagacctggcagtccttttaccggaagaagcttaaggaggtgtggaaacctgccgtgcggtctggcggatctggcggaggctccaccagccccaagaaaaagagaaaagtctaagctgccttctgcggggcttgccttctggccatgcccttcttctctcccttgcacctgtacctcttggtctttgaataaagcctgagtaggaaggctagcaaaaaaaaaaaaaaaaaaaaaaaaaaaaaaaaaaaaaaaaaaaaaaaaaaaaaaaaaaaaaaaaaaaaaaaaaaaaaaaagcccagccggctccccaacctctaccgaggagggcacctctgagtccgccacccccgagagcggccctggcacctccaccgagcccagcgagggcagcgcacccggcagccctgccggcagccccacctccacagaggagggaaccagcaccgagcccagcgaaggcagcgccccaggcaccagcaccgagcctagtgagcaggagattaaacggatcaacaagatcagaagaagacttgtgaaagacagcaacaccaagaaggccggcaagacaggccccatgaaaaccctgctggttagagtgatgacacccgatctgagagagcggctggaaaacctgagaaagaagcctgaaaatatcccccagcccatcagcaatacatctagagccaacctgaataagctgctgaccgattacaccgaaatgaagaaggcgatcctgcatgtgtactgggaagagttccagaaggaccctgtgggcctgatgagccgggtggcccagcctgccagcaagaagatcgatcagaacaagctgaaacctgagatggacgagaagggcaacctgaccaccgccggctttgcctgctctcagtgtggccagcccctgttcgtgtacaagctggagcaggtgtctgagaagggcaaggcttacaccaactacttcggacggtgcaatgtggccgagcacgaaaagctgatcctgctggcccagctgaagcccgagaaggatagcgacgaagccgtgacatatagcctgggaaagtttgggcagagggccctggatttctacagcattcatgtgaccaaggagtccacccaccccgtgaagcccctggcccagatcgccggaaacagatacgcctccggacctgtgggaaaggccctgagcgacgcatgtatgggcacaatcgcctccttcctgtctaagtaccaggacatcatcatcgaacaccagaaggtggtgaagggcaaccagaagagactggagagcctgcgggagctggccggcaaggaaaacctggaataccctagcgtgaccctgccacctcagcctcacaccaaggagggcgttgatgcctacaacgaagtgatcgcccgggtgcgaatgtgggtgaacctgaacctgtggcagaagctgaagctaagcagagatgatgccaagcctctgctgagactgaagggattcccttcctttcctctggtcgagagacaggccaacgaagtggactggtgggacatggtgtgtaacgtgaagaagctgatcaacgagaaaaaggaggatggcaaggtgttttggcagaatctggctggctacaagagacaggaagccctgagaccatacctgagcagcgaggaagatcggaagaagggaaagaaattcgctcggtaccagctgggcgacctgctgctgcacctggaaaagaagcacggcgaggactggggaaaggtgtacgacgaggcctgggagcggattgacaagaaagtggaaggcctgagcaagcacatcaagctggaagaggaacggagaagcgaggacgcccagagcaaggccgccctgaccgactggctgcgggctaaggccagcttcgtgatcgagggcctgaaggaggccgacaaggacgagttctgcagatgcgagctgaagctgcagaagtggtacggggacctgcggggaaagcccttcgccatcgaagccgagaacagcatcctggacatcagcggcttcagcaagcagtacaactgtgccttcatctggcagaaggacggcgtgaagaagctgaacctgtacctgatcatcaactacttcaagggcggcaagctgcggttcaagaagatcaaacctgaagccttcgaagccaacagattctacaccgtgatcaacaaaaagagcggcgagatcgtgcccatggaggtgaacttcaacttcgacgaccccaacctgatcatcctgcctctggcctttggcaagagacagggcagagaattcatctggaacgacctgctgtccctggaaaccggcagcctgaagctggccaacggaagagtgatcgagaagacactgtacaacagaagaacccggcaggatgagcctgccctgttcgtggccctgaccttcgagcggcgggaggtcctggactcctccaatatcaaaccaatgaacctgatcggcgtggcaagaggcgaaaacatccccgccgtgatcgccctgaccgaccccgagggctgcccactgagccggtttaaggatagcctgggaaacccaacccacatcctgagaatcggcgagagctataaggagaagcagcggaccatccaggccaagaaggaggtggagcagcggagagccggcggctacagccggaagtacgccagcaaagccaagaatctggcagacgatatggtgagaaacaccgctagagatctgctgtactacgccgtgacccaggatgccatgctgatcttcgccaacctgagccggggcttcggccggcagggcaagcggaccttcatggccgagagacagtacacacggatggaggactggctgaccgccaagctggcctacgagggcctgagcaagacctacctgtccaagacactggcccagtacacctccaagacatgcagcaactgtgggtttaccatcaccagcgccgactacgacagggtgctggagaagctgaagaagacagcaacaggctggatgaccacaattaacggcaaggagctgaaggtggagggccagattacctactacaacagatacaagagacagaacgtagtcaaggacctgtccgtcgagctggatagactgagcgaagaatctgtgaacaacgacatctcctcctggacaaagggcagaagcggagaagctctgagcctcctgaagaaaagattctcccatagacccgtgcaggagaagttcgtgtgcctgaactgcggcttcgagacacacgcagccgagcaagccgccctgaacatcgccagatcctggctgttcctgcggagccaggagtacaagaaataccagacaaacaagacaaccggcaacaccgataagagagccttcgtcgagacctggcagtccttttaccggaagaagcttaaggaggtgtggaaacctgccgtgcggtctggcggatctggcggaggctccaccagccccaagaaaaagagaaaagtctaagctgccttctgcggggcttgccttctggccatgcccttcttctctcccttgcacctgtacctcttggtctttgaataaagcctgagtaggaaggctagcaaaaaaaaaaaaaaaaaaaaaaaaaaaaaaaaaaaaaaaaaaaaaaaaaaaaaaaaaaaaaaaaaaaaaaaaaaaaaaaa

SEQ ID NO: 10277 - RNA, 8787 nt, synthetic construct
  source 1..8787: mol_type = other RNA
aggaaataagagagaaaagaagagtaagaagaaatataagagccaccatggcccctaagaagaagcgtaaagtgagccggatgaaccacgaccaggagttcgacccccctaaggtgtaccctcccgtccccgccgagaagagaaagcccatccgggtcctgagcctgttcgatggcatcgccaccggtctgctggtgctgaaggacctgggcatccaggtggataggtacattgcctccgaggtgtgcgaggactccatcaccgtgggaatggtgcgtcatcagggcaagatcatgtacgtgggcgacgtgcggagcgtgacacagaagcatatccaggagtggggccctttcgacctggtgatcggcggcagcccttgcaatgacctgagcatcgtgaacccagcccggaagggcctgtacgagggaaccggcagactgttcttcgagttttacagactgctgcacgacgcccggcctaaggaaggcgacgaccggcccttcttttggctgttcgagaatgtggtggccatgggagtcagcgacaagcgggatattagccggttcctggagagcaaccccgtgatgatcgatgccaaggaagtgagcgccgcccaccgggccagatacttctggggcaatctgcctggcatgaacagacccctggccagcaccgtgaacgacaagctggagctgcaggagtgcctggagcacggccggatcgccaagttcagcaaggtgagaaccatcaccacccgaagcaacagcatcaaacaaggcaaggaccagcactttcctgtgttcatgaacgagaaggaggacatcctgtggtgtaccgagatggagagagtgttcgggttcccagtccactacacagatgtcagcaacatgtctagactggccagacagagactgctgggaagaagctggtccgtccctgtgatcagacacctgttcgcccctctgaaggagtacttcgcctgcgtgagcagcggcaacagcaacgccaacagccggggccccagcttctctagcggcctggtgccactgtccctgagagggagccacatgggccccatggagatctacaaaaccgtgagcgcctggaagcggcagcctgtgcgcgtgctgagcctgtttcggaatatcgataaagtcctgaaaagcctgggattcctggagagcggctctggctccggcggtggcaccctgaagtacgtggaggatgtgacaaacgtggtcagacgggatgtggagaagtggggccccttcgatctggtgtacggcagcacccaacccctgggcagctcttgtgaccggtgccctggctggtacatgtttcagttccaccggatcctgcagtacgccctgccgagacaggagtcccagcggccattcttttggattttcatggacaacttgctgctgaccgaggatgaccaggaaactaccactcggttcctgcagaccgaagccgtgaccctgcaggacgtgagaggccgggactaccagaacgccatgcgggtgtggtccaacatccctggactgaaaagcaagcacgcacctctgacccctaaagaagaggagtacctgcaggcccaggtgcggagcagaagcaagctggacgcccctaaggtggatctgctggtgaagaattgcctcctgcccctgagagagtacttcaagtatttcagccagaatagtctgcccctgggaggcagcggcggcggccccgagaacggcgtgaccttcgaggacatcgccctgtacttcagctgggaggagtggaagctgctggacgaggcccagaggaggctgtaccacgacgtgatgctggagaacttcgccctgatcagcagcctgggcgtgtggagcggcgaggagaacgtggaggccagcttcgagcagagcgtgagcgtggtgatgagccaggtgaggaccagcaaggagcccagcagcagccagaagacccacggcggcccaagcagcggcgcccctcctcccagcggcggcaggcggcccaagcagcggcgcccctcctcccagcggcggcagcccagccggctccccaacctctaccgaggagggcacctctgagtccgccacccccgagagcggccctggcacctccaccgagcccagcgagggcagcgcacccggcagccctgccggcagccccacctccacagaggagggaaccagcaccgagcccagcgaaggcagcgccccaggcaccagcaccgagcctagtgagcaggagattaaacggatcaacaagatcagaagaagacttgtgaaagacagcaacaccaagaaggccggcaagacaggccccatgaaaaccctgctggttagagtgatgacacccgatctgagagagcggctggaaaacctgagaaagaagcctgaaaatatcccccagcccatcagcaatacatctagagccaacctgaataagctgctgaccgattacaccgaaatgaagaaggcgatcctgcatgtgtactgggaagagttccagaaggaccctgtgggcctgatgagccgggtggcccagcctgccagcaagaagatcgatcagaacaagctgaaacctgagatggacgagaagggcaacctgaccaccgccggctttgcctgctctcagtgtggccagcccctgttcgtgtacaagctggagcaggtgtctgagaagggcaaggcttacaccaactacttcggacggtgcaatgtggccgagcacgaaaagctgatcctgctggcccagctgaagcccgagaaggatagcgacgaagccgtgacatatagcctgggaaagtttgggcagagggccctggatttctacagcattcatgtgaccaaggagtccacccaccccgtgaagcccctggcccagatcgccggaaacagatacgcctccggacctgtgggaaaggccctgagcgacgcatgtatgggcacaatcgcctccttcctgtctaagtaccaggacatcatcatcgaacaccagaaggtggtgaagggcaaccagaagagactggagagcctgcgggagctggccggcaaggaaaacctggaataccctagcgtgaccctgccacctcagcctcacaccaaggagggcgttgatgcctacaacgaagtgatcgcccgggtgcgaatgtgggtgaacctgaacctgtggcagaagctgaagctaagcagagatgatgccaagcctctgctgagactgaagggattcccttcctttcctctggtcgagagacaggccaacgaagtggactggtgggacatggtgtgtaacgtgaagaagctgatcaacgagaaaaaggaggatggcaaggtgttttggcagaatctggctggctacaagagacaggaagccctgagaccatacctgagcagcgaggaagatcggaagaagggaaagaaattcgctcggtaccagctgggcgacctgctgctgcacctggaaaagaagcacggcgaggactggggaaaggtgtacgacgaggcctgggagcggattgacaagaaagtggaaggcctgagcaagcacatcaagctggaagaggaacggagaagcgaggacgcccagagcaaggccgccctgaccgactggctgcgggctaaggccagcttcgtgatcgagggcctgaaggaggccgacaaggacgagttctgcagatgcgagctgaagctgcagaagtggtacggggacctgcggggaaagcccttcgccatcgaagccgagaacagcatcctggacatcagcggcttcagcaagcagtacaactgtgccttcatctggcagaaggacggcgtgaagaagctgaacctgtacctgatcatcaactacttcaagggcggcaagctgcggttcaagaagatcaaacctgaagccttcgaagccaacagattctacaccgtgatcaacaaaaagagcggcgagatcgtgcccatggaggtgaacttcaacttcgacgaccccaacctgatcatcctgcctctggcctttggcaagagacagggcagagaattcatctggaacgacctgctgtccctggaaaccggcagcctgaagctggccaacggaagagtgatcgagaagacactgtacaacagaagaacccggcaggatgagcctgccctgttcgtggccctgaccttcgagcggcgggaggtcctggactcctccaatatcaaaccaatgaacctgatcggcgtggcaagaggcgaaaacatccccgccgtgatcgccctgaccgaccccgagggctgcccactgagccggtttaaggatagcctgggaaacccaacccacatcctgagaatcggcgagagctataaggagaagcagcggaccatccaggccaagaaggaggtggagcagcggagagccggcggctacagccggaagtacgccagcaaagccaagaatctggcagacgatatggtgagaaacaccgctagagatctgctgtactacgccgtgacccaggatgccatgctgatcttcgccaacctgagccggggcttcggccggcagggcaagcggaccttcatggccgagagacagtacacacggatggaggactggctgaccgccaagctggcctacgagggcctgagcaagacctacctgtccaagacactggcccagtacacctccaagacatgcagcaactgtgggtttaccatcaccagcgccgactacgacagggtgctggagaagctgaagaagacagcaacaggctggatgaccacaattaacggcaaggagctgaaggtggagggccagattacctactacaacagatacaagagacagaacgtagtcaaggacctgtccgtcgagctggatagactgagcgaagaatctgtgaacaacgacatctcctcctggacaaagggcagaagcggagaagctctgagcctcctgaagaaaagattctcccatagacccgtgcaggagaagttcgtgtgcctgaactgcggcttcgagacacacgcagccgagcaagccgccctgaacatcgccagatcctggctgttcctgcggagccaggagtacaagaaataccagacaaacaagacaaccggcaacaccgataagagagccttcgtcgagacctggcagtccttttaccggaagaagcttaaggaggtgtggaaacctgccgtgcggtctggcggatctggcggaggctccaccagccccaagaaaaagagaaaagtctaagctgccttctgcggggcttgccttctggccatgcccttcttctctcccttgcacctgtacctcttggtctttgaataaagcctgagtaggaaggctagcaaaaaaaaaaaaaaaaaaaaaaaaaaaaaaaaaaaaaaaaaaaaaaaaaaaaaaaaaaaaaaaaaaaaaaaaaaaaaaaagcccagccggctccccaacctctaccgaggagggcacctctgagtccgccacccccgagagcggccctggcacctccaccgagcccagcgagggcagcgcacccggcagccctgccggcagccccacctccacagaggagggaaccagcaccgagcccagcgaaggcagcgccccaggcaccagcaccgagcctagtgagcaggagattaaacggatcaacaagatcagaagaagacttgtgaaagacagcaacaccaagaaggccggcaagacaggccccatgaaaaccctgctggttagagtgatgacacccgatctgagagagcggctggaaaacctgagaaagaagcctgaaaatatcccccagcccatcagcaatacatctagagccaacctgaataagctgctgaccgattacaccgaaatgaagaaggcgatcctgcatgtgtactgggaagagttccagaaggaccctgtgggcctgatgagccgggtggcccagcctgccagcaagaagatcgatcagaacaagctgaaacctgagatggacgagaagggcaacctgaccaccgccggctttgcctgctctcagtgtggccagcccctgttcgtgtacaagctggagcaggtgtctgagaagggcaaggcttacaccaactacttcggacggtgcaatgtggccgagcacgaaaagctgatcctgctggcccagctgaagcccgagaaggatagcgacgaagccgtgacatatagcctgggaaagtttgggcagagggccctggatttctacagcattcatgtgaccaaggagtccacccaccccgtgaagcccctggcccagatcgccggaaacagatacgcctccggacctgtgggaaaggccctgagcgacgcatgtatgggcacaatcgcctccttcctgtctaagtaccaggacatcatcatcgaacaccagaaggtggtgaagggcaaccagaagagactggagagcctgcgggagctggccggcaaggaaaacctggaataccctagcgtgaccctgccacctcagcctcacaccaaggagggcgttgatgcctacaacgaagtgatcgcccgggtgcgaatgtgggtgaacctgaacctgtggcagaagctgaagctaagcagagatgatgccaagcctctgctgagactgaagggattcccttcctttcctctggtcgagagacaggccaacgaagtggactggtgggacatggtgtgtaacgtgaagaagctgatcaacgagaaaaaggaggatggcaaggtgttttggcagaatctggctggctacaagagacaggaagccctgagaccatacctgagcagcgaggaagatcggaagaagggaaagaaattcgctcggtaccagctgggcgacctgctgctgcacctggaaaagaagcacggcgaggactggggaaaggtgtacgacgaggcctgggagcggattgacaagaaagtggaaggcctgagcaagcacatcaagctggaagaggaacggagaagcgaggacgcccagagcaaggccgccctgaccgactggctgcgggctaaggccagcttcgtgatcgagggcctgaaggaggccgacaaggacgagttctgcagatgcgagctgaagctgcagaagtggtacggggacctgcggggaaagcccttcgccatcgaagccgagaacagcatcctggacatcagcggcttcagcaagcagtacaactgtgccttcatctggcagaaggacggcgtgaagaagctgaacctgtacctgatcatcaactacttcaagggcggcaagctgcggttcaagaagatcaaacctgaagccttcgaagccaacagattctacaccgtgatcaacaaaaagagcggcgagatcgtgcccatggaggtgaacttcaacttcgacgaccccaacctgatcatcctgcctctggcctttggcaagagacagggcagagaattcatctggaacgacctgctgtccctggaaaccggcagcctgaagctggccaacggaagagtgatcgagaagacactgtacaacagaagaacccggcaggatgagcctgccctgttcgtggccctgaccttcgagcggcgggaggtcctggactcctccaatatcaaaccaatgaacctgatcggcgtggcaagaggcgaaaacatccccgccgtgatcgccctgaccgaccccgagggctgcccactgagccggtttaaggatagcctgggaaacccaacccacatcctgagaatcggcgagagctataaggagaagcagcggaccatccaggccaagaaggaggtggagcagcggagagccggcggctacagccggaagtacgccagcaaagccaagaatctggcagacgatatggtgagaaacaccgctagagatctgctgtactacgccgtgacccaggatgccatgctgatcttcgccaacctgagccggggcttcggccggcagggcaagcggaccttcatggccgagagacagtacacacggatggaggactggctgaccgccaagctggcctacgagggcctgagcaagacctacctgtccaagacactggcccagtacacctccaagacatgcagcaactgtgggtttaccatcaccagcgccgactacgacagggtgctggagaagctgaagaagacagcaacaggctggatgaccacaattaacggcaaggagctgaaggtggagggccagattacctactacaacagatacaagagacagaacgtagtcaaggacctgtccgtcgagctggatagactgagcgaagaatctgtgaacaacgacatctcctcctggacaaagggcagaagcggagaagctctgagcctcctgaagaaaagattctcccatagacccgtgcaggagaagttcgtgtgcctgaactgcggcttcgagacacacgcagccgagcaagccgccctgaacatcgccagatcctggctgttcctgcggagccaggagtacaagaaataccagacaaacaagacaaccggcaacaccgataagagagccttcgtcgagacctggcagtccttttaccggaagaagcttaaggaggtgtggaaacctgccgtgcggtctggcggatctggcggaggctccaccagccccaagaaaaagagaaaagtctaagctgccttctgcggggcttgccttctggccatgcccttcttctctcccttgcacctgtacctcttggtctttgaataaagcctgagtaggaaggctagcaaaaaaaaaaaaaaaaaaaaaaaaaaaaaaaaaaaaaaaaaaaaaaaaaaaaaaaaaaaaaaaaaaaaaaaaaaaaaaaa

SEQ ID NO: 10278 - RNA, 8787 nt, synthetic construct
  source 1..8787: mol_type = other RNA
aggaaataagagagaaaagaagagtaagaagaaatataagagccaccatggcccctaagaagaagcgtaaagtgagccggatgaaccacgaccaggagttcgacccccctaaggtgtaccctcccgtccccgccgagaagagaaagcccatccgggtcctgagcctgttcgatggcatcgccaccggtctgctggtgctgaaggacctgggcatccaggtggataggtacattgcctccgaggtgtgcgaggactccatcaccgtgggaatggtgcgtcatcagggcaagatcatgtacgtgggcgacgtgcggagcgtgacacagaagcatatccaggagtggggccctttcgacctggtgatcggcggcagcccttgcaatgacctgagcatcgtgaacccagcccggaagggcctgtacgagggaaccggcagactgttcttcgagttttacagactgctgcacgacgcccggcctaaggaaggcgacgaccggcccttcttttggctgttcgagaatgtggtggccatgggagtcagcgacaagcgggatattagccggttcctggagagcaaccccgtgatgatcgatgccaaggaagtgagcgccgcccaccgggccagatacttctggggcaatctgcctggcatgaacagacccctggccagcaccgtgaacgacaagctggagctgcaggagtgcctggagcacggccggatcgccaagttcagcaaggtgagaaccatcaccacccgaagcaacagcatcaaacaaggcaaggaccagcactttcctgtgttcatgaacgagaaggaggacatcctgtggtgtaccgagatggagagagtgttcgggttcccagtccactacacagatgtcagcaacatgtctagactggccagacagagactgctgggaagaagctggtccgtccctgtgatcagacacctgttcgcccctctgaaggagtacttcgcctgcgtgagcagcggcaacagcaacgccaacagccggggccccagcttctctagcggcctggtgccactgtccctgagagggagccacatgggccccatggagatctacaaaaccgtgagcgcctggaagcggcagcctgtgcgcgtgctgagcctgtttcggaatatcgataaagtcctgaaaagcctgggattcctggagagcggctctggctccggcggtggcaccctgaagtacgtggaggatgtgacaaacgtggtcagacgggatgtggagaagtggggccccttcgatctggtgtacggcagcacccaacccctgggcagctcttgtgaccggtgccctggctggtacatgtttcagttccaccggatcctgcagtacgccctgccgagacaggagtcccagcggccattcttttggattttcatggacaacttgctgctgaccgaggatgaccaggaaactaccactcggttcctgcagaccgaagccgtgaccctgcaggacgtgagaggccgggactaccagaacgccatgcgggtgtggtccaacatccctggactgaaaagcaagcacgcacctctgacccctaaagaagaggagtacctgcaggcccaggtgcggagcagaagcaagctggacgcccctaaggtggatctgctggtgaagaattgcctcctgcccctgagagagtacttcaagtatttcagccagaatagtctgcccctgggaggcagcggcggcggcatgcccgtgaccttcgaggaggtggccgtgtacttcaccgagggccagggcgccctgctggaccccgcccagagggccctgtacagggacgtgatgcaggagatctacgagatggtgatcagcctgggcttcctgctgcccaagcccgacgtgatcatccagctggagaggggcgaggagccctgggtgcccgacctgcagggcagcgccgagagggagatgagcaggggcacctgcgccggcggcggcccaagcagcggcgcccctcctcccagcggcggcaggcggcccaagcagcggcgcccctcctcccagcggcggcagcccagccggctccccaacctctaccgaggagggcacctctgagtccgccacccccgagagcggccctggcacctccaccgagcccagcgagggcagcgcacccggcagccctgccggcagccccacctccacagaggagggaaccagcaccgagcccagcgaaggcagcgccccaggcaccagcaccgagcctagtgagcaggagattaaacggatcaacaagatcagaagaagacttgtgaaagacagcaacaccaagaaggccggcaagacaggccccatgaaaaccctgctggttagagtgatgacacccgatctgagagagcggctggaaaacctgagaaagaagcctgaaaatatcccccagcccatcagcaatacatctagagccaacctgaataagctgctgaccgattacaccgaaatgaagaaggcgatcctgcatgtgtactgggaagagttccagaaggaccctgtgggcctgatgagccgggtggcccagcctgccagcaagaagatcgatcagaacaagctgaaacctgagatggacgagaagggcaacctgaccaccgccggctttgcctgctctcagtgtggccagcccctgttcgtgtacaagctggagcaggtgtctgagaagggcaaggcttacaccaactacttcggacggtgcaatgtggccgagcacgaaaagctgatcctgctggcccagctgaagcccgagaaggatagcgacgaagccgtgacatatagcctgggaaagtttgggcagagggccctggatttctacagcattcatgtgaccaaggagtccacccaccccgtgaagcccctggcccagatcgccggaaacagatacgcctccggacctgtgggaaaggccctgagcgacgcatgtatgggcacaatcgcctccttcctgtctaagtaccaggacatcatcatcgaacaccagaaggtggtgaagggcaaccagaagagactggagagcctgcgggagctggccggcaaggaaaacctggaataccctagcgtgaccctgccacctcagcctcacaccaaggagggcgttgatgcctacaacgaagtgatcgcccgggtgcgaatgtgggtgaacctgaacctgtggcagaagctgaagctaagcagagatgatgccaagcctctgctgagactgaagggattcccttcctttcctctggtcgagagacaggccaacgaagtggactggtgggacatggtgtgtaacgtgaagaagctgatcaacgagaaaaaggaggatggcaaggtgttttggcagaatctggctggctacaagagacaggaagccctgagaccatacctgagcagcgaggaagatcggaagaagggaaagaaattcgctcggtaccagctgggcgacctgctgctgcacctggaaaagaagcacggcgaggactggggaaaggtgtacgacgaggcctgggagcggattgacaagaaagtggaaggcctgagcaagcacatcaagctggaagaggaacggagaagcgaggacgcccagagcaaggccgccctgaccgactggctgcgggctaaggccagcttcgtgatcgagggcctgaaggaggccgacaaggacgagttctgcagatgcgagctgaagctgcagaagtggtacggggacctgcggggaaagcccttcgccatcgaagccgagaacagcatcctggacatcagcggcttcagcaagcagtacaactgtgccttcatctggcagaaggacggcgtgaagaagctgaacctgtacctgatcatcaactacttcaagggcggcaagctgcggttcaagaagatcaaacctgaagccttcgaagccaacagattctacaccgtgatcaacaaaaagagcggcgagatcgtgcccatggaggtgaacttcaacttcgacgaccccaacctgatcatcctgcctctggcctttggcaagagacagggcagagaattcatctggaacgacctgctgtccctggaaaccggcagcctgaagctggccaacggaagagtgatcgagaagacactgtacaacagaagaacccggcaggatgagcctgccctgttcgtggccctgaccttcgagcggcgggaggtcctggactcctccaatatcaaaccaatgaacctgatcggcgtggcaagaggcgaaaacatccccgccgtgatcgccctgaccgaccccgagggctgcccactgagccggtttaaggatagcctgggaaacccaacccacatcctgagaatcggcgagagctataaggagaagcagcggaccatccaggccaagaaggaggtggagcagcggagagccggcggctacagccggaagtacgccagcaaagccaagaatctggcagacgatatggtgagaaacaccgctagagatctgctgtactacgccgtgacccaggatgccatgctgatcttcgccaacctgagccggggcttcggccggcagggcaagcggaccttcatggccgagagacagtacacacggatggaggactggctgaccgccaagctggcctacgagggcctgagcaagacctacctgtccaagacactggcccagtacacctccaagacatgcagcaactgtgggtttaccatcaccagcgccgactacgacagggtgctggagaagctgaagaagacagcaacaggctggatgaccacaattaacggcaaggagctgaaggtggagggccagattacctactacaacagatacaagagacagaacgtagtcaaggacctgtccgtcgagctggatagactgagcgaagaatctgtgaacaacgacatctcctcctggacaaagggcagaagcggagaagctctgagcctcctgaagaaaagattctcccatagacccgtgcaggagaagttcgtgtgcctgaactgcggcttcgagacacacgcagccgagcaagccgccctgaacatcgccagatcctggctgttcctgcggagccaggagtacaagaaataccagacaaacaagacaaccggcaacaccgataagagagccttcgtcgagacctggcagtccttttaccggaagaagcttaaggaggtgtggaaacctgccgtgcggtctggcggatctggcggaggctccaccagccccaagaaaaagagaaaagtctaagctgccttctgcggggcttgccttctggccatgcccttcttctctcccttgcacctgtacctcttggtctttgaataaagcctgagtaggaaggctagcaaaaaaaaaaaaaaaaaaaaaaaaaaaaaaaaaaaaaaaaaaaaaaaaaaaaaaaaaaaaaaaaaaaaaaaaaaaaaaaagcccagccggctccccaacctctaccgaggagggcacctctgagtccgccacccccgagagcggccctggcacctccaccgagcccagcgagggcagcgcacccggcagccctgccggcagccccacctccacagaggagggaaccagcaccgagcccagcgaaggcagcgccccaggcaccagcaccgagcctagtgagcaggagattaaacggatcaacaagatcagaagaagacttgtgaaagacagcaacaccaagaaggccggcaagacaggccccatgaaaaccctgctggttagagtgatgacacccgatctgagagagcggctggaaaacctgagaaagaagcctgaaaatatcccccagcccatcagcaatacatctagagccaacctgaataagctgctgaccgattacaccgaaatgaagaaggcgatcctgcatgtgtactgggaagagttccagaaggaccctgtgggcctgatgagccgggtggcccagcctgccagcaagaagatcgatcagaacaagctgaaacctgagatggacgagaagggcaacctgaccaccgccggctttgcctgctctcagtgtggccagcccctgttcgtgtacaagctggagcaggtgtctgagaagggcaaggcttacaccaactacttcggacggtgcaatgtggccgagcacgaaaagctgatcctgctggcccagctgaagcccgagaaggatagcgacgaagccgtgacatatagcctgggaaagtttgggcagagggccctggatttctacagcattcatgtgaccaaggagtccacccaccccgtgaagcccctggcccagatcgccggaaacagatacgcctccggacctgtgggaaaggccctgagcgacgcatgtatgggcacaatcgcctccttcctgtctaagtaccaggacatcatcatcgaacaccagaaggtggtgaagggcaaccagaagagactggagagcctgcgggagctggccggcaaggaaaacctggaataccctagcgtgaccctgccacctcagcctcacaccaaggagggcgttgatgcctacaacgaagtgatcgcccgggtgcgaatgtgggtgaacctgaacctgtggcagaagctgaagctaagcagagatgatgccaagcctctgctgagactgaagggattcccttcctttcctctggtcgagagacaggccaacgaagtggactggtgggacatggtgtgtaacgtgaagaagctgatcaacgagaaaaaggaggatggcaaggtgttttggcagaatctggctggctacaagagacaggaagccctgagaccatacctgagcagcgaggaagatcggaagaagggaaagaaattcgctcggtaccagctgggcgacctgctgctgcacctggaaaagaagcacggcgaggactggggaaaggtgtacgacgaggcctgggagcggattgacaagaaagtggaaggcctgagcaagcacatcaagctggaagaggaacggagaagcgaggacgcccagagcaaggccgccctgaccgactggctgcgggctaaggccagcttcgtgatcgagggcctgaaggaggccgacaaggacgagttctgcagatgcgagctgaagctgcagaagtggtacggggacctgcggggaaagcccttcgccatcgaagccgagaacagcatcctggacatcagcggcttcagcaagcagtacaactgtgccttcatctggcagaaggacggcgtgaagaagctgaacctgtacctgatcatcaactacttcaagggcggcaagctgcggttcaagaagatcaaacctgaagccttcgaagccaacagattctacaccgtgatcaacaaaaagagcggcgagatcgtgcccatggaggtgaacttcaacttcgacgaccccaacctgatcatcctgcctctggcctttggcaagagacagggcagagaattcatctggaacgacctgctgtccctggaaaccggcagcctgaagctggccaacggaagagtgatcgagaagacactgtacaacagaagaacccggcaggatgagcctgccctgttcgtggccctgaccttcgagcggcgggaggtcctggactcctccaatatcaaaccaatgaacctgatcggcgtggcaagaggcgaaaacatccccgccgtgatcgccctgaccgaccccgagggctgcccactgagccggtttaaggatagcctgggaaacccaacccacatcctgagaatcggcgagagctataaggagaagcagcggaccatccaggccaagaaggaggtggagcagcggagagccggcggctacagccggaagtacgccagcaaagccaagaatctggcagacgatatggtgagaaacaccgctagagatctgctgtactacgccgtgacccaggatgccatgctgatcttcgccaacctgagccggggcttcggccggcagggcaagcggaccttcatggccgagagacagtacacacggatggaggactggctgaccgccaagctggcctacgagggcctgagcaagacctacctgtccaagacactggcccagtacacctccaagacatgcagcaactgtgggtttaccatcaccagcgccgactacgacagggtgctggagaagctgaagaagacagcaacaggctggatgaccacaattaacggcaaggagctgaaggtggagggccagattacctactacaacagatacaagagacagaacgtagtcaaggacctgtccgtcgagctggatagactgagcgaagaatctgtgaacaacgacatctcctcctggacaaagggcagaagcggagaagctctgagcctcctgaagaaaagattctcccatagacccgtgcaggagaagttcgtgtgcctgaactgcggcttcgagacacacgcagccgagcaagccgccctgaacatcgccagatcctggctgttcctgcggagccaggagtacaagaaataccagacaaacaagacaaccggcaacaccgataagagagccttcgtcgagacctggcagtccttttaccggaagaagcttaaggaggtgtggaaacctgccgtgcggtctggcggatctggcggaggctccaccagccccaagaaaaagagaaaagtctaagctgccttctgcggggcttgccttctggccatgcccttcttctctcccttgcacctgtacctcttggtctttgaataaagcctgagtaggaaggctagcaaaaaaaaaaaaaaaaaaaaaaaaaaaaaaaaaaaaaaaaaaaaaaaaaaaaaaaaaaaaaaaaaaaaaaaaaaaaaaaa

SEQ ID NO: 10279 - RNA, 8784 nt, synthetic construct
  source 1..8784: mol_type = other RNA
aggaaataagagagaaaagaagagtaagaagaaatataagagccaccatggcccctaagaagaagcgtaaagtgagccggatgaaccacgaccaggagttcgacccccctaaggtgtaccctcccgtccccgccgagaagagaaagcccatccgggtcctgagcctgttcgatggcatcgccaccggtctgctggtgctgaaggacctgggcatccaggtggataggtacattgcctccgaggtgtgcgaggactccatcaccgtgggaatggtgcgtcatcagggcaagatcatgtacgtgggcgacgtgcggagcgtgacacagaagcatatccaggagtggggccctttcgacctggtgatcggcggcagcccttgcaatgacctgagcatcgtgaacccagcccggaagggcctgtacgagggaaccggcagactgttcttcgagttttacagactgctgcacgacgcccggcctaaggaaggcgacgaccggcccttcttttggctgttcgagaatgtggtggccatgggagtcagcgacaagcgggatattagccggttcctggagagcaaccccgtgatgatcgatgccaaggaagtgagcgccgcccaccgggccagatacttctggggcaatctgcctggcatgaacagacccctggccagcaccgtgaacgacaagctggagctgcaggagtgcctggagcacggccggatcgccaagttcagcaaggtgagaaccatcaccacccgaagcaacagcatcaaacaaggcaaggaccagcactttcctgtgttcatgaacgagaaggaggacatcctgtggtgtaccgagatggagagagtgttcgggttcccagtccactacacagatgtcagcaacatgtctagactggccagacagagactgctgggaagaagctggtccgtccctgtgatcagacacctgttcgcccctctgaaggagtacttcgcctgcgtgagcagcggcaacagcaacgccaacagccggggccccagcttctctagcggcctggtgccactgtccctgagagggagccacatgggccccatggagatctacaaaaccgtgagcgcctggaagcggcagcctgtgcgcgtgctgagcctgtttcggaatatcgataaagtcctgaaaagcctgggattcctggagagcggctctggctccggcggtggcaccctgaagtacgtggaggatgtgacaaacgtggtcagacgggatgtggagaagtggggccccttcgatctggtgtacggcagcacccaacccctgggcagctcttgtgaccggtgccctggctggtacatgtttcagttccaccggatcctgcagtacgccctgccgagacaggagtcccagcggccattcttttggattttcatggacaacttgctgctgaccgaggatgaccaggaaactaccactcggttcctgcagaccgaagccgtgaccctgcaggacgtgagaggccgggactaccagaacgccatgcgggtgtggtccaacatccctggactgaaaagcaagcacgcacctctgacccctaaagaagaggagtacctgcaggcccaggtgcggagcagaagcaagctggacgcccctaaggtggatctgctggtgaagaattgcctcctgcccctgagagagtacttcaagtatttcagccagaatagtctgcccctgggaggcagcggcggcggcgaggagacccagggcgagctgaccagcagctgcggcagcaagaccatggccaacgtgagcctggccttcagagacgtgagcatcgacctgagccaggaggagtgggagtgcctggacgccgtgcagagagacctgtacaaggacgtgatgctggagaactacagcaacctggtgagcctgggctacaccatccccaagcccgacgtgatcaccctgctggagcaggagaaggagccctggggcggcccaagcagcggcgcccctcctcccagcggcggcaggcggcccaagcagcggcgcccctcctcccagcggcggcagcccagccggctccccaacctctaccgaggagggcacctctgagtccgccacccccgagagcggccctggcacctccaccgagcccagcgagggcagcgcacccggcagccctgccggcagccccacctccacagaggagggaaccagcaccgagcccagcgaaggcagcgccccaggcaccagcaccgagcctagtgagcaggagattaaacggatcaacaagatcagaagaagacttgtgaaagacagcaacaccaagaaggccggcaagacaggccccatgaaaaccctgctggttagagtgatgacacccgatctgagagagcggctggaaaacctgagaaagaagcctgaaaatatcccccagcccatcagcaatacatctagagccaacctgaataagctgctgaccgattacaccgaaatgaagaaggcgatcctgcatgtgtactgggaagagttccagaaggaccctgtgggcctgatgagccgggtggcccagcctgccagcaagaagatcgatcagaacaagctgaaacctgagatggacgagaagggcaacctgaccaccgccggctttgcctgctctcagtgtggccagcccctgttcgtgtacaagctggagcaggtgtctgagaagggcaaggcttacaccaactacttcggacggtgcaatgtggccgagcacgaaaagctgatcctgctggcccagctgaagcccgagaaggatagcgacgaagccgtgacatatagcctgggaaagtttgggcagagggccctggatttctacagcattcatgtgaccaaggagtccacccaccccgtgaagcccctggcccagatcgccggaaacagatacgcctccggacctgtgggaaaggccctgagcgacgcatgtatgggcacaatcgcctccttcctgtctaagtaccaggacatcatcatcgaacaccagaaggtggtgaagggcaaccagaagagactggagagcctgcgggagctggccggcaaggaaaacctggaataccctagcgtgaccctgccacctcagcctcacaccaaggagggcgttgatgcctacaacgaagtgatcgcccgggtgcgaatgtgggtgaacctgaacctgtggcagaagctgaagctaagcagagatgatgccaagcctctgctgagactgaagggattcccttcctttcctctggtcgagagacaggccaacgaagtggactggtgggacatggtgtgtaacgtgaagaagctgatcaacgagaaaaaggaggatggcaaggtgttttggcagaatctggctggctacaagagacaggaagccctgagaccatacctgagcagcgaggaagatcggaagaagggaaagaaattcgctcggtaccagctgggcgacctgctgctgcacctggaaaagaagcacggcgaggactggggaaaggtgtacgacgaggcctgggagcggattgacaagaaagtggaaggcctgagcaagcacatcaagctggaagaggaacggagaagcgaggacgcccagagcaaggccgccctgaccgactggctgcgggctaaggccagcttcgtgatcgagggcctgaaggaggccgacaaggacgagttctgcagatgcgagctgaagctgcagaagtggtacggggacctgcggggaaagcccttcgccatcgaagccgagaacagcatcctggacatcagcggcttcagcaagcagtacaactgtgccttcatctggcagaaggacggcgtgaagaagctgaacctgtacctgatcatcaactacttcaagggcggcaagctgcggttcaagaagatcaaacctgaagccttcgaagccaacagattctacaccgtgatcaacaaaaagagcggcgagatcgtgcccatggaggtgaacttcaacttcgacgaccccaacctgatcatcctgcctctggcctttggcaagagacagggcagagaattcatctggaacgacctgctgtccctggaaaccggcagcctgaagctggccaacggaagagtgatcgagaagacactgtacaacagaagaacccggcaggatgagcctgccctgttcgtggccctgaccttcgagcggcgggaggtcctggactcctccaatatcaaaccaatgaacctgatcggcgtggcaagaggcgaaaacatccccgccgtgatcgccctgaccgaccccgagggctgcccactgagccggtttaaggatagcctgggaaacccaacccacatcctgagaatcggcgagagctataaggagaagcagcggaccatccaggccaagaaggaggtggagcagcggagagccggcggctacagccggaagtacgccagcaaagccaagaatctggcagacgatatggtgagaaacaccgctagagatctgctgtactacgccgtgacccaggatgccatgctgatcttcgccaacctgagccggggcttcggccggcagggcaagcggaccttcatggccgagagacagtacacacggatggaggactggctgaccgccaagctggcctacgagggcctgagcaagacctacctgtccaagacactggcccagtacacctccaagacatgcagcaactgtgggtttaccatcaccagcgccgactacgacagggtgctggagaagctgaagaagacagcaacaggctggatgaccacaattaacggcaaggagctgaaggtggagggccagattacctactacaacagatacaagagacagaacgtagtcaaggacctgtccgtcgagctggatagactgagcgaagaatctgtgaacaacgacatctcctcctggacaaagggcagaagcggagaagctctgagcctcctgaagaaaagattctcccatagacccgtgcaggagaagttcgtgtgcctgaactgcggcttcgagacacacgcagccgagcaagccgccctgaacatcgccagatcctggctgttcctgcggagccaggagtacaagaaataccagacaaacaagacaaccggcaacaccgataagagagccttcgtcgagacctggcagtccttttaccggaagaagcttaaggaggtgtggaaacctgccgtgcggtctggcggatctggcggaggctccaccagccccaagaaaaagagaaaagtctaagctgccttctgcggggcttgccttctggccatgcccttcttctctcccttgcacctgtacctcttggtctttgaataaagcctgagtaggaaggctagcaaaaaaaaaaaaaaaaaaaaaaaaaaaaaaaaaaaaaaaaaaaaaaaaaaaaaaaaaaaaaaaaaaaaaaaaaaaaaaaagcccagccggctccccaacctctaccgaggagggcacctctgagtccgccacccccgagagcggccctggcacctccaccgagcccagcgagggcagcgcacccggcagccctgccggcagccccacctccacagaggagggaaccagcaccgagcccagcgaaggcagcgccccaggcaccagcaccgagcctagtgagcaggagattaaacggatcaacaagatcagaagaagacttgtgaaagacagcaacaccaagaaggccggcaagacaggccccatgaaaaccctgctggttagagtgatgacacccgatctgagagagcggctggaaaacctgagaaagaagcctgaaaatatcccccagcccatcagcaatacatctagagccaacctgaataagctgctgaccgattacaccgaaatgaagaaggcgatcctgcatgtgtactgggaagagttccagaaggaccctgtgggcctgatgagccgggtggcccagcctgccagcaagaagatcgatcagaacaagctgaaacctgagatggacgagaagggcaacctgaccaccgccggctttgcctgctctcagtgtggccagcccctgttcgtgtacaagctggagcaggtgtctgagaagggcaaggcttacaccaactacttcggacggtgcaatgtggccgagcacgaaaagctgatcctgctggcccagctgaagcccgagaaggatagcgacgaagccgtgacatatagcctgggaaagtttgggcagagggccctggatttctacagcattcatgtgaccaaggagtccacccaccccgtgaagcccctggcccagatcgccggaaacagatacgcctccggacctgtgggaaaggccctgagcgacgcatgtatgggcacaatcgcctccttcctgtctaagtaccaggacatcatcatcgaacaccagaaggtggtgaagggcaaccagaagagactggagagcctgcgggagctggccggcaaggaaaacctggaataccctagcgtgaccctgccacctcagcctcacaccaaggagggcgttgatgcctacaacgaagtgatcgcccgggtgcgaatgtgggtgaacctgaacctgtggcagaagctgaagctaagcagagatgatgccaagcctctgctgagactgaagggattcccttcctttcctctggtcgagagacaggccaacgaagtggactggtgggacatggtgtgtaacgtgaagaagctgatcaacgagaaaaaggaggatggcaaggtgttttggcagaatctggctggctacaagagacaggaagccctgagaccatacctgagcagcgaggaagatcggaagaagggaaagaaattcgctcggtaccagctgggcgacctgctgctgcacctggaaaagaagcacggcgaggactggggaaaggtgtacgacgaggcctgggagcggattgacaagaaagtggaaggcctgagcaagcacatcaagctggaagaggaacggagaagcgaggacgcccagagcaaggccgccctgaccgactggctgcgggctaaggccagcttcgtgatcgagggcctgaaggaggccgacaaggacgagttctgcagatgcgagctgaagctgcagaagtggtacggggacctgcggggaaagcccttcgccatcgaagccgagaacagcatcctggacatcagcggcttcagcaagcagtacaactgtgccttcatctggcagaaggacggcgtgaagaagctgaacctgtacctgatcatcaactacttcaagggcggcaagctgcggttcaagaagatcaaacctgaagccttcgaagccaacagattctacaccgtgatcaacaaaaagagcggcgagatcgtgcccatggaggtgaacttcaacttcgacgaccccaacctgatcatcctgcctctggcctttggcaagagacagggcagagaattcatctggaacgacctgctgtccctggaaaccggcagcctgaagctggccaacggaagagtgatcgagaagacactgtacaacagaagaacccggcaggatgagcctgccctgttcgtggccctgaccttcgagcggcgggaggtcctggactcctccaatatcaaaccaatgaacctgatcggcgtggcaagaggcgaaaacatccccgccgtgatcgccctgaccgaccccgagggctgcccactgagccggtttaaggatagcctgggaaacccaacccacatcctgagaatcggcgagagctataaggagaagcagcggaccatccaggccaagaaggaggtggagcagcggagagccggcggctacagccggaagtacgccagcaaagccaagaatctggcagacgatatggtgagaaacaccgctagagatctgctgtactacgccgtgacccaggatgccatgctgatcttcgccaacctgagccggggcttcggccggcagggcaagcggaccttcatggccgagagacagtacacacggatggaggactggctgaccgccaagctggcctacgagggcctgagcaagacctacctgtccaagacactggcccagtacacctccaagacatgcagcaactgtgggtttaccatcaccagcgccgactacgacagggtgctggagaagctgaagaagacagcaacaggctggatgaccacaattaacggcaaggagctgaaggtggagggccagattacctactacaacagatacaagagacagaacgtagtcaaggacctgtccgtcgagctggatagactgagcgaagaatctgtgaacaacgacatctcctcctggacaaagggcagaagcggagaagctctgagcctcctgaagaaaagattctcccatagacccgtgcaggagaagttcgtgtgcctgaactgcggcttcgagacacacgcagccgagcaagccgccctgaacatcgccagatcctggctgttcctgcggagccaggagtacaagaaataccagacaaacaagacaaccggcaacaccgataagagagccttcgtcgagacctggcagtccttttaccggaagaagcttaaggaggtgtggaaacctgccgtgcggtctggcggatctggcggaggctccaccagccccaagaaaaagagaaaagtctaagctgccttctgcggggcttgccttctggccatgcccttcttctctcccttgcacctgtacctcttggtctttgaataaagcctgagtaggaaggctagcaaaaaaaaaaaaaaaaaaaaaaaaaaaaaaaaaaaaaaaaaaaaaaaaaaaaaaaaaaaaaaaaaaaaaaaaaaaaaaaa

SEQ ID NO: 10280 - RNA, 8787 nt, synthetic construct
  source 1..8787: mol_type = other RNA
aggaaataagagagaaaagaagagtaagaagaaatataagagccaccatggcccctaagaagaagcgtaaagtgagccggatgaaccacgaccaggagttcgacccccctaaggtgtaccctcccgtccccgccgagaagagaaagcccatccgggtcctgagcctgttcgatggcatcgccaccggtctgctggtgctgaaggacctgggcatccaggtggataggtacattgcctccgaggtgtgcgaggactccatcaccgtgggaatggtgcgtcatcagggcaagatcatgtacgtgggcgacgtgcggagcgtgacacagaagcatatccaggagtggggccctttcgacctggtgatcggcggcagcccttgcaatgacctgagcatcgtgaacccagcccggaagggcctgtacgagggaaccggcagactgttcttcgagttttacagactgctgcacgacgcccggcctaaggaaggcgacgaccggcccttcttttggctgttcgagaatgtggtggccatgggagtcagcgacaagcgggatattagccggttcctggagagcaaccccgtgatgatcgatgccaaggaagtgagcgccgcccaccgggccagatacttctggggcaatctgcctggcatgaacagacccctggccagcaccgtgaacgacaagctggagctgcaggagtgcctggagcacggccggatcgccaagttcagcaaggtgagaaccatcaccacccgaagcaacagcatcaaacaaggcaaggaccagcactttcctgtgttcatgaacgagaaggaggacatcctgtggtgtaccgagatggagagagtgttcgggttcccagtccactacacagatgtcagcaacatgtctagactggccagacagagactgctgggaagaagctggtccgtccctgtgatcagacacctgttcgcccctctgaaggagtacttcgcctgcgtgagcagcggcaacagcaacgccaacagccggggccccagcttctctagcggcctggtgccactgtccctgagagggagccacatgggccccatggagatctacaaaaccgtgagcgcctggaagcggcagcctgtgcgcgtgctgagcctgtttcggaatatcgataaagtcctgaaaagcctgggattcctggagagcggctctggctccggcggtggcaccctgaagtacgtggaggatgtgacaaacgtggtcagacgggatgtggagaagtggggccccttcgatctggtgtacggcagcacccaacccctgggcagctcttgtgaccggtgccctggctggtacatgtttcagttccaccggatcctgcagtacgccctgccgagacaggagtcccagcggccattcttttggattttcatggacaacttgctgctgaccgaggatgaccaggaaactaccactcggttcctgcagaccgaagccgtgaccctgcaggacgtgagaggccgggactaccagaacgccatgcgggtgtggtccaacatccctggactgaaaagcaagcacgcacctctgacccctaaagaagaggagtacctgcaggcccaggtgcggagcagaagcaagctggacgcccctaaggtggatctgctggtgaagaattgcctcctgcccctgagagagtacttcaagtatttcagccagaatagtctgcccctgggaggcagcggcggcggcatgggcccccagggcgccaggaggcaggccttcctggccttcggcgacgtgaccgtggacttcacccagaaggagtggaggctgctgagccccgcccagagggccctgtacagggaggtgaccctggagaactacagccacctggtgagcctgggcatcctgcacagcaagcccgagctgatcaggaggctggagcagggcgaggccccctggggcgaggagaggaggaggaggcccggccccggcggcccaagcagcggcgcccctcctcccagcggcggcaggcggcccaagcagcggcgcccctcctcccagcggcggcagcccagccggctccccaacctctaccgaggagggcacctctgagtccgccacccccgagagcggccctggcacctccaccgagcccagcgagggcagcgcacccggcagccctgccggcagccccacctccacagaggagggaaccagcaccgagcccagcgaaggcagcgccccaggcaccagcaccgagcctagtgagcaggagattaaacggatcaacaagatcagaagaagacttgtgaaagacagcaacaccaagaaggccggcaagacaggccccatgaaaaccctgctggttagagtgatgacacccgatctgagagagcggctggaaaacctgagaaagaagcctgaaaatatcccccagcccatcagcaatacatctagagccaacctgaataagctgctgaccgattacaccgaaatgaagaaggcgatcctgcatgtgtactgggaagagttccagaaggaccctgtgggcctgatgagccgggtggcccagcctgccagcaagaagatcgatcagaacaagctgaaacctgagatggacgagaagggcaacctgaccaccgccggctttgcctgctctcagtgtggccagcccctgttcgtgtacaagctggagcaggtgtctgagaagggcaaggcttacaccaactacttcggacggtgcaatgtggccgagcacgaaaagctgatcctgctggcccagctgaagcccgagaaggatagcgacgaagccgtgacatatagcctgggaaagtttgggcagagggccctggatttctacagcattcatgtgaccaaggagtccacccaccccgtgaagcccctggcccagatcgccggaaacagatacgcctccggacctgtgggaaaggccctgagcgacgcatgtatgggcacaatcgcctccttcctgtctaagtaccaggacatcatcatcgaacaccagaaggtggtgaagggcaaccagaagagactggagagcctgcgggagctggccggcaaggaaaacctggaataccctagcgtgaccctgccacctcagcctcacaccaaggagggcgttgatgcctacaacgaagtgatcgcccgggtgcgaatgtgggtgaacctgaacctgtggcagaagctgaagctaagcagagatgatgccaagcctctgctgagactgaagggattcccttcctttcctctggtcgagagacaggccaacgaagtggactggtgggacatggtgtgtaacgtgaagaagctgatcaacgagaaaaaggaggatggcaaggtgttttggcagaatctggctggctacaagagacaggaagccctgagaccatacctgagcagcgaggaagatcggaagaagggaaagaaattcgctcggtaccagctgggcgacctgctgctgcacctggaaaagaagcacggcgaggactggggaaaggtgtacgacgaggcctgggagcggattgacaagaaagtggaaggcctgagcaagcacatcaagctggaagaggaacggagaagcgaggacgcccagagcaaggccgccctgaccgactggctgcgggctaaggccagcttcgtgatcgagggcctgaaggaggccgacaaggacgagttctgcagatgcgagctgaagctgcagaagtggtacggggacctgcggggaaagcccttcgccatcgaagccgagaacagcatcctggacatcagcggcttcagcaagcagtacaactgtgccttcatctggcagaaggacggcgtgaagaagctgaacctgtacctgatcatcaactacttcaagggcggcaagctgcggttcaagaagatcaaacctgaagccttcgaagccaacagattctacaccgtgatcaacaaaaagagcggcgagatcgtgcccatggaggtgaacttcaacttcgacgaccccaacctgatcatcctgcctctggcctttggcaagagacagggcagagaattcatctggaacgacctgctgtccctggaaaccggcagcctgaagctggccaacggaagagtgatcgagaagacactgtacaacagaagaacccggcaggatgagcctgccctgttcgtggccctgaccttcgagcggcgggaggtcctggactcctccaatatcaaaccaatgaacctgatcggcgtggcaagaggcgaaaacatccccgccgtgatcgccctgaccgaccccgagggctgcccactgagccggtttaaggatagcctgggaaacccaacccacatcctgagaatcggcgagagctataaggagaagcagcggaccatccaggccaagaaggaggtggagcagcggagagccggcggctacagccggaagtacgccagcaaagccaagaatctggcagacgatatggtgagaaacaccgctagagatctgctgtactacgccgtgacccaggatgccatgctgatcttcgccaacctgagccggggcttcggccggcagggcaagcggaccttcatggccgagagacagtacacacggatggaggactggctgaccgccaagctggcctacgagggcctgagcaagacctacctgtccaagacactggcccagtacacctccaagacatgcagcaactgtgggtttaccatcaccagcgccgactacgacagggtgctggagaagctgaagaagacagcaacaggctggatgaccacaattaacggcaaggagctgaaggtggagggccagattacctactacaacagatacaagagacagaacgtagtcaaggacctgtccgtcgagctggatagactgagcgaagaatctgtgaacaacgacatctcctcctggacaaagggcagaagcggagaagctctgagcctcctgaagaaaagattctcccatagacccgtgcaggagaagttcgtgtgcctgaactgcggcttcgagacacacgcagccgagcaagccgccctgaacatcgccagatcctggctgttcctgcggagccaggagtacaagaaataccagacaaacaagacaaccggcaacaccgataagagagccttcgtcgagacctggcagtccttttaccggaagaagcttaaggaggtgtggaaacctgccgtgcggtctggcggatctggcggaggctccaccagccccaagaaaaagagaaaagtctaagctgccttctgcggggcttgccttctggccatgcccttcttctctcccttgcacctgtacctcttggtctttgaataaagcctgagtaggaaggctagcaaaaaaaaaaaaaaaaaaaaaaaaaaaaaaaaaaaaaaaaaaaaaaaaaaaaaaaaaaaaaaaaaaaaaaaaaaaaaaaagcccagccggctccccaacctctaccgaggagggcacctctgagtccgccacccccgagagcggccctggcacctccaccgagcccagcgagggcagcgcacccggcagccctgccggcagccccacctccacagaggagggaaccagcaccgagcccagcgaaggcagcgccccaggcaccagcaccgagcctagtgagcaggagattaaacggatcaacaagatcagaagaagacttgtgaaagacagcaacaccaagaaggccggcaagacaggccccatgaaaaccctgctggttagagtgatgacacccgatctgagagagcggctggaaaacctgagaaagaagcctgaaaatatcccccagcccatcagcaatacatctagagccaacctgaataagctgctgaccgattacaccgaaatgaagaaggcgatcctgcatgtgtactgggaagagttccagaaggaccctgtgggcctgatgagccgggtggcccagcctgccagcaagaagatcgatcagaacaagctgaaacctgagatggacgagaagggcaacctgaccaccgccggctttgcctgctctcagtgtggccagcccctgttcgtgtacaagctggagcaggtgtctgagaagggcaaggcttacaccaactacttcggacggtgcaatgtggccgagcacgaaaagctgatcctgctggcccagctgaagcccgagaaggatagcgacgaagccgtgacatatagcctgggaaagtttgggcagagggccctggatttctacagcattcatgtgaccaaggagtccacccaccccgtgaagcccctggcccagatcgccggaaacagatacgcctccggacctgtgggaaaggccctgagcgacgcatgtatgggcacaatcgcctccttcctgtctaagtaccaggacatcatcatcgaacaccagaaggtggtgaagggcaaccagaagagactggagagcctgcgggagctggccggcaaggaaaacctggaataccctagcgtgaccctgccacctcagcctcacaccaaggagggcgttgatgcctacaacgaagtgatcgcccgggtgcgaatgtgggtgaacctgaacctgtggcagaagctgaagctaagcagagatgatgccaagcctctgctgagactgaagggattcccttcctttcctctggtcgagagacaggccaacgaagtggactggtgggacatggtgtgtaacgtgaagaagctgatcaacgagaaaaaggaggatggcaaggtgttttggcagaatctggctggctacaagagacaggaagccctgagaccatacctgagcagcgaggaagatcggaagaagggaaagaaattcgctcggtaccagctgggcgacctgctgctgcacctggaaaagaagcacggcgaggactggggaaaggtgtacgacgaggcctgggagcggattgacaagaaagtggaaggcctgagcaagcacatcaagctggaagaggaacggagaagcgaggacgcccagagcaaggccgccctgaccgactggctgcgggctaaggccagcttcgtgatcgagggcctgaaggaggccgacaaggacgagttctgcagatgcgagctgaagctgcagaagtggtacggggacctgcggggaaagcccttcgccatcgaagccgagaacagcatcctggacatcagcggcttcagcaagcagtacaactgtgccttcatctggcagaaggacggcgtgaagaagctgaacctgtacctgatcatcaactacttcaagggcggcaagctgcggttcaagaagatcaaacctgaagccttcgaagccaacagattctacaccgtgatcaacaaaaagagcggcgagatcgtgcccatggaggtgaacttcaacttcgacgaccccaacctgatcatcctgcctctggcctttggcaagagacagggcagagaattcatctggaacgacctgctgtccctggaaaccggcagcctgaagctggccaacggaagagtgatcgagaagacactgtacaacagaagaacccggcaggatgagcctgccctgttcgtggccctgaccttcgagcggcgggaggtcctggactcctccaatatcaaaccaatgaacctgatcggcgtggcaagaggcgaaaacatccccgccgtgatcgccctgaccgaccccgagggctgcccactgagccggtttaaggatagcctgggaaacccaacccacatcctgagaatcggcgagagctataaggagaagcagcggaccatccaggccaagaaggaggtggagcagcggagagccggcggctacagccggaagtacgccagcaaagccaagaatctggcagacgatatggtgagaaacaccgctagagatctgctgtactacgccgtgacccaggatgccatgctgatcttcgccaacctgagccggggcttcggccggcagggcaagcggaccttcatggccgagagacagtacacacggatggaggactggctgaccgccaagctggcctacgagggcctgagcaagacctacctgtccaagacactggcccagtacacctccaagacatgcagcaactgtgggtttaccatcaccagcgccgactacgacagggtgctggagaagctgaagaagacagcaacaggctggatgaccacaattaacggcaaggagctgaaggtggagggccagattacctactacaacagatacaagagacagaacgtagtcaaggacctgtccgtcgagctggatagactgagcgaagaatctgtgaacaacgacatctcctcctggacaaagggcagaagcggagaagctctgagcctcctgaagaaaagattctcccatagacccgtgcaggagaagttcgtgtgcctgaactgcggcttcgagacacacgcagccgagcaagccgccctgaacatcgccagatcctggctgttcctgcggagccaggagtacaagaaataccagacaaacaagacaaccggcaacaccgataagagagccttcgtcgagacctggcagtccttttaccggaagaagcttaaggaggtgtggaaacctgccgtgcggtctggcggatctggcggaggctccaccagccccaagaaaaagagaaaagtctaagctgccttctgcggggcttgccttctggccatgcccttcttctctcccttgcacctgtacctcttggtctttgaataaagcctgagtaggaaggctagcaaaaaaaaaaaaaaaaaaaaaaaaaaaaaaaaaaaaaaaaaaaaaaaaaaaaaaaaaaaaaaaaaaaaaaaaaaaaaaaa

SEQ ID NO: 10281 - RNA, 8787 nt, synthetic construct
  source 1..8787: mol_type = other RNA
aggaaataagagagaaaagaagagtaagaagaaatataagagccaccatggcccctaagaagaagcgtaaagtgagccggatgaaccacgaccaggagttcgacccccctaaggtgtaccctcccgtccccgccgagaagagaaagcccatccgggtcctgagcctgttcgatggcatcgccaccggtctgctggtgctgaaggacctgggcatccaggtggataggtacattgcctccgaggtgtgcgaggactccatcaccgtgggaatggtgcgtcatcagggcaagatcatgtacgtgggcgacgtgcggagcgtgacacagaagcatatccaggagtggggccctttcgacctggtgatcggcggcagcccttgcaatgacctgagcatcgtgaacccagcccggaagggcctgtacgagggaaccggcagactgttcttcgagttttacagactgctgcacgacgcccggcctaaggaaggcgacgaccggcccttcttttggctgttcgagaatgtggtggccatgggagtcagcgacaagcgggatattagccggttcctggagagcaaccccgtgatgatcgatgccaaggaagtgagcgccgcccaccgggccagatacttctggggcaatctgcctggcatgaacagacccctggccagcaccgtgaacgacaagctggagctgcaggagtgcctggagcacggccggatcgccaagttcagcaaggtgagaaccatcaccacccgaagcaacagcatcaaacaaggcaaggaccagcactttcctgtgttcatgaacgagaaggaggacatcctgtggtgtaccgagatggagagagtgttcgggttcccagtccactacacagatgtcagcaacatgtctagactggccagacagagactgctgggaagaagctggtccgtccctgtgatcagacacctgttcgcccctctgaaggagtacttcgcctgcgtgagcagcggcaacagcaacgccaacagccggggccccagcttctctagcggcctggtgccactgtccctgagagggagccacatgggccccatggagatctacaaaaccgtgagcgcctggaagcggcagcctgtgcgcgtgctgagcctgtttcggaatatcgataaagtcctgaaaagcctgggattcctggagagcggctctggctccggcggtggcaccctgaagtacgtggaggatgtgacaaacgtggtcagacgggatgtggagaagtggggccccttcgatctggtgtacggcagcacccaacccctgggcagctcttgtgaccggtgccctggctggtacatgtttcagttccaccggatcctgcagtacgccctgccgagacaggagtcccagcggccattcttttggattttcatggacaacttgctgctgaccgaggatgaccaggaaactaccactcggttcctgcagaccgaagccgtgaccctgcaggacgtgagaggccgggactaccagaacgccatgcgggtgtggtccaacatccctggactgaaaagcaagcacgcacctctgacccctaaagaagaggagtacctgcaggcccaggtgcggagcagaagcaagctggacgcccctaaggtggatctgctggtgaagaattgcctcctgcccctgagagagtacttcaagtatttcagccagaatagtctgcccctgggaggcagcggcggcggcttccagggcagcgtgaccttcaccgacgtggccatcgacttcagccaggaggagtggaggtggctgcagcccgcccagagggacctgtacaggtgcgtgatgctggagaactacggccacctggtgagcctgggcctgagcatcagcaagcccgacgtggtgagcctgctggagcagggcaaggagccctggctgggcaagaggaacgtgaacagggacctgttcagcgtgagcgagagcaggggcggcccaagcagcggcgcccctcctcccagcggcggcaggcggcccaagcagcggcgcccctcctcccagcggcggcagcccagccggctccccaacctctaccgaggagggcacctctgagtccgccacccccgagagcggccctggcacctccaccgagcccagcgagggcagcgcacccggcagccctgccggcagccccacctccacagaggagggaaccagcaccgagcccagcgaaggcagcgccccaggcaccagcaccgagcctagtgagcaggagattaaacggatcaacaagatcagaagaagacttgtgaaagacagcaacaccaagaaggccggcaagacaggccccatgaaaaccctgctggttagagtgatgacacccgatctgagagagcggctggaaaacctgagaaagaagcctgaaaatatcccccagcccatcagcaatacatctagagccaacctgaataagctgctgaccgattacaccgaaatgaagaaggcgatcctgcatgtgtactgggaagagttccagaaggaccctgtgggcctgatgagccgggtggcccagcctgccagcaagaagatcgatcagaacaagctgaaacctgagatggacgagaagggcaacctgaccaccgccggctttgcctgctctcagtgtggccagcccctgttcgtgtacaagctggagcaggtgtctgagaagggcaaggcttacaccaactacttcggacggtgcaatgtggccgagcacgaaaagctgatcctgctggcccagctgaagcccgagaaggatagcgacgaagccgtgacatatagcctgggaaagtttgggcagagggccctggatttctacagcattcatgtgaccaaggagtccacccaccccgtgaagcccctggcccagatcgccggaaacagatacgcctccggacctgtgggaaaggccctgagcgacgcatgtatgggcacaatcgcctccttcctgtctaagtaccaggacatcatcatcgaacaccagaaggtggtgaagggcaaccagaagagactggagagcctgcgggagctggccggcaaggaaaacctggaataccctagcgtgaccctgccacctcagcctcacaccaaggagggcgttgatgcctacaacgaagtgatcgcccgggtgcgaatgtgggtgaacctgaacctgtggcagaagctgaagctaagcagagatgatgccaagcctctgctgagactgaagggattcccttcctttcctctggtcgagagacaggccaacgaagtggactggtgggacatggtgtgtaacgtgaagaagctgatcaacgagaaaaaggaggatggcaaggtgttttggcagaatctggctggctacaagagacaggaagccctgagaccatacctgagcagcgaggaagatcggaagaagggaaagaaattcgctcggtaccagctgggcgacctgctgctgcacctggaaaagaagcacggcgaggactggggaaaggtgtacgacgaggcctgggagcggattgacaagaaagtggaaggcctgagcaagcacatcaagctggaagaggaacggagaagcgaggacgcccagagcaaggccgccctgaccgactggctgcgggctaaggccagcttcgtgatcgagggcctgaaggaggccgacaaggacgagttctgcagatgcgagctgaagctgcagaagtggtacggggacctgcggggaaagcccttcgccatcgaagccgagaacagcatcctggacatcagcggcttcagcaagcagtacaactgtgccttcatctggcagaaggacggcgtgaagaagctgaacctgtacctgatcatcaactacttcaagggcggcaagctgcggttcaagaagatcaaacctgaagccttcgaagccaacagattctacaccgtgatcaacaaaaagagcggcgagatcgtgcccatggaggtgaacttcaacttcgacgaccccaacctgatcatcctgcctctggcctttggcaagagacagggcagagaattcatctggaacgacctgctgtccctggaaaccggcagcctgaagctggccaacggaagagtgatcgagaagacactgtacaacagaagaacccggcaggatgagcctgccctgttcgtggccctgaccttcgagcggcgggaggtcctggactcctccaatatcaaaccaatgaacctgatcggcgtggcaagaggcgaaaacatccccgccgtgatcgccctgaccgaccccgagggctgcccactgagccggtttaaggatagcctgggaaacccaacccacatcctgagaatcggcgagagctataaggagaagcagcggaccatccaggccaagaaggaggtggagcagcggagagccggcggctacagccggaagtacgccagcaaagccaagaatctggcagacgatatggtgagaaacaccgctagagatctgctgtactacgccgtgacccaggatgccatgctgatcttcgccaacctgagccggggcttcggccggcagggcaagcggaccttcatggccgagagacagtacacacggatggaggactggctgaccgccaagctggcctacgagggcctgagcaagacctacctgtccaagacactggcccagtacacctccaagacatgcagcaactgtgggtttaccatcaccagcgccgactacgacagggtgctggagaagctgaagaagacagcaacaggctggatgaccacaattaacggcaaggagctgaaggtggagggccagattacctactacaacagatacaagagacagaacgtagtcaaggacctgtccgtcgagctggatagactgagcgaagaatctgtgaacaacgacatctcctcctggacaaagggcagaagcggagaagctctgagcctcctgaagaaaagattctcccatagacccgtgcaggagaagttcgtgtgcctgaactgcggcttcgagacacacgcagccgagcaagccgccctgaacatcgccagatcctggctgttcctgcggagccaggagtacaagaaataccagacaaacaagacaaccggcaacaccgataagagagccttcgtcgagacctggcagtccttttaccggaagaagcttaaggaggtgtggaaacctgccgtgcggtctggcggatctggcggaggctccaccagccccaagaaaaagagaaaagtctaagctgccttctgcggggcttgccttctggccatgcccttcttctctcccttgcacctgtacctcttggtctttgaataaagcctgagtaggaaggctagcaaaaaaaaaaaaaaaaaaaaaaaaaaaaaaaaaaaaaaaaaaaaaaaaaaaaaaaaaaaaaaaaaaaaaaaaaaaaaaaagcccagccggctccccaacctctaccgaggagggcacctctgagtccgccacccccgagagcggccctggcacctccaccgagcccagcgagggcagcgcacccggcagccctgccggcagccccacctccacagaggagggaaccagcaccgagcccagcgaaggcagcgccccaggcaccagcaccgagcctagtgagcaggagattaaacggatcaacaagatcagaagaagacttgtgaaagacagcaacaccaagaaggccggcaagacaggccccatgaaaaccctgctggttagagtgatgacacccgatctgagagagcggctggaaaacctgagaaagaagcctgaaaatatcccccagcccatcagcaatacatctagagccaacctgaataagctgctgaccgattacaccgaaatgaagaaggcgatcctgcatgtgtactgggaagagttccagaaggaccctgtgggcctgatgagccgggtggcccagcctgccagcaagaagatcgatcagaacaagctgaaacctgagatggacgagaagggcaacctgaccaccgccggctttgcctgctctcagtgtggccagcccctgttcgtgtacaagctggagcaggtgtctgagaagggcaaggcttacaccaactacttcggacggtgcaatgtggccgagcacgaaaagctgatcctgctggcccagctgaagcccgagaaggatagcgacgaagccgtgacatatagcctgggaaagtttgggcagagggccctggatttctacagcattcatgtgaccaaggagtccacccaccccgtgaagcccctggcccagatcgccggaaacagatacgcctccggacctgtgggaaaggccctgagcgacgcatgtatgggcacaatcgcctccttcctgtctaagtaccaggacatcatcatcgaacaccagaaggtggtgaagggcaaccagaagagactggagagcctgcgggagctggccggcaaggaaaacctggaataccctagcgtgaccctgccacctcagcctcacaccaaggagggcgttgatgcctacaacgaagtgatcgcccgggtgcgaatgtgggtgaacctgaacctgtggcagaagctgaagctaagcagagatgatgccaagcctctgctgagactgaagggattcccttcctttcctctggtcgagagacaggccaacgaagtggactggtgggacatggtgtgtaacgtgaagaagctgatcaacgagaaaaaggaggatggcaaggtgttttggcagaatctggctggctacaagagacaggaagccctgagaccatacctgagcagcgaggaagatcggaagaagggaaagaaattcgctcggtaccagctgggcgacctgctgctgcacctggaaaagaagcacggcgaggactggggaaaggtgtacgacgaggcctgggagcggattgacaagaaagtggaaggcctgagcaagcacatcaagctggaagaggaacggagaagcgaggacgcccagagcaaggccgccctgaccgactggctgcgggctaaggccagcttcgtgatcgagggcctgaaggaggccgacaaggacgagttctgcagatgcgagctgaagctgcagaagtggtacggggacctgcggggaaagcccttcgccatcgaagccgagaacagcatcctggacatcagcggcttcagcaagcagtacaactgtgccttcatctggcagaaggacggcgtgaagaagctgaacctgtacctgatcatcaactacttcaagggcggcaagctgcggttcaagaagatcaaacctgaagccttcgaagccaacagattctacaccgtgatcaacaaaaagagcggcgagatcgtgcccatggaggtgaacttcaacttcgacgaccccaacctgatcatcctgcctctggcctttggcaagagacagggcagagaattcatctggaacgacctgctgtccctggaaaccggcagcctgaagctggccaacggaagagtgatcgagaagacactgtacaacagaagaacccggcaggatgagcctgccctgttcgtggccctgaccttcgagcggcgggaggtcctggactcctccaatatcaaaccaatgaacctgatcggcgtggcaagaggcgaaaacatccccgccgtgatcgccctgaccgaccccgagggctgcccactgagccggtttaaggatagcctgggaaacccaacccacatcctgagaatcggcgagagctataaggagaagcagcggaccatccaggccaagaaggaggtggagcagcggagagccggcggctacagccggaagtacgccagcaaagccaagaatctggcagacgatatggtgagaaacaccgctagagatctgctgtactacgccgtgacccaggatgccatgctgatcttcgccaacctgagccggggcttcggccggcagggcaagcggaccttcatggccgagagacagtacacacggatggaggactggctgaccgccaagctggcctacgagggcctgagcaagacctacctgtccaagacactggcccagtacacctccaagacatgcagcaactgtgggtttaccatcaccagcgccgactacgacagggtgctggagaagctgaagaagacagcaacaggctggatgaccacaattaacggcaaggagctgaaggtggagggccagattacctactacaacagatacaagagacagaacgtagtcaaggacctgtccgtcgagctggatagactgagcgaagaatctgtgaacaacgacatctcctcctggacaaagggcagaagcggagaagctctgagcctcctgaagaaaagattctcccatagacccgtgcaggagaagttcgtgtgcctgaactgcggcttcgagacacacgcagccgagcaagccgccctgaacatcgccagatcctggctgttcctgcggagccaggagtacaagaaataccagacaaacaagacaaccggcaacaccgataagagagccttcgtcgagacctggcagtccttttaccggaagaagcttaaggaggtgtggaaacctgccgtgcggtctggcggatctggcggaggctccaccagccccaagaaaaagagaaaagtctaagctgccttctgcggggcttgccttctggccatgcccttcttctctcccttgcacctgtacctcttggtctttgaataaagcctgagtaggaaggctagcaaaaaaaaaaaaaaaaaaaaaaaaaaaaaaaaaaaaaaaaaaaaaaaaaaaaaaaaaaaaaaaaaaaaaaaaaaaaaaaa

SEQ ID NO: 10282 - RNA, 8787 nt, synthetic construct
  source 1..8787: mol_type = other RNA
aggaaataagagagaaaagaagagtaagaagaaatataagagccaccatggcccctaagaagaagcgtaaagtgagccggatgaaccacgaccaggagttcgacccccctaaggtgtaccctcccgtccccgccgagaagagaaagcccatccgggtcctgagcctgttcgatggcatcgccaccggtctgctggtgctgaaggacctgggcatccaggtggataggtacattgcctccgaggtgtgcgaggactccatcaccgtgggaatggtgcgtcatcagggcaagatcatgtacgtgggcgacgtgcggagcgtgacacagaagcatatccaggagtggggccctttcgacctggtgatcggcggcagcccttgcaatgacctgagcatcgtgaacccagcccggaagggcctgtacgagggaaccggcagactgttcttcgagttttacagactgctgcacgacgcccggcctaaggaaggcgacgaccggcccttcttttggctgttcgagaatgtggtggccatgggagtcagcgacaagcgggatattagccggttcctggagagcaaccccgtgatgatcgatgccaaggaagtgagcgccgcccaccgggccagatacttctggggcaatctgcctggcatgaacagacccctggccagcaccgtgaacgacaagctggagctgcaggagtgcctggagcacggccggatcgccaagttcagcaaggtgagaaccatcaccacccgaagcaacagcatcaaacaaggcaaggaccagcactttcctgtgttcatgaacgagaaggaggacatcctgtggtgtaccgagatggagagagtgttcgggttcccagtccactacacagatgtcagcaacatgtctagactggccagacagagactgctgggaagaagctggtccgtccctgtgatcagacacctgttcgcccctctgaaggagtacttcgcctgcgtgagcagcggcaacagcaacgccaacagccggggccccagcttctctagcggcctggtgccactgtccctgagagggagccacatgggccccatggagatctacaaaaccgtgagcgcctggaagcggcagcctgtgcgcgtgctgagcctgtttcggaatatcgataaagtcctgaaaagcctgggattcctggagagcggctctggctccggcggtggcaccctgaagtacgtggaggatgtgacaaacgtggtcagacgggatgtggagaagtggggccccttcgatctggtgtacggcagcacccaacccctgggcagctcttgtgaccggtgccctggctggtacatgtttcagttccaccggatcctgcagtacgccctgccgagacaggagtcccagcggccattcttttggattttcatggacaacttgctgctgaccgaggatgaccaggaaactaccactcggttcctgcagaccgaagccgtgaccctgcaggacgtgagaggccgggactaccagaacgccatgcgggtgtggtccaacatccctggactgaaaagcaagcacgcacctctgacccctaaagaagaggagtacctgcaggcccaggtgcggagcagaagcaagctggacgcccctaaggtggatctgctggtgaagaattgcctcctgcccctgagagagtacttcaagtatttcagccagaatagtctgcccctgggaggcagcggcggcggctggaaggagctgctgagcttcgaggacgtggccatgtacttcaccagggaggagtggaacaggctggactgggcccagaaggacctgtacagggacgtgatgctggagaactacaggaacatgatcctgctgggcttccagttccccaagcccgaggtgatctgcctgctggagcagtgggaggagccctggatcctggacctgcccagggccggcaccaggaaggccagcagcagcgcctgcggcggcccaagcagcggcgcccctcctcccagcggcggcaggcggcccaagcagcggcgcccctcctcccagcggcggcagcccagccggctccccaacctctaccgaggagggcacctctgagtccgccacccccgagagcggccctggcacctccaccgagcccagcgagggcagcgcacccggcagccctgccggcagccccacctccacagaggagggaaccagcaccgagcccagcgaaggcagcgccccaggcaccagcaccgagcctagtgagcaggagattaaacggatcaacaagatcagaagaagacttgtgaaagacagcaacaccaagaaggccggcaagacaggccccatgaaaaccctgctggttagagtgatgacacccgatctgagagagcggctggaaaacctgagaaagaagcctgaaaatatcccccagcccatcagcaatacatctagagccaacctgaataagctgctgaccgattacaccgaaatgaagaaggcgatcctgcatgtgtactgggaagagttccagaaggaccctgtgggcctgatgagccgggtggcccagcctgccagcaagaagatcgatcagaacaagctgaaacctgagatggacgagaagggcaacctgaccaccgccggctttgcctgctctcagtgtggccagcccctgttcgtgtacaagctggagcaggtgtctgagaagggcaaggcttacaccaactacttcggacggtgcaatgtggccgagcacgaaaagctgatcctgctggcccagctgaagcccgagaaggatagcgacgaagccgtgacatatagcctgggaaagtttgggcagagggccctggatttctacagcattcatgtgaccaaggagtccacccaccccgtgaagcccctggcccagatcgccggaaacagatacgcctccggacctgtgggaaaggccctgagcgacgcatgtatgggcacaatcgcctccttcctgtctaagtaccaggacatcatcatcgaacaccagaaggtggtgaagggcaaccagaagagactggagagcctgcgggagctggccggcaaggaaaacctggaataccctagcgtgaccctgccacctcagcctcacaccaaggagggcgttgatgcctacaacgaagtgatcgcccgggtgcgaatgtgggtgaacctgaacctgtggcagaagctgaagctaagcagagatgatgccaagcctctgctgagactgaagggattcccttcctttcctctggtcgagagacaggccaacgaagtggactggtgggacatggtgtgtaacgtgaagaagctgatcaacgagaaaaaggaggatggcaaggtgttttggcagaatctggctggctacaagagacaggaagccctgagaccatacctgagcagcgaggaagatcggaagaagggaaagaaattcgctcggtaccagctgggcgacctgctgctgcacctggaaaagaagcacggcgaggactggggaaaggtgtacgacgaggcctgggagcggattgacaagaaagtggaaggcctgagcaagcacatcaagctggaagaggaacggagaagcgaggacgcccagagcaaggccgccctgaccgactggctgcgggctaaggccagcttcgtgatcgagggcctgaaggaggccgacaaggacgagttctgcagatgcgagctgaagctgcagaagtggtacggggacctgcggggaaagcccttcgccatcgaagccgagaacagcatcctggacatcagcggcttcagcaagcagtacaactgtgccttcatctggcagaaggacggcgtgaagaagctgaacctgtacctgatcatcaactacttcaagggcggcaagctgcggttcaagaagatcaaacctgaagccttcgaagccaacagattctacaccgtgatcaacaaaaagagcggcgagatcgtgcccatggaggtgaacttcaacttcgacgaccccaacctgatcatcctgcctctggcctttggcaagagacagggcagagaattcatctggaacgacctgctgtccctggaaaccggcagcctgaagctggccaacggaagagtgatcgagaagacactgtacaacagaagaacccggcaggatgagcctgccctgttcgtggccctgaccttcgagcggcgggaggtcctggactcctccaatatcaaaccaatgaacctgatcggcgtggcaagaggcgaaaacatccccgccgtgatcgccctgaccgaccccgagggctgcccactgagccggtttaaggatagcctgggaaacccaacccacatcctgagaatcggcgagagctataaggagaagcagcggaccatccaggccaagaaggaggtggagcagcggagagccggcggctacagccggaagtacgccagcaaagccaagaatctggcagacgatatggtgagaaacaccgctagagatctgctgtactacgccgtgacccaggatgccatgctgatcttcgccaacctgagccggggcttcggccggcagggcaagcggaccttcatggccgagagacagtacacacggatggaggactggctgaccgccaagctggcctacgagggcctgagcaagacctacctgtccaagacactggcccagtacacctccaagacatgcagcaactgtgggtttaccatcaccagcgccgactacgacagggtgctggagaagctgaagaagacagcaacaggctggatgaccacaattaacggcaaggagctgaaggtggagggccagattacctactacaacagatacaagagacagaacgtagtcaaggacctgtccgtcgagctggatagactgagcgaagaatctgtgaacaacgacatctcctcctggacaaagggcagaagcggagaagctctgagcctcctgaagaaaagattctcccatagacccgtgcaggagaagttcgtgtgcctgaactgcggcttcgagacacacgcagccgagcaagccgccctgaacatcgccagatcctggctgttcctgcggagccaggagtacaagaaataccagacaaacaagacaaccggcaacaccgataagagagccttcgtcgagacctggcagtccttttaccggaagaagcttaaggaggtgtggaaacctgccgtgcggtctggcggatctggcggaggctccaccagccccaagaaaaagagaaaagtctaagctgccttctgcggggcttgccttctggccatgcccttcttctctcccttgcacctgtacctcttggtctttgaataaagcctgagtaggaaggctagcaaaaaaaaaaaaaaaaaaaaaaaaaaaaaaaaaaaaaaaaaaaaaaaaaaaaaaaaaaaaaaaaaaaaaaaaaaaaaaaagcccagccggctccccaacctctaccgaggagggcacctctgagtccgccacccccgagagcggccctggcacctccaccgagcccagcgagggcagcgcacccggcagccctgccggcagccccacctccacagaggagggaaccagcaccgagcccagcgaaggcagcgccccaggcaccagcaccgagcctagtgagcaggagattaaacggatcaacaagatcagaagaagacttgtgaaagacagcaacaccaagaaggccggcaagacaggccccatgaaaaccctgctggttagagtgatgacacccgatctgagagagcggctggaaaacctgagaaagaagcctgaaaatatcccccagcccatcagcaatacatctagagccaacctgaataagctgctgaccgattacaccgaaatgaagaaggcgatcctgcatgtgtactgggaagagttccagaaggaccctgtgggcctgatgagccgggtggcccagcctgccagcaagaagatcgatcagaacaagctgaaacctgagatggacgagaagggcaacctgaccaccgccggctttgcctgctctcagtgtggccagcccctgttcgtgtacaagctggagcaggtgtctgagaagggcaaggcttacaccaactacttcggacggtgcaatgtggccgagcacgaaaagctgatcctgctggcccagctgaagcccgagaaggatagcgacgaagccgtgacatatagcctgggaaagtttgggcagagggccctggatttctacagcattcatgtgaccaaggagtccacccaccccgtgaagcccctggcccagatcgccggaaacagatacgcctccggacctgtgggaaaggccctgagcgacgcatgtatgggcacaatcgcctccttcctgtctaagtaccaggacatcatcatcgaacaccagaaggtggtgaagggcaaccagaagagactggagagcctgcgggagctggccggcaaggaaaacctggaataccctagcgtgaccctgccacctcagcctcacaccaaggagggcgttgatgcctacaacgaagtgatcgcccgggtgcgaatgtgggtgaacctgaacctgtggcagaagctgaagctaagcagagatgatgccaagcctctgctgagactgaagggattcccttcctttcctctggtcgagagacaggccaacgaagtggactggtgggacatggtgtgtaacgtgaagaagctgatcaacgagaaaaaggaggatggcaaggtgttttggcagaatctggctggctacaagagacaggaagccctgagaccatacctgagcagcgaggaagatcggaagaagggaaagaaattcgctcggtaccagctgggcgacctgctgctgcacctggaaaagaagcacggcgaggactggggaaaggtgtacgacgaggcctgggagcggattgacaagaaagtggaaggcctgagcaagcacatcaagctggaagaggaacggagaagcgaggacgcccagagcaaggccgccctgaccgactggctgcgggctaaggccagcttcgtgatcgagggcctgaaggaggccgacaaggacgagttctgcagatgcgagctgaagctgcagaagtggtacggggacctgcggggaaagcccttcgccatcgaagccgagaacagcatcctggacatcagcggcttcagcaagcagtacaactgtgccttcatctggcagaaggacggcgtgaagaagctgaacctgtacctgatcatcaactacttcaagggcggcaagctgcggttcaagaagatcaaacctgaagccttcgaagccaacagattctacaccgtgatcaacaaaaagagcggcgagatcgtgcccatggaggtgaacttcaacttcgacgaccccaacctgatcatcctgcctctggcctttggcaagagacagggcagagaattcatctggaacgacctgctgtccctggaaaccggcagcctgaagctggccaacggaagagtgatcgagaagacactgtacaacagaagaacccggcaggatgagcctgccctgttcgtggccctgaccttcgagcggcgggaggtcctggactcctccaatatcaaaccaatgaacctgatcggcgtggcaagaggcgaaaacatccccgccgtgatcgccctgaccgaccccgagggctgcccactgagccggtttaaggatagcctgggaaacccaacccacatcctgagaatcggcgagagctataaggagaagcagcggaccatccaggccaagaaggaggtggagcagcggagagccggcggctacagccggaagtacgccagcaaagccaagaatctggcagacgatatggtgagaaacaccgctagagatctgctgtactacgccgtgacccaggatgccatgctgatcttcgccaacctgagccggggcttcggccggcagggcaagcggaccttcatggccgagagacagtacacacggatggaggactggctgaccgccaagctggcctacgagggcctgagcaagacctacctgtccaagacactggcccagtacacctccaagacatgcagcaactgtgggtttaccatcaccagcgccgactacgacagggtgctggagaagctgaagaagacagcaacaggctggatgaccacaattaacggcaaggagctgaaggtggagggccagattacctactacaacagatacaagagacagaacgtagtcaaggacctgtccgtcgagctggatagactgagcgaagaatctgtgaacaacgacatctcctcctggacaaagggcagaagcggagaagctctgagcctcctgaagaaaagattctcccatagacccgtgcaggagaagttcgtgtgcctgaactgcggcttcgagacacacgcagccgagcaagccgccctgaacatcgccagatcctggctgttcctgcggagccaggagtacaagaaataccagacaaacaagacaaccggcaacaccgataagagagccttcgtcgagacctggcagtccttttaccggaagaagcttaaggaggtgtggaaacctgccgtgcggtctggcggatctggcggaggctccaccagccccaagaaaaagagaaaagtctaagctgccttctgcggggcttgccttctggccatgcccttcttctctcccttgcacctgtacctcttggtctttgaataaagcctgagtaggaaggctagcaaaaaaaaaaaaaaaaaaaaaaaaaaaaaaaaaaaaaaaaaaaaaaaaaaaaaaaaaaaaaaaaaaaaaaaaaaaaaaaa

SEQ ID NO: 10283 - RNA, 8787 nt, synthetic construct
  source 1..8787: mol_type = other RNA
aggaaataagagagaaaagaagagtaagaagaaatataagagccaccatggcccctaagaagaagcgtaaagtgagccggatgaaccacgaccaggagttcgacccccctaaggtgtaccctcccgtccccgccgagaagagaaagcccatccgggtcctgagcctgttcgatggcatcgccaccggtctgctggtgctgaaggacctgggcatccaggtggataggtacattgcctccgaggtgtgcgaggactccatcaccgtgggaatggtgcgtcatcagggcaagatcatgtacgtgggcgacgtgcggagcgtgacacagaagcatatccaggagtggggccctttcgacctggtgatcggcggcagcccttgcaatgacctgagcatcgtgaacccagcccggaagggcctgtacgagggaaccggcagactgttcttcgagttttacagactgctgcacgacgcccggcctaaggaaggcgacgaccggcccttcttttggctgttcgagaatgtggtggccatgggagtcagcgacaagcgggatattagccggttcctggagagcaaccccgtgatgatcgatgccaaggaagtgagcgccgcccaccgggccagatacttctggggcaatctgcctggcatgaacagacccctggccagcaccgtgaacgacaagctggagctgcaggagtgcctggagcacggccggatcgccaagttcagcaaggtgagaaccatcaccacccgaagcaacagcatcaaacaaggcaaggaccagcactttcctgtgttcatgaacgagaaggaggacatcctgtggtgtaccgagatggagagagtgttcgggttcccagtccactacacagatgtcagcaacatgtctagactggccagacagagactgctgggaagaagctggtccgtccctgtgatcagacacctgttcgcccctctgaaggagtacttcgcctgcgtgagcagcggcaacagcaacgccaacagccggggccccagcttctctagcggcctggtgccactgtccctgagagggagccacatgggccccatggagatctacaaaaccgtgagcgcctggaagcggcagcctgtgcgcgtgctgagcctgtttcggaatatcgataaagtcctgaaaagcctgggattcctggagagcggctctggctccggcggtggcaccctgaagtacgtggaggatgtgacaaacgtggtcagacgggatgtggagaagtggggccccttcgatctggtgtacggcagcacccaacccctgggcagctcttgtgaccggtgccctggctggtacatgtttcagttccaccggatcctgcagtacgccctgccgagacaggagtcccagcggccattcttttggattttcatggacaacttgctgctgaccgaggatgaccaggaaactaccactcggttcctgcagaccgaagccgtgaccctgcaggacgtgagaggccgggactaccagaacgccatgcgggtgtggtccaacatccctggactgaaaagcaagcacgcacctctgacccctaaagaagaggagtacctgcaggcccaggtgcggagcagaagcaagctggacgcccctaaggtggatctgctggtgaagaattgcctcctgcccctgagagagtacttcaagtatttcagccagaatagtctgcccctgggaggcagcggcggcggcagcctgggccccgtgagcttcaaggacgtggccgtgggcttcacccaggaggagtggaggcagctggagcccgcccagaggaggacctacagggaggtgatgctggagaactacagccacctggtggccgtgggctgccacttcatcaagcccgacgtgatcaccaagctggagaggggcgaggagccctggatcgagggcggcttcctgccccagggctgcgccgacgaggtgtggcaggccggcggcccaagcagcggcgcccctcctcccagcggcggcaggcggcccaagcagcggcgcccctcctcccagcggcggcagcccagccggctccccaacctctaccgaggagggcacctctgagtccgccacccccgagagcggccctggcacctccaccgagcccagcgagggcagcgcacccggcagccctgccggcagccccacctccacagaggagggaaccagcaccgagcccagcgaaggcagcgccccaggcaccagcaccgagcctagtgagcaggagattaaacggatcaacaagatcagaagaagacttgtgaaagacagcaacaccaagaaggccggcaagacaggccccatgaaaaccctgctggttagagtgatgacacccgatctgagagagcggctggaaaacctgagaaagaagcctgaaaatatcccccagcccatcagcaatacatctagagccaacctgaataagctgctgaccgattacaccgaaatgaagaaggcgatcctgcatgtgtactgggaagagttccagaaggaccctgtgggcctgatgagccgggtggcccagcctgccagcaagaagatcgatcagaacaagctgaaacctgagatggacgagaagggcaacctgaccaccgccggctttgcctgctctcagtgtggccagcccctgttcgtgtacaagctggagcaggtgtctgagaagggcaaggcttacaccaactacttcggacggtgcaatgtggccgagcacgaaaagctgatcctgctggcccagctgaagcccgagaaggatagcgacgaagccgtgacatatagcctgggaaagtttgggcagagggccctggatttctacagcattcatgtgaccaaggagtccacccaccccgtgaagcccctggcccagatcgccggaaacagatacgcctccggacctgtgggaaaggccctgagcgacgcatgtatgggcacaatcgcctccttcctgtctaagtaccaggacatcatcatcgaacaccagaaggtggtgaagggcaaccagaagagactggagagcctgcgggagctggccggcaaggaaaacctggaataccctagcgtgaccctgccacctcagcctcacaccaaggagggcgttgatgcctacaacgaagtgatcgcccgggtgcgaatgtgggtgaacctgaacctgtggcagaagctgaagctaagcagagatgatgccaagcctctgctgagactgaagggattcccttcctttcctctggtcgagagacaggccaacgaagtggactggtgggacatggtgtgtaacgtgaagaagctgatcaacgagaaaaaggaggatggcaaggtgttttggcagaatctggctggctacaagagacaggaagccctgagaccatacctgagcagcgaggaagatcggaagaagggaaagaaattcgctcggtaccagctgggcgacctgctgctgcacctggaaaagaagcacggcgaggactggggaaaggtgtacgacgaggcctgggagcggattgacaagaaagtggaaggcctgagcaagcacatcaagctggaagaggaacggagaagcgaggacgcccagagcaaggccgccctgaccgactggctgcgggctaaggccagcttcgtgatcgagggcctgaaggaggccgacaaggacgagttctgcagatgcgagctgaagctgcagaagtggtacggggacctgcggggaaagcccttcgccatcgaagccgagaacagcatcctggacatcagcggcttcagcaagcagtacaactgtgccttcatctggcagaaggacggcgtgaagaagctgaacctgtacctgatcatcaactacttcaagggcggcaagctgcggttcaagaagatcaaacctgaagccttcgaagccaacagattctacaccgtgatcaacaaaaagagcggcgagatcgtgcccatggaggtgaacttcaacttcgacgaccccaacctgatcatcctgcctctggcctttggcaagagacagggcagagaattcatctggaacgacctgctgtccctggaaaccggcagcctgaagctggccaacggaagagtgatcgagaagacactgtacaacagaagaacccggcaggatgagcctgccctgttcgtggccctgaccttcgagcggcgggaggtcctggactcctccaatatcaaaccaatgaacctgatcggcgtggcaagaggcgaaaacatccccgccgtgatcgccctgaccgaccccgagggctgcccactgagccggtttaaggatagcctgggaaacccaacccacatcctgagaatcggcgagagctataaggagaagcagcggaccatccaggccaagaaggaggtggagcagcggagagccggcggctacagccggaagtacgccagcaaagccaagaatctggcagacgatatggtgagaaacaccgctagagatctgctgtactacgccgtgacccaggatgccatgctgatcttcgccaacctgagccggggcttcggccggcagggcaagcggaccttcatggccgagagacagtacacacggatggaggactggctgaccgccaagctggcctacgagggcctgagcaagacctacctgtccaagacactggcccagtacacctccaagacatgcagcaactgtgggtttaccatcaccagcgccgactacgacagggtgctggagaagctgaagaagacagcaacaggctggatgaccacaattaacggcaaggagctgaaggtggagggccagattacctactacaacagatacaagagacagaacgtagtcaaggacctgtccgtcgagctggatagactgagcgaagaatctgtgaacaacgacatctcctcctggacaaagggcagaagcggagaagctctgagcctcctgaagaaaagattctcccatagacccgtgcaggagaagttcgtgtgcctgaactgcggcttcgagacacacgcagccgagcaagccgccctgaacatcgccagatcctggctgttcctgcggagccaggagtacaagaaataccagacaaacaagacaaccggcaacaccgataagagagccttcgtcgagacctggcagtccttttaccggaagaagcttaaggaggtgtggaaacctgccgtgcggtctggcggatctggcggaggctccaccagccccaagaaaaagagaaaagtctaagctgccttctgcggggcttgccttctggccatgcccttcttctctcccttgcacctgtacctcttggtctttgaataaagcctgagtaggaaggctagcaaaaaaaaaaaaaaaaaaaaaaaaaaaaaaaaaaaaaaaaaaaaaaaaaaaaaaaaaaaaaaaaaaaaaaaaaaaaaaaagcccagccggctccccaacctctaccgaggagggcacctctgagtccgccacccccgagagcggccctggcacctccaccgagcccagcgagggcagcgcacccggcagccctgccggcagccccacctccacagaggagggaaccagcaccgagcccagcgaaggcagcgccccaggcaccagcaccgagcctagtgagcaggagattaaacggatcaacaagatcagaagaagacttgtgaaagacagcaacaccaagaaggccggcaagacaggccccatgaaaaccctgctggttagagtgatgacacccgatctgagagagcggctggaaaacctgagaaagaagcctgaaaatatcccccagcccatcagcaatacatctagagccaacctgaataagctgctgaccgattacaccgaaatgaagaaggcgatcctgcatgtgtactgggaagagttccagaaggaccctgtgggcctgatgagccgggtggcccagcctgccagcaagaagatcgatcagaacaagctgaaacctgagatggacgagaagggcaacctgaccaccgccggctttgcctgctctcagtgtggccagcccctgttcgtgtacaagctggagcaggtgtctgagaagggcaaggcttacaccaactacttcggacggtgcaatgtggccgagcacgaaaagctgatcctgctggcccagctgaagcccgagaaggatagcgacgaagccgtgacatatagcctgggaaagtttgggcagagggccctggatttctacagcattcatgtgaccaaggagtccacccaccccgtgaagcccctggcccagatcgccggaaacagatacgcctccggacctgtgggaaaggccctgagcgacgcatgtatgggcacaatcgcctccttcctgtctaagtaccaggacatcatcatcgaacaccagaaggtggtgaagggcaaccagaagagactggagagcctgcgggagctggccggcaaggaaaacctggaataccctagcgtgaccctgccacctcagcctcacaccaaggagggcgttgatgcctacaacgaagtgatcgcccgggtgcgaatgtgggtgaacctgaacctgtggcagaagctgaagctaagcagagatgatgccaagcctctgctgagactgaagggattcccttcctttcctctggtcgagagacaggccaacgaagtggactggtgggacatggtgtgtaacgtgaagaagctgatcaacgagaaaaaggaggatggcaaggtgttttggcagaatctggctggctacaagagacaggaagccctgagaccatacctgagcagcgaggaagatcggaagaagggaaagaaattcgctcggtaccagctgggcgacctgctgctgcacctggaaaagaagcacggcgaggactggggaaaggtgtacgacgaggcctgggagcggattgacaagaaagtggaaggcctgagcaagcacatcaagctggaagaggaacggagaagcgaggacgcccagagcaaggccgccctgaccgactggctgcgggctaaggccagcttcgtgatcgagggcctgaaggaggccgacaaggacgagttctgcagatgcgagctgaagctgcagaagtggtacggggacctgcggggaaagcccttcgccatcgaagccgagaacagcatcctggacatcagcggcttcagcaagcagtacaactgtgccttcatctggcagaaggacggcgtgaagaagctgaacctgtacctgatcatcaactacttcaagggcggcaagctgcggttcaagaagatcaaacctgaagccttcgaagccaacagattctacaccgtgatcaacaaaaagagcggcgagatcgtgcccatggaggtgaacttcaacttcgacgaccccaacctgatcatcctgcctctggcctttggcaagagacagggcagagaattcatctggaacgacctgctgtccctggaaaccggcagcctgaagctggccaacggaagagtgatcgagaagacactgtacaacagaagaacccggcaggatgagcctgccctgttcgtggccctgaccttcgagcggcgggaggtcctggactcctccaatatcaaaccaatgaacctgatcggcgtggcaagaggcgaaaacatccccgccgtgatcgccctgaccgaccccgagggctgcccactgagccggtttaaggatagcctgggaaacccaacccacatcctgagaatcggcgagagctataaggagaagcagcggaccatccaggccaagaaggaggtggagcagcggagagccggcggctacagccggaagtacgccagcaaagccaagaatctggcagacgatatggtgagaaacaccgctagagatctgctgtactacgccgtgacccaggatgccatgctgatcttcgccaacctgagccggggcttcggccggcagggcaagcggaccttcatggccgagagacagtacacacggatggaggactggctgaccgccaagctggcctacgagggcctgagcaagacctacctgtccaagacactggcccagtacacctccaagacatgcagcaactgtgggtttaccatcaccagcgccgactacgacagggtgctggagaagctgaagaagacagcaacaggctggatgaccacaattaacggcaaggagctgaaggtggagggccagattacctactacaacagatacaagagacagaacgtagtcaaggacctgtccgtcgagctggatagactgagcgaagaatctgtgaacaacgacatctcctcctggacaaagggcagaagcggagaagctctgagcctcctgaagaaaagattctcccatagacccgtgcaggagaagttcgtgtgcctgaactgcggcttcgagacacacgcagccgagcaagccgccctgaacatcgccagatcctggctgttcctgcggagccaggagtacaagaaataccagacaaacaagacaaccggcaacaccgataagagagccttcgtcgagacctggcagtccttttaccggaagaagcttaaggaggtgtggaaacctgccgtgcggtctggcggatctggcggaggctccaccagccccaagaaaaagagaaaagtctaagctgccttctgcggggcttgccttctggccatgcccttcttctctcccttgcacctgtacctcttggtctttgaataaagcctgagtaggaaggctagcaaaaaaaaaaaaaaaaaaaaaaaaaaaaaaaaaaaaaaaaaaaaaaaaaaaaaaaaaaaaaaaaaaaaaaaaaaaaaaaa

SEQ ID NO: 10284 - RNA, 8787 nt, synthetic construct
  source 1..8787: mol_type = other RNA
aggaaataagagagaaaagaagagtaagaagaaatataagagccaccatggcccctaagaagaagcgtaaagtgagccggatgaaccacgaccaggagttcgacccccctaaggtgtaccctcccgtccccgccgagaagagaaagcccatccgggtcctgagcctgttcgatggcatcgccaccggtctgctggtgctgaaggacctgggcatccaggtggataggtacattgcctccgaggtgtgcgaggactccatcaccgtgggaatggtgcgtcatcagggcaagatcatgtacgtgggcgacgtgcggagcgtgacacagaagcatatccaggagtggggccctttcgacctggtgatcggcggcagcccttgcaatgacctgagcatcgtgaacccagcccggaagggcctgtacgagggaaccggcagactgttcttcgagttttacagactgctgcacgacgcccggcctaaggaaggcgacgaccggcccttcttttggctgttcgagaatgtggtggccatgggagtcagcgacaagcgggatattagccggttcctggagagcaaccccgtgatgatcgatgccaaggaagtgagcgccgcccaccgggccagatacttctggggcaatctgcctggcatgaacagacccctggccagcaccgtgaacgacaagctggagctgcaggagtgcctggagcacggccggatcgccaagttcagcaaggtgagaaccatcaccacccgaagcaacagcatcaaacaaggcaaggaccagcactttcctgtgttcatgaacgagaaggaggacatcctgtggtgtaccgagatggagagagtgttcgggttcccagtccactacacagatgtcagcaacatgtctagactggccagacagagactgctgggaagaagctggtccgtccctgtgatcagacacctgttcgcccctctgaaggagtacttcgcctgcgtgagcagcggcaacagcaacgccaacagccggggccccagcttctctagcggcctggtgccactgtccctgagagggagccacatgggccccatggagatctacaaaaccgtgagcgcctggaagcggcagcctgtgcgcgtgctgagcctgtttcggaatatcgataaagtcctgaaaagcctgggattcctggagagcggctctggctccggcggtggcaccctgaagtacgtggaggatgtgacaaacgtggtcagacgggatgtggagaagtggggccccttcgatctggtgtacggcagcacccaacccctgggcagctcttgtgaccggtgccctggctggtacatgtttcagttccaccggatcctgcagtacgccctgccgagacaggagtcccagcggccattcttttggattttcatggacaacttgctgctgaccgaggatgaccaggaaactaccactcggttcctgcagaccgaagccgtgaccctgcaggacgtgagaggccgggactaccagaacgccatgcgggtgtggtccaacatccctggactgaaaagcaagcacgcacctctgacccctaaagaagaggagtacctgcaggcccaggtgcggagcagaagcaagctggacgcccctaaggtggatctgctggtgaagaattgcctcctgcccctgagagagtacttcaagtatttcagccagaatagtctgcccctgggaggcagcggcggcggcaccctgggcctgctgagcttcaacgacgtgagcctggagttcagctgggaggagtggcagctgctggacagcgcccagaggtacctgtacagggaggtgatcctggagaactacagcaacctgctgagcgtgggctaccacggcaccaagcccgacctgatcttcaggctggagcagggcgaggagccctggatcctgaacgccaagatgagcacccagaactgccccgaggtgtgggaggacggcggcccaagcagcggcgcccctcctcccagcggcggcaggcggcccaagcagcggcgcccctcctcccagcggcggcagcccagccggctccccaacctctaccgaggagggcacctctgagtccgccacccccgagagcggccctggcacctccaccgagcccagcgagggcagcgcacccggcagccctgccggcagccccacctccacagaggagggaaccagcaccgagcccagcgaaggcagcgccccaggcaccagcaccgagcctagtgagcaggagattaaacggatcaacaagatcagaagaagacttgtgaaagacagcaacaccaagaaggccggcaagacaggccccatgaaaaccctgctggttagagtgatgacacccgatctgagagagcggctggaaaacctgagaaagaagcctgaaaatatcccccagcccatcagcaatacatctagagccaacctgaataagctgctgaccgattacaccgaaatgaagaaggcgatcctgcatgtgtactgggaagagttccagaaggaccctgtgggcctgatgagccgggtggcccagcctgccagcaagaagatcgatcagaacaagctgaaacctgagatggacgagaagggcaacctgaccaccgccggctttgcctgctctcagtgtggccagcccctgttcgtgtacaagctggagcaggtgtctgagaagggcaaggcttacaccaactacttcggacggtgcaatgtggccgagcacgaaaagctgatcctgctggcccagctgaagcccgagaaggatagcgacgaagccgtgacatatagcctgggaaagtttgggcagagggccctggatttctacagcattcatgtgaccaaggagtccacccaccccgtgaagcccctggcccagatcgccggaaacagatacgcctccggacctgtgggaaaggccctgagcgacgcatgtatgggcacaatcgcctccttcctgtctaagtaccaggacatcatcatcgaacaccagaaggtggtgaagggcaaccagaagagactggagagcctgcgggagctggccggcaaggaaaacctggaataccctagcgtgaccctgccacctcagcctcacaccaaggagggcgttgatgcctacaacgaagtgatcgcccgggtgcgaatgtgggtgaacctgaacctgtggcagaagctgaagctaagcagagatgatgccaagcctctgctgagactgaagggattcccttcctttcctctggtcgagagacaggccaacgaagtggactggtgggacatggtgtgtaacgtgaagaagctgatcaacgagaaaaaggaggatggcaaggtgttttggcagaatctggctggctacaagagacaggaagccctgagaccatacctgagcagcgaggaagatcggaagaagggaaagaaattcgctcggtaccagctgggcgacctgctgctgcacctggaaaagaagcacggcgaggactggggaaaggtgtacgacgaggcctgggagcggattgacaagaaagtggaaggcctgagcaagcacatcaagctggaagaggaacggagaagcgaggacgcccagagcaaggccgccctgaccgactggctgcgggctaaggccagcttcgtgatcgagggcctgaaggaggccgacaaggacgagttctgcagatgcgagctgaagctgcagaagtggtacggggacctgcggggaaagcccttcgccatcgaagccgagaacagcatcctggacatcagcggcttcagcaagcagtacaactgtgccttcatctggcagaaggacggcgtgaagaagctgaacctgtacctgatcatcaactacttcaagggcggcaagctgcggttcaagaagatcaaacctgaagccttcgaagccaacagattctacaccgtgatcaacaaaaagagcggcgagatcgtgcccatggaggtgaacttcaacttcgacgaccccaacctgatcatcctgcctctggcctttggcaagagacagggcagagaattcatctggaacgacctgctgtccctggaaaccggcagcctgaagctggccaacggaagagtgatcgagaagacactgtacaacagaagaacccggcaggatgagcctgccctgttcgtggccctgaccttcgagcggcgggaggtcctggactcctccaatatcaaaccaatgaacctgatcggcgtggcaagaggcgaaaacatccccgccgtgatcgccctgaccgaccccgagggctgcccactgagccggtttaaggatagcctgggaaacccaacccacatcctgagaatcggcgagagctataaggagaagcagcggaccatccaggccaagaaggaggtggagcagcggagagccggcggctacagccggaagtacgccagcaaagccaagaatctggcagacgatatggtgagaaacaccgctagagatctgctgtactacgccgtgacccaggatgccatgctgatcttcgccaacctgagccggggcttcggccggcagggcaagcggaccttcatggccgagagacagtacacacggatggaggactggctgaccgccaagctggcctacgagggcctgagcaagacctacctgtccaagacactggcccagtacacctccaagacatgcagcaactgtgggtttaccatcaccagcgccgactacgacagggtgctggagaagctgaagaagacagcaacaggctggatgaccacaattaacggcaaggagctgaaggtggagggccagattacctactacaacagatacaagagacagaacgtagtcaaggacctgtccgtcgagctggatagactgagcgaagaatctgtgaacaacgacatctcctcctggacaaagggcagaagcggagaagctctgagcctcctgaagaaaagattctcccatagacccgtgcaggagaagttcgtgtgcctgaactgcggcttcgagacacacgcagccgagcaagccgccctgaacatcgccagatcctggctgttcctgcggagccaggagtacaagaaataccagacaaacaagacaaccggcaacaccgataagagagccttcgtcgagacctggcagtccttttaccggaagaagcttaaggaggtgtggaaacctgccgtgcggtctggcggatctggcggaggctccaccagccccaagaaaaagagaaaagtctaagctgccttctgcggggcttgccttctggccatgcccttcttctctcccttgcacctgtacctcttggtctttgaataaagcctgagtaggaaggctagcaaaaaaaaaaaaaaaaaaaaaaaaaaaaaaaaaaaaaaaaaaaaaaaaaaaaaaaaaaaaaaaaaaaaaaaaaaaaaaaagcccagccggctccccaacctctaccgaggagggcacctctgagtccgccacccccgagagcggccctggcacctccaccgagcccagcgagggcagcgcacccggcagccctgccggcagccccacctccacagaggagggaaccagcaccgagcccagcgaaggcagcgccccaggcaccagcaccgagcctagtgagcaggagattaaacggatcaacaagatcagaagaagacttgtgaaagacagcaacaccaagaaggccggcaagacaggccccatgaaaaccctgctggttagagtgatgacacccgatctgagagagcggctggaaaacctgagaaagaagcctgaaaatatcccccagcccatcagcaatacatctagagccaacctgaataagctgctgaccgattacaccgaaatgaagaaggcgatcctgcatgtgtactgggaagagttccagaaggaccctgtgggcctgatgagccgggtggcccagcctgccagcaagaagatcgatcagaacaagctgaaacctgagatggacgagaagggcaacctgaccaccgccggctttgcctgctctcagtgtggccagcccctgttcgtgtacaagctggagcaggtgtctgagaagggcaaggcttacaccaactacttcggacggtgcaatgtggccgagcacgaaaagctgatcctgctggcccagctgaagcccgagaaggatagcgacgaagccgtgacatatagcctgggaaagtttgggcagagggccctggatttctacagcattcatgtgaccaaggagtccacccaccccgtgaagcccctggcccagatcgccggaaacagatacgcctccggacctgtgggaaaggccctgagcgacgcatgtatgggcacaatcgcctccttcctgtctaagtaccaggacatcatcatcgaacaccagaaggtggtgaagggcaaccagaagagactggagagcctgcgggagctggccggcaaggaaaacctggaataccctagcgtgaccctgccacctcagcctcacaccaaggagggcgttgatgcctacaacgaagtgatcgcccgggtgcgaatgtgggtgaacctgaacctgtggcagaagctgaagctaagcagagatgatgccaagcctctgctgagactgaagggattcccttcctttcctctggtcgagagacaggccaacgaagtggactggtgggacatggtgtgtaacgtgaagaagctgatcaacgagaaaaaggaggatggcaaggtgttttggcagaatctggctggctacaagagacaggaagccctgagaccatacctgagcagcgaggaagatcggaagaagggaaagaaattcgctcggtaccagctgggcgacctgctgctgcacctggaaaagaagcacggcgaggactggggaaaggtgtacgacgaggcctgggagcggattgacaagaaagtggaaggcctgagcaagcacatcaagctggaagaggaacggagaagcgaggacgcccagagcaaggccgccctgaccgactggctgcgggctaaggccagcttcgtgatcgagggcctgaaggaggccgacaaggacgagttctgcagatgcgagctgaagctgcagaagtggtacggggacctgcggggaaagcccttcgccatcgaagccgagaacagcatcctggacatcagcggcttcagcaagcagtacaactgtgccttcatctggcagaaggacggcgtgaagaagctgaacctgtacctgatcatcaactacttcaagggcggcaagctgcggttcaagaagatcaaacctgaagccttcgaagccaacagattctacaccgtgatcaacaaaaagagcggcgagatcgtgcccatggaggtgaacttcaacttcgacgaccccaacctgatcatcctgcctctggcctttggcaagagacagggcagagaattcatctggaacgacctgctgtccctggaaaccggcagcctgaagctggccaacggaagagtgatcgagaagacactgtacaacagaagaacccggcaggatgagcctgccctgttcgtggccctgaccttcgagcggcgggaggtcctggactcctccaatatcaaaccaatgaacctgatcggcgtggcaagaggcgaaaacatccccgccgtgatcgccctgaccgaccccgagggctgcccactgagccggtttaaggatagcctgggaaacccaacccacatcctgagaatcggcgagagctataaggagaagcagcggaccatccaggccaagaaggaggtggagcagcggagagccggcggctacagccggaagtacgccagcaaagccaagaatctggcagacgatatggtgagaaacaccgctagagatctgctgtactacgccgtgacccaggatgccatgctgatcttcgccaacctgagccggggcttcggccggcagggcaagcggaccttcatggccgagagacagtacacacggatggaggactggctgaccgccaagctggcctacgagggcctgagcaagacctacctgtccaagacactggcccagtacacctccaagacatgcagcaactgtgggtttaccatcaccagcgccgactacgacagggtgctggagaagctgaagaagacagcaacaggctggatgaccacaattaacggcaaggagctgaaggtggagggccagattacctactacaacagatacaagagacagaacgtagtcaaggacctgtccgtcgagctggatagactgagcgaagaatctgtgaacaacgacatctcctcctggacaaagggcagaagcggagaagctctgagcctcctgaagaaaagattctcccatagacccgtgcaggagaagttcgtgtgcctgaactgcggcttcgagacacacgcagccgagcaagccgccctgaacatcgccagatcctggctgttcctgcggagccaggagtacaagaaataccagacaaacaagacaaccggcaacaccgataagagagccttcgtcgagacctggcagtccttttaccggaagaagcttaaggaggtgtggaaacctgccgtgcggtctggcggatctggcggaggctccaccagccccaagaaaaagagaaaagtctaagctgccttctgcggggcttgccttctggccatgcccttcttctctcccttgcacctgtacctcttggtctttgaataaagcctgagtaggaaggctagcaaaaaaaaaaaaaaaaaaaaaaaaaaaaaaaaaaaaaaaaaaaaaaaaaaaaaaaaaaaaaaaaaaaaaaaaaaaaaaaa

SEQ ID NO: 10285 - RNA, 8787 nt, synthetic construct
  source 1..8787: mol_type = other RNA
aggaaataagagagaaaagaagagtaagaagaaatataagagccaccatggcccctaagaagaagcgtaaagtgagccggatgaaccacgaccaggagttcgacccccctaaggtgtaccctcccgtccccgccgagaagagaaagcccatccgggtcctgagcctgttcgatggcatcgccaccggtctgctggtgctgaaggacctgggcatccaggtggataggtacattgcctccgaggtgtgcgaggactccatcaccgtgggaatggtgcgtcatcagggcaagatcatgtacgtgggcgacgtgcggagcgtgacacagaagcatatccaggagtggggccctttcgacctggtgatcggcggcagcccttgcaatgacctgagcatcgtgaacccagcccggaagggcctgtacgagggaaccggcagactgttcttcgagttttacagactgctgcacgacgcccggcctaaggaaggcgacgaccggcccttcttttggctgttcgagaatgtggtggccatgggagtcagcgacaagcgggatattagccggttcctggagagcaaccccgtgatgatcgatgccaaggaagtgagcgccgcccaccgggccagatacttctggggcaatctgcctggcatgaacagacccctggccagcaccgtgaacgacaagctggagctgcaggagtgcctggagcacggccggatcgccaagttcagcaaggtgagaaccatcaccacccgaagcaacagcatcaaacaaggcaaggaccagcactttcctgtgttcatgaacgagaaggaggacatcctgtggtgtaccgagatggagagagtgttcgggttcccagtccactacacagatgtcagcaacatgtctagactggccagacagagactgctgggaagaagctggtccgtccctgtgatcagacacctgttcgcccctctgaaggagtacttcgcctgcgtgagcagcggcaacagcaacgccaacagccggggccccagcttctctagcggcctggtgccactgtccctgagagggagccacatgggccccatggagatctacaaaaccgtgagcgcctggaagcggcagcctgtgcgcgtgctgagcctgtttcggaatatcgataaagtcctgaaaagcctgggattcctggagagcggctctggctccggcggtggcaccctgaagtacgtggaggatgtgacaaacgtggtcagacgggatgtggagaagtggggccccttcgatctggtgtacggcagcacccaacccctgggcagctcttgtgaccggtgccctggctggtacatgtttcagttccaccggatcctgcagtacgccctgccgagacaggagtcccagcggccattcttttggattttcatggacaacttgctgctgaccgaggatgaccaggaaactaccactcggttcctgcagaccgaagccgtgaccctgcaggacgtgagaggccgggactaccagaacgccatgcgggtgtggtccaacatccctggactgaaaagcaagcacgcacctctgacccctaaagaagaggagtacctgcaggcccaggtgcggagcagaagcaagctggacgcccctaaggtggatctgctggtgaagaattgcctcctgcccctgagagagtacttcaagtatttcagccagaatagtctgcccctgggaggcagcggcggcggcgcccagggccacgtgaccttcgaggacgtggccgtgtacttcagctgggaggagtggggcctgctggacgaggcccagaggctgctgtacagggacgtgatgctggagaacttcagcctgatggccagcctgggcctggccagcagcatgacccacgagatcacccagctggagtggtggagggagcccttcctgcccccctgcggcgtgatgaccgccgccatgcccagggacggcaggcagggcggcccaagcagcggcgcccctcctcccagcggcggcaggcggcccaagcagcggcgcccctcctcccagcggcggcagcccagccggctccccaacctctaccgaggagggcacctctgagtccgccacccccgagagcggccctggcacctccaccgagcccagcgagggcagcgcacccggcagccctgccggcagccccacctccacagaggagggaaccagcaccgagcccagcgaaggcagcgccccaggcaccagcaccgagcctagtgagcaggagattaaacggatcaacaagatcagaagaagacttgtgaaagacagcaacaccaagaaggccggcaagacaggccccatgaaaaccctgctggttagagtgatgacacccgatctgagagagcggctggaaaacctgagaaagaagcctgaaaatatcccccagcccatcagcaatacatctagagccaacctgaataagctgctgaccgattacaccgaaatgaagaaggcgatcctgcatgtgtactgggaagagttccagaaggaccctgtgggcctgatgagccgggtggcccagcctgccagcaagaagatcgatcagaacaagctgaaacctgagatggacgagaagggcaacctgaccaccgccggctttgcctgctctcagtgtggccagcccctgttcgtgtacaagctggagcaggtgtctgagaagggcaaggcttacaccaactacttcggacggtgcaatgtggccgagcacgaaaagctgatcctgctggcccagctgaagcccgagaaggatagcgacgaagccgtgacatatagcctgggaaagtttgggcagagggccctggatttctacagcattcatgtgaccaaggagtccacccaccccgtgaagcccctggcccagatcgccggaaacagatacgcctccggacctgtgggaaaggccctgagcgacgcatgtatgggcacaatcgcctccttcctgtctaagtaccaggacatcatcatcgaacaccagaaggtggtgaagggcaaccagaagagactggagagcctgcgggagctggccggcaaggaaaacctggaataccctagcgtgaccctgccacctcagcctcacaccaaggagggcgttgatgcctacaacgaagtgatcgcccgggtgcgaatgtgggtgaacctgaacctgtggcagaagctgaagctaagcagagatgatgccaagcctctgctgagactgaagggattcccttcctttcctctggtcgagagacaggccaacgaagtggactggtgggacatggtgtgtaacgtgaagaagctgatcaacgagaaaaaggaggatggcaaggtgttttggcagaatctggctggctacaagagacaggaagccctgagaccatacctgagcagcgaggaagatcggaagaagggaaagaaattcgctcggtaccagctgggcgacctgctgctgcacctggaaaagaagcacggcgaggactggggaaaggtgtacgacgaggcctgggagcggattgacaagaaagtggaaggcctgagcaagcacatcaagctggaagaggaacggagaagcgaggacgcccagagcaaggccgccctgaccgactggctgcgggctaaggccagcttcgtgatcgagggcctgaaggaggccgacaaggacgagttctgcagatgcgagctgaagctgcagaagtggtacggggacctgcggggaaagcccttcgccatcgaagccgagaacagcatcctggacatcagcggcttcagcaagcagtacaactgtgccttcatctggcagaaggacggcgtgaagaagctgaacctgtacctgatcatcaactacttcaagggcggcaagctgcggttcaagaagatcaaacctgaagccttcgaagccaacagattctacaccgtgatcaacaaaaagagcggcgagatcgtgcccatggaggtgaacttcaacttcgacgaccccaacctgatcatcctgcctctggcctttggcaagagacagggcagagaattcatctggaacgacctgctgtccctggaaaccggcagcctgaagctggccaacggaagagtgatcgagaagacactgtacaacagaagaacccggcaggatgagcctgccctgttcgtggccctgaccttcgagcggcgggaggtcctggactcctccaatatcaaaccaatgaacctgatcggcgtggcaagaggcgaaaacatccccgccgtgatcgccctgaccgaccccgagggctgcccactgagccggtttaaggatagcctgggaaacccaacccacatcctgagaatcggcgagagctataaggagaagcagcggaccatccaggccaagaaggaggtggagcagcggagagccggcggctacagccggaagtacgccagcaaagccaagaatctggcagacgatatggtgagaaacaccgctagagatctgctgtactacgccgtgacccaggatgccatgctgatcttcgccaacctgagccggggcttcggccggcagggcaagcggaccttcatggccgagagacagtacacacggatggaggactggctgaccgccaagctggcctacgagggcctgagcaagacctacctgtccaagacactggcccagtacacctccaagacatgcagcaactgtgggtttaccatcaccagcgccgactacgacagggtgctggagaagctgaagaagacagcaacaggctggatgaccacaattaacggcaaggagctgaaggtggagggccagattacctactacaacagatacaagagacagaacgtagtcaaggacctgtccgtcgagctggatagactgagcgaagaatctgtgaacaacgacatctcctcctggacaaagggcagaagcggagaagctctgagcctcctgaagaaaagattctcccatagacccgtgcaggagaagttcgtgtgcctgaactgcggcttcgagacacacgcagccgagcaagccgccctgaacatcgccagatcctggctgttcctgcggagccaggagtacaagaaataccagacaaacaagacaaccggcaacaccgataagagagccttcgtcgagacctggcagtccttttaccggaagaagcttaaggaggtgtggaaacctgccgtgcggtctggcggatctggcggaggctccaccagccccaagaaaaagagaaaagtctaagctgccttctgcggggcttgccttctggccatgcccttcttctctcccttgcacctgtacctcttggtctttgaataaagcctgagtaggaaggctagcaaaaaaaaaaaaaaaaaaaaaaaaaaaaaaaaaaaaaaaaaaaaaaaaaaaaaaaaaaaaaaaaaaaaaaaaaaaaaaaagcccagccggctccccaacctctaccgaggagggcacctctgagtccgccacccccgagagcggccctggcacctccaccgagcccagcgagggcagcgcacccggcagccctgccggcagccccacctccacagaggagggaaccagcaccgagcccagcgaaggcagcgccccaggcaccagcaccgagcctagtgagcaggagattaaacggatcaacaagatcagaagaagacttgtgaaagacagcaacaccaagaaggccggcaagacaggccccatgaaaaccctgctggttagagtgatgacacccgatctgagagagcggctggaaaacctgagaaagaagcctgaaaatatcccccagcccatcagcaatacatctagagccaacctgaataagctgctgaccgattacaccgaaatgaagaaggcgatcctgcatgtgtactgggaagagttccagaaggaccctgtgggcctgatgagccgggtggcccagcctgccagcaagaagatcgatcagaacaagctgaaacctgagatggacgagaagggcaacctgaccaccgccggctttgcctgctctcagtgtggccagcccctgttcgtgtacaagctggagcaggtgtctgagaagggcaaggcttacaccaactacttcggacggtgcaatgtggccgagcacgaaaagctgatcctgctggcccagctgaagcccgagaaggatagcgacgaagccgtgacatatagcctgggaaagtttgggcagagggccctggatttctacagcattcatgtgaccaaggagtccacccaccccgtgaagcccctggcccagatcgccggaaacagatacgcctccggacctgtgggaaaggccctgagcgacgcatgtatgggcacaatcgcctccttcctgtctaagtaccaggacatcatcatcgaacaccagaaggtggtgaagggcaaccagaagagactggagagcctgcgggagctggccggcaaggaaaacctggaataccctagcgtgaccctgccacctcagcctcacaccaaggagggcgttgatgcctacaacgaagtgatcgcccgggtgcgaatgtgggtgaacctgaacctgtggcagaagctgaagctaagcagagatgatgccaagcctctgctgagactgaagggattcccttcctttcctctggtcgagagacaggccaacgaagtggactggtgggacatggtgtgtaacgtgaagaagctgatcaacgagaaaaaggaggatggcaaggtgttttggcagaatctggctggctacaagagacaggaagccctgagaccatacctgagcagcgaggaagatcggaagaagggaaagaaattcgctcggtaccagctgggcgacctgctgctgcacctggaaaagaagcacggcgaggactggggaaaggtgtacgacgaggcctgggagcggattgacaagaaagtggaaggcctgagcaagcacatcaagctggaagaggaacggagaagcgaggacgcccagagcaaggccgccctgaccgactggctgcgggctaaggccagcttcgtgatcgagggcctgaaggaggccgacaaggacgagttctgcagatgcgagctgaagctgcagaagtggtacggggacctgcggggaaagcccttcgccatcgaagccgagaacagcatcctggacatcagcggcttcagcaagcagtacaactgtgccttcatctggcagaaggacggcgtgaagaagctgaacctgtacctgatcatcaactacttcaagggcggcaagctgcggttcaagaagatcaaacctgaagccttcgaagccaacagattctacaccgtgatcaacaaaaagagcggcgagatcgtgcccatggaggtgaacttcaacttcgacgaccccaacctgatcatcctgcctctggcctttggcaagagacagggcagagaattcatctggaacgacctgctgtccctggaaaccggcagcctgaagctggccaacggaagagtgatcgagaagacactgtacaacagaagaacccggcaggatgagcctgccctgttcgtggccctgaccttcgagcggcgggaggtcctggactcctccaatatcaaaccaatgaacctgatcggcgtggcaagaggcgaaaacatccccgccgtgatcgccctgaccgaccccgagggctgcccactgagccggtttaaggatagcctgggaaacccaacccacatcctgagaatcggcgagagctataaggagaagcagcggaccatccaggccaagaaggaggtggagcagcggagagccggcggctacagccggaagtacgccagcaaagccaagaatctggcagacgatatggtgagaaacaccgctagagatctgctgtactacgccgtgacccaggatgccatgctgatcttcgccaacctgagccggggcttcggccggcagggcaagcggaccttcatggccgagagacagtacacacggatggaggactggctgaccgccaagctggcctacgagggcctgagcaagacctacctgtccaagacactggcccagtacacctccaagacatgcagcaactgtgggtttaccatcaccagcgccgactacgacagggtgctggagaagctgaagaagacagcaacaggctggatgaccacaattaacggcaaggagctgaaggtggagggccagattacctactacaacagatacaagagacagaacgtagtcaaggacctgtccgtcgagctggatagactgagcgaagaatctgtgaacaacgacatctcctcctggacaaagggcagaagcggagaagctctgagcctcctgaagaaaagattctcccatagacccgtgcaggagaagttcgtgtgcctgaactgcggcttcgagacacacgcagccgagcaagccgccctgaacatcgccagatcctggctgttcctgcggagccaggagtacaagaaataccagacaaacaagacaaccggcaacaccgataagagagccttcgtcgagacctggcagtccttttaccggaagaagcttaaggaggtgtggaaacctgccgtgcggtctggcggatctggcggaggctccaccagccccaagaaaaagagaaaagtctaagctgccttctgcggggcttgccttctggccatgcccttcttctctcccttgcacctgtacctcttggtctttgaataaagcctgagtaggaaggctagcaaaaaaaaaaaaaaaaaaaaaaaaaaaaaaaaaaaaaaaaaaaaaaaaaaaaaaaaaaaaaaaaaaaaaaaaaaaaaaaa

SEQ ID NO: 10286 - RNA, 8787 nt, synthetic construct
  source 1..8787: mol_type = other RNA
aggaaataagagagaaaagaagagtaagaagaaatataagagccaccatggcccctaagaagaagcgtaaagtgagccggatgaaccacgaccaggagttcgacccccctaaggtgtaccctcccgtccccgccgagaagagaaagcccatccgggtcctgagcctgttcgatggcatcgccaccggtctgctggtgctgaaggacctgggcatccaggtggataggtacattgcctccgaggtgtgcgaggactccatcaccgtgggaatggtgcgtcatcagggcaagatcatgtacgtgggcgacgtgcggagcgtgacacagaagcatatccaggagtggggccctttcgacctggtgatcggcggcagcccttgcaatgacctgagcatcgtgaacccagcccggaagggcctgtacgagggaaccggcagactgttcttcgagttttacagactgctgcacgacgcccggcctaaggaaggcgacgaccggcccttcttttggctgttcgagaatgtggtggccatgggagtcagcgacaagcgggatattagccggttcctggagagcaaccccgtgatgatcgatgccaaggaagtgagcgccgcccaccgggccagatacttctggggcaatctgcctggcatgaacagacccctggccagcaccgtgaacgacaagctggagctgcaggagtgcctggagcacggccggatcgccaagttcagcaaggtgagaaccatcaccacccgaagcaacagcatcaaacaaggcaaggaccagcactttcctgtgttcatgaacgagaaggaggacatcctgtggtgtaccgagatggagagagtgttcgggttcccagtccactacacagatgtcagcaacatgtctagactggccagacagagactgctgggaagaagctggtccgtccctgtgatcagacacctgttcgcccctctgaaggagtacttcgcctgcgtgagcagcggcaacagcaacgccaacagccggggccccagcttctctagcggcctggtgccactgtccctgagagggagccacatgggccccatggagatctacaaaaccgtgagcgcctggaagcggcagcctgtgcgcgtgctgagcctgtttcggaatatcgataaagtcctgaaaagcctgggattcctggagagcggctctggctccggcggtggcaccctgaagtacgtggaggatgtgacaaacgtggtcagacgggatgtggagaagtggggccccttcgatctggtgtacggcagcacccaacccctgggcagctcttgtgaccggtgccctggctggtacatgtttcagttccaccggatcctgcagtacgccctgccgagacaggagtcccagcggccattcttttggattttcatggacaacttgctgctgaccgaggatgaccaggaaactaccactcggttcctgcagaccgaagccgtgaccctgcaggacgtgagaggccgggactaccagaacgccatgcgggtgtggtccaacatccctggactgaaaagcaagcacgcacctctgacccctaaagaagaggagtacctgcaggcccaggtgcggagcagaagcaagctggacgcccctaaggtggatctgctggtgaagaattgcctcctgcccctgagagagtacttcaagtatttcagccagaatagtctgcccctgggaggcagcggcggcggcatggcccccggcctgctgaccaccagggaggaggccctgatggccttcagggacgtggccgtggccttcacccagaaggagtggaagctgctgagcagcgcccagaggaccctgtacagggaggtgatgctggagaactacagccacctggtgagcctgggcatcgccttcagcaagcccaagctgatcgagcagctggagcagggcaacgagccctggagggaggagaacgagcacctgctgggcggcccaagcagcggcgcccctcctcccagcggcggcaggcggcccaagcagcggcgcccctcctcccagcggcggcagcccagccggctccccaacctctaccgaggagggcacctctgagtccgccacccccgagagcggccctggcacctccaccgagcccagcgagggcagcgcacccggcagccctgccggcagccccacctccacagaggagggaaccagcaccgagcccagcgaaggcagcgccccaggcaccagcaccgagcctagtgagcaggagattaaacggatcaacaagatcagaagaagacttgtgaaagacagcaacaccaagaaggccggcaagacaggccccatgaaaaccctgctggttagagtgatgacacccgatctgagagagcggctggaaaacctgagaaagaagcctgaaaatatcccccagcccatcagcaatacatctagagccaacctgaataagctgctgaccgattacaccgaaatgaagaaggcgatcctgcatgtgtactgggaagagttccagaaggaccctgtgggcctgatgagccgggtggcccagcctgccagcaagaagatcgatcagaacaagctgaaacctgagatggacgagaagggcaacctgaccaccgccggctttgcctgctctcagtgtggccagcccctgttcgtgtacaagctggagcaggtgtctgagaagggcaaggcttacaccaactacttcggacggtgcaatgtggccgagcacgaaaagctgatcctgctggcccagctgaagcccgagaaggatagcgacgaagccgtgacatatagcctgggaaagtttgggcagagggccctggatttctacagcattcatgtgaccaaggagtccacccaccccgtgaagcccctggcccagatcgccggaaacagatacgcctccggacctgtgggaaaggccctgagcgacgcatgtatgggcacaatcgcctccttcctgtctaagtaccaggacatcatcatcgaacaccagaaggtggtgaagggcaaccagaagagactggagagcctgcgggagctggccggcaaggaaaacctggaataccctagcgtgaccctgccacctcagcctcacaccaaggagggcgttgatgcctacaacgaagtgatcgcccgggtgcgaatgtgggtgaacctgaacctgtggcagaagctgaagctaagcagagatgatgccaagcctctgctgagactgaagggattcccttcctttcctctggtcgagagacaggccaacgaagtggactggtgggacatggtgtgtaacgtgaagaagctgatcaacgagaaaaaggaggatggcaaggtgttttggcagaatctggctggctacaagagacaggaagccctgagaccatacctgagcagcgaggaagatcggaagaagggaaagaaattcgctcggtaccagctgggcgacctgctgctgcacctggaaaagaagcacggcgaggactggggaaaggtgtacgacgaggcctgggagcggattgacaagaaagtggaaggcctgagcaagcacatcaagctggaagaggaacggagaagcgaggacgcccagagcaaggccgccctgaccgactggctgcgggctaaggccagcttcgtgatcgagggcctgaaggaggccgacaaggacgagttctgcagatgcgagctgaagctgcagaagtggtacggggacctgcggggaaagcccttcgccatcgaagccgagaacagcatcctggacatcagcggcttcagcaagcagtacaactgtgccttcatctggcagaaggacggcgtgaagaagctgaacctgtacctgatcatcaactacttcaagggcggcaagctgcggttcaagaagatcaaacctgaagccttcgaagccaacagattctacaccgtgatcaacaaaaagagcggcgagatcgtgcccatggaggtgaacttcaacttcgacgaccccaacctgatcatcctgcctctggcctttggcaagagacagggcagagaattcatctggaacgacctgctgtccctggaaaccggcagcctgaagctggccaacggaagagtgatcgagaagacactgtacaacagaagaacccggcaggatgagcctgccctgttcgtggccctgaccttcgagcggcgggaggtcctggactcctccaatatcaaaccaatgaacctgatcggcgtggcaagaggcgaaaacatccccgccgtgatcgccctgaccgaccccgagggctgcccactgagccggtttaaggatagcctgggaaacccaacccacatcctgagaatcggcgagagctataaggagaagcagcggaccatccaggccaagaaggaggtggagcagcggagagccggcggctacagccggaagtacgccagcaaagccaagaatctggcagacgatatggtgagaaacaccgctagagatctgctgtactacgccgtgacccaggatgccatgctgatcttcgccaacctgagccggggcttcggccggcagggcaagcggaccttcatggccgagagacagtacacacggatggaggactggctgaccgccaagctggcctacgagggcctgagcaagacctacctgtccaagacactggcccagtacacctccaagacatgcagcaactgtgggtttaccatcaccagcgccgactacgacagggtgctggagaagctgaagaagacagcaacaggctggatgaccacaattaacggcaaggagctgaaggtggagggccagattacctactacaacagatacaagagacagaacgtagtcaaggacctgtccgtcgagctggatagactgagcgaagaatctgtgaacaacgacatctcctcctggacaaagggcagaagcggagaagctctgagcctcctgaagaaaagattctcccatagacccgtgcaggagaagttcgtgtgcctgaactgcggcttcgagacacacgcagccgagcaagccgccctgaacatcgccagatcctggctgttcctgcggagccaggagtacaagaaataccagacaaacaagacaaccggcaacaccgataagagagccttcgtcgagacctggcagtccttttaccggaagaagcttaaggaggtgtggaaacctgccgtgcggtctggcggatctggcggaggctccaccagccccaagaaaaagagaaaagtctaagctgccttctgcggggcttgccttctggccatgcccttcttctctcccttgcacctgtacctcttggtctttgaataaagcctgagtaggaaggctagcaaaaaaaaaaaaaaaaaaaaaaaaaaaaaaaaaaaaaaaaaaaaaaaaaaaaaaaaaaaaaaaaaaaaaaaaaaaaaaaagcccagccggctccccaacctctaccgaggagggcacctctgagtccgccacccccgagagcggccctggcacctccaccgagcccagcgagggcagcgcacccggcagccctgccggcagccccacctccacagaggagggaaccagcaccgagcccagcgaaggcagcgccccaggcaccagcaccgagcctagtgagcaggagattaaacggatcaacaagatcagaagaagacttgtgaaagacagcaacaccaagaaggccggcaagacaggccccatgaaaaccctgctggttagagtgatgacacccgatctgagagagcggctggaaaacctgagaaagaagcctgaaaatatcccccagcccatcagcaatacatctagagccaacctgaataagctgctgaccgattacaccgaaatgaagaaggcgatcctgcatgtgtactgggaagagttccagaaggaccctgtgggcctgatgagccgggtggcccagcctgccagcaagaagatcgatcagaacaagctgaaacctgagatggacgagaagggcaacctgaccaccgccggctttgcctgctctcagtgtggccagcccctgttcgtgtacaagctggagcaggtgtctgagaagggcaaggcttacaccaactacttcggacggtgcaatgtggccgagcacgaaaagctgatcctgctggcccagctgaagcccgagaaggatagcgacgaagccgtgacatatagcctgggaaagtttgggcagagggccctggatttctacagcattcatgtgaccaaggagtccacccaccccgtgaagcccctggcccagatcgccggaaacagatacgcctccggacctgtgggaaaggccctgagcgacgcatgtatgggcacaatcgcctccttcctgtctaagtaccaggacatcatcatcgaacaccagaaggtggtgaagggcaaccagaagagactggagagcctgcgggagctggccggcaaggaaaacctggaataccctagcgtgaccctgccacctcagcctcacaccaaggagggcgttgatgcctacaacgaagtgatcgcccgggtgcgaatgtgggtgaacctgaacctgtggcagaagctgaagctaagcagagatgatgccaagcctctgctgagactgaagggattcccttcctttcctctggtcgagagacaggccaacgaagtggactggtgggacatggtgtgtaacgtgaagaagctgatcaacgagaaaaaggaggatggcaaggtgttttggcagaatctggctggctacaagagacaggaagccctgagaccatacctgagcagcgaggaagatcggaagaagggaaagaaattcgctcggtaccagctgggcgacctgctgctgcacctggaaaagaagcacggcgaggactggggaaaggtgtacgacgaggcctgggagcggattgacaagaaagtggaaggcctgagcaagcacatcaagctggaagaggaacggagaagcgaggacgcccagagcaaggccgccctgaccgactggctgcgggctaaggccagcttcgtgatcgagggcctgaaggaggccgacaaggacgagttctgcagatgcgagctgaagctgcagaagtggtacggggacctgcggggaaagcccttcgccatcgaagccgagaacagcatcctggacatcagcggcttcagcaagcagtacaactgtgccttcatctggcagaaggacggcgtgaagaagctgaacctgtacctgatcatcaactacttcaagggcggcaagctgcggttcaagaagatcaaacctgaagccttcgaagccaacagattctacaccgtgatcaacaaaaagagcggcgagatcgtgcccatggaggtgaacttcaacttcgacgaccccaacctgatcatcctgcctctggcctttggcaagagacagggcagagaattcatctggaacgacctgctgtccctggaaaccggcagcctgaagctggccaacggaagagtgatcgagaagacactgtacaacagaagaacccggcaggatgagcctgccctgttcgtggccctgaccttcgagcggcgggaggtcctggactcctccaatatcaaaccaatgaacctgatcggcgtggcaagaggcgaaaacatccccgccgtgatcgccctgaccgaccccgagggctgcccactgagccggtttaaggatagcctgggaaacccaacccacatcctgagaatcggcgagagctataaggagaagcagcggaccatccaggccaagaaggaggtggagcagcggagagccggcggctacagccggaagtacgccagcaaagccaagaatctggcagacgatatggtgagaaacaccgctagagatctgctgtactacgccgtgacccaggatgccatgctgatcttcgccaacctgagccggggcttcggccggcagggcaagcggaccttcatggccgagagacagtacacacggatggaggactggctgaccgccaagctggcctacgagggcctgagcaagacctacctgtccaagacactggcccagtacacctccaagacatgcagcaactgtgggtttaccatcaccagcgccgactacgacagggtgctggagaagctgaagaagacagcaacaggctggatgaccacaattaacggcaaggagctgaaggtggagggccagattacctactacaacagatacaagagacagaacgtagtcaaggacctgtccgtcgagctggatagactgagcgaagaatctgtgaacaacgacatctcctcctggacaaagggcagaagcggagaagctctgagcctcctgaagaaaagattctcccatagacccgtgcaggagaagttcgtgtgcctgaactgcggcttcgagacacacgcagccgagcaagccgccctgaacatcgccagatcctggctgttcctgcggagccaggagtacaagaaataccagacaaacaagacaaccggcaacaccgataagagagccttcgtcgagacctggcagtccttttaccggaagaagcttaaggaggtgtggaaacctgccgtgcggtctggcggatctggcggaggctccaccagccccaagaaaaagagaaaagtctaagctgccttctgcggggcttgccttctggccatgcccttcttctctcccttgcacctgtacctcttggtctttgaataaagcctgagtaggaaggctagcaaaaaaaaaaaaaaaaaaaaaaaaaaaaaaaaaaaaaaaaaaaaaaaaaaaaaaaaaaaaaaaaaaaaaaaaaaaaaaaa

SEQ ID NO: 10287 - RNA, 8787 nt, synthetic construct
  source 1..8787: mol_type = other RNA
aggaaataagagagaaaagaagagtaagaagaaatataagagccaccatggcccctaagaagaagcgtaaagtgagccggatgaaccacgaccaggagttcgacccccctaaggtgtaccctcccgtccccgccgagaagagaaagcccatccgggtcctgagcctgttcgatggcatcgccaccggtctgctggtgctgaaggacctgggcatccaggtggataggtacattgcctccgaggtgtgcgaggactccatcaccgtgggaatggtgcgtcatcagggcaagatcatgtacgtgggcgacgtgcggagcgtgacacagaagcatatccaggagtggggccctttcgacctggtgatcggcggcagcccttgcaatgacctgagcatcgtgaacccagcccggaagggcctgtacgagggaaccggcagactgttcttcgagttttacagactgctgcacgacgcccggcctaaggaaggcgacgaccggcccttcttttggctgttcgagaatgtggtggccatgggagtcagcgacaagcgggatattagccggttcctggagagcaaccccgtgatgatcgatgccaaggaagtgagcgccgcccaccgggccagatacttctggggcaatctgcctggcatgaacagacccctggccagcaccgtgaacgacaagctggagctgcaggagtgcctggagcacggccggatcgccaagttcagcaaggtgagaaccatcaccacccgaagcaacagcatcaaacaaggcaaggaccagcactttcctgtgttcatgaacgagaaggaggacatcctgtggtgtaccgagatggagagagtgttcgggttcccagtccactacacagatgtcagcaacatgtctagactggccagacagagactgctgggaagaagctggtccgtccctgtgatcagacacctgttcgcccctctgaaggagtacttcgcctgcgtgagcagcggcaacagcaacgccaacagccggggccccagcttctctagcggcctggtgccactgtccctgagagggagccacatgggccccatggagatctacaaaaccgtgagcgcctggaagcggcagcctgtgcgcgtgctgagcctgtttcggaatatcgataaagtcctgaaaagcctgggattcctggagagcggctctggctccggcggtggcaccctgaagtacgtggaggatgtgacaaacgtggtcagacgggatgtggagaagtggggccccttcgatctggtgtacggcagcacccaacccctgggcagctcttgtgaccggtgccctggctggtacatgtttcagttccaccggatcctgcagtacgccctgccgagacaggagtcccagcggccattcttttggattttcatggacaacttgctgctgaccgaggatgaccaggaaactaccactcggttcctgcagaccgaagccgtgaccctgcaggacgtgagaggccgggactaccagaacgccatgcgggtgtggtccaacatccctggactgaaaagcaagcacgcacctctgacccctaaagaagaggagtacctgcaggcccaggtgcggagcagaagcaagctggacgcccctaaggtggatctgctggtgaagaattgcctcctgcccctgagagagtacttcaagtatttcagccagaatagtctgcccctgggaggcagcggcggcggcaagccctgggccgtgaacttcgccgacgtggccgtgtacttcagccccgaggagtggaggtacctgaggcccgcccagagggccctgtacagggaggtgatgagggagacctacggcctgctggcctacctggacgtgggctgcgccaagcccgccctgatctgctgggtggaggaggagagcgaggtgtggggcccctgcgcccaggaccccgaggtggccatgtgcaggaccgaggtgcacggcggcccaagcagcggcgcccctcctcccagcggcggcaggcggcccaagcagcggcgcccctcctcccagcggcggcagcccagccggctccccaacctctaccgaggagggcacctctgagtccgccacccccgagagcggccctggcacctccaccgagcccagcgagggcagcgcacccggcagccctgccggcagccccacctccacagaggagggaaccagcaccgagcccagcgaaggcagcgccccaggcaccagcaccgagcctagtgagcaggagattaaacggatcaacaagatcagaagaagacttgtgaaagacagcaacaccaagaaggccggcaagacaggccccatgaaaaccctgctggttagagtgatgacacccgatctgagagagcggctggaaaacctgagaaagaagcctgaaaatatcccccagcccatcagcaatacatctagagccaacctgaataagctgctgaccgattacaccgaaatgaagaaggcgatcctgcatgtgtactgggaagagttccagaaggaccctgtgggcctgatgagccgggtggcccagcctgccagcaagaagatcgatcagaacaagctgaaacctgagatggacgagaagggcaacctgaccaccgccggctttgcctgctctcagtgtggccagcccctgttcgtgtacaagctggagcaggtgtctgagaagggcaaggcttacaccaactacttcggacggtgcaatgtggccgagcacgaaaagctgatcctgctggcccagctgaagcccgagaaggatagcgacgaagccgtgacatatagcctgggaaagtttgggcagagggccctggatttctacagcattcatgtgaccaaggagtccacccaccccgtgaagcccctggcccagatcgccggaaacagatacgcctccggacctgtgggaaaggccctgagcgacgcatgtatgggcacaatcgcctccttcctgtctaagtaccaggacatcatcatcgaacaccagaaggtggtgaagggcaaccagaagagactggagagcctgcgggagctggccggcaaggaaaacctggaataccctagcgtgaccctgccacctcagcctcacaccaaggagggcgttgatgcctacaacgaagtgatcgcccgggtgcgaatgtgggtgaacctgaacctgtggcagaagctgaagctaagcagagatgatgccaagcctctgctgagactgaagggattcccttcctttcctctggtcgagagacaggccaacgaagtggactggtgggacatggtgtgtaacgtgaagaagctgatcaacgagaaaaaggaggatggcaaggtgttttggcagaatctggctggctacaagagacaggaagccctgagaccatacctgagcagcgaggaagatcggaagaagggaaagaaattcgctcggtaccagctgggcgacctgctgctgcacctggaaaagaagcacggcgaggactggggaaaggtgtacgacgaggcctgggagcggattgacaagaaagtggaaggcctgagcaagcacatcaagctggaagaggaacggagaagcgaggacgcccagagcaaggccgccctgaccgactggctgcgggctaaggccagcttcgtgatcgagggcctgaaggaggccgacaaggacgagttctgcagatgcgagctgaagctgcagaagtggtacggggacctgcggggaaagcccttcgccatcgaagccgagaacagcatcctggacatcagcggcttcagcaagcagtacaactgtgccttcatctggcagaaggacggcgtgaagaagctgaacctgtacctgatcatcaactacttcaagggcggcaagctgcggttcaagaagatcaaacctgaagccttcgaagccaacagattctacaccgtgatcaacaaaaagagcggcgagatcgtgcccatggaggtgaacttcaacttcgacgaccccaacctgatcatcctgcctctggcctttggcaagagacagggcagagaattcatctggaacgacctgctgtccctggaaaccggcagcctgaagctggccaacggaagagtgatcgagaagacactgtacaacagaagaacccggcaggatgagcctgccctgttcgtggccctgaccttcgagcggcgggaggtcctggactcctccaatatcaaaccaatgaacctgatcggcgtggcaagaggcgaaaacatccccgccgtgatcgccctgaccgaccccgagggctgcccactgagccggtttaaggatagcctgggaaacccaacccacatcctgagaatcggcgagagctataaggagaagcagcggaccatccaggccaagaaggaggtggagcagcggagagccggcggctacagccggaagtacgccagcaaagccaagaatctggcagacgatatggtgagaaacaccgctagagatctgctgtactacgccgtgacccaggatgccatgctgatcttcgccaacctgagccggggcttcggccggcagggcaagcggaccttcatggccgagagacagtacacacggatggaggactggctgaccgccaagctggcctacgagggcctgagcaagacctacctgtccaagacactggcccagtacacctccaagacatgcagcaactgtgggtttaccatcaccagcgccgactacgacagggtgctggagaagctgaagaagacagcaacaggctggatgaccacaattaacggcaaggagctgaaggtggagggccagattacctactacaacagatacaagagacagaacgtagtcaaggacctgtccgtcgagctggatagactgagcgaagaatctgtgaacaacgacatctcctcctggacaaagggcagaagcggagaagctctgagcctcctgaagaaaagattctcccatagacccgtgcaggagaagttcgtgtgcctgaactgcggcttcgagacacacgcagccgagcaagccgccctgaacatcgccagatcctggctgttcctgcggagccaggagtacaagaaataccagacaaacaagacaaccggcaacaccgataagagagccttcgtcgagacctggcagtccttttaccggaagaagcttaaggaggtgtggaaacctgccgtgcggtctggcggatctggcggaggctccaccagccccaagaaaaagagaaaagtctaagctgccttctgcggggcttgccttctggccatgcccttcttctctcccttgcacctgtacctcttggtctttgaataaagcctgagtaggaaggctagcaaaaaaaaaaaaaaaaaaaaaaaaaaaaaaaaaaaaaaaaaaaaaaaaaaaaaaaaaaaaaaaaaaaaaaaaaaaaaaaagcccagccggctccccaacctctaccgaggagggcacctctgagtccgccacccccgagagcggccctggcacctccaccgagcccagcgagggcagcgcacccggcagccctgccggcagccccacctccacagaggagggaaccagcaccgagcccagcgaaggcagcgccccaggcaccagcaccgagcctagtgagcaggagattaaacggatcaacaagatcagaagaagacttgtgaaagacagcaacaccaagaaggccggcaagacaggccccatgaaaaccctgctggttagagtgatgacacccgatctgagagagcggctggaaaacctgagaaagaagcctgaaaatatcccccagcccatcagcaatacatctagagccaacctgaataagctgctgaccgattacaccgaaatgaagaaggcgatcctgcatgtgtactgggaagagttccagaaggaccctgtgggcctgatgagccgggtggcccagcctgccagcaagaagatcgatcagaacaagctgaaacctgagatggacgagaagggcaacctgaccaccgccggctttgcctgctctcagtgtggccagcccctgttcgtgtacaagctggagcaggtgtctgagaagggcaaggcttacaccaactacttcggacggtgcaatgtggccgagcacgaaaagctgatcctgctggcccagctgaagcccgagaaggatagcgacgaagccgtgacatatagcctgggaaagtttgggcagagggccctggatttctacagcattcatgtgaccaaggagtccacccaccccgtgaagcccctggcccagatcgccggaaacagatacgcctccggacctgtgggaaaggccctgagcgacgcatgtatgggcacaatcgcctccttcctgtctaagtaccaggacatcatcatcgaacaccagaaggtggtgaagggcaaccagaagagactggagagcctgcgggagctggccggcaaggaaaacctggaataccctagcgtgaccctgccacctcagcctcacaccaaggagggcgttgatgcctacaacgaagtgatcgcccgggtgcgaatgtgggtgaacctgaacctgtggcagaagctgaagctaagcagagatgatgccaagcctctgctgagactgaagggattcccttcctttcctctggtcgagagacaggccaacgaagtggactggtgggacatggtgtgtaacgtgaagaagctgatcaacgagaaaaaggaggatggcaaggtgttttggcagaatctggctggctacaagagacaggaagccctgagaccatacctgagcagcgaggaagatcggaagaagggaaagaaattcgctcggtaccagctgggcgacctgctgctgcacctggaaaagaagcacggcgaggactggggaaaggtgtacgacgaggcctgggagcggattgacaagaaagtggaaggcctgagcaagcacatcaagctggaagaggaacggagaagcgaggacgcccagagcaaggccgccctgaccgactggctgcgggctaaggccagcttcgtgatcgagggcctgaaggaggccgacaaggacgagttctgcagatgcgagctgaagctgcagaagtggtacggggacctgcggggaaagcccttcgccatcgaagccgagaacagcatcctggacatcagcggcttcagcaagcagtacaactgtgccttcatctggcagaaggacggcgtgaagaagctgaacctgtacctgatcatcaactacttcaagggcggcaagctgcggttcaagaagatcaaacctgaagccttcgaagccaacagattctacaccgtgatcaacaaaaagagcggcgagatcgtgcccatggaggtgaacttcaacttcgacgaccccaacctgatcatcctgcctctggcctttggcaagagacagggcagagaattcatctggaacgacctgctgtccctggaaaccggcagcctgaagctggccaacggaagagtgatcgagaagacactgtacaacagaagaacccggcaggatgagcctgccctgttcgtggccctgaccttcgagcggcgggaggtcctggactcctccaatatcaaaccaatgaacctgatcggcgtggcaagaggcgaaaacatccccgccgtgatcgccctgaccgaccccgagggctgcccactgagccggtttaaggatagcctgggaaacccaacccacatcctgagaatcggcgagagctataaggagaagcagcggaccatccaggccaagaaggaggtggagcagcggagagccggcggctacagccggaagtacgccagcaaagccaagaatctggcagacgatatggtgagaaacaccgctagagatctgctgtactacgccgtgacccaggatgccatgctgatcttcgccaacctgagccggggcttcggccggcagggcaagcggaccttcatggccgagagacagtacacacggatggaggactggctgaccgccaagctggcctacgagggcctgagcaagacctacctgtccaagacactggcccagtacacctccaagacatgcagcaactgtgggtttaccatcaccagcgccgactacgacagggtgctggagaagctgaagaagacagcaacaggctggatgaccacaattaacggcaaggagctgaaggtggagggccagattacctactacaacagatacaagagacagaacgtagtcaaggacctgtccgtcgagctggatagactgagcgaagaatctgtgaacaacgacatctcctcctggacaaagggcagaagcggagaagctctgagcctcctgaagaaaagattctcccatagacccgtgcaggagaagttcgtgtgcctgaactgcggcttcgagacacacgcagccgagcaagccgccctgaacatcgccagatcctggctgttcctgcggagccaggagtacaagaaataccagacaaacaagacaaccggcaacaccgataagagagccttcgtcgagacctggcagtccttttaccggaagaagcttaaggaggtgtggaaacctgccgtgcggtctggcggatctggcggaggctccaccagccccaagaaaaagagaaaagtctaagctgccttctgcggggcttgccttctggccatgcccttcttctctcccttgcacctgtacctcttggtctttgaataaagcctgagtaggaaggctagcaaaaaaaaaaaaaaaaaaaaaaaaaaaaaaaaaaaaaaaaaaaaaaaaaaaaaaaaaaaaaaaaaaaaaaaaaaaaaaaa

SEQ ID NO: 10288 - RNA, 8787 nt, synthetic construct
  source 1..8787: mol_type = other RNA
aggaaataagagagaaaagaagagtaagaagaaatataagagccaccatggcccctaagaagaagcgtaaagtgagccggatgaaccacgaccaggagttcgacccccctaaggtgtaccctcccgtccccgccgagaagagaaagcccatccgggtcctgagcctgttcgatggcatcgccaccggtctgctggtgctgaaggacctgggcatccaggtggataggtacattgcctccgaggtgtgcgaggactccatcaccgtgggaatggtgcgtcatcagggcaagatcatgtacgtgggcgacgtgcggagcgtgacacagaagcatatccaggagtggggccctttcgacctggtgatcggcggcagcccttgcaatgacctgagcatcgtgaacccagcccggaagggcctgtacgagggaaccggcagactgttcttcgagttttacagactgctgcacgacgcccggcctaaggaaggcgacgaccggcccttcttttggctgttcgagaatgtggtggccatgggagtcagcgacaagcgggatattagccggttcctggagagcaaccccgtgatgatcgatgccaaggaagtgagcgccgcccaccgggccagatacttctggggcaatctgcctggcatgaacagacccctggccagcaccgtgaacgacaagctggagctgcaggagtgcctggagcacggccggatcgccaagttcagcaaggtgagaaccatcaccacccgaagcaacagcatcaaacaaggcaaggaccagcactttcctgtgttcatgaacgagaaggaggacatcctgtggtgtaccgagatggagagagtgttcgggttcccagtccactacacagatgtcagcaacatgtctagactggccagacagagactgctgggaagaagctggtccgtccctgtgatcagacacctgttcgcccctctgaaggagtacttcgcctgcgtgagcagcggcaacagcaacgccaacagccggggccccagcttctctagcggcctggtgccactgtccctgagagggagccacatgggccccatggagatctacaaaaccgtgagcgcctggaagcggcagcctgtgcgcgtgctgagcctgtttcggaatatcgataaagtcctgaaaagcctgggattcctggagagcggctctggctccggcggtggcaccctgaagtacgtggaggatgtgacaaacgtggtcagacgggatgtggagaagtggggccccttcgatctggtgtacggcagcacccaacccctgggcagctcttgtgaccggtgccctggctggtacatgtttcagttccaccggatcctgcagtacgccctgccgagacaggagtcccagcggccattcttttggattttcatggacaacttgctgctgaccgaggatgaccaggaaactaccactcggttcctgcagaccgaagccgtgaccctgcaggacgtgagaggccgggactaccagaacgccatgcgggtgtggtccaacatccctggactgaaaagcaagcacgcacctctgacccctaaagaagaggagtacctgcaggcccaggtgcggagcagaagcaagctggacgcccctaaggtggatctgctggtgaagaattgcctcctgcccctgagagagtacttcaagtatttcagccagaatagtctgcccctgggaggcagcggcggcggcagccagatccccctgaccttccaggacgtggccgtggacttcacctgggaggagtggggcctgctggagcccagccagaaggacatgtactgggacgtgatgctggagaactacgagaacttcgtgagcctgggcggcatccccgtgagcttccccgacgtgatcagccagatggagaggatcgaggccccctggatgaccgagaggggcgtgctggtgagcgccttcctggacagccccaacggcggcccaagcagcggcgcccctcctcccagcggcggcaggcggcccaagcagcggcgcccctcctcccagcggcggcagcccagccggctccccaacctctaccgaggagggcacctctgagtccgccacccccgagagcggccctggcacctccaccgagcccagcgagggcagcgcacccggcagccctgccggcagccccacctccacagaggagggaaccagcaccgagcccagcgaaggcagcgccccaggcaccagcaccgagcctagtgagcaggagattaaacggatcaacaagatcagaagaagacttgtgaaagacagcaacaccaagaaggccggcaagacaggccccatgaaaaccctgctggttagagtgatgacacccgatctgagagagcggctggaaaacctgagaaagaagcctgaaaatatcccccagcccatcagcaatacatctagagccaacctgaataagctgctgaccgattacaccgaaatgaagaaggcgatcctgcatgtgtactgggaagagttccagaaggaccctgtgggcctgatgagccgggtggcccagcctgccagcaagaagatcgatcagaacaagctgaaacctgagatggacgagaagggcaacctgaccaccgccggctttgcctgctctcagtgtggccagcccctgttcgtgtacaagctggagcaggtgtctgagaagggcaaggcttacaccaactacttcggacggtgcaatgtggccgagcacgaaaagctgatcctgctggcccagctgaagcccgagaaggatagcgacgaagccgtgacatatagcctgggaaagtttgggcagagggccctggatttctacagcattcatgtgaccaaggagtccacccaccccgtgaagcccctggcccagatcgccggaaacagatacgcctccggacctgtgggaaaggccctgagcgacgcatgtatgggcacaatcgcctccttcctgtctaagtaccaggacatcatcatcgaacaccagaaggtggtgaagggcaaccagaagagactggagagcctgcgggagctggccggcaaggaaaacctggaataccctagcgtgaccctgccacctcagcctcacaccaaggagggcgttgatgcctacaacgaagtgatcgcccgggtgcgaatgtgggtgaacctgaacctgtggcagaagctgaagctaagcagagatgatgccaagcctctgctgagactgaagggattcccttcctttcctctggtcgagagacaggccaacgaagtggactggtgggacatggtgtgtaacgtgaagaagctgatcaacgagaaaaaggaggatggcaaggtgttttggcagaatctggctggctacaagagacaggaagccctgagaccatacctgagcagcgaggaagatcggaagaagggaaagaaattcgctcggtaccagctgggcgacctgctgctgcacctggaaaagaagcacggcgaggactggggaaaggtgtacgacgaggcctgggagcggattgacaagaaagtggaaggcctgagcaagcacatcaagctggaagaggaacggagaagcgaggacgcccagagcaaggccgccctgaccgactggctgcgggctaaggccagcttcgtgatcgagggcctgaaggaggccgacaaggacgagttctgcagatgcgagctgaagctgcagaagtggtacggggacctgcggggaaagcccttcgccatcgaagccgagaacagcatcctggacatcagcggcttcagcaagcagtacaactgtgccttcatctggcagaaggacggcgtgaagaagctgaacctgtacctgatcatcaactacttcaagggcggcaagctgcggttcaagaagatcaaacctgaagccttcgaagccaacagattctacaccgtgatcaacaaaaagagcggcgagatcgtgcccatggaggtgaacttcaacttcgacgaccccaacctgatcatcctgcctctggcctttggcaagagacagggcagagaattcatctggaacgacctgctgtccctggaaaccggcagcctgaagctggccaacggaagagtgatcgagaagacactgtacaacagaagaacccggcaggatgagcctgccctgttcgtggccctgaccttcgagcggcgggaggtcctggactcctccaatatcaaaccaatgaacctgatcggcgtggcaagaggcgaaaacatccccgccgtgatcgccctgaccgaccccgagggctgcccactgagccggtttaaggatagcctgggaaacccaacccacatcctgagaatcggcgagagctataaggagaagcagcggaccatccaggccaagaaggaggtggagcagcggagagccggcggctacagccggaagtacgccagcaaagccaagaatctggcagacgatatggtgagaaacaccgctagagatctgctgtactacgccgtgacccaggatgccatgctgatcttcgccaacctgagccggggcttcggccggcagggcaagcggaccttcatggccgagagacagtacacacggatggaggactggctgaccgccaagctggcctacgagggcctgagcaagacctacctgtccaagacactggcccagtacacctccaagacatgcagcaactgtgggtttaccatcaccagcgccgactacgacagggtgctggagaagctgaagaagacagcaacaggctggatgaccacaattaacggcaaggagctgaaggtggagggccagattacctactacaacagatacaagagacagaacgtagtcaaggacctgtccgtcgagctggatagactgagcgaagaatctgtgaacaacgacatctcctcctggacaaagggcagaagcggagaagctctgagcctcctgaagaaaagattctcccatagacccgtgcaggagaagttcgtgtgcctgaactgcggcttcgagacacacgcagccgagcaagccgccctgaacatcgccagatcctggctgttcctgcggagccaggagtacaagaaataccagacaaacaagacaaccggcaacaccgataagagagccttcgtcgagacctggcagtccttttaccggaagaagcttaaggaggtgtggaaacctgccgtgcggtctggcggatctggcggaggctccaccagccccaagaaaaagagaaaagtctaagctgccttctgcggggcttgccttctggccatgcccttcttctctcccttgcacctgtacctcttggtctttgaataaagcctgagtaggaaggctagcaaaaaaaaaaaaaaaaaaaaaaaaaaaaaaaaaaaaaaaaaaaaaaaaaaaaaaaaaaaaaaaaaaaaaaaaaaaaaaaagcccagccggctccccaacctctaccgaggagggcacctctgagtccgccacccccgagagcggccctggcacctccaccgagcccagcgagggcagcgcacccggcagccctgccggcagccccacctccacagaggagggaaccagcaccgagcccagcgaaggcagcgccccaggcaccagcaccgagcctagtgagcaggagattaaacggatcaacaagatcagaagaagacttgtgaaagacagcaacaccaagaaggccggcaagacaggccccatgaaaaccctgctggttagagtgatgacacccgatctgagagagcggctggaaaacctgagaaagaagcctgaaaatatcccccagcccatcagcaatacatctagagccaacctgaataagctgctgaccgattacaccgaaatgaagaaggcgatcctgcatgtgtactgggaagagttccagaaggaccctgtgggcctgatgagccgggtggcccagcctgccagcaagaagatcgatcagaacaagctgaaacctgagatggacgagaagggcaacctgaccaccgccggctttgcctgctctcagtgtggccagcccctgttcgtgtacaagctggagcaggtgtctgagaagggcaaggcttacaccaactacttcggacggtgcaatgtggccgagcacgaaaagctgatcctgctggcccagctgaagcccgagaaggatagcgacgaagccgtgacatatagcctgggaaagtttgggcagagggccctggatttctacagcattcatgtgaccaaggagtccacccaccccgtgaagcccctggcccagatcgccggaaacagatacgcctccggacctgtgggaaaggccctgagcgacgcatgtatgggcacaatcgcctccttcctgtctaagtaccaggacatcatcatcgaacaccagaaggtggtgaagggcaaccagaagagactggagagcctgcgggagctggccggcaaggaaaacctggaataccctagcgtgaccctgccacctcagcctcacaccaaggagggcgttgatgcctacaacgaagtgatcgcccgggtgcgaatgtgggtgaacctgaacctgtggcagaagctgaagctaagcagagatgatgccaagcctctgctgagactgaagggattcccttcctttcctctggtcgagagacaggccaacgaagtggactggtgggacatggtgtgtaacgtgaagaagctgatcaacgagaaaaaggaggatggcaaggtgttttggcagaatctggctggctacaagagacaggaagccctgagaccatacctgagcagcgaggaagatcggaagaagggaaagaaattcgctcggtaccagctgggcgacctgctgctgcacctggaaaagaagcacggcgaggactggggaaaggtgtacgacgaggcctgggagcggattgacaagaaagtggaaggcctgagcaagcacatcaagctggaagaggaacggagaagcgaggacgcccagagcaaggccgccctgaccgactggctgcgggctaaggccagcttcgtgatcgagggcctgaaggaggccgacaaggacgagttctgcagatgcgagctgaagctgcagaagtggtacggggacctgcggggaaagcccttcgccatcgaagccgagaacagcatcctggacatcagcggcttcagcaagcagtacaactgtgccttcatctggcagaaggacggcgtgaagaagctgaacctgtacctgatcatcaactacttcaagggcggcaagctgcggttcaagaagatcaaacctgaagccttcgaagccaacagattctacaccgtgatcaacaaaaagagcggcgagatcgtgcccatggaggtgaacttcaacttcgacgaccccaacctgatcatcctgcctctggcctttggcaagagacagggcagagaattcatctggaacgacctgctgtccctggaaaccggcagcctgaagctggccaacggaagagtgatcgagaagacactgtacaacagaagaacccggcaggatgagcctgccctgttcgtggccctgaccttcgagcggcgggaggtcctggactcctccaatatcaaaccaatgaacctgatcggcgtggcaagaggcgaaaacatccccgccgtgatcgccctgaccgaccccgagggctgcccactgagccggtttaaggatagcctgggaaacccaacccacatcctgagaatcggcgagagctataaggagaagcagcggaccatccaggccaagaaggaggtggagcagcggagagccggcggctacagccggaagtacgccagcaaagccaagaatctggcagacgatatggtgagaaacaccgctagagatctgctgtactacgccgtgacccaggatgccatgctgatcttcgccaacctgagccggggcttcggccggcagggcaagcggaccttcatggccgagagacagtacacacggatggaggactggctgaccgccaagctggcctacgagggcctgagcaagacctacctgtccaagacactggcccagtacacctccaagacatgcagcaactgtgggtttaccatcaccagcgccgactacgacagggtgctggagaagctgaagaagacagcaacaggctggatgaccacaattaacggcaaggagctgaaggtggagggccagattacctactacaacagatacaagagacagaacgtagtcaaggacctgtccgtcgagctggatagactgagcgaagaatctgtgaacaacgacatctcctcctggacaaagggcagaagcggagaagctctgagcctcctgaagaaaagattctcccatagacccgtgcaggagaagttcgtgtgcctgaactgcggcttcgagacacacgcagccgagcaagccgccctgaacatcgccagatcctggctgttcctgcggagccaggagtacaagaaataccagacaaacaagacaaccggcaacaccgataagagagccttcgtcgagacctggcagtccttttaccggaagaagcttaaggaggtgtggaaacctgccgtgcggtctggcggatctggcggaggctccaccagccccaagaaaaagagaaaagtctaagctgccttctgcggggcttgccttctggccatgcccttcttctctcccttgcacctgtacctcttggtctttgaataaagcctgagtaggaaggctagcaaaaaaaaaaaaaaaaaaaaaaaaaaaaaaaaaaaaaaaaaaaaaaaaaaaaaaaaaaaaaaaaaaaaaaaaaaaaaaaa

SEQ ID NO: 10289 - RNA, 8787 nt, synthetic construct
  source 1..8787: mol_type = other RNA
aggaaataagagagaaaagaagagtaagaagaaatataagagccaccatggcccctaagaagaagcgtaaagtgagccggatgaaccacgaccaggagttcgacccccctaaggtgtaccctcccgtccccgccgagaagagaaagcccatccgggtcctgagcctgttcgatggcatcgccaccggtctgctggtgctgaaggacctgggcatccaggtggataggtacattgcctccgaggtgtgcgaggactccatcaccgtgggaatggtgcgtcatcagggcaagatcatgtacgtgggcgacgtgcggagcgtgacacagaagcatatccaggagtggggccctttcgacctggtgatcggcggcagcccttgcaatgacctgagcatcgtgaacccagcccggaagggcctgtacgagggaaccggcagactgttcttcgagttttacagactgctgcacgacgcccggcctaaggaaggcgacgaccggcccttcttttggctgttcgagaatgtggtggccatgggagtcagcgacaagcgggatattagccggttcctggagagcaaccccgtgatgatcgatgccaaggaagtgagcgccgcccaccgggccagatacttctggggcaatctgcctggcatgaacagacccctggccagcaccgtgaacgacaagctggagctgcaggagtgcctggagcacggccggatcgccaagttcagcaaggtgagaaccatcaccacccgaagcaacagcatcaaacaaggcaaggaccagcactttcctgtgttcatgaacgagaaggaggacatcctgtggtgtaccgagatggagagagtgttcgggttcccagtccactacacagatgtcagcaacatgtctagactggccagacagagactgctgggaagaagctggtccgtccctgtgatcagacacctgttcgcccctctgaaggagtacttcgcctgcgtgagcagcggcaacagcaacgccaacagccggggccccagcttctctagcggcctggtgccactgtccctgagagggagccacatgggccccatggagatctacaaaaccgtgagcgcctggaagcggcagcctgtgcgcgtgctgagcctgtttcggaatatcgataaagtcctgaaaagcctgggattcctggagagcggctctggctccggcggtggcaccctgaagtacgtggaggatgtgacaaacgtggtcagacgggatgtggagaagtggggccccttcgatctggtgtacggcagcacccaacccctgggcagctcttgtgaccggtgccctggctggtacatgtttcagttccaccggatcctgcagtacgccctgccgagacaggagtcccagcggccattcttttggattttcatggacaacttgctgctgaccgaggatgaccaggaaactaccactcggttcctgcagaccgaagccgtgaccctgcaggacgtgagaggccgggactaccagaacgccatgcgggtgtggtccaacatccctggactgaaaagcaagcacgcacctctgacccctaaagaagaggagtacctgcaggcccaggtgcggagcagaagcaagctggacgcccctaaggtggatctgctggtgaagaattgcctcctgcccctgagagagtacttcaagtatttcagccagaatagtctgcccctgggaggcagcggcggcggcttccaggaggccgtgaccttcaaggacgtggccgtggccttcaccgaggaggagctgggcctgctggacagcgcccagaggaagctgtacagggacgtgatgctggagaacttcaggaacctggtgagcgtgggccaccagagcttcaagcccgacatgatcagccagctggagagggaggagaagctgtggatgaaggagttccagacccagaggggcaagcacagcggcttcctgtgcttcggcggcccaagcagcggcgcccctcctcccagcggcggcaggcggcccaagcagcggcgcccctcctcccagcggcggcagcccagccggctccccaacctctaccgaggagggcacctctgagtccgccacccccgagagcggccctggcacctccaccgagcccagcgagggcagcgcacccggcagccctgccggcagccccacctccacagaggagggaaccagcaccgagcccagcgaaggcagcgccccaggcaccagcaccgagcctagtgagcaggagattaaacggatcaacaagatcagaagaagacttgtgaaagacagcaacaccaagaaggccggcaagacaggccccatgaaaaccctgctggttagagtgatgacacccgatctgagagagcggctggaaaacctgagaaagaagcctgaaaatatcccccagcccatcagcaatacatctagagccaacctgaataagctgctgaccgattacaccgaaatgaagaaggcgatcctgcatgtgtactgggaagagttccagaaggaccctgtgggcctgatgagccgggtggcccagcctgccagcaagaagatcgatcagaacaagctgaaacctgagatggacgagaagggcaacctgaccaccgccggctttgcctgctctcagtgtggccagcccctgttcgtgtacaagctggagcaggtgtctgagaagggcaaggcttacaccaactacttcggacggtgcaatgtggccgagcacgaaaagctgatcctgctggcccagctgaagcccgagaaggatagcgacgaagccgtgacatatagcctgggaaagtttgggcagagggccctggatttctacagcattcatgtgaccaaggagtccacccaccccgtgaagcccctggcccagatcgccggaaacagatacgcctccggacctgtgggaaaggccctgagcgacgcatgtatgggcacaatcgcctccttcctgtctaagtaccaggacatcatcatcgaacaccagaaggtggtgaagggcaaccagaagagactggagagcctgcgggagctggccggcaaggaaaacctggaataccctagcgtgaccctgccacctcagcctcacaccaaggagggcgttgatgcctacaacgaagtgatcgcccgggtgcgaatgtgggtgaacctgaacctgtggcagaagctgaagctaagcagagatgatgccaagcctctgctgagactgaagggattcccttcctttcctctggtcgagagacaggccaacgaagtggactggtgggacatggtgtgtaacgtgaagaagctgatcaacgagaaaaaggaggatggcaaggtgttttggcagaatctggctggctacaagagacaggaagccctgagaccatacctgagcagcgaggaagatcggaagaagggaaagaaattcgctcggtaccagctgggcgacctgctgctgcacctggaaaagaagcacggcgaggactggggaaaggtgtacgacgaggcctgggagcggattgacaagaaagtggaaggcctgagcaagcacatcaagctggaagaggaacggagaagcgaggacgcccagagcaaggccgccctgaccgactggctgcgggctaaggccagcttcgtgatcgagggcctgaaggaggccgacaaggacgagttctgcagatgcgagctgaagctgcagaagtggtacggggacctgcggggaaagcccttcgccatcgaagccgagaacagcatcctggacatcagcggcttcagcaagcagtacaactgtgccttcatctggcagaaggacggcgtgaagaagctgaacctgtacctgatcatcaactacttcaagggcggcaagctgcggttcaagaagatcaaacctgaagccttcgaagccaacagattctacaccgtgatcaacaaaaagagcggcgagatcgtgcccatggaggtgaacttcaacttcgacgaccccaacctgatcatcctgcctctggcctttggcaagagacagggcagagaattcatctggaacgacctgctgtccctggaaaccggcagcctgaagctggccaacggaagagtgatcgagaagacactgtacaacagaagaacccggcaggatgagcctgccctgttcgtggccctgaccttcgagcggcgggaggtcctggactcctccaatatcaaaccaatgaacctgatcggcgtggcaagaggcgaaaacatccccgccgtgatcgccctgaccgaccccgagggctgcccactgagccggtttaaggatagcctgggaaacccaacccacatcctgagaatcggcgagagctataaggagaagcagcggaccatccaggccaagaaggaggtggagcagcggagagccggcggctacagccggaagtacgccagcaaagccaagaatctggcagacgatatggtgagaaacaccgctagagatctgctgtactacgccgtgacccaggatgccatgctgatcttcgccaacctgagccggggcttcggccggcagggcaagcggaccttcatggccgagagacagtacacacggatggaggactggctgaccgccaagctggcctacgagggcctgagcaagacctacctgtccaagacactggcccagtacacctccaagacatgcagcaactgtgggtttaccatcaccagcgccgactacgacagggtgctggagaagctgaagaagacagcaacaggctggatgaccacaattaacggcaaggagctgaaggtggagggccagattacctactacaacagatacaagagacagaacgtagtcaaggacctgtccgtcgagctggatagactgagcgaagaatctgtgaacaacgacatctcctcctggacaaagggcagaagcggagaagctctgagcctcctgaagaaaagattctcccatagacccgtgcaggagaagttcgtgtgcctgaactgcggcttcgagacacacgcagccgagcaagccgccctgaacatcgccagatcctggctgttcctgcggagccaggagtacaagaaataccagacaaacaagacaaccggcaacaccgataagagagccttcgtcgagacctggcagtccttttaccggaagaagcttaaggaggtgtggaaacctgccgtgcggtctggcggatctggcggaggctccaccagccccaagaaaaagagaaaagtctaagctgccttctgcggggcttgccttctggccatgcccttcttctctcccttgcacctgtacctcttggtctttgaataaagcctgagtaggaaggctagcaaaaaaaaaaaaaaaaaaaaaaaaaaaaaaaaaaaaaaaaaaaaaaaaaaaaaaaaaaaaaaaaaaaaaaaaaaaaaaaagcccagccggctccccaacctctaccgaggagggcacctctgagtccgccacccccgagagcggccctggcacctccaccgagcccagcgagggcagcgcacccggcagccctgccggcagccccacctccacagaggagggaaccagcaccgagcccagcgaaggcagcgccccaggcaccagcaccgagcctagtgagcaggagattaaacggatcaacaagatcagaagaagacttgtgaaagacagcaacaccaagaaggccggcaagacaggccccatgaaaaccctgctggttagagtgatgacacccgatctgagagagcggctggaaaacctgagaaagaagcctgaaaatatcccccagcccatcagcaatacatctagagccaacctgaataagctgctgaccgattacaccgaaatgaagaaggcgatcctgcatgtgtactgggaagagttccagaaggaccctgtgggcctgatgagccgggtggcccagcctgccagcaagaagatcgatcagaacaagctgaaacctgagatggacgagaagggcaacctgaccaccgccggctttgcctgctctcagtgtggccagcccctgttcgtgtacaagctggagcaggtgtctgagaagggcaaggcttacaccaactacttcggacggtgcaatgtggccgagcacgaaaagctgatcctgctggcccagctgaagcccgagaaggatagcgacgaagccgtgacatatagcctgggaaagtttgggcagagggccctggatttctacagcattcatgtgaccaaggagtccacccaccccgtgaagcccctggcccagatcgccggaaacagatacgcctccggacctgtgggaaaggccctgagcgacgcatgtatgggcacaatcgcctccttcctgtctaagtaccaggacatcatcatcgaacaccagaaggtggtgaagggcaaccagaagagactggagagcctgcgggagctggccggcaaggaaaacctggaataccctagcgtgaccctgccacctcagcctcacaccaaggagggcgttgatgcctacaacgaagtgatcgcccgggtgcgaatgtgggtgaacctgaacctgtggcagaagctgaagctaagcagagatgatgccaagcctctgctgagactgaagggattcccttcctttcctctggtcgagagacaggccaacgaagtggactggtgggacatggtgtgtaacgtgaagaagctgatcaacgagaaaaaggaggatggcaaggtgttttggcagaatctggctggctacaagagacaggaagccctgagaccatacctgagcagcgaggaagatcggaagaagggaaagaaattcgctcggtaccagctgggcgacctgctgctgcacctggaaaagaagcacggcgaggactggggaaaggtgtacgacgaggcctgggagcggattgacaagaaagtggaaggcctgagcaagcacatcaagctggaagaggaacggagaagcgaggacgcccagagcaaggccgccctgaccgactggctgcgggctaaggccagcttcgtgatcgagggcctgaaggaggccgacaaggacgagttctgcagatgcgagctgaagctgcagaagtggtacggggacctgcggggaaagcccttcgccatcgaagccgagaacagcatcctggacatcagcggcttcagcaagcagtacaactgtgccttcatctggcagaaggacggcgtgaagaagctgaacctgtacctgatcatcaactacttcaagggcggcaagctgcggttcaagaagatcaaacctgaagccttcgaagccaacagattctacaccgtgatcaacaaaaagagcggcgagatcgtgcccatggaggtgaacttcaacttcgacgaccccaacctgatcatcctgcctctggcctttggcaagagacagggcagagaattcatctggaacgacctgctgtccctggaaaccggcagcctgaagctggccaacggaagagtgatcgagaagacactgtacaacagaagaacccggcaggatgagcctgccctgttcgtggccctgaccttcgagcggcgggaggtcctggactcctccaatatcaaaccaatgaacctgatcggcgtggcaagaggcgaaaacatccccgccgtgatcgccctgaccgaccccgagggctgcccactgagccggtttaaggatagcctgggaaacccaacccacatcctgagaatcggcgagagctataaggagaagcagcggaccatccaggccaagaaggaggtggagcagcggagagccggcggctacagccggaagtacgccagcaaagccaagaatctggcagacgatatggtgagaaacaccgctagagatctgctgtactacgccgtgacccaggatgccatgctgatcttcgccaacctgagccggggcttcggccggcagggcaagcggaccttcatggccgagagacagtacacacggatggaggactggctgaccgccaagctggcctacgagggcctgagcaagacctacctgtccaagacactggcccagtacacctccaagacatgcagcaactgtgggtttaccatcaccagcgccgactacgacagggtgctggagaagctgaagaagacagcaacaggctggatgaccacaattaacggcaaggagctgaaggtggagggccagattacctactacaacagatacaagagacagaacgtagtcaaggacctgtccgtcgagctggatagactgagcgaagaatctgtgaacaacgacatctcctcctggacaaagggcagaagcggagaagctctgagcctcctgaagaaaagattctcccatagacccgtgcaggagaagttcgtgtgcctgaactgcggcttcgagacacacgcagccgagcaagccgccctgaacatcgccagatcctggctgttcctgcggagccaggagtacaagaaataccagacaaacaagacaaccggcaacaccgataagagagccttcgtcgagacctggcagtccttttaccggaagaagcttaaggaggtgtggaaacctgccgtgcggtctggcggatctggcggaggctccaccagccccaagaaaaagagaaaagtctaagctgccttctgcggggcttgccttctggccatgcccttcttctctcccttgcacctgtacctcttggtctttgaataaagcctgagtaggaaggctagcaaaaaaaaaaaaaaaaaaaaaaaaaaaaaaaaaaaaaaaaaaaaaaaaaaaaaaaaaaaaaaaaaaaaaaaaaaaaaaaa

SEQ ID NO: 10290 - RNA, 8787 nt, synthetic construct
  source 1..8787: mol_type = other RNA
aggaaataagagagaaaagaagagtaagaagaaatataagagccaccatggcccctaagaagaagcgtaaagtgagccggatgaaccacgaccaggagttcgacccccctaaggtgtaccctcccgtccccgccgagaagagaaagcccatccgggtcctgagcctgttcgatggcatcgccaccggtctgctggtgctgaaggacctgggcatccaggtggataggtacattgcctccgaggtgtgcgaggactccatcaccgtgggaatggtgcgtcatcagggcaagatcatgtacgtgggcgacgtgcggagcgtgacacagaagcatatccaggagtggggccctttcgacctggtgatcggcggcagcccttgcaatgacctgagcatcgtgaacccagcccggaagggcctgtacgagggaaccggcagactgttcttcgagttttacagactgctgcacgacgcccggcctaaggaaggcgacgaccggcccttcttttggctgttcgagaatgtggtggccatgggagtcagcgacaagcgggatattagccggttcctggagagcaaccccgtgatgatcgatgccaaggaagtgagcgccgcccaccgggccagatacttctggggcaatctgcctggcatgaacagacccctggccagcaccgtgaacgacaagctggagctgcaggagtgcctggagcacggccggatcgccaagttcagcaaggtgagaaccatcaccacccgaagcaacagcatcaaacaaggcaaggaccagcactttcctgtgttcatgaacgagaaggaggacatcctgtggtgtaccgagatggagagagtgttcgggttcccagtccactacacagatgtcagcaacatgtctagactggccagacagagactgctgggaagaagctggtccgtccctgtgatcagacacctgttcgcccctctgaaggagtacttcgcctgcgtgagcagcggcaacagcaacgccaacagccggggccccagcttctctagcggcctggtgccactgtccctgagagggagccacatgggccccatggagatctacaaaaccgtgagcgcctggaagcggcagcctgtgcgcgtgctgagcctgtttcggaatatcgataaagtcctgaaaagcctgggattcctggagagcggctctggctccggcggtggcaccctgaagtacgtggaggatgtgacaaacgtggtcagacgggatgtggagaagtggggccccttcgatctggtgtacggcagcacccaacccctgggcagctcttgtgaccggtgccctggctggtacatgtttcagttccaccggatcctgcagtacgccctgccgagacaggagtcccagcggccattcttttggattttcatggacaacttgctgctgaccgaggatgaccaggaaactaccactcggttcctgcagaccgaagccgtgaccctgcaggacgtgagaggccgggactaccagaacgccatgcgggtgtggtccaacatccctggactgaaaagcaagcacgcacctctgacccctaaagaagaggagtacctgcaggcccaggtgcggagcagaagcaagctggacgcccctaaggtggatctgctggtgaagaattgcctcctgcccctgagagagtacttcaagtatttcagccagaatagtctgcccctgggaggcagcggcggcggcagcctgggcagcgtgaccttcaccgacgtggccatcgacttcagccaggacgagtgggagtggctgaacctggcccagaggagcctgtacaagaaggtgatgctggagaactacaggaacctggtgagcgtgggcctgtgcatcagcaagcccgtggtgatcagcctgctggagcaggagaaggacccctgggtgatcaagggcggcatgaacaggggcctgtgccccgacctggagtgcgtgggcggcccaagcagcggcgcccctcctcccagcggcggcaggcggcccaagcagcggcgcccctcctcccagcggcggcagcccagccggctccccaacctctaccgaggagggcacctctgagtccgccacccccgagagcggccctggcacctccaccgagcccagcgagggcagcgcacccggcagccctgccggcagccccacctccacagaggagggaaccagcaccgagcccagcgaaggcagcgccccaggcaccagcaccgagcctagtgagcaggagattaaacggatcaacaagatcagaagaagacttgtgaaagacagcaacaccaagaaggccggcaagacaggccccatgaaaaccctgctggttagagtgatgacacccgatctgagagagcggctggaaaacctgagaaagaagcctgaaaatatcccccagcccatcagcaatacatctagagccaacctgaataagctgctgaccgattacaccgaaatgaagaaggcgatcctgcatgtgtactgggaagagttccagaaggaccctgtgggcctgatgagccgggtggcccagcctgccagcaagaagatcgatcagaacaagctgaaacctgagatggacgagaagggcaacctgaccaccgccggctttgcctgctctcagtgtggccagcccctgttcgtgtacaagctggagcaggtgtctgagaagggcaaggcttacaccaactacttcggacggtgcaatgtggccgagcacgaaaagctgatcctgctggcccagctgaagcccgagaaggatagcgacgaagccgtgacatatagcctgggaaagtttgggcagagggccctggatttctacagcattcatgtgaccaaggagtccacccaccccgtgaagcccctggcccagatcgccggaaacagatacgcctccggacctgtgggaaaggccctgagcgacgcatgtatgggcacaatcgcctccttcctgtctaagtaccaggacatcatcatcgaacaccagaaggtggtgaagggcaaccagaagagactggagagcctgcgggagctggccggcaaggaaaacctggaataccctagcgtgaccctgccacctcagcctcacaccaaggagggcgttgatgcctacaacgaagtgatcgcccgggtgcgaatgtgggtgaacctgaacctgtggcagaagctgaagctaagcagagatgatgccaagcctctgctgagactgaagggattcccttcctttcctctggtcgagagacaggccaacgaagtggactggtgggacatggtgtgtaacgtgaagaagctgatcaacgagaaaaaggaggatggcaaggtgttttggcagaatctggctggctacaagagacaggaagccctgagaccatacctgagcagcgaggaagatcggaagaagggaaagaaattcgctcggtaccagctgggcgacctgctgctgcacctggaaaagaagcacggcgaggactggggaaaggtgtacgacgaggcctgggagcggattgacaagaaagtggaaggcctgagcaagcacatcaagctggaagaggaacggagaagcgaggacgcccagagcaaggccgccctgaccgactggctgcgggctaaggccagcttcgtgatcgagggcctgaaggaggccgacaaggacgagttctgcagatgcgagctgaagctgcagaagtggtacggggacctgcggggaaagcccttcgccatcgaagccgagaacagcatcctggacatcagcggcttcagcaagcagtacaactgtgccttcatctggcagaaggacggcgtgaagaagctgaacctgtacctgatcatcaactacttcaagggcggcaagctgcggttcaagaagatcaaacctgaagccttcgaagccaacagattctacaccgtgatcaacaaaaagagcggcgagatcgtgcccatggaggtgaacttcaacttcgacgaccccaacctgatcatcctgcctctggcctttggcaagagacagggcagagaattcatctggaacgacctgctgtccctggaaaccggcagcctgaagctggccaacggaagagtgatcgagaagacactgtacaacagaagaacccggcaggatgagcctgccctgttcgtggccctgaccttcgagcggcgggaggtcctggactcctccaatatcaaaccaatgaacctgatcggcgtggcaagaggcgaaaacatccccgccgtgatcgccctgaccgaccccgagggctgcccactgagccggtttaaggatagcctgggaaacccaacccacatcctgagaatcggcgagagctataaggagaagcagcggaccatccaggccaagaaggaggtggagcagcggagagccggcggctacagccggaagtacgccagcaaagccaagaatctggcagacgatatggtgagaaacaccgctagagatctgctgtactacgccgtgacccaggatgccatgctgatcttcgccaacctgagccggggcttcggccggcagggcaagcggaccttcatggccgagagacagtacacacggatggaggactggctgaccgccaagctggcctacgagggcctgagcaagacctacctgtccaagacactggcccagtacacctccaagacatgcagcaactgtgggtttaccatcaccagcgccgactacgacagggtgctggagaagctgaagaagacagcaacaggctggatgaccacaattaacggcaaggagctgaaggtggagggccagattacctactacaacagatacaagagacagaacgtagtcaaggacctgtccgtcgagctggatagactgagcgaagaatctgtgaacaacgacatctcctcctggacaaagggcagaagcggagaagctctgagcctcctgaagaaaagattctcccatagacccgtgcaggagaagttcgtgtgcctgaactgcggcttcgagacacacgcagccgagcaagccgccctgaacatcgccagatcctggctgttcctgcggagccaggagtacaagaaataccagacaaacaagacaaccggcaacaccgataagagagccttcgtcgagacctggcagtccttttaccggaagaagcttaaggaggtgtggaaacctgccgtgcggtctggcggatctggcggaggctccaccagccccaagaaaaagagaaaagtctaagctgccttctgcggggcttgccttctggccatgcccttcttctctcccttgcacctgtacctcttggtctttgaataaagcctgagtaggaaggctagcaaaaaaaaaaaaaaaaaaaaaaaaaaaaaaaaaaaaaaaaaaaaaaaaaaaaaaaaaaaaaaaaaaaaaaaaaaaaaaaagcccagccggctccccaacctctaccgaggagggcacctctgagtccgccacccccgagagcggccctggcacctccaccgagcccagcgagggcagcgcacccggcagccctgccggcagccccacctccacagaggagggaaccagcaccgagcccagcgaaggcagcgccccaggcaccagcaccgagcctagtgagcaggagattaaacggatcaacaagatcagaagaagacttgtgaaagacagcaacaccaagaaggccggcaagacaggccccatgaaaaccctgctggttagagtgatgacacccgatctgagagagcggctggaaaacctgagaaagaagcctgaaaatatcccccagcccatcagcaatacatctagagccaacctgaataagctgctgaccgattacaccgaaatgaagaaggcgatcctgcatgtgtactgggaagagttccagaaggaccctgtgggcctgatgagccgggtggcccagcctgccagcaagaagatcgatcagaacaagctgaaacctgagatggacgagaagggcaacctgaccaccgccggctttgcctgctctcagtgtggccagcccctgttcgtgtacaagctggagcaggtgtctgagaagggcaaggcttacaccaactacttcggacggtgcaatgtggccgagcacgaaaagctgatcctgctggcccagctgaagcccgagaaggatagcgacgaagccgtgacatatagcctgggaaagtttgggcagagggccctggatttctacagcattcatgtgaccaaggagtccacccaccccgtgaagcccctggcccagatcgccggaaacagatacgcctccggacctgtgggaaaggccctgagcgacgcatgtatgggcacaatcgcctccttcctgtctaagtaccaggacatcatcatcgaacaccagaaggtggtgaagggcaaccagaagagactggagagcctgcgggagctggccggcaaggaaaacctggaataccctagcgtgaccctgccacctcagcctcacaccaaggagggcgttgatgcctacaacgaagtgatcgcccgggtgcgaatgtgggtgaacctgaacctgtggcagaagctgaagctaagcagagatgatgccaagcctctgctgagactgaagggattcccttcctttcctctggtcgagagacaggccaacgaagtggactggtgggacatggtgtgtaacgtgaagaagctgatcaacgagaaaaaggaggatggcaaggtgttttggcagaatctggctggctacaagagacaggaagccctgagaccatacctgagcagcgaggaagatcggaagaagggaaagaaattcgctcggtaccagctgggcgacctgctgctgcacctggaaaagaagcacggcgaggactggggaaaggtgtacgacgaggcctgggagcggattgacaagaaagtggaaggcctgagcaagcacatcaagctggaagaggaacggagaagcgaggacgcccagagcaaggccgccctgaccgactggctgcgggctaaggccagcttcgtgatcgagggcctgaaggaggccgacaaggacgagttctgcagatgcgagctgaagctgcagaagtggtacggggacctgcggggaaagcccttcgccatcgaagccgagaacagcatcctggacatcagcggcttcagcaagcagtacaactgtgccttcatctggcagaaggacggcgtgaagaagctgaacctgtacctgatcatcaactacttcaagggcggcaagctgcggttcaagaagatcaaacctgaagccttcgaagccaacagattctacaccgtgatcaacaaaaagagcggcgagatcgtgcccatggaggtgaacttcaacttcgacgaccccaacctgatcatcctgcctctggcctttggcaagagacagggcagagaattcatctggaacgacctgctgtccctggaaaccggcagcctgaagctggccaacggaagagtgatcgagaagacactgtacaacagaagaacccggcaggatgagcctgccctgttcgtggccctgaccttcgagcggcgggaggtcctggactcctccaatatcaaaccaatgaacctgatcggcgtggcaagaggcgaaaacatccccgccgtgatcgccctgaccgaccccgagggctgcccactgagccggtttaaggatagcctgggaaacccaacccacatcctgagaatcggcgagagctataaggagaagcagcggaccatccaggccaagaaggaggtggagcagcggagagccggcggctacagccggaagtacgccagcaaagccaagaatctggcagacgatatggtgagaaacaccgctagagatctgctgtactacgccgtgacccaggatgccatgctgatcttcgccaacctgagccggggcttcggccggcagggcaagcggaccttcatggccgagagacagtacacacggatggaggactggctgaccgccaagctggcctacgagggcctgagcaagacctacctgtccaagacactggcccagtacacctccaagacatgcagcaactgtgggtttaccatcaccagcgccgactacgacagggtgctggagaagctgaagaagacagcaacaggctggatgaccacaattaacggcaaggagctgaaggtggagggccagattacctactacaacagatacaagagacagaacgtagtcaaggacctgtccgtcgagctggatagactgagcgaagaatctgtgaacaacgacatctcctcctggacaaagggcagaagcggagaagctctgagcctcctgaagaaaagattctcccatagacccgtgcaggagaagttcgtgtgcctgaactgcggcttcgagacacacgcagccgagcaagccgccctgaacatcgccagatcctggctgttcctgcggagccaggagtacaagaaataccagacaaacaagacaaccggcaacaccgataagagagccttcgtcgagacctggcagtccttttaccggaagaagcttaaggaggtgtggaaacctgccgtgcggtctggcggatctggcggaggctccaccagccccaagaaaaagagaaaagtctaagctgccttctgcggggcttgccttctggccatgcccttcttctctcccttgcacctgtacctcttggtctttgaataaagcctgagtaggaaggctagcaaaaaaaaaaaaaaaaaaaaaaaaaaaaaaaaaaaaaaaaaaaaaaaaaaaaaaaaaaaaaaaaaaaaaaaaaaaaaaaa

SEQ ID NO: 10291 - RNA, 8787 nt, synthetic construct
  source 1..8787: mol_type = other RNA
aggaaataagagagaaaagaagagtaagaagaaatataagagccaccatggcccctaagaagaagcgtaaagtgagccggatgaaccacgaccaggagttcgacccccctaaggtgtaccctcccgtccccgccgagaagagaaagcccatccgggtcctgagcctgttcgatggcatcgccaccggtctgctggtgctgaaggacctgggcatccaggtggataggtacattgcctccgaggtgtgcgaggactccatcaccgtgggaatggtgcgtcatcagggcaagatcatgtacgtgggcgacgtgcggagcgtgacacagaagcatatccaggagtggggccctttcgacctggtgatcggcggcagcccttgcaatgacctgagcatcgtgaacccagcccggaagggcctgtacgagggaaccggcagactgttcttcgagttttacagactgctgcacgacgcccggcctaaggaaggcgacgaccggcccttcttttggctgttcgagaatgtggtggccatgggagtcagcgacaagcgggatattagccggttcctggagagcaaccccgtgatgatcgatgccaaggaagtgagcgccgcccaccgggccagatacttctggggcaatctgcctggcatgaacagacccctggccagcaccgtgaacgacaagctggagctgcaggagtgcctggagcacggccggatcgccaagttcagcaaggtgagaaccatcaccacccgaagcaacagcatcaaacaaggcaaggaccagcactttcctgtgttcatgaacgagaaggaggacatcctgtggtgtaccgagatggagagagtgttcgggttcccagtccactacacagatgtcagcaacatgtctagactggccagacagagactgctgggaagaagctggtccgtccctgtgatcagacacctgttcgcccctctgaaggagtacttcgcctgcgtgagcagcggcaacagcaacgccaacagccggggccccagcttctctagcggcctggtgccactgtccctgagagggagccacatgggccccatggagatctacaaaaccgtgagcgcctggaagcggcagcctgtgcgcgtgctgagcctgtttcggaatatcgataaagtcctgaaaagcctgggattcctggagagcggctctggctccggcggtggcaccctgaagtacgtggaggatgtgacaaacgtggtcagacgggatgtggagaagtggggccccttcgatctggtgtacggcagcacccaacccctgggcagctcttgtgaccggtgccctggctggtacatgtttcagttccaccggatcctgcagtacgccctgccgagacaggagtcccagcggccattcttttggattttcatggacaacttgctgctgaccgaggatgaccaggaaactaccactcggttcctgcagaccgaagccgtgaccctgcaggacgtgagaggccgggactaccagaacgccatgcgggtgtggtccaacatccctggactgaaaagcaagcacgcacctctgacccctaaagaagaggagtacctgcaggcccaggtgcggagcagaagcaagctggacgcccctaaggtggatctgctggtgaagaattgcctcctgcccctgagagagtacttcaagtatttcagccagaatagtctgcccctgggaggcagcggcggcggcatgggccccctgcagttcagggacgtggccatcgagttcagcctggaggagtggcactgcctggacaccgcccagaggaacctgtacaggaacgtgatgctggagaactacagcaacctggtgttcctgggcatcgtggtgagcaagcccgacctgatcaccaggctggagcagggcaagaagcccctgaccatgaagaggcacgagatggtggccaaccccagcggccccggcgtgttcgtgggcggcccaagcagcggcgcccctcctcccagcggcggcaggcggcccaagcagcggcgcccctcctcccagcggcggcagcccagccggctccccaacctctaccgaggagggcacctctgagtccgccacccccgagagcggccctggcacctccaccgagcccagcgagggcagcgcacccggcagccctgccggcagccccacctccacagaggagggaaccagcaccgagcccagcgaaggcagcgccccaggcaccagcaccgagcctagtgagcaggagattaaacggatcaacaagatcagaagaagacttgtgaaagacagcaacaccaagaaggccggcaagacaggccccatgaaaaccctgctggttagagtgatgacacccgatctgagagagcggctggaaaacctgagaaagaagcctgaaaatatcccccagcccatcagcaatacatctagagccaacctgaataagctgctgaccgattacaccgaaatgaagaaggcgatcctgcatgtgtactgggaagagttccagaaggaccctgtgggcctgatgagccgggtggcccagcctgccagcaagaagatcgatcagaacaagctgaaacctgagatggacgagaagggcaacctgaccaccgccggctttgcctgctctcagtgtggccagcccctgttcgtgtacaagctggagcaggtgtctgagaagggcaaggcttacaccaactacttcggacggtgcaatgtggccgagcacgaaaagctgatcctgctggcccagctgaagcccgagaaggatagcgacgaagccgtgacatatagcctgggaaagtttgggcagagggccctggatttctacagcattcatgtgaccaaggagtccacccaccccgtgaagcccctggcccagatcgccggaaacagatacgcctccggacctgtgggaaaggccctgagcgacgcatgtatgggcacaatcgcctccttcctgtctaagtaccaggacatcatcatcgaacaccagaaggtggtgaagggcaaccagaagagactggagagcctgcgggagctggccggcaaggaaaacctggaataccctagcgtgaccctgccacctcagcctcacaccaaggagggcgttgatgcctacaacgaagtgatcgcccgggtgcgaatgtgggtgaacctgaacctgtggcagaagctgaagctaagcagagatgatgccaagcctctgctgagactgaagggattcccttcctttcctctggtcgagagacaggccaacgaagtggactggtgggacatggtgtgtaacgtgaagaagctgatcaacgagaaaaaggaggatggcaaggtgttttggcagaatctggctggctacaagagacaggaagccctgagaccatacctgagcagcgaggaagatcggaagaagggaaagaaattcgctcggtaccagctgggcgacctgctgctgcacctggaaaagaagcacggcgaggactggggaaaggtgtacgacgaggcctgggagcggattgacaagaaagtggaaggcctgagcaagcacatcaagctggaagaggaacggagaagcgaggacgcccagagcaaggccgccctgaccgactggctgcgggctaaggccagcttcgtgatcgagggcctgaaggaggccgacaaggacgagttctgcagatgcgagctgaagctgcagaagtggtacggggacctgcggggaaagcccttcgccatcgaagccgagaacagcatcctggacatcagcggcttcagcaagcagtacaactgtgccttcatctggcagaaggacggcgtgaagaagctgaacctgtacctgatcatcaactacttcaagggcggcaagctgcggttcaagaagatcaaacctgaagccttcgaagccaacagattctacaccgtgatcaacaaaaagagcggcgagatcgtgcccatggaggtgaacttcaacttcgacgaccccaacctgatcatcctgcctctggcctttggcaagagacagggcagagaattcatctggaacgacctgctgtccctggaaaccggcagcctgaagctggccaacggaagagtgatcgagaagacactgtacaacagaagaacccggcaggatgagcctgccctgttcgtggccctgaccttcgagcggcgggaggtcctggactcctccaatatcaaaccaatgaacctgatcggcgtggcaagaggcgaaaacatccccgccgtgatcgccctgaccgaccccgagggctgcccactgagccggtttaaggatagcctgggaaacccaacccacatcctgagaatcggcgagagctataaggagaagcagcggaccatccaggccaagaaggaggtggagcagcggagagccggcggctacagccggaagtacgccagcaaagccaagaatctggcagacgatatggtgagaaacaccgctagagatctgctgtactacgccgtgacccaggatgccatgctgatcttcgccaacctgagccggggcttcggccggcagggcaagcggaccttcatggccgagagacagtacacacggatggaggactggctgaccgccaagctggcctacgagggcctgagcaagacctacctgtccaagacactggcccagtacacctccaagacatgcagcaactgtgggtttaccatcaccagcgccgactacgacagggtgctggagaagctgaagaagacagcaacaggctggatgaccacaattaacggcaaggagctgaaggtggagggccagattacctactacaacagatacaagagacagaacgtagtcaaggacctgtccgtcgagctggatagactgagcgaagaatctgtgaacaacgacatctcctcctggacaaagggcagaagcggagaagctctgagcctcctgaagaaaagattctcccatagacccgtgcaggagaagttcgtgtgcctgaactgcggcttcgagacacacgcagccgagcaagccgccctgaacatcgccagatcctggctgttcctgcggagccaggagtacaagaaataccagacaaacaagacaaccggcaacaccgataagagagccttcgtcgagacctggcagtccttttaccggaagaagcttaaggaggtgtggaaacctgccgtgcggtctggcggatctggcggaggctccaccagccccaagaaaaagagaaaagtctaagctgccttctgcggggcttgccttctggccatgcccttcttctctcccttgcacctgtacctcttggtctttgaataaagcctgagtaggaaggctagcaaaaaaaaaaaaaaaaaaaaaaaaaaaaaaaaaaaaaaaaaaaaaaaaaaaaaaaaaaaaaaaaaaaaaaaaaaaaaaaagcccagccggctccccaacctctaccgaggagggcacctctgagtccgccacccccgagagcggccctggcacctccaccgagcccagcgagggcagcgcacccggcagccctgccggcagccccacctccacagaggagggaaccagcaccgagcccagcgaaggcagcgccccaggcaccagcaccgagcctagtgagcaggagattaaacggatcaacaagatcagaagaagacttgtgaaagacagcaacaccaagaaggccggcaagacaggccccatgaaaaccctgctggttagagtgatgacacccgatctgagagagcggctggaaaacctgagaaagaagcctgaaaatatcccccagcccatcagcaatacatctagagccaacctgaataagctgctgaccgattacaccgaaatgaagaaggcgatcctgcatgtgtactgggaagagttccagaaggaccctgtgggcctgatgagccgggtggcccagcctgccagcaagaagatcgatcagaacaagctgaaacctgagatggacgagaagggcaacctgaccaccgccggctttgcctgctctcagtgtggccagcccctgttcgtgtacaagctggagcaggtgtctgagaagggcaaggcttacaccaactacttcggacggtgcaatgtggccgagcacgaaaagctgatcctgctggcccagctgaagcccgagaaggatagcgacgaagccgtgacatatagcctgggaaagtttgggcagagggccctggatttctacagcattcatgtgaccaaggagtccacccaccccgtgaagcccctggcccagatcgccggaaacagatacgcctccggacctgtgggaaaggccctgagcgacgcatgtatgggcacaatcgcctccttcctgtctaagtaccaggacatcatcatcgaacaccagaaggtggtgaagggcaaccagaagagactggagagcctgcgggagctggccggcaaggaaaacctggaataccctagcgtgaccctgccacctcagcctcacaccaaggagggcgttgatgcctacaacgaagtgatcgcccgggtgcgaatgtgggtgaacctgaacctgtggcagaagctgaagctaagcagagatgatgccaagcctctgctgagactgaagggattcccttcctttcctctggtcgagagacaggccaacgaagtggactggtgggacatggtgtgtaacgtgaagaagctgatcaacgagaaaaaggaggatggcaaggtgttttggcagaatctggctggctacaagagacaggaagccctgagaccatacctgagcagcgaggaagatcggaagaagggaaagaaattcgctcggtaccagctgggcgacctgctgctgcacctggaaaagaagcacggcgaggactggggaaaggtgtacgacgaggcctgggagcggattgacaagaaagtggaaggcctgagcaagcacatcaagctggaagaggaacggagaagcgaggacgcccagagcaaggccgccctgaccgactggctgcgggctaaggccagcttcgtgatcgagggcctgaaggaggccgacaaggacgagttctgcagatgcgagctgaagctgcagaagtggtacggggacctgcggggaaagcccttcgccatcgaagccgagaacagcatcctggacatcagcggcttcagcaagcagtacaactgtgccttcatctggcagaaggacggcgtgaagaagctgaacctgtacctgatcatcaactacttcaagggcggcaagctgcggttcaagaagatcaaacctgaagccttcgaagccaacagattctacaccgtgatcaacaaaaagagcggcgagatcgtgcccatggaggtgaacttcaacttcgacgaccccaacctgatcatcctgcctctggcctttggcaagagacagggcagagaattcatctggaacgacctgctgtccctggaaaccggcagcctgaagctggccaacggaagagtgatcgagaagacactgtacaacagaagaacccggcaggatgagcctgccctgttcgtggccctgaccttcgagcggcgggaggtcctggactcctccaatatcaaaccaatgaacctgatcggcgtggcaagaggcgaaaacatccccgccgtgatcgccctgaccgaccccgagggctgcccactgagccggtttaaggatagcctgggaaacccaacccacatcctgagaatcggcgagagctataaggagaagcagcggaccatccaggccaagaaggaggtggagcagcggagagccggcggctacagccggaagtacgccagcaaagccaagaatctggcagacgatatggtgagaaacaccgctagagatctgctgtactacgccgtgacccaggatgccatgctgatcttcgccaacctgagccggggcttcggccggcagggcaagcggaccttcatggccgagagacagtacacacggatggaggactggctgaccgccaagctggcctacgagggcctgagcaagacctacctgtccaagacactggcccagtacacctccaagacatgcagcaactgtgggtttaccatcaccagcgccgactacgacagggtgctggagaagctgaagaagacagcaacaggctggatgaccacaattaacggcaaggagctgaaggtggagggccagattacctactacaacagatacaagagacagaacgtagtcaaggacctgtccgtcgagctggatagactgagcgaagaatctgtgaacaacgacatctcctcctggacaaagggcagaagcggagaagctctgagcctcctgaagaaaagattctcccatagacccgtgcaggagaagttcgtgtgcctgaactgcggcttcgagacacacgcagccgagcaagccgccctgaacatcgccagatcctggctgttcctgcggagccaggagtacaagaaataccagacaaacaagacaaccggcaacaccgataagagagccttcgtcgagacctggcagtccttttaccggaagaagcttaaggaggtgtggaaacctgccgtgcggtctggcggatctggcggaggctccaccagccccaagaaaaagagaaaagtctaagctgccttctgcggggcttgccttctggccatgcccttcttctctcccttgcacctgtacctcttggtctttgaataaagcctgagtaggaaggctagcaaaaaaaaaaaaaaaaaaaaaaaaaaaaaaaaaaaaaaaaaaaaaaaaaaaaaaaaaaaaaaaaaaaaaaaaaaaaaaaa

SEQ ID NO: 10292 - RNA, 8787 nt, synthetic construct
  source 1..8787: mol_type = other RNA
aggaaataagagagaaaagaagagtaagaagaaatataagagccaccatggcccctaagaagaagcgtaaagtgagccggatgaaccacgaccaggagttcgacccccctaaggtgtaccctcccgtccccgccgagaagagaaagcccatccgggtcctgagcctgttcgatggcatcgccaccggtctgctggtgctgaaggacctgggcatccaggtggataggtacattgcctccgaggtgtgcgaggactccatcaccgtgggaatggtgcgtcatcagggcaagatcatgtacgtgggcgacgtgcggagcgtgacacagaagcatatccaggagtggggccctttcgacctggtgatcggcggcagcccttgcaatgacctgagcatcgtgaacccagcccggaagggcctgtacgagggaaccggcagactgttcttcgagttttacagactgctgcacgacgcccggcctaaggaaggcgacgaccggcccttcttttggctgttcgagaatgtggtggccatgggagtcagcgacaagcgggatattagccggttcctggagagcaaccccgtgatgatcgatgccaaggaagtgagcgccgcccaccgggccagatacttctggggcaatctgcctggcatgaacagacccctggccagcaccgtgaacgacaagctggagctgcaggagtgcctggagcacggccggatcgccaagttcagcaaggtgagaaccatcaccacccgaagcaacagcatcaaacaaggcaaggaccagcactttcctgtgttcatgaacgagaaggaggacatcctgtggtgtaccgagatggagagagtgttcgggttcccagtccactacacagatgtcagcaacatgtctagactggccagacagagactgctgggaagaagctggtccgtccctgtgatcagacacctgttcgcccctctgaaggagtacttcgcctgcgtgagcagcggcaacagcaacgccaacagccggggccccagcttctctagcggcctggtgccactgtccctgagagggagccacatgggccccatggagatctacaaaaccgtgagcgcctggaagcggcagcctgtgcgcgtgctgagcctgtttcggaatatcgataaagtcctgaaaagcctgggattcctggagagcggctctggctccggcggtggcaccctgaagtacgtggaggatgtgacaaacgtggtcagacgggatgtggagaagtggggccccttcgatctggtgtacggcagcacccaacccctgggcagctcttgtgaccggtgccctggctggtacatgtttcagttccaccggatcctgcagtacgccctgccgagacaggagtcccagcggccattcttttggattttcatggacaacttgctgctgaccgaggatgaccaggaaactaccactcggttcctgcagaccgaagccgtgaccctgcaggacgtgagaggccgggactaccagaacgccatgcgggtgtggtccaacatccctggactgaaaagcaagcacgcacctctgacccctaaagaagaggagtacctgcaggcccaggtgcggagcagaagcaagctggacgcccctaaggtggatctgctggtgaagaattgcctcctgcccctgagagagtacttcaagtatttcagccagaatagtctgcccctgggaggcagcggcggcggctgctggggcctgctgagcttcaaggacatcagcatggacttcacctgggaggagtggcagctgctggacagcgcccagaagtacctgtacagggacgtgatcctggagaactacaggaacctggtgagcgtgggctaccacggcaccaagcccgacctgatcttcaagctggagcagggcgaggagccctggatcaggaacgccaagatcagcaggcccaggtgcagcgagggctggaaggagggcggcccaagcagcggcgcccctcctcccagcggcggcaggcggcccaagcagcggcgcccctcctcccagcggcggcagcccagccggctccccaacctctaccgaggagggcacctctgagtccgccacccccgagagcggccctggcacctccaccgagcccagcgagggcagcgcacccggcagccctgccggcagccccacctccacagaggagggaaccagcaccgagcccagcgaaggcagcgccccaggcaccagcaccgagcctagtgagcaggagattaaacggatcaacaagatcagaagaagacttgtgaaagacagcaacaccaagaaggccggcaagacaggccccatgaaaaccctgctggttagagtgatgacacccgatctgagagagcggctggaaaacctgagaaagaagcctgaaaatatcccccagcccatcagcaatacatctagagccaacctgaataagctgctgaccgattacaccgaaatgaagaaggcgatcctgcatgtgtactgggaagagttccagaaggaccctgtgggcctgatgagccgggtggcccagcctgccagcaagaagatcgatcagaacaagctgaaacctgagatggacgagaagggcaacctgaccaccgccggctttgcctgctctcagtgtggccagcccctgttcgtgtacaagctggagcaggtgtctgagaagggcaaggcttacaccaactacttcggacggtgcaatgtggccgagcacgaaaagctgatcctgctggcccagctgaagcccgagaaggatagcgacgaagccgtgacatatagcctgggaaagtttgggcagagggccctggatttctacagcattcatgtgaccaaggagtccacccaccccgtgaagcccctggcccagatcgccggaaacagatacgcctccggacctgtgggaaaggccctgagcgacgcatgtatgggcacaatcgcctccttcctgtctaagtaccaggacatcatcatcgaacaccagaaggtggtgaagggcaaccagaagagactggagagcctgcgggagctggccggcaaggaaaacctggaataccctagcgtgaccctgccacctcagcctcacaccaaggagggcgttgatgcctacaacgaagtgatcgcccgggtgcgaatgtgggtgaacctgaacctgtggcagaagctgaagctaagcagagatgatgccaagcctctgctgagactgaagggattcccttcctttcctctggtcgagagacaggccaacgaagtggactggtgggacatggtgtgtaacgtgaagaagctgatcaacgagaaaaaggaggatggcaaggtgttttggcagaatctggctggctacaagagacaggaagccctgagaccatacctgagcagcgaggaagatcggaagaagggaaagaaattcgctcggtaccagctgggcgacctgctgctgcacctggaaaagaagcacggcgaggactggggaaaggtgtacgacgaggcctgggagcggattgacaagaaagtggaaggcctgagcaagcacatcaagctggaagaggaacggagaagcgaggacgcccagagcaaggccgccctgaccgactggctgcgggctaaggccagcttcgtgatcgagggcctgaaggaggccgacaaggacgagttctgcagatgcgagctgaagctgcagaagtggtacggggacctgcggggaaagcccttcgccatcgaagccgagaacagcatcctggacatcagcggcttcagcaagcagtacaactgtgccttcatctggcagaaggacggcgtgaagaagctgaacctgtacctgatcatcaactacttcaagggcggcaagctgcggttcaagaagatcaaacctgaagccttcgaagccaacagattctacaccgtgatcaacaaaaagagcggcgagatcgtgcccatggaggtgaacttcaacttcgacgaccccaacctgatcatcctgcctctggcctttggcaagagacagggcagagaattcatctggaacgacctgctgtccctggaaaccggcagcctgaagctggccaacggaagagtgatcgagaagacactgtacaacagaagaacccggcaggatgagcctgccctgttcgtggccctgaccttcgagcggcgggaggtcctggactcctccaatatcaaaccaatgaacctgatcggcgtggcaagaggcgaaaacatccccgccgtgatcgccctgaccgaccccgagggctgcccactgagccggtttaaggatagcctgggaaacccaacccacatcctgagaatcggcgagagctataaggagaagcagcggaccatccaggccaagaaggaggtggagcagcggagagccggcggctacagccggaagtacgccagcaaagccaagaatctggcagacgatatggtgagaaacaccgctagagatctgctgtactacgccgtgacccaggatgccatgctgatcttcgccaacctgagccggggcttcggccggcagggcaagcggaccttcatggccgagagacagtacacacggatggaggactggctgaccgccaagctggcctacgagggcctgagcaagacctacctgtccaagacactggcccagtacacctccaagacatgcagcaactgtgggtttaccatcaccagcgccgactacgacagggtgctggagaagctgaagaagacagcaacaggctggatgaccacaattaacggcaaggagctgaaggtggagggccagattacctactacaacagatacaagagacagaacgtagtcaaggacctgtccgtcgagctggatagactgagcgaagaatctgtgaacaacgacatctcctcctggacaaagggcagaagcggagaagctctgagcctcctgaagaaaagattctcccatagacccgtgcaggagaagttcgtgtgcctgaactgcggcttcgagacacacgcagccgagcaagccgccctgaacatcgccagatcctggctgttcctgcggagccaggagtacaagaaataccagacaaacaagacaaccggcaacaccgataagagagccttcgtcgagacctggcagtccttttaccggaagaagcttaaggaggtgtggaaacctgccgtgcggtctggcggatctggcggaggctccaccagccccaagaaaaagagaaaagtctaagctgccttctgcggggcttgccttctggccatgcccttcttctctcccttgcacctgtacctcttggtctttgaataaagcctgagtaggaaggctagcaaaaaaaaaaaaaaaaaaaaaaaaaaaaaaaaaaaaaaaaaaaaaaaaaaaaaaaaaaaaaaaaaaaaaaaaaaaaaaaagcccagccggctccccaacctctaccgaggagggcacctctgagtccgccacccccgagagcggccctggcacctccaccgagcccagcgagggcagcgcacccggcagccctgccggcagccccacctccacagaggagggaaccagcaccgagcccagcgaaggcagcgccccaggcaccagcaccgagcctagtgagcaggagattaaacggatcaacaagatcagaagaagacttgtgaaagacagcaacaccaagaaggccggcaagacaggccccatgaaaaccctgctggttagagtgatgacacccgatctgagagagcggctggaaaacctgagaaagaagcctgaaaatatcccccagcccatcagcaatacatctagagccaacctgaataagctgctgaccgattacaccgaaatgaagaaggcgatcctgcatgtgtactgggaagagttccagaaggaccctgtgggcctgatgagccgggtggcccagcctgccagcaagaagatcgatcagaacaagctgaaacctgagatggacgagaagggcaacctgaccaccgccggctttgcctgctctcagtgtggccagcccctgttcgtgtacaagctggagcaggtgtctgagaagggcaaggcttacaccaactacttcggacggtgcaatgtggccgagcacgaaaagctgatcctgctggcccagctgaagcccgagaaggatagcgacgaagccgtgacatatagcctgggaaagtttgggcagagggccctggatttctacagcattcatgtgaccaaggagtccacccaccccgtgaagcccctggcccagatcgccggaaacagatacgcctccggacctgtgggaaaggccctgagcgacgcatgtatgggcacaatcgcctccttcctgtctaagtaccaggacatcatcatcgaacaccagaaggtggtgaagggcaaccagaagagactggagagcctgcgggagctggccggcaaggaaaacctggaataccctagcgtgaccctgccacctcagcctcacaccaaggagggcgttgatgcctacaacgaagtgatcgcccgggtgcgaatgtgggtgaacctgaacctgtggcagaagctgaagctaagcagagatgatgccaagcctctgctgagactgaagggattcccttcctttcctctggtcgagagacaggccaacgaagtggactggtgggacatggtgtgtaacgtgaagaagctgatcaacgagaaaaaggaggatggcaaggtgttttggcagaatctggctggctacaagagacaggaagccctgagaccatacctgagcagcgaggaagatcggaagaagggaaagaaattcgctcggtaccagctgggcgacctgctgctgcacctggaaaagaagcacggcgaggactggggaaaggtgtacgacgaggcctgggagcggattgacaagaaagtggaaggcctgagcaagcacatcaagctggaagaggaacggagaagcgaggacgcccagagcaaggccgccctgaccgactggctgcgggctaaggccagcttcgtgatcgagggcctgaaggaggccgacaaggacgagttctgcagatgcgagctgaagctgcagaagtggtacggggacctgcggggaaagcccttcgccatcgaagccgagaacagcatcctggacatcagcggcttcagcaagcagtacaactgtgccttcatctggcagaaggacggcgtgaagaagctgaacctgtacctgatcatcaactacttcaagggcggcaagctgcggttcaagaagatcaaacctgaagccttcgaagccaacagattctacaccgtgatcaacaaaaagagcggcgagatcgtgcccatggaggtgaacttcaacttcgacgaccccaacctgatcatcctgcctctggcctttggcaagagacagggcagagaattcatctggaacgacctgctgtccctggaaaccggcagcctgaagctggccaacggaagagtgatcgagaagacactgtacaacagaagaacccggcaggatgagcctgccctgttcgtggccctgaccttcgagcggcgggaggtcctggactcctccaatatcaaaccaatgaacctgatcggcgtggcaagaggcgaaaacatccccgccgtgatcgccctgaccgaccccgagggctgcccactgagccggtttaaggatagcctgggaaacccaacccacatcctgagaatcggcgagagctataaggagaagcagcggaccatccaggccaagaaggaggtggagcagcggagagccggcggctacagccggaagtacgccagcaaagccaagaatctggcagacgatatggtgagaaacaccgctagagatctgctgtactacgccgtgacccaggatgccatgctgatcttcgccaacctgagccggggcttcggccggcagggcaagcggaccttcatggccgagagacagtacacacggatggaggactggctgaccgccaagctggcctacgagggcctgagcaagacctacctgtccaagacactggcccagtacacctccaagacatgcagcaactgtgggtttaccatcaccagcgccgactacgacagggtgctggagaagctgaagaagacagcaacaggctggatgaccacaattaacggcaaggagctgaaggtggagggccagattacctactacaacagatacaagagacagaacgtagtcaaggacctgtccgtcgagctggatagactgagcgaagaatctgtgaacaacgacatctcctcctggacaaagggcagaagcggagaagctctgagcctcctgaagaaaagattctcccatagacccgtgcaggagaagttcgtgtgcctgaactgcggcttcgagacacacgcagccgagcaagccgccctgaacatcgccagatcctggctgttcctgcggagccaggagtacaagaaataccagacaaacaagacaaccggcaacaccgataagagagccttcgtcgagacctggcagtccttttaccggaagaagcttaaggaggtgtggaaacctgccgtgcggtctggcggatctggcggaggctccaccagccccaagaaaaagagaaaagtctaagctgccttctgcggggcttgccttctggccatgcccttcttctctcccttgcacctgtacctcttggtctttgaataaagcctgagtaggaaggctagcaaaaaaaaaaaaaaaaaaaaaaaaaaaaaaaaaaaaaaaaaaaaaaaaaaaaaaaaaaaaaaaaaaaaaaaaaaaaaaaa

SEQ ID NO: 10293 - RNA, 8787 nt, synthetic construct
  source 1..8787: mol_type = other RNA
aggaaataagagagaaaagaagagtaagaagaaatataagagccaccatggcccctaagaagaagcgtaaagtgagccggatgaaccacgaccaggagttcgacccccctaaggtgtaccctcccgtccccgccgagaagagaaagcccatccgggtcctgagcctgttcgatggcatcgccaccggtctgctggtgctgaaggacctgggcatccaggtggataggtacattgcctccgaggtgtgcgaggactccatcaccgtgggaatggtgcgtcatcagggcaagatcatgtacgtgggcgacgtgcggagcgtgacacagaagcatatccaggagtggggccctttcgacctggtgatcggcggcagcccttgcaatgacctgagcatcgtgaacccagcccggaagggcctgtacgagggaaccggcagactgttcttcgagttttacagactgctgcacgacgcccggcctaaggaaggcgacgaccggcccttcttttggctgttcgagaatgtggtggccatgggagtcagcgacaagcgggatattagccggttcctggagagcaaccccgtgatgatcgatgccaaggaagtgagcgccgcccaccgggccagatacttctggggcaatctgcctggcatgaacagacccctggccagcaccgtgaacgacaagctggagctgcaggagtgcctggagcacggccggatcgccaagttcagcaaggtgagaaccatcaccacccgaagcaacagcatcaaacaaggcaaggaccagcactttcctgtgttcatgaacgagaaggaggacatcctgtggtgtaccgagatggagagagtgttcgggttcccagtccactacacagatgtcagcaacatgtctagactggccagacagagactgctgggaagaagctggtccgtccctgtgatcagacacctgttcgcccctctgaaggagtacttcgcctgcgtgagcagcggcaacagcaacgccaacagccggggccccagcttctctagcggcctggtgccactgtccctgagagggagccacatgggccccatggagatctacaaaaccgtgagcgcctggaagcggcagcctgtgcgcgtgctgagcctgtttcggaatatcgataaagtcctgaaaagcctgggattcctggagagcggctctggctccggcggtggcaccctgaagtacgtggaggatgtgacaaacgtggtcagacgggatgtggagaagtggggccccttcgatctggtgtacggcagcacccaacccctgggcagctcttgtgaccggtgccctggctggtacatgtttcagttccaccggatcctgcagtacgccctgccgagacaggagtcccagcggccattcttttggattttcatggacaacttgctgctgaccgaggatgaccaggaaactaccactcggttcctgcagaccgaagccgtgaccctgcaggacgtgagaggccgggactaccagaacgccatgcgggtgtggtccaacatccctggactgaaaagcaagcacgcacctctgacccctaaagaagaggagtacctgcaggcccaggtgcggagcagaagcaagctggacgcccctaaggtggatctgctggtgaagaattgcctcctgcccctgagagagtacttcaagtatttcagccagaatagtctgcccctgggaggcagcggcggcggccccatcaccttcgacgacgtggccatcatcttcagccccgaggagtgggagtgcctggacagcgcccagagggacctgtacagggacgtgatggtggagaactgcaggaacctgctgagcgtggaggccagcaggcacggcaccaagggcttcagcagcaagaaggacatgaagaggagcttccaggaggagctgagcaggaggctgagcaagtgcggcgccgacatcttccaccccaggaagggcggcccaagcagcggcgcccctcctcccagcggcggcaggcggcccaagcagcggcgcccctcctcccagcggcggcagcccagccggctccccaacctctaccgaggagggcacctctgagtccgccacccccgagagcggccctggcacctccaccgagcccagcgagggcagcgcacccggcagccctgccggcagccccacctccacagaggagggaaccagcaccgagcccagcgaaggcagcgccccaggcaccagcaccgagcctagtgagcaggagattaaacggatcaacaagatcagaagaagacttgtgaaagacagcaacaccaagaaggccggcaagacaggccccatgaaaaccctgctggttagagtgatgacacccgatctgagagagcggctggaaaacctgagaaagaagcctgaaaatatcccccagcccatcagcaatacatctagagccaacctgaataagctgctgaccgattacaccgaaatgaagaaggcgatcctgcatgtgtactgggaagagttccagaaggaccctgtgggcctgatgagccgggtggcccagcctgccagcaagaagatcgatcagaacaagctgaaacctgagatggacgagaagggcaacctgaccaccgccggctttgcctgctctcagtgtggccagcccctgttcgtgtacaagctggagcaggtgtctgagaagggcaaggcttacaccaactacttcggacggtgcaatgtggccgagcacgaaaagctgatcctgctggcccagctgaagcccgagaaggatagcgacgaagccgtgacatatagcctgggaaagtttgggcagagggccctggatttctacagcattcatgtgaccaaggagtccacccaccccgtgaagcccctggcccagatcgccggaaacagatacgcctccggacctgtgggaaaggccctgagcgacgcatgtatgggcacaatcgcctccttcctgtctaagtaccaggacatcatcatcgaacaccagaaggtggtgaagggcaaccagaagagactggagagcctgcgggagctggccggcaaggaaaacctggaataccctagcgtgaccctgccacctcagcctcacaccaaggagggcgttgatgcctacaacgaagtgatcgcccgggtgcgaatgtgggtgaacctgaacctgtggcagaagctgaagctaagcagagatgatgccaagcctctgctgagactgaagggattcccttcctttcctctggtcgagagacaggccaacgaagtggactggtgggacatggtgtgtaacgtgaagaagctgatcaacgagaaaaaggaggatggcaaggtgttttggcagaatctggctggctacaagagacaggaagccctgagaccatacctgagcagcgaggaagatcggaagaagggaaagaaattcgctcggtaccagctgggcgacctgctgctgcacctggaaaagaagcacggcgaggactggggaaaggtgtacgacgaggcctgggagcggattgacaagaaagtggaaggcctgagcaagcacatcaagctggaagaggaacggagaagcgaggacgcccagagcaaggccgccctgaccgactggctgcgggctaaggccagcttcgtgatcgagggcctgaaggaggccgacaaggacgagttctgcagatgcgagctgaagctgcagaagtggtacggggacctgcggggaaagcccttcgccatcgaagccgagaacagcatcctggacatcagcggcttcagcaagcagtacaactgtgccttcatctggcagaaggacggcgtgaagaagctgaacctgtacctgatcatcaactacttcaagggcggcaagctgcggttcaagaagatcaaacctgaagccttcgaagccaacagattctacaccgtgatcaacaaaaagagcggcgagatcgtgcccatggaggtgaacttcaacttcgacgaccccaacctgatcatcctgcctctggcctttggcaagagacagggcagagaattcatctggaacgacctgctgtccctggaaaccggcagcctgaagctggccaacggaagagtgatcgagaagacactgtacaacagaagaacccggcaggatgagcctgccctgttcgtggccctgaccttcgagcggcgggaggtcctggactcctccaatatcaaaccaatgaacctgatcggcgtggcaagaggcgaaaacatccccgccgtgatcgccctgaccgaccccgagggctgcccactgagccggtttaaggatagcctgggaaacccaacccacatcctgagaatcggcgagagctataaggagaagcagcggaccatccaggccaagaaggaggtggagcagcggagagccggcggctacagccggaagtacgccagcaaagccaagaatctggcagacgatatggtgagaaacaccgctagagatctgctgtactacgccgtgacccaggatgccatgctgatcttcgccaacctgagccggggcttcggccggcagggcaagcggaccttcatggccgagagacagtacacacggatggaggactggctgaccgccaagctggcctacgagggcctgagcaagacctacctgtccaagacactggcccagtacacctccaagacatgcagcaactgtgggtttaccatcaccagcgccgactacgacagggtgctggagaagctgaagaagacagcaacaggctggatgaccacaattaacggcaaggagctgaaggtggagggccagattacctactacaacagatacaagagacagaacgtagtcaaggacctgtccgtcgagctggatagactgagcgaagaatctgtgaacaacgacatctcctcctggacaaagggcagaagcggagaagctctgagcctcctgaagaaaagattctcccatagacccgtgcaggagaagttcgtgtgcctgaactgcggcttcgagacacacgcagccgagcaagccgccctgaacatcgccagatcctggctgttcctgcggagccaggagtacaagaaataccagacaaacaagacaaccggcaacaccgataagagagccttcgtcgagacctggcagtccttttaccggaagaagcttaaggaggtgtggaaacctgccgtgcggtctggcggatctggcggaggctccaccagccccaagaaaaagagaaaagtctaagctgccttctgcggggcttgccttctggccatgcccttcttctctcccttgcacctgtacctcttggtctttgaataaagcctgagtaggaaggctagcaaaaaaaaaaaaaaaaaaaaaaaaaaaaaaaaaaaaaaaaaaaaaaaaaaaaaaaaaaaaaaaaaaaaaaaaaaaaaaaagcccagccggctccccaacctctaccgaggagggcacctctgagtccgccacccccgagagcggccctggcacctccaccgagcccagcgagggcagcgcacccggcagccctgccggcagccccacctccacagaggagggaaccagcaccgagcccagcgaaggcagcgccccaggcaccagcaccgagcctagtgagcaggagattaaacggatcaacaagatcagaagaagacttgtgaaagacagcaacaccaagaaggccggcaagacaggccccatgaaaaccctgctggttagagtgatgacacccgatctgagagagcggctggaaaacctgagaaagaagcctgaaaatatcccccagcccatcagcaatacatctagagccaacctgaataagctgctgaccgattacaccgaaatgaagaaggcgatcctgcatgtgtactgggaagagttccagaaggaccctgtgggcctgatgagccgggtggcccagcctgccagcaagaagatcgatcagaacaagctgaaacctgagatggacgagaagggcaacctgaccaccgccggctttgcctgctctcagtgtggccagcccctgttcgtgtacaagctggagcaggtgtctgagaagggcaaggcttacaccaactacttcggacggtgcaatgtggccgagcacgaaaagctgatcctgctggcccagctgaagcccgagaaggatagcgacgaagccgtgacatatagcctgggaaagtttgggcagagggccctggatttctacagcattcatgtgaccaaggagtccacccaccccgtgaagcccctggcccagatcgccggaaacagatacgcctccggacctgtgggaaaggccctgagcgacgcatgtatgggcacaatcgcctccttcctgtctaagtaccaggacatcatcatcgaacaccagaaggtggtgaagggcaaccagaagagactggagagcctgcgggagctggccggcaaggaaaacctggaataccctagcgtgaccctgccacctcagcctcacaccaaggagggcgttgatgcctacaacgaagtgatcgcccgggtgcgaatgtgggtgaacctgaacctgtggcagaagctgaagctaagcagagatgatgccaagcctctgctgagactgaagggattcccttcctttcctctggtcgagagacaggccaacgaagtggactggtgggacatggtgtgtaacgtgaagaagctgatcaacgagaaaaaggaggatggcaaggtgttttggcagaatctggctggctacaagagacaggaagccctgagaccatacctgagcagcgaggaagatcggaagaagggaaagaaattcgctcggtaccagctgggcgacctgctgctgcacctggaaaagaagcacggcgaggactggggaaaggtgtacgacgaggcctgggagcggattgacaagaaagtggaaggcctgagcaagcacatcaagctggaagaggaacggagaagcgaggacgcccagagcaaggccgccctgaccgactggctgcgggctaaggccagcttcgtgatcgagggcctgaaggaggccgacaaggacgagttctgcagatgcgagctgaagctgcagaagtggtacggggacctgcggggaaagcccttcgccatcgaagccgagaacagcatcctggacatcagcggcttcagcaagcagtacaactgtgccttcatctggcagaaggacggcgtgaagaagctgaacctgtacctgatcatcaactacttcaagggcggcaagctgcggttcaagaagatcaaacctgaagccttcgaagccaacagattctacaccgtgatcaacaaaaagagcggcgagatcgtgcccatggaggtgaacttcaacttcgacgaccccaacctgatcatcctgcctctggcctttggcaagagacagggcagagaattcatctggaacgacctgctgtccctggaaaccggcagcctgaagctggccaacggaagagtgatcgagaagacactgtacaacagaagaacccggcaggatgagcctgccctgttcgtggccctgaccttcgagcggcgggaggtcctggactcctccaatatcaaaccaatgaacctgatcggcgtggcaagaggcgaaaacatccccgccgtgatcgccctgaccgaccccgagggctgcccactgagccggtttaaggatagcctgggaaacccaacccacatcctgagaatcggcgagagctataaggagaagcagcggaccatccaggccaagaaggaggtggagcagcggagagccggcggctacagccggaagtacgccagcaaagccaagaatctggcagacgatatggtgagaaacaccgctagagatctgctgtactacgccgtgacccaggatgccatgctgatcttcgccaacctgagccggggcttcggccggcagggcaagcggaccttcatggccgagagacagtacacacggatggaggactggctgaccgccaagctggcctacgagggcctgagcaagacctacctgtccaagacactggcccagtacacctccaagacatgcagcaactgtgggtttaccatcaccagcgccgactacgacagggtgctggagaagctgaagaagacagcaacaggctggatgaccacaattaacggcaaggagctgaaggtggagggccagattacctactacaacagatacaagagacagaacgtagtcaaggacctgtccgtcgagctggatagactgagcgaagaatctgtgaacaacgacatctcctcctggacaaagggcagaagcggagaagctctgagcctcctgaagaaaagattctcccatagacccgtgcaggagaagttcgtgtgcctgaactgcggcttcgagacacacgcagccgagcaagccgccctgaacatcgccagatcctggctgttcctgcggagccaggagtacaagaaataccagacaaacaagacaaccggcaacaccgataagagagccttcgtcgagacctggcagtccttttaccggaagaagcttaaggaggtgtggaaacctgccgtgcggtctggcggatctggcggaggctccaccagccccaagaaaaagagaaaagtctaagctgccttctgcggggcttgccttctggccatgcccttcttctctcccttgcacctgtacctcttggtctttgaataaagcctgagtaggaaggctagcaaaaaaaaaaaaaaaaaaaaaaaaaaaaaaaaaaaaaaaaaaaaaaaaaaaaaaaaaaaaaaaaaaaaaaaaaaaaaaaa

SEQ ID NO: 10294 - RNA, 8787 nt, synthetic construct
  source 1..8787: mol_type = other RNA
aggaaataagagagaaaagaagagtaagaagaaatataagagccaccatggcccctaagaagaagcgtaaagtgagccggatgaaccacgaccaggagttcgacccccctaaggtgtaccctcccgtccccgccgagaagagaaagcccatccgggtcctgagcctgttcgatggcatcgccaccggtctgctggtgctgaaggacctgggcatccaggtggataggtacattgcctccgaggtgtgcgaggactccatcaccgtgggaatggtgcgtcatcagggcaagatcatgtacgtgggcgacgtgcggagcgtgacacagaagcatatccaggagtggggccctttcgacctggtgatcggcggcagcccttgcaatgacctgagcatcgtgaacccagcccggaagggcctgtacgagggaaccggcagactgttcttcgagttttacagactgctgcacgacgcccggcctaaggaaggcgacgaccggcccttcttttggctgttcgagaatgtggtggccatgggagtcagcgacaagcgggatattagccggttcctggagagcaaccccgtgatgatcgatgccaaggaagtgagcgccgcccaccgggccagatacttctggggcaatctgcctggcatgaacagacccctggccagcaccgtgaacgacaagctggagctgcaggagtgcctggagcacggccggatcgccaagttcagcaaggtgagaaccatcaccacccgaagcaacagcatcaaacaaggcaaggaccagcactttcctgtgttcatgaacgagaaggaggacatcctgtggtgtaccgagatggagagagtgttcgggttcccagtccactacacagatgtcagcaacatgtctagactggccagacagagactgctgggaagaagctggtccgtccctgtgatcagacacctgttcgcccctctgaaggagtacttcgcctgcgtgagcagcggcaacagcaacgccaacagccggggccccagcttctctagcggcctggtgccactgtccctgagagggagccacatgggccccatggagatctacaaaaccgtgagcgcctggaagcggcagcctgtgcgcgtgctgagcctgtttcggaatatcgataaagtcctgaaaagcctgggattcctggagagcggctctggctccggcggtggcaccctgaagtacgtggaggatgtgacaaacgtggtcagacgggatgtggagaagtggggccccttcgatctggtgtacggcagcacccaacccctgggcagctcttgtgaccggtgccctggctggtacatgtttcagttccaccggatcctgcagtacgccctgccgagacaggagtcccagcggccattcttttggattttcatggacaacttgctgctgaccgaggatgaccaggaaactaccactcggttcctgcagaccgaagccgtgaccctgcaggacgtgagaggccgggactaccagaacgccatgcgggtgtggtccaacatccctggactgaaaagcaagcacgcacctctgacccctaaagaagaggagtacctgcaggcccaggtgcggagcagaagcaagctggacgcccctaaggtggatctgctggtgaagaattgcctcctgcccctgagagagtacttcaagtatttcagccagaatagtctgcccctgggaggcagcggcggcggcccccaggagagcgtggccttcgacgacgtggccgtgtacttcaccaagaaggagtgggccatcatggtgcccgaccagagggccctgtacagggacgtgatgctggagaactacgaggccgtggccttcgtggtgccccccaccagcaagcccgccctggtgagccacctggagcagggcaaggagccctgcttcacccagccccagggcgtgctgagcaggagcaactggagggccggcttcggcggcccaagcagcggcgcccctcctcccagcggcggcaggcggcccaagcagcggcgcccctcctcccagcggcggcagcccagccggctccccaacctctaccgaggagggcacctctgagtccgccacccccgagagcggccctggcacctccaccgagcccagcgagggcagcgcacccggcagccctgccggcagccccacctccacagaggagggaaccagcaccgagcccagcgaaggcagcgccccaggcaccagcaccgagcctagtgagcaggagattaaacggatcaacaagatcagaagaagacttgtgaaagacagcaacaccaagaaggccggcaagacaggccccatgaaaaccctgctggttagagtgatgacacccgatctgagagagcggctggaaaacctgagaaagaagcctgaaaatatcccccagcccatcagcaatacatctagagccaacctgaataagctgctgaccgattacaccgaaatgaagaaggcgatcctgcatgtgtactgggaagagttccagaaggaccctgtgggcctgatgagccgggtggcccagcctgccagcaagaagatcgatcagaacaagctgaaacctgagatggacgagaagggcaacctgaccaccgccggctttgcctgctctcagtgtggccagcccctgttcgtgtacaagctggagcaggtgtctgagaagggcaaggcttacaccaactacttcggacggtgcaatgtggccgagcacgaaaagctgatcctgctggcccagctgaagcccgagaaggatagcgacgaagccgtgacatatagcctgggaaagtttgggcagagggccctggatttctacagcattcatgtgaccaaggagtccacccaccccgtgaagcccctggcccagatcgccggaaacagatacgcctccggacctgtgggaaaggccctgagcgacgcatgtatgggcacaatcgcctccttcctgtctaagtaccaggacatcatcatcgaacaccagaaggtggtgaagggcaaccagaagagactggagagcctgcgggagctggccggcaaggaaaacctggaataccctagcgtgaccctgccacctcagcctcacaccaaggagggcgttgatgcctacaacgaagtgatcgcccgggtgcgaatgtgggtgaacctgaacctgtggcagaagctgaagctaagcagagatgatgccaagcctctgctgagactgaagggattcccttcctttcctctggtcgagagacaggccaacgaagtggactggtgggacatggtgtgtaacgtgaagaagctgatcaacgagaaaaaggaggatggcaaggtgttttggcagaatctggctggctacaagagacaggaagccctgagaccatacctgagcagcgaggaagatcggaagaagggaaagaaattcgctcggtaccagctgggcgacctgctgctgcacctggaaaagaagcacggcgaggactggggaaaggtgtacgacgaggcctgggagcggattgacaagaaagtggaaggcctgagcaagcacatcaagctggaagaggaacggagaagcgaggacgcccagagcaaggccgccctgaccgactggctgcgggctaaggccagcttcgtgatcgagggcctgaaggaggccgacaaggacgagttctgcagatgcgagctgaagctgcagaagtggtacggggacctgcggggaaagcccttcgccatcgaagccgagaacagcatcctggacatcagcggcttcagcaagcagtacaactgtgccttcatctggcagaaggacggcgtgaagaagctgaacctgtacctgatcatcaactacttcaagggcggcaagctgcggttcaagaagatcaaacctgaagccttcgaagccaacagattctacaccgtgatcaacaaaaagagcggcgagatcgtgcccatggaggtgaacttcaacttcgacgaccccaacctgatcatcctgcctctggcctttggcaagagacagggcagagaattcatctggaacgacctgctgtccctggaaaccggcagcctgaagctggccaacggaagagtgatcgagaagacactgtacaacagaagaacccggcaggatgagcctgccctgttcgtggccctgaccttcgagcggcgggaggtcctggactcctccaatatcaaaccaatgaacctgatcggcgtggcaagaggcgaaaacatccccgccgtgatcgccctgaccgaccccgagggctgcccactgagccggtttaaggatagcctgggaaacccaacccacatcctgagaatcggcgagagctataaggagaagcagcggaccatccaggccaagaaggaggtggagcagcggagagccggcggctacagccggaagtacgccagcaaagccaagaatctggcagacgatatggtgagaaacaccgctagagatctgctgtactacgccgtgacccaggatgccatgctgatcttcgccaacctgagccggggcttcggccggcagggcaagcggaccttcatggccgagagacagtacacacggatggaggactggctgaccgccaagctggcctacgagggcctgagcaagacctacctgtccaagacactggcccagtacacctccaagacatgcagcaactgtgggtttaccatcaccagcgccgactacgacagggtgctggagaagctgaagaagacagcaacaggctggatgaccacaattaacggcaaggagctgaaggtggagggccagattacctactacaacagatacaagagacagaacgtagtcaaggacctgtccgtcgagctggatagactgagcgaagaatctgtgaacaacgacatctcctcctggacaaagggcagaagcggagaagctctgagcctcctgaagaaaagattctcccatagacccgtgcaggagaagttcgtgtgcctgaactgcggcttcgagacacacgcagccgagcaagccgccctgaacatcgccagatcctggctgttcctgcggagccaggagtacaagaaataccagacaaacaagacaaccggcaacaccgataagagagccttcgtcgagacctggcagtccttttaccggaagaagcttaaggaggtgtggaaacctgccgtgcggtctggcggatctggcggaggctccaccagccccaagaaaaagagaaaagtctaagctgccttctgcggggcttgccttctggccatgcccttcttctctcccttgcacctgtacctcttggtctttgaataaagcctgagtaggaaggctagcaaaaaaaaaaaaaaaaaaaaaaaaaaaaaaaaaaaaaaaaaaaaaaaaaaaaaaaaaaaaaaaaaaaaaaaaaaaaaaaagcccagccggctccccaacctctaccgaggagggcacctctgagtccgccacccccgagagcggccctggcacctccaccgagcccagcgagggcagcgcacccggcagccctgccggcagccccacctccacagaggagggaaccagcaccgagcccagcgaaggcagcgccccaggcaccagcaccgagcctagtgagcaggagattaaacggatcaacaagatcagaagaagacttgtgaaagacagcaacaccaagaaggccggcaagacaggccccatgaaaaccctgctggttagagtgatgacacccgatctgagagagcggctggaaaacctgagaaagaagcctgaaaatatcccccagcccatcagcaatacatctagagccaacctgaataagctgctgaccgattacaccgaaatgaagaaggcgatcctgcatgtgtactgggaagagttccagaaggaccctgtgggcctgatgagccgggtggcccagcctgccagcaagaagatcgatcagaacaagctgaaacctgagatggacgagaagggcaacctgaccaccgccggctttgcctgctctcagtgtggccagcccctgttcgtgtacaagctggagcaggtgtctgagaagggcaaggcttacaccaactacttcggacggtgcaatgtggccgagcacgaaaagctgatcctgctggcccagctgaagcccgagaaggatagcgacgaagccgtgacatatagcctgggaaagtttgggcagagggccctggatttctacagcattcatgtgaccaaggagtccacccaccccgtgaagcccctggcccagatcgccggaaacagatacgcctccggacctgtgggaaaggccctgagcgacgcatgtatgggcacaatcgcctccttcctgtctaagtaccaggacatcatcatcgaacaccagaaggtggtgaagggcaaccagaagagactggagagcctgcgggagctggccggcaaggaaaacctggaataccctagcgtgaccctgccacctcagcctcacaccaaggagggcgttgatgcctacaacgaagtgatcgcccgggtgcgaatgtgggtgaacctgaacctgtggcagaagctgaagctaagcagagatgatgccaagcctctgctgagactgaagggattcccttcctttcctctggtcgagagacaggccaacgaagtggactggtgggacatggtgtgtaacgtgaagaagctgatcaacgagaaaaaggaggatggcaaggtgttttggcagaatctggctggctacaagagacaggaagccctgagaccatacctgagcagcgaggaagatcggaagaagggaaagaaattcgctcggtaccagctgggcgacctgctgctgcacctggaaaagaagcacggcgaggactggggaaaggtgtacgacgaggcctgggagcggattgacaagaaagtggaaggcctgagcaagcacatcaagctggaagaggaacggagaagcgaggacgcccagagcaaggccgccctgaccgactggctgcgggctaaggccagcttcgtgatcgagggcctgaaggaggccgacaaggacgagttctgcagatgcgagctgaagctgcagaagtggtacggggacctgcggggaaagcccttcgccatcgaagccgagaacagcatcctggacatcagcggcttcagcaagcagtacaactgtgccttcatctggcagaaggacggcgtgaagaagctgaacctgtacctgatcatcaactacttcaagggcggcaagctgcggttcaagaagatcaaacctgaagccttcgaagccaacagattctacaccgtgatcaacaaaaagagcggcgagatcgtgcccatggaggtgaacttcaacttcgacgaccccaacctgatcatcctgcctctggcctttggcaagagacagggcagagaattcatctggaacgacctgctgtccctggaaaccggcagcctgaagctggccaacggaagagtgatcgagaagacactgtacaacagaagaacccggcaggatgagcctgccctgttcgtggccctgaccttcgagcggcgggaggtcctggactcctccaatatcaaaccaatgaacctgatcggcgtggcaagaggcgaaaacatccccgccgtgatcgccctgaccgaccccgagggctgcccactgagccggtttaaggatagcctgggaaacccaacccacatcctgagaatcggcgagagctataaggagaagcagcggaccatccaggccaagaaggaggtggagcagcggagagccggcggctacagccggaagtacgccagcaaagccaagaatctggcagacgatatggtgagaaacaccgctagagatctgctgtactacgccgtgacccaggatgccatgctgatcttcgccaacctgagccggggcttcggccggcagggcaagcggaccttcatggccgagagacagtacacacggatggaggactggctgaccgccaagctggcctacgagggcctgagcaagacctacctgtccaagacactggcccagtacacctccaagacatgcagcaactgtgggtttaccatcaccagcgccgactacgacagggtgctggagaagctgaagaagacagcaacaggctggatgaccacaattaacggcaaggagctgaaggtggagggccagattacctactacaacagatacaagagacagaacgtagtcaaggacctgtccgtcgagctggatagactgagcgaagaatctgtgaacaacgacatctcctcctggacaaagggcagaagcggagaagctctgagcctcctgaagaaaagattctcccatagacccgtgcaggagaagttcgtgtgcctgaactgcggcttcgagacacacgcagccgagcaagccgccctgaacatcgccagatcctggctgttcctgcggagccaggagtacaagaaataccagacaaacaagacaaccggcaacaccgataagagagccttcgtcgagacctggcagtccttttaccggaagaagcttaaggaggtgtggaaacctgccgtgcggtctggcggatctggcggaggctccaccagccccaagaaaaagagaaaagtctaagctgccttctgcggggcttgccttctggccatgcccttcttctctcccttgcacctgtacctcttggtctttgaataaagcctgagtaggaaggctagcaaaaaaaaaaaaaaaaaaaaaaaaaaaaaaaaaaaaaaaaaaaaaaaaaaaaaaaaaaaaaaaaaaaaaaaaaaaaaaaa

SEQ ID NO: 10295 - RNA, 8787 nt, synthetic construct
  source 1..8787: mol_type = other RNA
aggaaataagagagaaaagaagagtaagaagaaatataagagccaccatggcccctaagaagaagcgtaaagtgagccggatgaaccacgaccaggagttcgacccccctaaggtgtaccctcccgtccccgccgagaagagaaagcccatccgggtcctgagcctgttcgatggcatcgccaccggtctgctggtgctgaaggacctgggcatccaggtggataggtacattgcctccgaggtgtgcgaggactccatcaccgtgggaatggtgcgtcatcagggcaagatcatgtacgtgggcgacgtgcggagcgtgacacagaagcatatccaggagtggggccctttcgacctggtgatcggcggcagcccttgcaatgacctgagcatcgtgaacccagcccggaagggcctgtacgagggaaccggcagactgttcttcgagttttacagactgctgcacgacgcccggcctaaggaaggcgacgaccggcccttcttttggctgttcgagaatgtggtggccatgggagtcagcgacaagcgggatattagccggttcctggagagcaaccccgtgatgatcgatgccaaggaagtgagcgccgcccaccgggccagatacttctggggcaatctgcctggcatgaacagacccctggccagcaccgtgaacgacaagctggagctgcaggagtgcctggagcacggccggatcgccaagttcagcaaggtgagaaccatcaccacccgaagcaacagcatcaaacaaggcaaggaccagcactttcctgtgttcatgaacgagaaggaggacatcctgtggtgtaccgagatggagagagtgttcgggttcccagtccactacacagatgtcagcaacatgtctagactggccagacagagactgctgggaagaagctggtccgtccctgtgatcagacacctgttcgcccctctgaaggagtacttcgcctgcgtgagcagcggcaacagcaacgccaacagccggggccccagcttctctagcggcctggtgccactgtccctgagagggagccacatgggccccatggagatctacaaaaccgtgagcgcctggaagcggcagcctgtgcgcgtgctgagcctgtttcggaatatcgataaagtcctgaaaagcctgggattcctggagagcggctctggctccggcggtggcaccctgaagtacgtggaggatgtgacaaacgtggtcagacgggatgtggagaagtggggccccttcgatctggtgtacggcagcacccaacccctgggcagctcttgtgaccggtgccctggctggtacatgtttcagttccaccggatcctgcagtacgccctgccgagacaggagtcccagcggccattcttttggattttcatggacaacttgctgctgaccgaggatgaccaggaaactaccactcggttcctgcagaccgaagccgtgaccctgcaggacgtgagaggccgggactaccagaacgccatgcgggtgtggtccaacatccctggactgaaaagcaagcacgcacctctgacccctaaagaagaggagtacctgcaggcccaggtgcggagcagaagcaagctggacgcccctaaggtggatctgctggtgaagaattgcctcctgcccctgagagagtacttcaagtatttcagccagaatagtctgcccctgggaggcagcggcggcggcagccagggccacgtgaccttcgaggacatcgccgtgtacttcagccaggaggagtggggcctgctggacgaggcccagaggtgcctgtaccacgacgtgatgctggagaacttcagcctgatgaccagcgtggccggcctgagccagaacaaccacaaggacagctgcctgcagtggaaggtgcccgtgagcatgaacaacgtggcccagtgcagccccgacgaggtgcactacacccccatgggcggcccaagcagcggcgcccctcctcccagcggcggcaggcggcccaagcagcggcgcccctcctcccagcggcggcagcccagccggctccccaacctctaccgaggagggcacctctgagtccgccacccccgagagcggccctggcacctccaccgagcccagcgagggcagcgcacccggcagccctgccggcagccccacctccacagaggagggaaccagcaccgagcccagcgaaggcagcgccccaggcaccagcaccgagcctagtgagcaggagattaaacggatcaacaagatcagaagaagacttgtgaaagacagcaacaccaagaaggccggcaagacaggccccatgaaaaccctgctggttagagtgatgacacccgatctgagagagcggctggaaaacctgagaaagaagcctgaaaatatcccccagcccatcagcaatacatctagagccaacctgaataagctgctgaccgattacaccgaaatgaagaaggcgatcctgcatgtgtactgggaagagttccagaaggaccctgtgggcctgatgagccgggtggcccagcctgccagcaagaagatcgatcagaacaagctgaaacctgagatggacgagaagggcaacctgaccaccgccggctttgcctgctctcagtgtggccagcccctgttcgtgtacaagctggagcaggtgtctgagaagggcaaggcttacaccaactacttcggacggtgcaatgtggccgagcacgaaaagctgatcctgctggcccagctgaagcccgagaaggatagcgacgaagccgtgacatatagcctgggaaagtttgggcagagggccctggatttctacagcattcatgtgaccaaggagtccacccaccccgtgaagcccctggcccagatcgccggaaacagatacgcctccggacctgtgggaaaggccctgagcgacgcatgtatgggcacaatcgcctccttcctgtctaagtaccaggacatcatcatcgaacaccagaaggtggtgaagggcaaccagaagagactggagagcctgcgggagctggccggcaaggaaaacctggaataccctagcgtgaccctgccacctcagcctcacaccaaggagggcgttgatgcctacaacgaagtgatcgcccgggtgcgaatgtgggtgaacctgaacctgtggcagaagctgaagctaagcagagatgatgccaagcctctgctgagactgaagggattcccttcctttcctctggtcgagagacaggccaacgaagtggactggtgggacatggtgtgtaacgtgaagaagctgatcaacgagaaaaaggaggatggcaaggtgttttggcagaatctggctggctacaagagacaggaagccctgagaccatacctgagcagcgaggaagatcggaagaagggaaagaaattcgctcggtaccagctgggcgacctgctgctgcacctggaaaagaagcacggcgaggactggggaaaggtgtacgacgaggcctgggagcggattgacaagaaagtggaaggcctgagcaagcacatcaagctggaagaggaacggagaagcgaggacgcccagagcaaggccgccctgaccgactggctgcgggctaaggccagcttcgtgatcgagggcctgaaggaggccgacaaggacgagttctgcagatgcgagctgaagctgcagaagtggtacggggacctgcggggaaagcccttcgccatcgaagccgagaacagcatcctggacatcagcggcttcagcaagcagtacaactgtgccttcatctggcagaaggacggcgtgaagaagctgaacctgtacctgatcatcaactacttcaagggcggcaagctgcggttcaagaagatcaaacctgaagccttcgaagccaacagattctacaccgtgatcaacaaaaagagcggcgagatcgtgcccatggaggtgaacttcaacttcgacgaccccaacctgatcatcctgcctctggcctttggcaagagacagggcagagaattcatctggaacgacctgctgtccctggaaaccggcagcctgaagctggccaacggaagagtgatcgagaagacactgtacaacagaagaacccggcaggatgagcctgccctgttcgtggccctgaccttcgagcggcgggaggtcctggactcctccaatatcaaaccaatgaacctgatcggcgtggcaagaggcgaaaacatccccgccgtgatcgccctgaccgaccccgagggctgcccactgagccggtttaaggatagcctgggaaacccaacccacatcctgagaatcggcgagagctataaggagaagcagcggaccatccaggccaagaaggaggtggagcagcggagagccggcggctacagccggaagtacgccagcaaagccaagaatctggcagacgatatggtgagaaacaccgctagagatctgctgtactacgccgtgacccaggatgccatgctgatcttcgccaacctgagccggggcttcggccggcagggcaagcggaccttcatggccgagagacagtacacacggatggaggactggctgaccgccaagctggcctacgagggcctgagcaagacctacctgtccaagacactggcccagtacacctccaagacatgcagcaactgtgggtttaccatcaccagcgccgactacgacagggtgctggagaagctgaagaagacagcaacaggctggatgaccacaattaacggcaaggagctgaaggtggagggccagattacctactacaacagatacaagagacagaacgtagtcaaggacctgtccgtcgagctggatagactgagcgaagaatctgtgaacaacgacatctcctcctggacaaagggcagaagcggagaagctctgagcctcctgaagaaaagattctcccatagacccgtgcaggagaagttcgtgtgcctgaactgcggcttcgagacacacgcagccgagcaagccgccctgaacatcgccagatcctggctgttcctgcggagccaggagtacaagaaataccagacaaacaagacaaccggcaacaccgataagagagccttcgtcgagacctggcagtccttttaccggaagaagcttaaggaggtgtggaaacctgccgtgcggtctggcggatctggcggaggctccaccagccccaagaaaaagagaaaagtctaagctgccttctgcggggcttgccttctggccatgcccttcttctctcccttgcacctgtacctcttggtctttgaataaagcctgagtaggaaggctagcaaaaaaaaaaaaaaaaaaaaaaaaaaaaaaaaaaaaaaaaaaaaaaaaaaaaaaaaaaaaaaaaaaaaaaaaaaaaaaaagcccagccggctccccaacctctaccgaggagggcacctctgagtccgccacccccgagagcggccctggcacctccaccgagcccagcgagggcagcgcacccggcagccctgccggcagccccacctccacagaggagggaaccagcaccgagcccagcgaaggcagcgccccaggcaccagcaccgagcctagtgagcaggagattaaacggatcaacaagatcagaagaagacttgtgaaagacagcaacaccaagaaggccggcaagacaggccccatgaaaaccctgctggttagagtgatgacacccgatctgagagagcggctggaaaacctgagaaagaagcctgaaaatatcccccagcccatcagcaatacatctagagccaacctgaataagctgctgaccgattacaccgaaatgaagaaggcgatcctgcatgtgtactgggaagagttccagaaggaccctgtgggcctgatgagccgggtggcccagcctgccagcaagaagatcgatcagaacaagctgaaacctgagatggacgagaagggcaacctgaccaccgccggctttgcctgctctcagtgtggccagcccctgttcgtgtacaagctggagcaggtgtctgagaagggcaaggcttacaccaactacttcggacggtgcaatgtggccgagcacgaaaagctgatcctgctggcccagctgaagcccgagaaggatagcgacgaagccgtgacatatagcctgggaaagtttgggcagagggccctggatttctacagcattcatgtgaccaaggagtccacccaccccgtgaagcccctggcccagatcgccggaaacagatacgcctccggacctgtgggaaaggccctgagcgacgcatgtatgggcacaatcgcctccttcctgtctaagtaccaggacatcatcatcgaacaccagaaggtggtgaagggcaaccagaagagactggagagcctgcgggagctggccggcaaggaaaacctggaataccctagcgtgaccctgccacctcagcctcacaccaaggagggcgttgatgcctacaacgaagtgatcgcccgggtgcgaatgtgggtgaacctgaacctgtggcagaagctgaagctaagcagagatgatgccaagcctctgctgagactgaagggattcccttcctttcctctggtcgagagacaggccaacgaagtggactggtgggacatggtgtgtaacgtgaagaagctgatcaacgagaaaaaggaggatggcaaggtgttttggcagaatctggctggctacaagagacaggaagccctgagaccatacctgagcagcgaggaagatcggaagaagggaaagaaattcgctcggtaccagctgggcgacctgctgctgcacctggaaaagaagcacggcgaggactggggaaaggtgtacgacgaggcctgggagcggattgacaagaaagtggaaggcctgagcaagcacatcaagctggaagaggaacggagaagcgaggacgcccagagcaaggccgccctgaccgactggctgcgggctaaggccagcttcgtgatcgagggcctgaaggaggccgacaaggacgagttctgcagatgcgagctgaagctgcagaagtggtacggggacctgcggggaaagcccttcgccatcgaagccgagaacagcatcctggacatcagcggcttcagcaagcagtacaactgtgccttcatctggcagaaggacggcgtgaagaagctgaacctgtacctgatcatcaactacttcaagggcggcaagctgcggttcaagaagatcaaacctgaagccttcgaagccaacagattctacaccgtgatcaacaaaaagagcggcgagatcgtgcccatggaggtgaacttcaacttcgacgaccccaacctgatcatcctgcctctggcctttggcaagagacagggcagagaattcatctggaacgacctgctgtccctggaaaccggcagcctgaagctggccaacggaagagtgatcgagaagacactgtacaacagaagaacccggcaggatgagcctgccctgttcgtggccctgaccttcgagcggcgggaggtcctggactcctccaatatcaaaccaatgaacctgatcggcgtggcaagaggcgaaaacatccccgccgtgatcgccctgaccgaccccgagggctgcccactgagccggtttaaggatagcctgggaaacccaacccacatcctgagaatcggcgagagctataaggagaagcagcggaccatccaggccaagaaggaggtggagcagcggagagccggcggctacagccggaagtacgccagcaaagccaagaatctggcagacgatatggtgagaaacaccgctagagatctgctgtactacgccgtgacccaggatgccatgctgatcttcgccaacctgagccggggcttcggccggcagggcaagcggaccttcatggccgagagacagtacacacggatggaggactggctgaccgccaagctggcctacgagggcctgagcaagacctacctgtccaagacactggcccagtacacctccaagacatgcagcaactgtgggtttaccatcaccagcgccgactacgacagggtgctggagaagctgaagaagacagcaacaggctggatgaccacaattaacggcaaggagctgaaggtggagggccagattacctactacaacagatacaagagacagaacgtagtcaaggacctgtccgtcgagctggatagactgagcgaagaatctgtgaacaacgacatctcctcctggacaaagggcagaagcggagaagctctgagcctcctgaagaaaagattctcccatagacccgtgcaggagaagttcgtgtgcctgaactgcggcttcgagacacacgcagccgagcaagccgccctgaacatcgccagatcctggctgttcctgcggagccaggagtacaagaaataccagacaaacaagacaaccggcaacaccgataagagagccttcgtcgagacctggcagtccttttaccggaagaagcttaaggaggtgtggaaacctgccgtgcggtctggcggatctggcggaggctccaccagccccaagaaaaagagaaaagtctaagctgccttctgcggggcttgccttctggccatgcccttcttctctcccttgcacctgtacctcttggtctttgaataaagcctgagtaggaaggctagcaaaaaaaaaaaaaaaaaaaaaaaaaaaaaaaaaaaaaaaaaaaaaaaaaaaaaaaaaaaaaaaaaaaaaaaaaaaaaaaa

SEQ ID NO: 10296 - RNA, 8787 nt, synthetic construct
  source 1..8787: mol_type = other RNA
aggaaataagagagaaaagaagagtaagaagaaatataagagccaccatggcccctaagaagaagcgtaaagtgagccggatgaaccacgaccaggagttcgacccccctaaggtgtaccctcccgtccccgccgagaagagaaagcccatccgggtcctgagcctgttcgatggcatcgccaccggtctgctggtgctgaaggacctgggcatccaggtggataggtacattgcctccgaggtgtgcgaggactccatcaccgtgggaatggtgcgtcatcagggcaagatcatgtacgtgggcgacgtgcggagcgtgacacagaagcatatccaggagtggggccctttcgacctggtgatcggcggcagcccttgcaatgacctgagcatcgtgaacccagcccggaagggcctgtacgagggaaccggcagactgttcttcgagttttacagactgctgcacgacgcccggcctaaggaaggcgacgaccggcccttcttttggctgttcgagaatgtggtggccatgggagtcagcgacaagcgggatattagccggttcctggagagcaaccccgtgatgatcgatgccaaggaagtgagcgccgcccaccgggccagatacttctggggcaatctgcctggcatgaacagacccctggccagcaccgtgaacgacaagctggagctgcaggagtgcctggagcacggccggatcgccaagttcagcaaggtgagaaccatcaccacccgaagcaacagcatcaaacaaggcaaggaccagcactttcctgtgttcatgaacgagaaggaggacatcctgtggtgtaccgagatggagagagtgttcgggttcccagtccactacacagatgtcagcaacatgtctagactggccagacagagactgctgggaagaagctggtccgtccctgtgatcagacacctgttcgcccctctgaaggagtacttcgcctgcgtgagcagcggcaacagcaacgccaacagccggggccccagcttctctagcggcctggtgccactgtccctgagagggagccacatgggccccatggagatctacaaaaccgtgagcgcctggaagcggcagcctgtgcgcgtgctgagcctgtttcggaatatcgataaagtcctgaaaagcctgggattcctggagagcggctctggctccggcggtggcaccctgaagtacgtggaggatgtgacaaacgtggtcagacgggatgtggagaagtggggccccttcgatctggtgtacggcagcacccaacccctgggcagctcttgtgaccggtgccctggctggtacatgtttcagttccaccggatcctgcagtacgccctgccgagacaggagtcccagcggccattcttttggattttcatggacaacttgctgctgaccgaggatgaccaggaaactaccactcggttcctgcagaccgaagccgtgaccctgcaggacgtgagaggccgggactaccagaacgccatgcgggtgtggtccaacatccctggactgaaaagcaagcacgcacctctgacccctaaagaagaggagtacctgcaggcccaggtgcggagcagaagcaagctggacgcccctaaggtggatctgctggtgaagaattgcctcctgcccctgagagagtacttcaagtatttcagccagaatagtctgcccctgggaggcagcggcggcggcgtgcacggcagcgtgaccttcagggacgtggccatcgacttctgccaggaggagtgggagtgcctgggccccatccagagggacctgtacagggacgtgatgctggagaactacagcaacctgatcgccgtgggcagcaccatcagcaagcccgacgtgatcgccctgctggagcagggcaccgagccctggatgggcgtgaggaaggacaggagcaggtggtaccccggcctgaacagcggcggcggcccaagcagcggcgcccctcctcccagcggcggcaggcggcccaagcagcggcgcccctcctcccagcggcggcagcccagccggctccccaacctctaccgaggagggcacctctgagtccgccacccccgagagcggccctggcacctccaccgagcccagcgagggcagcgcacccggcagccctgccggcagccccacctccacagaggagggaaccagcaccgagcccagcgaaggcagcgccccaggcaccagcaccgagcctagtgagcaggagattaaacggatcaacaagatcagaagaagacttgtgaaagacagcaacaccaagaaggccggcaagacaggccccatgaaaaccctgctggttagagtgatgacacccgatctgagagagcggctggaaaacctgagaaagaagcctgaaaatatcccccagcccatcagcaatacatctagagccaacctgaataagctgctgaccgattacaccgaaatgaagaaggcgatcctgcatgtgtactgggaagagttccagaaggaccctgtgggcctgatgagccgggtggcccagcctgccagcaagaagatcgatcagaacaagctgaaacctgagatggacgagaagggcaacctgaccaccgccggctttgcctgctctcagtgtggccagcccctgttcgtgtacaagctggagcaggtgtctgagaagggcaaggcttacaccaactacttcggacggtgcaatgtggccgagcacgaaaagctgatcctgctggcccagctgaagcccgagaaggatagcgacgaagccgtgacatatagcctgggaaagtttgggcagagggccctggatttctacagcattcatgtgaccaaggagtccacccaccccgtgaagcccctggcccagatcgccggaaacagatacgcctccggacctgtgggaaaggccctgagcgacgcatgtatgggcacaatcgcctccttcctgtctaagtaccaggacatcatcatcgaacaccagaaggtggtgaagggcaaccagaagagactggagagcctgcgggagctggccggcaaggaaaacctggaataccctagcgtgaccctgccacctcagcctcacaccaaggagggcgttgatgcctacaacgaagtgatcgcccgggtgcgaatgtgggtgaacctgaacctgtggcagaagctgaagctaagcagagatgatgccaagcctctgctgagactgaagggattcccttcctttcctctggtcgagagacaggccaacgaagtggactggtgggacatggtgtgtaacgtgaagaagctgatcaacgagaaaaaggaggatggcaaggtgttttggcagaatctggctggctacaagagacaggaagccctgagaccatacctgagcagcgaggaagatcggaagaagggaaagaaattcgctcggtaccagctgggcgacctgctgctgcacctggaaaagaagcacggcgaggactggggaaaggtgtacgacgaggcctgggagcggattgacaagaaagtggaaggcctgagcaagcacatcaagctggaagaggaacggagaagcgaggacgcccagagcaaggccgccctgaccgactggctgcgggctaaggccagcttcgtgatcgagggcctgaaggaggccgacaaggacgagttctgcagatgcgagctgaagctgcagaagtggtacggggacctgcggggaaagcccttcgccatcgaagccgagaacagcatcctggacatcagcggcttcagcaagcagtacaactgtgccttcatctggcagaaggacggcgtgaagaagctgaacctgtacctgatcatcaactacttcaagggcggcaagctgcggttcaagaagatcaaacctgaagccttcgaagccaacagattctacaccgtgatcaacaaaaagagcggcgagatcgtgcccatggaggtgaacttcaacttcgacgaccccaacctgatcatcctgcctctggcctttggcaagagacagggcagagaattcatctggaacgacctgctgtccctggaaaccggcagcctgaagctggccaacggaagagtgatcgagaagacactgtacaacagaagaacccggcaggatgagcctgccctgttcgtggccctgaccttcgagcggcgggaggtcctggactcctccaatatcaaaccaatgaacctgatcggcgtggcaagaggcgaaaacatccccgccgtgatcgccctgaccgaccccgagggctgcccactgagccggtttaaggatagcctgggaaacccaacccacatcctgagaatcggcgagagctataaggagaagcagcggaccatccaggccaagaaggaggtggagcagcggagagccggcggctacagccggaagtacgccagcaaagccaagaatctggcagacgatatggtgagaaacaccgctagagatctgctgtactacgccgtgacccaggatgccatgctgatcttcgccaacctgagccggggcttcggccggcagggcaagcggaccttcatggccgagagacagtacacacggatggaggactggctgaccgccaagctggcctacgagggcctgagcaagacctacctgtccaagacactggcccagtacacctccaagacatgcagcaactgtgggtttaccatcaccagcgccgactacgacagggtgctggagaagctgaagaagacagcaacaggctggatgaccacaattaacggcaaggagctgaaggtggagggccagattacctactacaacagatacaagagacagaacgtagtcaaggacctgtccgtcgagctggatagactgagcgaagaatctgtgaacaacgacatctcctcctggacaaagggcagaagcggagaagctctgagcctcctgaagaaaagattctcccatagacccgtgcaggagaagttcgtgtgcctgaactgcggcttcgagacacacgcagccgagcaagccgccctgaacatcgccagatcctggctgttcctgcggagccaggagtacaagaaataccagacaaacaagacaaccggcaacaccgataagagagccttcgtcgagacctggcagtccttttaccggaagaagcttaaggaggtgtggaaacctgccgtgcggtctggcggatctggcggaggctccaccagccccaagaaaaagagaaaagtctaagctgccttctgcggggcttgccttctggccatgcccttcttctctcccttgcacctgtacctcttggtctttgaataaagcctgagtaggaaggctagcaaaaaaaaaaaaaaaaaaaaaaaaaaaaaaaaaaaaaaaaaaaaaaaaaaaaaaaaaaaaaaaaaaaaaaaaaaaaaaaagcccagccggctccccaacctctaccgaggagggcacctctgagtccgccacccccgagagcggccctggcacctccaccgagcccagcgagggcagcgcacccggcagccctgccggcagccccacctccacagaggagggaaccagcaccgagcccagcgaaggcagcgccccaggcaccagcaccgagcctagtgagcaggagattaaacggatcaacaagatcagaagaagacttgtgaaagacagcaacaccaagaaggccggcaagacaggccccatgaaaaccctgctggttagagtgatgacacccgatctgagagagcggctggaaaacctgagaaagaagcctgaaaatatcccccagcccatcagcaatacatctagagccaacctgaataagctgctgaccgattacaccgaaatgaagaaggcgatcctgcatgtgtactgggaagagttccagaaggaccctgtgggcctgatgagccgggtggcccagcctgccagcaagaagatcgatcagaacaagctgaaacctgagatggacgagaagggcaacctgaccaccgccggctttgcctgctctcagtgtggccagcccctgttcgtgtacaagctggagcaggtgtctgagaagggcaaggcttacaccaactacttcggacggtgcaatgtggccgagcacgaaaagctgatcctgctggcccagctgaagcccgagaaggatagcgacgaagccgtgacatatagcctgggaaagtttgggcagagggccctggatttctacagcattcatgtgaccaaggagtccacccaccccgtgaagcccctggcccagatcgccggaaacagatacgcctccggacctgtgggaaaggccctgagcgacgcatgtatgggcacaatcgcctccttcctgtctaagtaccaggacatcatcatcgaacaccagaaggtggtgaagggcaaccagaagagactggagagcctgcgggagctggccggcaaggaaaacctggaataccctagcgtgaccctgccacctcagcctcacaccaaggagggcgttgatgcctacaacgaagtgatcgcccgggtgcgaatgtgggtgaacctgaacctgtggcagaagctgaagctaagcagagatgatgccaagcctctgctgagactgaagggattcccttcctttcctctggtcgagagacaggccaacgaagtggactggtgggacatggtgtgtaacgtgaagaagctgatcaacgagaaaaaggaggatggcaaggtgttttggcagaatctggctggctacaagagacaggaagccctgagaccatacctgagcagcgaggaagatcggaagaagggaaagaaattcgctcggtaccagctgggcgacctgctgctgcacctggaaaagaagcacggcgaggactggggaaaggtgtacgacgaggcctgggagcggattgacaagaaagtggaaggcctgagcaagcacatcaagctggaagaggaacggagaagcgaggacgcccagagcaaggccgccctgaccgactggctgcgggctaaggccagcttcgtgatcgagggcctgaaggaggccgacaaggacgagttctgcagatgcgagctgaagctgcagaagtggtacggggacctgcggggaaagcccttcgccatcgaagccgagaacagcatcctggacatcagcggcttcagcaagcagtacaactgtgccttcatctggcagaaggacggcgtgaagaagctgaacctgtacctgatcatcaactacttcaagggcggcaagctgcggttcaagaagatcaaacctgaagccttcgaagccaacagattctacaccgtgatcaacaaaaagagcggcgagatcgtgcccatggaggtgaacttcaacttcgacgaccccaacctgatcatcctgcctctggcctttggcaagagacagggcagagaattcatctggaacgacctgctgtccctggaaaccggcagcctgaagctggccaacggaagagtgatcgagaagacactgtacaacagaagaacccggcaggatgagcctgccctgttcgtggccctgaccttcgagcggcgggaggtcctggactcctccaatatcaaaccaatgaacctgatcggcgtggcaagaggcgaaaacatccccgccgtgatcgccctgaccgaccccgagggctgcccactgagccggtttaaggatagcctgggaaacccaacccacatcctgagaatcggcgagagctataaggagaagcagcggaccatccaggccaagaaggaggtggagcagcggagagccggcggctacagccggaagtacgccagcaaagccaagaatctggcagacgatatggtgagaaacaccgctagagatctgctgtactacgccgtgacccaggatgccatgctgatcttcgccaacctgagccggggcttcggccggcagggcaagcggaccttcatggccgagagacagtacacacggatggaggactggctgaccgccaagctggcctacgagggcctgagcaagacctacctgtccaagacactggcccagtacacctccaagacatgcagcaactgtgggtttaccatcaccagcgccgactacgacagggtgctggagaagctgaagaagacagcaacaggctggatgaccacaattaacggcaaggagctgaaggtggagggccagattacctactacaacagatacaagagacagaacgtagtcaaggacctgtccgtcgagctggatagactgagcgaagaatctgtgaacaacgacatctcctcctggacaaagggcagaagcggagaagctctgagcctcctgaagaaaagattctcccatagacccgtgcaggagaagttcgtgtgcctgaactgcggcttcgagacacacgcagccgagcaagccgccctgaacatcgccagatcctggctgttcctgcggagccaggagtacaagaaataccagacaaacaagacaaccggcaacaccgataagagagccttcgtcgagacctggcagtccttttaccggaagaagcttaaggaggtgtggaaacctgccgtgcggtctggcggatctggcggaggctccaccagccccaagaaaaagagaaaagtctaagctgccttctgcggggcttgccttctggccatgcccttcttctctcccttgcacctgtacctcttggtctttgaataaagcctgagtaggaaggctagcaaaaaaaaaaaaaaaaaaaaaaaaaaaaaaaaaaaaaaaaaaaaaaaaaaaaaaaaaaaaaaaaaaaaaaaaaaaaaaaa

SEQ ID NO: 10297 - RNA, 8787 nt, synthetic construct
  source 1..8787: mol_type = other RNA
aggaaataagagagaaaagaagagtaagaagaaatataagagccaccatggcccctaagaagaagcgtaaagtgagccggatgaaccacgaccaggagttcgacccccctaaggtgtaccctcccgtccccgccgagaagagaaagcccatccgggtcctgagcctgttcgatggcatcgccaccggtctgctggtgctgaaggacctgggcatccaggtggataggtacattgcctccgaggtgtgcgaggactccatcaccgtgggaatggtgcgtcatcagggcaagatcatgtacgtgggcgacgtgcggagcgtgacacagaagcatatccaggagtggggccctttcgacctggtgatcggcggcagcccttgcaatgacctgagcatcgtgaacccagcccggaagggcctgtacgagggaaccggcagactgttcttcgagttttacagactgctgcacgacgcccggcctaaggaaggcgacgaccggcccttcttttggctgttcgagaatgtggtggccatgggagtcagcgacaagcgggatattagccggttcctggagagcaaccccgtgatgatcgatgccaaggaagtgagcgccgcccaccgggccagatacttctggggcaatctgcctggcatgaacagacccctggccagcaccgtgaacgacaagctggagctgcaggagtgcctggagcacggccggatcgccaagttcagcaaggtgagaaccatcaccacccgaagcaacagcatcaaacaaggcaaggaccagcactttcctgtgttcatgaacgagaaggaggacatcctgtggtgtaccgagatggagagagtgttcgggttcccagtccactacacagatgtcagcaacatgtctagactggccagacagagactgctgggaagaagctggtccgtccctgtgatcagacacctgttcgcccctctgaaggagtacttcgcctgcgtgagcagcggcaacagcaacgccaacagccggggccccagcttctctagcggcctggtgccactgtccctgagagggagccacatgggccccatggagatctacaaaaccgtgagcgcctggaagcggcagcctgtgcgcgtgctgagcctgtttcggaatatcgataaagtcctgaaaagcctgggattcctggagagcggctctggctccggcggtggcaccctgaagtacgtggaggatgtgacaaacgtggtcagacgggatgtggagaagtggggccccttcgatctggtgtacggcagcacccaacccctgggcagctcttgtgaccggtgccctggctggtacatgtttcagttccaccggatcctgcagtacgccctgccgagacaggagtcccagcggccattcttttggattttcatggacaacttgctgctgaccgaggatgaccaggaaactaccactcggttcctgcagaccgaagccgtgaccctgcaggacgtgagaggccgggactaccagaacgccatgcgggtgtggtccaacatccctggactgaaaagcaagcacgcacctctgacccctaaagaagaggagtacctgcaggcccaggtgcggagcagaagcaagctggacgcccctaaggtggatctgctggtgaagaattgcctcctgcccctgagagagtacttcaagtatttcagccagaatagtctgcccctgggaggcagcggcggcggcttccaggaggccgtgaccttcaaggacgtggccgtggtgttcagcgaggaggagctgggcctgctggaccccacccagaggaagctgtacagggacgtgatgctggagaacttcaggaacctggtgagcctgggccacagcagcagcaagcccgacgtgatcagccagctggagagggaggagaagctgtgcaccaaggagttccacacccagggcggcggcaggaaccagaaggagatggagggcggcccaagcagcggcgcccctcctcccagcggcggcaggcggcccaagcagcggcgcccctcctcccagcggcggcagcccagccggctccccaacctctaccgaggagggcacctctgagtccgccacccccgagagcggccctggcacctccaccgagcccagcgagggcagcgcacccggcagccctgccggcagccccacctccacagaggagggaaccagcaccgagcccagcgaaggcagcgccccaggcaccagcaccgagcctagtgagcaggagattaaacggatcaacaagatcagaagaagacttgtgaaagacagcaacaccaagaaggccggcaagacaggccccatgaaaaccctgctggttagagtgatgacacccgatctgagagagcggctggaaaacctgagaaagaagcctgaaaatatcccccagcccatcagcaatacatctagagccaacctgaataagctgctgaccgattacaccgaaatgaagaaggcgatcctgcatgtgtactgggaagagttccagaaggaccctgtgggcctgatgagccgggtggcccagcctgccagcaagaagatcgatcagaacaagctgaaacctgagatggacgagaagggcaacctgaccaccgccggctttgcctgctctcagtgtggccagcccctgttcgtgtacaagctggagcaggtgtctgagaagggcaaggcttacaccaactacttcggacggtgcaatgtggccgagcacgaaaagctgatcctgctggcccagctgaagcccgagaaggatagcgacgaagccgtgacatatagcctgggaaagtttgggcagagggccctggatttctacagcattcatgtgaccaaggagtccacccaccccgtgaagcccctggcccagatcgccggaaacagatacgcctccggacctgtgggaaaggccctgagcgacgcatgtatgggcacaatcgcctccttcctgtctaagtaccaggacatcatcatcgaacaccagaaggtggtgaagggcaaccagaagagactggagagcctgcgggagctggccggcaaggaaaacctggaataccctagcgtgaccctgccacctcagcctcacaccaaggagggcgttgatgcctacaacgaagtgatcgcccgggtgcgaatgtgggtgaacctgaacctgtggcagaagctgaagctaagcagagatgatgccaagcctctgctgagactgaagggattcccttcctttcctctggtcgagagacaggccaacgaagtggactggtgggacatggtgtgtaacgtgaagaagctgatcaacgagaaaaaggaggatggcaaggtgttttggcagaatctggctggctacaagagacaggaagccctgagaccatacctgagcagcgaggaagatcggaagaagggaaagaaattcgctcggtaccagctgggcgacctgctgctgcacctggaaaagaagcacggcgaggactggggaaaggtgtacgacgaggcctgggagcggattgacaagaaagtggaaggcctgagcaagcacatcaagctggaagaggaacggagaagcgaggacgcccagagcaaggccgccctgaccgactggctgcgggctaaggccagcttcgtgatcgagggcctgaaggaggccgacaaggacgagttctgcagatgcgagctgaagctgcagaagtggtacggggacctgcggggaaagcccttcgccatcgaagccgagaacagcatcctggacatcagcggcttcagcaagcagtacaactgtgccttcatctggcagaaggacggcgtgaagaagctgaacctgtacctgatcatcaactacttcaagggcggcaagctgcggttcaagaagatcaaacctgaagccttcgaagccaacagattctacaccgtgatcaacaaaaagagcggcgagatcgtgcccatggaggtgaacttcaacttcgacgaccccaacctgatcatcctgcctctggcctttggcaagagacagggcagagaattcatctggaacgacctgctgtccctggaaaccggcagcctgaagctggccaacggaagagtgatcgagaagacactgtacaacagaagaacccggcaggatgagcctgccctgttcgtggccctgaccttcgagcggcgggaggtcctggactcctccaatatcaaaccaatgaacctgatcggcgtggcaagaggcgaaaacatccccgccgtgatcgccctgaccgaccccgagggctgcccactgagccggtttaaggatagcctgggaaacccaacccacatcctgagaatcggcgagagctataaggagaagcagcggaccatccaggccaagaaggaggtggagcagcggagagccggcggctacagccggaagtacgccagcaaagccaagaatctggcagacgatatggtgagaaacaccgctagagatctgctgtactacgccgtgacccaggatgccatgctgatcttcgccaacctgagccggggcttcggccggcagggcaagcggaccttcatggccgagagacagtacacacggatggaggactggctgaccgccaagctggcctacgagggcctgagcaagacctacctgtccaagacactggcccagtacacctccaagacatgcagcaactgtgggtttaccatcaccagcgccgactacgacagggtgctggagaagctgaagaagacagcaacaggctggatgaccacaattaacggcaaggagctgaaggtggagggccagattacctactacaacagatacaagagacagaacgtagtcaaggacctgtccgtcgagctggatagactgagcgaagaatctgtgaacaacgacatctcctcctggacaaagggcagaagcggagaagctctgagcctcctgaagaaaagattctcccatagacccgtgcaggagaagttcgtgtgcctgaactgcggcttcgagacacacgcagccgagcaagccgccctgaacatcgccagatcctggctgttcctgcggagccaggagtacaagaaataccagacaaacaagacaaccggcaacaccgataagagagccttcgtcgagacctggcagtccttttaccggaagaagcttaaggaggtgtggaaacctgccgtgcggtctggcggatctggcggaggctccaccagccccaagaaaaagagaaaagtctaagctgccttctgcggggcttgccttctggccatgcccttcttctctcccttgcacctgtacctcttggtctttgaataaagcctgagtaggaaggctagcaaaaaaaaaaaaaaaaaaaaaaaaaaaaaaaaaaaaaaaaaaaaaaaaaaaaaaaaaaaaaaaaaaaaaaaaaaaaaaaagcccagccggctccccaacctctaccgaggagggcacctctgagtccgccacccccgagagcggccctggcacctccaccgagcccagcgagggcagcgcacccggcagccctgccggcagccccacctccacagaggagggaaccagcaccgagcccagcgaaggcagcgccccaggcaccagcaccgagcctagtgagcaggagattaaacggatcaacaagatcagaagaagacttgtgaaagacagcaacaccaagaaggccggcaagacaggccccatgaaaaccctgctggttagagtgatgacacccgatctgagagagcggctggaaaacctgagaaagaagcctgaaaatatcccccagcccatcagcaatacatctagagccaacctgaataagctgctgaccgattacaccgaaatgaagaaggcgatcctgcatgtgtactgggaagagttccagaaggaccctgtgggcctgatgagccgggtggcccagcctgccagcaagaagatcgatcagaacaagctgaaacctgagatggacgagaagggcaacctgaccaccgccggctttgcctgctctcagtgtggccagcccctgttcgtgtacaagctggagcaggtgtctgagaagggcaaggcttacaccaactacttcggacggtgcaatgtggccgagcacgaaaagctgatcctgctggcccagctgaagcccgagaaggatagcgacgaagccgtgacatatagcctgggaaagtttgggcagagggccctggatttctacagcattcatgtgaccaaggagtccacccaccccgtgaagcccctggcccagatcgccggaaacagatacgcctccggacctgtgggaaaggccctgagcgacgcatgtatgggcacaatcgcctccttcctgtctaagtaccaggacatcatcatcgaacaccagaaggtggtgaagggcaaccagaagagactggagagcctgcgggagctggccggcaaggaaaacctggaataccctagcgtgaccctgccacctcagcctcacaccaaggagggcgttgatgcctacaacgaagtgatcgcccgggtgcgaatgtgggtgaacctgaacctgtggcagaagctgaagctaagcagagatgatgccaagcctctgctgagactgaagggattcccttcctttcctctggtcgagagacaggccaacgaagtggactggtgggacatggtgtgtaacgtgaagaagctgatcaacgagaaaaaggaggatggcaaggtgttttggcagaatctggctggctacaagagacaggaagccctgagaccatacctgagcagcgaggaagatcggaagaagggaaagaaattcgctcggtaccagctgggcgacctgctgctgcacctggaaaagaagcacggcgaggactggggaaaggtgtacgacgaggcctgggagcggattgacaagaaagtggaaggcctgagcaagcacatcaagctggaagaggaacggagaagcgaggacgcccagagcaaggccgccctgaccgactggctgcgggctaaggccagcttcgtgatcgagggcctgaaggaggccgacaaggacgagttctgcagatgcgagctgaagctgcagaagtggtacggggacctgcggggaaagcccttcgccatcgaagccgagaacagcatcctggacatcagcggcttcagcaagcagtacaactgtgccttcatctggcagaaggacggcgtgaagaagctgaacctgtacctgatcatcaactacttcaagggcggcaagctgcggttcaagaagatcaaacctgaagccttcgaagccaacagattctacaccgtgatcaacaaaaagagcggcgagatcgtgcccatggaggtgaacttcaacttcgacgaccccaacctgatcatcctgcctctggcctttggcaagagacagggcagagaattcatctggaacgacctgctgtccctggaaaccggcagcctgaagctggccaacggaagagtgatcgagaagacactgtacaacagaagaacccggcaggatgagcctgccctgttcgtggccctgaccttcgagcggcgggaggtcctggactcctccaatatcaaaccaatgaacctgatcggcgtggcaagaggcgaaaacatccccgccgtgatcgccctgaccgaccccgagggctgcccactgagccggtttaaggatagcctgggaaacccaacccacatcctgagaatcggcgagagctataaggagaagcagcggaccatccaggccaagaaggaggtggagcagcggagagccggcggctacagccggaagtacgccagcaaagccaagaatctggcagacgatatggtgagaaacaccgctagagatctgctgtactacgccgtgacccaggatgccatgctgatcttcgccaacctgagccggggcttcggccggcagggcaagcggaccttcatggccgagagacagtacacacggatggaggactggctgaccgccaagctggcctacgagggcctgagcaagacctacctgtccaagacactggcccagtacacctccaagacatgcagcaactgtgggtttaccatcaccagcgccgactacgacagggtgctggagaagctgaagaagacagcaacaggctggatgaccacaattaacggcaaggagctgaaggtggagggccagattacctactacaacagatacaagagacagaacgtagtcaaggacctgtccgtcgagctggatagactgagcgaagaatctgtgaacaacgacatctcctcctggacaaagggcagaagcggagaagctctgagcctcctgaagaaaagattctcccatagacccgtgcaggagaagttcgtgtgcctgaactgcggcttcgagacacacgcagccgagcaagccgccctgaacatcgccagatcctggctgttcctgcggagccaggagtacaagaaataccagacaaacaagacaaccggcaacaccgataagagagccttcgtcgagacctggcagtccttttaccggaagaagcttaaggaggtgtggaaacctgccgtgcggtctggcggatctggcggaggctccaccagccccaagaaaaagagaaaagtctaagctgccttctgcggggcttgccttctggccatgcccttcttctctcccttgcacctgtacctcttggtctttgaataaagcctgagtaggaaggctagcaaaaaaaaaaaaaaaaaaaaaaaaaaaaaaaaaaaaaaaaaaaaaaaaaaaaaaaaaaaaaaaaaaaaaaaaaaaaaaaa

SEQ ID NO: 10298 - RNA, 8787 nt, synthetic construct
  source 1..8787: mol_type = other RNA
aggaaataagagagaaaagaagagtaagaagaaatataagagccaccatggcccctaagaagaagcgtaaagtgagccggatgaaccacgaccaggagttcgacccccctaaggtgtaccctcccgtccccgccgagaagagaaagcccatccgggtcctgagcctgttcgatggcatcgccaccggtctgctggtgctgaaggacctgggcatccaggtggataggtacattgcctccgaggtgtgcgaggactccatcaccgtgggaatggtgcgtcatcagggcaagatcatgtacgtgggcgacgtgcggagcgtgacacagaagcatatccaggagtggggccctttcgacctggtgatcggcggcagcccttgcaatgacctgagcatcgtgaacccagcccggaagggcctgtacgagggaaccggcagactgttcttcgagttttacagactgctgcacgacgcccggcctaaggaaggcgacgaccggcccttcttttggctgttcgagaatgtggtggccatgggagtcagcgacaagcgggatattagccggttcctggagagcaaccccgtgatgatcgatgccaaggaagtgagcgccgcccaccgggccagatacttctggggcaatctgcctggcatgaacagacccctggccagcaccgtgaacgacaagctggagctgcaggagtgcctggagcacggccggatcgccaagttcagcaaggtgagaaccatcaccacccgaagcaacagcatcaaacaaggcaaggaccagcactttcctgtgttcatgaacgagaaggaggacatcctgtggtgtaccgagatggagagagtgttcgggttcccagtccactacacagatgtcagcaacatgtctagactggccagacagagactgctgggaagaagctggtccgtccctgtgatcagacacctgttcgcccctctgaaggagtacttcgcctgcgtgagcagcggcaacagcaacgccaacagccggggccccagcttctctagcggcctggtgccactgtccctgagagggagccacatgggccccatggagatctacaaaaccgtgagcgcctggaagcggcagcctgtgcgcgtgctgagcctgtttcggaatatcgataaagtcctgaaaagcctgggattcctggagagcggctctggctccggcggtggcaccctgaagtacgtggaggatgtgacaaacgtggtcagacgggatgtggagaagtggggccccttcgatctggtgtacggcagcacccaacccctgggcagctcttgtgaccggtgccctggctggtacatgtttcagttccaccggatcctgcagtacgccctgccgagacaggagtcccagcggccattcttttggattttcatggacaacttgctgctgaccgaggatgaccaggaaactaccactcggttcctgcagaccgaagccgtgaccctgcaggacgtgagaggccgggactaccagaacgccatgcgggtgtggtccaacatccctggactgaaaagcaagcacgcacctctgacccctaaagaagaggagtacctgcaggcccaggtgcggagcagaagcaagctggacgcccctaaggtggatctgctggtgaagaattgcctcctgcccctgagagagtacttcaagtatttcagccagaatagtctgcccctgggaggcagcggcggcggccagctgcaggagaccatgaccttcaaggacgtggaggtgaccttcagccaggacgagtggggcctgctggacagcgcccagaggaacctgtacagggacgtgatgctggagaactacaggaacatggccttcctggtgggccccttcaccaagcccgccctgatcagctggctggaggccagggagccctggggcctgaacgtgcaggtggcccagcccaagaggaaccccggcgccgcccccggcggcccaagcagcggcgcccctcctcccagcggcggcaggcggcccaagcagcggcgcccctcctcccagcggcggcagcccagccggctccccaacctctaccgaggagggcacctctgagtccgccacccccgagagcggccctggcacctccaccgagcccagcgagggcagcgcacccggcagccctgccggcagccccacctccacagaggagggaaccagcaccgagcccagcgaaggcagcgccccaggcaccagcaccgagcctagtgagcaggagattaaacggatcaacaagatcagaagaagacttgtgaaagacagcaacaccaagaaggccggcaagacaggccccatgaaaaccctgctggttagagtgatgacacccgatctgagagagcggctggaaaacctgagaaagaagcctgaaaatatcccccagcccatcagcaatacatctagagccaacctgaataagctgctgaccgattacaccgaaatgaagaaggcgatcctgcatgtgtactgggaagagttccagaaggaccctgtgggcctgatgagccgggtggcccagcctgccagcaagaagatcgatcagaacaagctgaaacctgagatggacgagaagggcaacctgaccaccgccggctttgcctgctctcagtgtggccagcccctgttcgtgtacaagctggagcaggtgtctgagaagggcaaggcttacaccaactacttcggacggtgcaatgtggccgagcacgaaaagctgatcctgctggcccagctgaagcccgagaaggatagcgacgaagccgtgacatatagcctgggaaagtttgggcagagggccctggatttctacagcattcatgtgaccaaggagtccacccaccccgtgaagcccctggcccagatcgccggaaacagatacgcctccggacctgtgggaaaggccctgagcgacgcatgtatgggcacaatcgcctccttcctgtctaagtaccaggacatcatcatcgaacaccagaaggtggtgaagggcaaccagaagagactggagagcctgcgggagctggccggcaaggaaaacctggaataccctagcgtgaccctgccacctcagcctcacaccaaggagggcgttgatgcctacaacgaagtgatcgcccgggtgcgaatgtgggtgaacctgaacctgtggcagaagctgaagctaagcagagatgatgccaagcctctgctgagactgaagggattcccttcctttcctctggtcgagagacaggccaacgaagtggactggtgggacatggtgtgtaacgtgaagaagctgatcaacgagaaaaaggaggatggcaaggtgttttggcagaatctggctggctacaagagacaggaagccctgagaccatacctgagcagcgaggaagatcggaagaagggaaagaaattcgctcggtaccagctgggcgacctgctgctgcacctggaaaagaagcacggcgaggactggggaaaggtgtacgacgaggcctgggagcggattgacaagaaagtggaaggcctgagcaagcacatcaagctggaagaggaacggagaagcgaggacgcccagagcaaggccgccctgaccgactggctgcgggctaaggccagcttcgtgatcgagggcctgaaggaggccgacaaggacgagttctgcagatgcgagctgaagctgcagaagtggtacggggacctgcggggaaagcccttcgccatcgaagccgagaacagcatcctggacatcagcggcttcagcaagcagtacaactgtgccttcatctggcagaaggacggcgtgaagaagctgaacctgtacctgatcatcaactacttcaagggcggcaagctgcggttcaagaagatcaaacctgaagccttcgaagccaacagattctacaccgtgatcaacaaaaagagcggcgagatcgtgcccatggaggtgaacttcaacttcgacgaccccaacctgatcatcctgcctctggcctttggcaagagacagggcagagaattcatctggaacgacctgctgtccctggaaaccggcagcctgaagctggccaacggaagagtgatcgagaagacactgtacaacagaagaacccggcaggatgagcctgccctgttcgtggccctgaccttcgagcggcgggaggtcctggactcctccaatatcaaaccaatgaacctgatcggcgtggcaagaggcgaaaacatccccgccgtgatcgccctgaccgaccccgagggctgcccactgagccggtttaaggatagcctgggaaacccaacccacatcctgagaatcggcgagagctataaggagaagcagcggaccatccaggccaagaaggaggtggagcagcggagagccggcggctacagccggaagtacgccagcaaagccaagaatctggcagacgatatggtgagaaacaccgctagagatctgctgtactacgccgtgacccaggatgccatgctgatcttcgccaacctgagccggggcttcggccggcagggcaagcggaccttcatggccgagagacagtacacacggatggaggactggctgaccgccaagctggcctacgagggcctgagcaagacctacctgtccaagacactggcccagtacacctccaagacatgcagcaactgtgggtttaccatcaccagcgccgactacgacagggtgctggagaagctgaagaagacagcaacaggctggatgaccacaattaacggcaaggagctgaaggtggagggccagattacctactacaacagatacaagagacagaacgtagtcaaggacctgtccgtcgagctggatagactgagcgaagaatctgtgaacaacgacatctcctcctggacaaagggcagaagcggagaagctctgagcctcctgaagaaaagattctcccatagacccgtgcaggagaagttcgtgtgcctgaactgcggcttcgagacacacgcagccgagcaagccgccctgaacatcgccagatcctggctgttcctgcggagccaggagtacaagaaataccagacaaacaagacaaccggcaacaccgataagagagccttcgtcgagacctggcagtccttttaccggaagaagcttaaggaggtgtggaaacctgccgtgcggtctggcggatctggcggaggctccaccagccccaagaaaaagagaaaagtctaagctgccttctgcggggcttgccttctggccatgcccttcttctctcccttgcacctgtacctcttggtctttgaataaagcctgagtaggaaggctagcaaaaaaaaaaaaaaaaaaaaaaaaaaaaaaaaaaaaaaaaaaaaaaaaaaaaaaaaaaaaaaaaaaaaaaaaaaaaaaaagcccagccggctccccaacctctaccgaggagggcacctctgagtccgccacccccgagagcggccctggcacctccaccgagcccagcgagggcagcgcacccggcagccctgccggcagccccacctccacagaggagggaaccagcaccgagcccagcgaaggcagcgccccaggcaccagcaccgagcctagtgagcaggagattaaacggatcaacaagatcagaagaagacttgtgaaagacagcaacaccaagaaggccggcaagacaggccccatgaaaaccctgctggttagagtgatgacacccgatctgagagagcggctggaaaacctgagaaagaagcctgaaaatatcccccagcccatcagcaatacatctagagccaacctgaataagctgctgaccgattacaccgaaatgaagaaggcgatcctgcatgtgtactgggaagagttccagaaggaccctgtgggcctgatgagccgggtggcccagcctgccagcaagaagatcgatcagaacaagctgaaacctgagatggacgagaagggcaacctgaccaccgccggctttgcctgctctcagtgtggccagcccctgttcgtgtacaagctggagcaggtgtctgagaagggcaaggcttacaccaactacttcggacggtgcaatgtggccgagcacgaaaagctgatcctgctggcccagctgaagcccgagaaggatagcgacgaagccgtgacatatagcctgggaaagtttgggcagagggccctggatttctacagcattcatgtgaccaaggagtccacccaccccgtgaagcccctggcccagatcgccggaaacagatacgcctccggacctgtgggaaaggccctgagcgacgcatgtatgggcacaatcgcctccttcctgtctaagtaccaggacatcatcatcgaacaccagaaggtggtgaagggcaaccagaagagactggagagcctgcgggagctggccggcaaggaaaacctggaataccctagcgtgaccctgccacctcagcctcacaccaaggagggcgttgatgcctacaacgaagtgatcgcccgggtgcgaatgtgggtgaacctgaacctgtggcagaagctgaagctaagcagagatgatgccaagcctctgctgagactgaagggattcccttcctttcctctggtcgagagacaggccaacgaagtggactggtgggacatggtgtgtaacgtgaagaagctgatcaacgagaaaaaggaggatggcaaggtgttttggcagaatctggctggctacaagagacaggaagccctgagaccatacctgagcagcgaggaagatcggaagaagggaaagaaattcgctcggtaccagctgggcgacctgctgctgcacctggaaaagaagcacggcgaggactggggaaaggtgtacgacgaggcctgggagcggattgacaagaaagtggaaggcctgagcaagcacatcaagctggaagaggaacggagaagcgaggacgcccagagcaaggccgccctgaccgactggctgcgggctaaggccagcttcgtgatcgagggcctgaaggaggccgacaaggacgagttctgcagatgcgagctgaagctgcagaagtggtacggggacctgcggggaaagcccttcgccatcgaagccgagaacagcatcctggacatcagcggcttcagcaagcagtacaactgtgccttcatctggcagaaggacggcgtgaagaagctgaacctgtacctgatcatcaactacttcaagggcggcaagctgcggttcaagaagatcaaacctgaagccttcgaagccaacagattctacaccgtgatcaacaaaaagagcggcgagatcgtgcccatggaggtgaacttcaacttcgacgaccccaacctgatcatcctgcctctggcctttggcaagagacagggcagagaattcatctggaacgacctgctgtccctggaaaccggcagcctgaagctggccaacggaagagtgatcgagaagacactgtacaacagaagaacccggcaggatgagcctgccctgttcgtggccctgaccttcgagcggcgggaggtcctggactcctccaatatcaaaccaatgaacctgatcggcgtggcaagaggcgaaaacatccccgccgtgatcgccctgaccgaccccgagggctgcccactgagccggtttaaggatagcctgggaaacccaacccacatcctgagaatcggcgagagctataaggagaagcagcggaccatccaggccaagaaggaggtggagcagcggagagccggcggctacagccggaagtacgccagcaaagccaagaatctggcagacgatatggtgagaaacaccgctagagatctgctgtactacgccgtgacccaggatgccatgctgatcttcgccaacctgagccggggcttcggccggcagggcaagcggaccttcatggccgagagacagtacacacggatggaggactggctgaccgccaagctggcctacgagggcctgagcaagacctacctgtccaagacactggcccagtacacctccaagacatgcagcaactgtgggtttaccatcaccagcgccgactacgacagggtgctggagaagctgaagaagacagcaacaggctggatgaccacaattaacggcaaggagctgaaggtggagggccagattacctactacaacagatacaagagacagaacgtagtcaaggacctgtccgtcgagctggatagactgagcgaagaatctgtgaacaacgacatctcctcctggacaaagggcagaagcggagaagctctgagcctcctgaagaaaagattctcccatagacccgtgcaggagaagttcgtgtgcctgaactgcggcttcgagacacacgcagccgagcaagccgccctgaacatcgccagatcctggctgttcctgcggagccaggagtacaagaaataccagacaaacaagacaaccggcaacaccgataagagagccttcgtcgagacctggcagtccttttaccggaagaagcttaaggaggtgtggaaacctgccgtgcggtctggcggatctggcggaggctccaccagccccaagaaaaagagaaaagtctaagctgccttctgcggggcttgccttctggccatgcccttcttctctcccttgcacctgtacctcttggtctttgaataaagcctgagtaggaaggctagcaaaaaaaaaaaaaaaaaaaaaaaaaaaaaaaaaaaaaaaaaaaaaaaaaaaaaaaaaaaaaaaaaaaaaaaaaaaaaaaa

SEQ ID NO: 10299 - RNA, 8787 nt, synthetic construct
  source 1..8787: mol_type = other RNA
aggaaataagagagaaaagaagagtaagaagaaatataagagccaccatggcccctaagaagaagcgtaaagtgagccggatgaaccacgaccaggagttcgacccccctaaggtgtaccctcccgtccccgccgagaagagaaagcccatccgggtcctgagcctgttcgatggcatcgccaccggtctgctggtgctgaaggacctgggcatccaggtggataggtacattgcctccgaggtgtgcgaggactccatcaccgtgggaatggtgcgtcatcagggcaagatcatgtacgtgggcgacgtgcggagcgtgacacagaagcatatccaggagtggggccctttcgacctggtgatcggcggcagcccttgcaatgacctgagcatcgtgaacccagcccggaagggcctgtacgagggaaccggcagactgttcttcgagttttacagactgctgcacgacgcccggcctaaggaaggcgacgaccggcccttcttttggctgttcgagaatgtggtggccatgggagtcagcgacaagcgggatattagccggttcctggagagcaaccccgtgatgatcgatgccaaggaagtgagcgccgcccaccgggccagatacttctggggcaatctgcctggcatgaacagacccctggccagcaccgtgaacgacaagctggagctgcaggagtgcctggagcacggccggatcgccaagttcagcaaggtgagaaccatcaccacccgaagcaacagcatcaaacaaggcaaggaccagcactttcctgtgttcatgaacgagaaggaggacatcctgtggtgtaccgagatggagagagtgttcgggttcccagtccactacacagatgtcagcaacatgtctagactggccagacagagactgctgggaagaagctggtccgtccctgtgatcagacacctgttcgcccctctgaaggagtacttcgcctgcgtgagcagcggcaacagcaacgccaacagccggggccccagcttctctagcggcctggtgccactgtccctgagagggagccacatgggccccatggagatctacaaaaccgtgagcgcctggaagcggcagcctgtgcgcgtgctgagcctgtttcggaatatcgataaagtcctgaaaagcctgggattcctggagagcggctctggctccggcggtggcaccctgaagtacgtggaggatgtgacaaacgtggtcagacgggatgtggagaagtggggccccttcgatctggtgtacggcagcacccaacccctgggcagctcttgtgaccggtgccctggctggtacatgtttcagttccaccggatcctgcagtacgccctgccgagacaggagtcccagcggccattcttttggattttcatggacaacttgctgctgaccgaggatgaccaggaaactaccactcggttcctgcagaccgaagccgtgaccctgcaggacgtgagaggccgggactaccagaacgccatgcgggtgtggtccaacatccctggactgaaaagcaagcacgcacctctgacccctaaagaagaggagtacctgcaggcccaggtgcggagcagaagcaagctggacgcccctaaggtggatctgctggtgaagaattgcctcctgcccctgagagagtacttcaagtatttcagccagaatagtctgcccctgggaggcagcggcggcggccagatcctggagagcctgaccttccaggacgtggccgtggacttcaccagggaggagtgggaccagctgtaccccgcccagaagaacctgtacagggacgtgatgctggagaactacaggaacctggtggccctgggccaccagctgtacaagcccgaggtgatcacccagctggagcaggaggagaggtggatgatgggcagggtgagcccccccgacacccaccccgacggcgagaacaggggcggcccaagcagcggcgcccctcctcccagcggcggcaggcggcccaagcagcggcgcccctcctcccagcggcggcagcccagccggctccccaacctctaccgaggagggcacctctgagtccgccacccccgagagcggccctggcacctccaccgagcccagcgagggcagcgcacccggcagccctgccggcagccccacctccacagaggagggaaccagcaccgagcccagcgaaggcagcgccccaggcaccagcaccgagcctagtgagcaggagattaaacggatcaacaagatcagaagaagacttgtgaaagacagcaacaccaagaaggccggcaagacaggccccatgaaaaccctgctggttagagtgatgacacccgatctgagagagcggctggaaaacctgagaaagaagcctgaaaatatcccccagcccatcagcaatacatctagagccaacctgaataagctgctgaccgattacaccgaaatgaagaaggcgatcctgcatgtgtactgggaagagttccagaaggaccctgtgggcctgatgagccgggtggcccagcctgccagcaagaagatcgatcagaacaagctgaaacctgagatggacgagaagggcaacctgaccaccgccggctttgcctgctctcagtgtggccagcccctgttcgtgtacaagctggagcaggtgtctgagaagggcaaggcttacaccaactacttcggacggtgcaatgtggccgagcacgaaaagctgatcctgctggcccagctgaagcccgagaaggatagcgacgaagccgtgacatatagcctgggaaagtttgggcagagggccctggatttctacagcattcatgtgaccaaggagtccacccaccccgtgaagcccctggcccagatcgccggaaacagatacgcctccggacctgtgggaaaggccctgagcgacgcatgtatgggcacaatcgcctccttcctgtctaagtaccaggacatcatcatcgaacaccagaaggtggtgaagggcaaccagaagagactggagagcctgcgggagctggccggcaaggaaaacctggaataccctagcgtgaccctgccacctcagcctcacaccaaggagggcgttgatgcctacaacgaagtgatcgcccgggtgcgaatgtgggtgaacctgaacctgtggcagaagctgaagctaagcagagatgatgccaagcctctgctgagactgaagggattcccttcctttcctctggtcgagagacaggccaacgaagtggactggtgggacatggtgtgtaacgtgaagaagctgatcaacgagaaaaaggaggatggcaaggtgttttggcagaatctggctggctacaagagacaggaagccctgagaccatacctgagcagcgaggaagatcggaagaagggaaagaaattcgctcggtaccagctgggcgacctgctgctgcacctggaaaagaagcacggcgaggactggggaaaggtgtacgacgaggcctgggagcggattgacaagaaagtggaaggcctgagcaagcacatcaagctggaagaggaacggagaagcgaggacgcccagagcaaggccgccctgaccgactggctgcgggctaaggccagcttcgtgatcgagggcctgaaggaggccgacaaggacgagttctgcagatgcgagctgaagctgcagaagtggtacggggacctgcggggaaagcccttcgccatcgaagccgagaacagcatcctggacatcagcggcttcagcaagcagtacaactgtgccttcatctggcagaaggacggcgtgaagaagctgaacctgtacctgatcatcaactacttcaagggcggcaagctgcggttcaagaagatcaaacctgaagccttcgaagccaacagattctacaccgtgatcaacaaaaagagcggcgagatcgtgcccatggaggtgaacttcaacttcgacgaccccaacctgatcatcctgcctctggcctttggcaagagacagggcagagaattcatctggaacgacctgctgtccctggaaaccggcagcctgaagctggccaacggaagagtgatcgagaagacactgtacaacagaagaacccggcaggatgagcctgccctgttcgtggccctgaccttcgagcggcgggaggtcctggactcctccaatatcaaaccaatgaacctgatcggcgtggcaagaggcgaaaacatccccgccgtgatcgccctgaccgaccccgagggctgcccactgagccggtttaaggatagcctgggaaacccaacccacatcctgagaatcggcgagagctataaggagaagcagcggaccatccaggccaagaaggaggtggagcagcggagagccggcggctacagccggaagtacgccagcaaagccaagaatctggcagacgatatggtgagaaacaccgctagagatctgctgtactacgccgtgacccaggatgccatgctgatcttcgccaacctgagccggggcttcggccggcagggcaagcggaccttcatggccgagagacagtacacacggatggaggactggctgaccgccaagctggcctacgagggcctgagcaagacctacctgtccaagacactggcccagtacacctccaagacatgcagcaactgtgggtttaccatcaccagcgccgactacgacagggtgctggagaagctgaagaagacagcaacaggctggatgaccacaattaacggcaaggagctgaaggtggagggccagattacctactacaacagatacaagagacagaacgtagtcaaggacctgtccgtcgagctggatagactgagcgaagaatctgtgaacaacgacatctcctcctggacaaagggcagaagcggagaagctctgagcctcctgaagaaaagattctcccatagacccgtgcaggagaagttcgtgtgcctgaactgcggcttcgagacacacgcagccgagcaagccgccctgaacatcgccagatcctggctgttcctgcggagccaggagtacaagaaataccagacaaacaagacaaccggcaacaccgataagagagccttcgtcgagacctggcagtccttttaccggaagaagcttaaggaggtgtggaaacctgccgtgcggtctggcggatctggcggaggctccaccagccccaagaaaaagagaaaagtctaagctgccttctgcggggcttgccttctggccatgcccttcttctctcccttgcacctgtacctcttggtctttgaataaagcctgagtaggaaggctagcaaaaaaaaaaaaaaaaaaaaaaaaaaaaaaaaaaaaaaaaaaaaaaaaaaaaaaaaaaaaaaaaaaaaaaaaaaaaaaaagcccagccggctccccaacctctaccgaggagggcacctctgagtccgccacccccgagagcggccctggcacctccaccgagcccagcgagggcagcgcacccggcagccctgccggcagccccacctccacagaggagggaaccagcaccgagcccagcgaaggcagcgccccaggcaccagcaccgagcctagtgagcaggagattaaacggatcaacaagatcagaagaagacttgtgaaagacagcaacaccaagaaggccggcaagacaggccccatgaaaaccctgctggttagagtgatgacacccgatctgagagagcggctggaaaacctgagaaagaagcctgaaaatatcccccagcccatcagcaatacatctagagccaacctgaataagctgctgaccgattacaccgaaatgaagaaggcgatcctgcatgtgtactgggaagagttccagaaggaccctgtgggcctgatgagccgggtggcccagcctgccagcaagaagatcgatcagaacaagctgaaacctgagatggacgagaagggcaacctgaccaccgccggctttgcctgctctcagtgtggccagcccctgttcgtgtacaagctggagcaggtgtctgagaagggcaaggcttacaccaactacttcggacggtgcaatgtggccgagcacgaaaagctgatcctgctggcccagctgaagcccgagaaggatagcgacgaagccgtgacatatagcctgggaaagtttgggcagagggccctggatttctacagcattcatgtgaccaaggagtccacccaccccgtgaagcccctggcccagatcgccggaaacagatacgcctccggacctgtgggaaaggccctgagcgacgcatgtatgggcacaatcgcctccttcctgtctaagtaccaggacatcatcatcgaacaccagaaggtggtgaagggcaaccagaagagactggagagcctgcgggagctggccggcaaggaaaacctggaataccctagcgtgaccctgccacctcagcctcacaccaaggagggcgttgatgcctacaacgaagtgatcgcccgggtgcgaatgtgggtgaacctgaacctgtggcagaagctgaagctaagcagagatgatgccaagcctctgctgagactgaagggattcccttcctttcctctggtcgagagacaggccaacgaagtggactggtgggacatggtgtgtaacgtgaagaagctgatcaacgagaaaaaggaggatggcaaggtgttttggcagaatctggctggctacaagagacaggaagccctgagaccatacctgagcagcgaggaagatcggaagaagggaaagaaattcgctcggtaccagctgggcgacctgctgctgcacctggaaaagaagcacggcgaggactggggaaaggtgtacgacgaggcctgggagcggattgacaagaaagtggaaggcctgagcaagcacatcaagctggaagaggaacggagaagcgaggacgcccagagcaaggccgccctgaccgactggctgcgggctaaggccagcttcgtgatcgagggcctgaaggaggccgacaaggacgagttctgcagatgcgagctgaagctgcagaagtggtacggggacctgcggggaaagcccttcgccatcgaagccgagaacagcatcctggacatcagcggcttcagcaagcagtacaactgtgccttcatctggcagaaggacggcgtgaagaagctgaacctgtacctgatcatcaactacttcaagggcggcaagctgcggttcaagaagatcaaacctgaagccttcgaagccaacagattctacaccgtgatcaacaaaaagagcggcgagatcgtgcccatggaggtgaacttcaacttcgacgaccccaacctgatcatcctgcctctggcctttggcaagagacagggcagagaattcatctggaacgacctgctgtccctggaaaccggcagcctgaagctggccaacggaagagtgatcgagaagacactgtacaacagaagaacccggcaggatgagcctgccctgttcgtggccctgaccttcgagcggcgggaggtcctggactcctccaatatcaaaccaatgaacctgatcggcgtggcaagaggcgaaaacatccccgccgtgatcgccctgaccgaccccgagggctgcccactgagccggtttaaggatagcctgggaaacccaacccacatcctgagaatcggcgagagctataaggagaagcagcggaccatccaggccaagaaggaggtggagcagcggagagccggcggctacagccggaagtacgccagcaaagccaagaatctggcagacgatatggtgagaaacaccgctagagatctgctgtactacgccgtgacccaggatgccatgctgatcttcgccaacctgagccggggcttcggccggcagggcaagcggaccttcatggccgagagacagtacacacggatggaggactggctgaccgccaagctggcctacgagggcctgagcaagacctacctgtccaagacactggcccagtacacctccaagacatgcagcaactgtgggtttaccatcaccagcgccgactacgacagggtgctggagaagctgaagaagacagcaacaggctggatgaccacaattaacggcaaggagctgaaggtggagggccagattacctactacaacagatacaagagacagaacgtagtcaaggacctgtccgtcgagctggatagactgagcgaagaatctgtgaacaacgacatctcctcctggacaaagggcagaagcggagaagctctgagcctcctgaagaaaagattctcccatagacccgtgcaggagaagttcgtgtgcctgaactgcggcttcgagacacacgcagccgagcaagccgccctgaacatcgccagatcctggctgttcctgcggagccaggagtacaagaaataccagacaaacaagacaaccggcaacaccgataagagagccttcgtcgagacctggcagtccttttaccggaagaagcttaaggaggtgtggaaacctgccgtgcggtctggcggatctggcggaggctccaccagccccaagaaaaagagaaaagtctaagctgccttctgcggggcttgccttctggccatgcccttcttctctcccttgcacctgtacctcttggtctttgaataaagcctgagtaggaaggctagcaaaaaaaaaaaaaaaaaaaaaaaaaaaaaaaaaaaaaaaaaaaaaaaaaaaaaaaaaaaaaaaaaaaaaaaaaaaaaaaa

SEQ ID NO: 10300 - RNA, 8787 nt, synthetic construct
  source 1..8787: mol_type = other RNA
aggaaataagagagaaaagaagagtaagaagaaatataagagccaccatggcccctaagaagaagcgtaaagtgagccggatgaaccacgaccaggagttcgacccccctaaggtgtaccctcccgtccccgccgagaagagaaagcccatccgggtcctgagcctgttcgatggcatcgccaccggtctgctggtgctgaaggacctgggcatccaggtggataggtacattgcctccgaggtgtgcgaggactccatcaccgtgggaatggtgcgtcatcagggcaagatcatgtacgtgggcgacgtgcggagcgtgacacagaagcatatccaggagtggggccctttcgacctggtgatcggcggcagcccttgcaatgacctgagcatcgtgaacccagcccggaagggcctgtacgagggaaccggcagactgttcttcgagttttacagactgctgcacgacgcccggcctaaggaaggcgacgaccggcccttcttttggctgttcgagaatgtggtggccatgggagtcagcgacaagcgggatattagccggttcctggagagcaaccccgtgatgatcgatgccaaggaagtgagcgccgcccaccgggccagatacttctggggcaatctgcctggcatgaacagacccctggccagcaccgtgaacgacaagctggagctgcaggagtgcctggagcacggccggatcgccaagttcagcaaggtgagaaccatcaccacccgaagcaacagcatcaaacaaggcaaggaccagcactttcctgtgttcatgaacgagaaggaggacatcctgtggtgtaccgagatggagagagtgttcgggttcccagtccactacacagatgtcagcaacatgtctagactggccagacagagactgctgggaagaagctggtccgtccctgtgatcagacacctgttcgcccctctgaaggagtacttcgcctgcgtgagcagcggcaacagcaacgccaacagccggggccccagcttctctagcggcctggtgccactgtccctgagagggagccacatgggccccatggagatctacaaaaccgtgagcgcctggaagcggcagcctgtgcgcgtgctgagcctgtttcggaatatcgataaagtcctgaaaagcctgggattcctggagagcggctctggctccggcggtggcaccctgaagtacgtggaggatgtgacaaacgtggtcagacgggatgtggagaagtggggccccttcgatctggtgtacggcagcacccaacccctgggcagctcttgtgaccggtgccctggctggtacatgtttcagttccaccggatcctgcagtacgccctgccgagacaggagtcccagcggccattcttttggattttcatggacaacttgctgctgaccgaggatgaccaggaaactaccactcggttcctgcagaccgaagccgtgaccctgcaggacgtgagaggccgggactaccagaacgccatgcgggtgtggtccaacatccctggactgaaaagcaagcacgcacctctgacccctaaagaagaggagtacctgcaggcccaggtgcggagcagaagcaagctggacgcccctaaggtggatctgctggtgaagaattgcctcctgcccctgagagagtacttcaagtatttcagccagaatagtctgcccctgggaggcagcggcggcggcatggccttcatggacgtggccgtggacttcacccaggaggagtggaggctgctgagccccgcccagaggaccctgtacagggaggtgatgctggagaactacagcaacctggtgagcctgggcatccccttcagcaagcccaagctgatcaccctgctggagcaggagaaggtgacctggagggagaagaggaagtgccccctggccacctgccccgccgagcccgagcccgagcccgagctgggcggcccaagcagcggcgcccctcctcccagcggcggcaggcggcccaagcagcggcgcccctcctcccagcggcggcagcccagccggctccccaacctctaccgaggagggcacctctgagtccgccacccccgagagcggccctggcacctccaccgagcccagcgagggcagcgcacccggcagccctgccggcagccccacctccacagaggagggaaccagcaccgagcccagcgaaggcagcgccccaggcaccagcaccgagcctagtgagcaggagattaaacggatcaacaagatcagaagaagacttgtgaaagacagcaacaccaagaaggccggcaagacaggccccatgaaaaccctgctggttagagtgatgacacccgatctgagagagcggctggaaaacctgagaaagaagcctgaaaatatcccccagcccatcagcaatacatctagagccaacctgaataagctgctgaccgattacaccgaaatgaagaaggcgatcctgcatgtgtactgggaagagttccagaaggaccctgtgggcctgatgagccgggtggcccagcctgccagcaagaagatcgatcagaacaagctgaaacctgagatggacgagaagggcaacctgaccaccgccggctttgcctgctctcagtgtggccagcccctgttcgtgtacaagctggagcaggtgtctgagaagggcaaggcttacaccaactacttcggacggtgcaatgtggccgagcacgaaaagctgatcctgctggcccagctgaagcccgagaaggatagcgacgaagccgtgacatatagcctgggaaagtttgggcagagggccctggatttctacagcattcatgtgaccaaggagtccacccaccccgtgaagcccctggcccagatcgccggaaacagatacgcctccggacctgtgggaaaggccctgagcgacgcatgtatgggcacaatcgcctccttcctgtctaagtaccaggacatcatcatcgaacaccagaaggtggtgaagggcaaccagaagagactggagagcctgcgggagctggccggcaaggaaaacctggaataccctagcgtgaccctgccacctcagcctcacaccaaggagggcgttgatgcctacaacgaagtgatcgcccgggtgcgaatgtgggtgaacctgaacctgtggcagaagctgaagctaagcagagatgatgccaagcctctgctgagactgaagggattcccttcctttcctctggtcgagagacaggccaacgaagtggactggtgggacatggtgtgtaacgtgaagaagctgatcaacgagaaaaaggaggatggcaaggtgttttggcagaatctggctggctacaagagacaggaagccctgagaccatacctgagcagcgaggaagatcggaagaagggaaagaaattcgctcggtaccagctgggcgacctgctgctgcacctggaaaagaagcacggcgaggactggggaaaggtgtacgacgaggcctgggagcggattgacaagaaagtggaaggcctgagcaagcacatcaagctggaagaggaacggagaagcgaggacgcccagagcaaggccgccctgaccgactggctgcgggctaaggccagcttcgtgatcgagggcctgaaggaggccgacaaggacgagttctgcagatgcgagctgaagctgcagaagtggtacggggacctgcggggaaagcccttcgccatcgaagccgagaacagcatcctggacatcagcggcttcagcaagcagtacaactgtgccttcatctggcagaaggacggcgtgaagaagctgaacctgtacctgatcatcaactacttcaagggcggcaagctgcggttcaagaagatcaaacctgaagccttcgaagccaacagattctacaccgtgatcaacaaaaagagcggcgagatcgtgcccatggaggtgaacttcaacttcgacgaccccaacctgatcatcctgcctctggcctttggcaagagacagggcagagaattcatctggaacgacctgctgtccctggaaaccggcagcctgaagctggccaacggaagagtgatcgagaagacactgtacaacagaagaacccggcaggatgagcctgccctgttcgtggccctgaccttcgagcggcgggaggtcctggactcctccaatatcaaaccaatgaacctgatcggcgtggcaagaggcgaaaacatccccgccgtgatcgccctgaccgaccccgagggctgcccactgagccggtttaaggatagcctgggaaacccaacccacatcctgagaatcggcgagagctataaggagaagcagcggaccatccaggccaagaaggaggtggagcagcggagagccggcggctacagccggaagtacgccagcaaagccaagaatctggcagacgatatggtgagaaacaccgctagagatctgctgtactacgccgtgacccaggatgccatgctgatcttcgccaacctgagccggggcttcggccggcagggcaagcggaccttcatggccgagagacagtacacacggatggaggactggctgaccgccaagctggcctacgagggcctgagcaagacctacctgtccaagacactggcccagtacacctccaagacatgcagcaactgtgggtttaccatcaccagcgccgactacgacagggtgctggagaagctgaagaagacagcaacaggctggatgaccacaattaacggcaaggagctgaaggtggagggccagattacctactacaacagatacaagagacagaacgtagtcaaggacctgtccgtcgagctggatagactgagcgaagaatctgtgaacaacgacatctcctcctggacaaagggcagaagcggagaagctctgagcctcctgaagaaaagattctcccatagacccgtgcaggagaagttcgtgtgcctgaactgcggcttcgagacacacgcagccgagcaagccgccctgaacatcgccagatcctggctgttcctgcggagccaggagtacaagaaataccagacaaacaagacaaccggcaacaccgataagagagccttcgtcgagacctggcagtccttttaccggaagaagcttaaggaggtgtggaaacctgccgtgcggtctggcggatctggcggaggctccaccagccccaagaaaaagagaaaagtctaagctgccttctgcggggcttgccttctggccatgcccttcttctctcccttgcacctgtacctcttggtctttgaataaagcctgagtaggaaggctagcaaaaaaaaaaaaaaaaaaaaaaaaaaaaaaaaaaaaaaaaaaaaaaaaaaaaaaaaaaaaaaaaaaaaaaaaaaaaaaaagcccagccggctccccaacctctaccgaggagggcacctctgagtccgccacccccgagagcggccctggcacctccaccgagcccagcgagggcagcgcacccggcagccctgccggcagccccacctccacagaggagggaaccagcaccgagcccagcgaaggcagcgccccaggcaccagcaccgagcctagtgagcaggagattaaacggatcaacaagatcagaagaagacttgtgaaagacagcaacaccaagaaggccggcaagacaggccccatgaaaaccctgctggttagagtgatgacacccgatctgagagagcggctggaaaacctgagaaagaagcctgaaaatatcccccagcccatcagcaatacatctagagccaacctgaataagctgctgaccgattacaccgaaatgaagaaggcgatcctgcatgtgtactgggaagagttccagaaggaccctgtgggcctgatgagccgggtggcccagcctgccagcaagaagatcgatcagaacaagctgaaacctgagatggacgagaagggcaacctgaccaccgccggctttgcctgctctcagtgtggccagcccctgttcgtgtacaagctggagcaggtgtctgagaagggcaaggcttacaccaactacttcggacggtgcaatgtggccgagcacgaaaagctgatcctgctggcccagctgaagcccgagaaggatagcgacgaagccgtgacatatagcctgggaaagtttgggcagagggccctggatttctacagcattcatgtgaccaaggagtccacccaccccgtgaagcccctggcccagatcgccggaaacagatacgcctccggacctgtgggaaaggccctgagcgacgcatgtatgggcacaatcgcctccttcctgtctaagtaccaggacatcatcatcgaacaccagaaggtggtgaagggcaaccagaagagactggagagcctgcgggagctggccggcaaggaaaacctggaataccctagcgtgaccctgccacctcagcctcacaccaaggagggcgttgatgcctacaacgaagtgatcgcccgggtgcgaatgtgggtgaacctgaacctgtggcagaagctgaagctaagcagagatgatgccaagcctctgctgagactgaagggattcccttcctttcctctggtcgagagacaggccaacgaagtggactggtgggacatggtgtgtaacgtgaagaagctgatcaacgagaaaaaggaggatggcaaggtgttttggcagaatctggctggctacaagagacaggaagccctgagaccatacctgagcagcgaggaagatcggaagaagggaaagaaattcgctcggtaccagctgggcgacctgctgctgcacctggaaaagaagcacggcgaggactggggaaaggtgtacgacgaggcctgggagcggattgacaagaaagtggaaggcctgagcaagcacatcaagctggaagaggaacggagaagcgaggacgcccagagcaaggccgccctgaccgactggctgcgggctaaggccagcttcgtgatcgagggcctgaaggaggccgacaaggacgagttctgcagatgcgagctgaagctgcagaagtggtacggggacctgcggggaaagcccttcgccatcgaagccgagaacagcatcctggacatcagcggcttcagcaagcagtacaactgtgccttcatctggcagaaggacggcgtgaagaagctgaacctgtacctgatcatcaactacttcaagggcggcaagctgcggttcaagaagatcaaacctgaagccttcgaagccaacagattctacaccgtgatcaacaaaaagagcggcgagatcgtgcccatggaggtgaacttcaacttcgacgaccccaacctgatcatcctgcctctggcctttggcaagagacagggcagagaattcatctggaacgacctgctgtccctggaaaccggcagcctgaagctggccaacggaagagtgatcgagaagacactgtacaacagaagaacccggcaggatgagcctgccctgttcgtggccctgaccttcgagcggcgggaggtcctggactcctccaatatcaaaccaatgaacctgatcggcgtggcaagaggcgaaaacatccccgccgtgatcgccctgaccgaccccgagggctgcccactgagccggtttaaggatagcctgggaaacccaacccacatcctgagaatcggcgagagctataaggagaagcagcggaccatccaggccaagaaggaggtggagcagcggagagccggcggctacagccggaagtacgccagcaaagccaagaatctggcagacgatatggtgagaaacaccgctagagatctgctgtactacgccgtgacccaggatgccatgctgatcttcgccaacctgagccggggcttcggccggcagggcaagcggaccttcatggccgagagacagtacacacggatggaggactggctgaccgccaagctggcctacgagggcctgagcaagacctacctgtccaagacactggcccagtacacctccaagacatgcagcaactgtgggtttaccatcaccagcgccgactacgacagggtgctggagaagctgaagaagacagcaacaggctggatgaccacaattaacggcaaggagctgaaggtggagggccagattacctactacaacagatacaagagacagaacgtagtcaaggacctgtccgtcgagctggatagactgagcgaagaatctgtgaacaacgacatctcctcctggacaaagggcagaagcggagaagctctgagcctcctgaagaaaagattctcccatagacccgtgcaggagaagttcgtgtgcctgaactgcggcttcgagacacacgcagccgagcaagccgccctgaacatcgccagatcctggctgttcctgcggagccaggagtacaagaaataccagacaaacaagacaaccggcaacaccgataagagagccttcgtcgagacctggcagtccttttaccggaagaagcttaaggaggtgtggaaacctgccgtgcggtctggcggatctggcggaggctccaccagccccaagaaaaagagaaaagtctaagctgccttctgcggggcttgccttctggccatgcccttcttctctcccttgcacctgtacctcttggtctttgaataaagcctgagtaggaaggctagcaaaaaaaaaaaaaaaaaaaaaaaaaaaaaaaaaaaaaaaaaaaaaaaaaaaaaaaaaaaaaaaaaaaaaaaaaaaaaaaa

SEQ ID NO: 10301 - RNA, 8787 nt, synthetic construct
  source 1..8787: mol_type = other RNA
aggaaataagagagaaaagaagagtaagaagaaatataagagccaccatggcccctaagaagaagcgtaaagtgagccggatgaaccacgaccaggagttcgacccccctaaggtgtaccctcccgtccccgccgagaagagaaagcccatccgggtcctgagcctgttcgatggcatcgccaccggtctgctggtgctgaaggacctgggcatccaggtggataggtacattgcctccgaggtgtgcgaggactccatcaccgtgggaatggtgcgtcatcagggcaagatcatgtacgtgggcgacgtgcggagcgtgacacagaagcatatccaggagtggggccctttcgacctggtgatcggcggcagcccttgcaatgacctgagcatcgtgaacccagcccggaagggcctgtacgagggaaccggcagactgttcttcgagttttacagactgctgcacgacgcccggcctaaggaaggcgacgaccggcccttcttttggctgttcgagaatgtggtggccatgggagtcagcgacaagcgggatattagccggttcctggagagcaaccccgtgatgatcgatgccaaggaagtgagcgccgcccaccgggccagatacttctggggcaatctgcctggcatgaacagacccctggccagcaccgtgaacgacaagctggagctgcaggagtgcctggagcacggccggatcgccaagttcagcaaggtgagaaccatcaccacccgaagcaacagcatcaaacaaggcaaggaccagcactttcctgtgttcatgaacgagaaggaggacatcctgtggtgtaccgagatggagagagtgttcgggttcccagtccactacacagatgtcagcaacatgtctagactggccagacagagactgctgggaagaagctggtccgtccctgtgatcagacacctgttcgcccctctgaaggagtacttcgcctgcgtgagcagcggcaacagcaacgccaacagccggggccccagcttctctagcggcctggtgccactgtccctgagagggagccacatgggccccatggagatctacaaaaccgtgagcgcctggaagcggcagcctgtgcgcgtgctgagcctgtttcggaatatcgataaagtcctgaaaagcctgggattcctggagagcggctctggctccggcggtggcaccctgaagtacgtggaggatgtgacaaacgtggtcagacgggatgtggagaagtggggccccttcgatctggtgtacggcagcacccaacccctgggcagctcttgtgaccggtgccctggctggtacatgtttcagttccaccggatcctgcagtacgccctgccgagacaggagtcccagcggccattcttttggattttcatggacaacttgctgctgaccgaggatgaccaggaaactaccactcggttcctgcagaccgaagccgtgaccctgcaggacgtgagaggccgggactaccagaacgccatgcgggtgtggtccaacatccctggactgaaaagcaagcacgcacctctgacccctaaagaagaggagtacctgcaggcccaggtgcggagcagaagcaagctggacgcccctaaggtggatctgctggtgaagaattgcctcctgcccctgagagagtacttcaagtatttcagccagaatagtctgcccctgggaggcagcggcggcggcaggcccggcgccgtgagcttcgccgacgtggccgtgtacttcagccccgaggagtgggagtgcctgaggcccgcccagagggccctgtacagggacgtgatgagggagaccttcggccacctgggcgccctgggcttcagcggccccaagcccgccttcatcagctgggtggagggcgaggtggaggcctggagccccgagagccaggaccccgacggcgagagcagcgccgccttcagcaggggcggcccaagcagcggcgcccctcctcccagcggcggcaggcggcccaagcagcggcgcccctcctcccagcggcggcagcccagccggctccccaacctctaccgaggagggcacctctgagtccgccacccccgagagcggccctggcacctccaccgagcccagcgagggcagcgcacccggcagccctgccggcagccccacctccacagaggagggaaccagcaccgagcccagcgaaggcagcgccccaggcaccagcaccgagcctagtgagcaggagattaaacggatcaacaagatcagaagaagacttgtgaaagacagcaacaccaagaaggccggcaagacaggccccatgaaaaccctgctggttagagtgatgacacccgatctgagagagcggctggaaaacctgagaaagaagcctgaaaatatcccccagcccatcagcaatacatctagagccaacctgaataagctgctgaccgattacaccgaaatgaagaaggcgatcctgcatgtgtactgggaagagttccagaaggaccctgtgggcctgatgagccgggtggcccagcctgccagcaagaagatcgatcagaacaagctgaaacctgagatggacgagaagggcaacctgaccaccgccggctttgcctgctctcagtgtggccagcccctgttcgtgtacaagctggagcaggtgtctgagaagggcaaggcttacaccaactacttcggacggtgcaatgtggccgagcacgaaaagctgatcctgctggcccagctgaagcccgagaaggatagcgacgaagccgtgacatatagcctgggaaagtttgggcagagggccctggatttctacagcattcatgtgaccaaggagtccacccaccccgtgaagcccctggcccagatcgccggaaacagatacgcctccggacctgtgggaaaggccctgagcgacgcatgtatgggcacaatcgcctccttcctgtctaagtaccaggacatcatcatcgaacaccagaaggtggtgaagggcaaccagaagagactggagagcctgcgggagctggccggcaaggaaaacctggaataccctagcgtgaccctgccacctcagcctcacaccaaggagggcgttgatgcctacaacgaagtgatcgcccgggtgcgaatgtgggtgaacctgaacctgtggcagaagctgaagctaagcagagatgatgccaagcctctgctgagactgaagggattcccttcctttcctctggtcgagagacaggccaacgaagtggactggtgggacatggtgtgtaacgtgaagaagctgatcaacgagaaaaaggaggatggcaaggtgttttggcagaatctggctggctacaagagacaggaagccctgagaccatacctgagcagcgaggaagatcggaagaagggaaagaaattcgctcggtaccagctgggcgacctgctgctgcacctggaaaagaagcacggcgaggactggggaaaggtgtacgacgaggcctgggagcggattgacaagaaagtggaaggcctgagcaagcacatcaagctggaagaggaacggagaagcgaggacgcccagagcaaggccgccctgaccgactggctgcgggctaaggccagcttcgtgatcgagggcctgaaggaggccgacaaggacgagttctgcagatgcgagctgaagctgcagaagtggtacggggacctgcggggaaagcccttcgccatcgaagccgagaacagcatcctggacatcagcggcttcagcaagcagtacaactgtgccttcatctggcagaaggacggcgtgaagaagctgaacctgtacctgatcatcaactacttcaagggcggcaagctgcggttcaagaagatcaaacctgaagccttcgaagccaacagattctacaccgtgatcaacaaaaagagcggcgagatcgtgcccatggaggtgaacttcaacttcgacgaccccaacctgatcatcctgcctctggcctttggcaagagacagggcagagaattcatctggaacgacctgctgtccctggaaaccggcagcctgaagctggccaacggaagagtgatcgagaagacactgtacaacagaagaacccggcaggatgagcctgccctgttcgtggccctgaccttcgagcggcgggaggtcctggactcctccaatatcaaaccaatgaacctgatcggcgtggcaagaggcgaaaacatccccgccgtgatcgccctgaccgaccccgagggctgcccactgagccggtttaaggatagcctgggaaacccaacccacatcctgagaatcggcgagagctataaggagaagcagcggaccatccaggccaagaaggaggtggagcagcggagagccggcggctacagccggaagtacgccagcaaagccaagaatctggcagacgatatggtgagaaacaccgctagagatctgctgtactacgccgtgacccaggatgccatgctgatcttcgccaacctgagccggggcttcggccggcagggcaagcggaccttcatggccgagagacagtacacacggatggaggactggctgaccgccaagctggcctacgagggcctgagcaagacctacctgtccaagacactggcccagtacacctccaagacatgcagcaactgtgggtttaccatcaccagcgccgactacgacagggtgctggagaagctgaagaagacagcaacaggctggatgaccacaattaacggcaaggagctgaaggtggagggccagattacctactacaacagatacaagagacagaacgtagtcaaggacctgtccgtcgagctggatagactgagcgaagaatctgtgaacaacgacatctcctcctggacaaagggcagaagcggagaagctctgagcctcctgaagaaaagattctcccatagacccgtgcaggagaagttcgtgtgcctgaactgcggcttcgagacacacgcagccgagcaagccgccctgaacatcgccagatcctggctgttcctgcggagccaggagtacaagaaataccagacaaacaagacaaccggcaacaccgataagagagccttcgtcgagacctggcagtccttttaccggaagaagcttaaggaggtgtggaaacctgccgtgcggtctggcggatctggcggaggctccaccagccccaagaaaaagagaaaagtctaagctgccttctgcggggcttgccttctggccatgcccttcttctctcccttgcacctgtacctcttggtctttgaataaagcctgagtaggaaggctagcaaaaaaaaaaaaaaaaaaaaaaaaaaaaaaaaaaaaaaaaaaaaaaaaaaaaaaaaaaaaaaaaaaaaaaaaaaaaaaaagcccagccggctccccaacctctaccgaggagggcacctctgagtccgccacccccgagagcggccctggcacctccaccgagcccagcgagggcagcgcacccggcagccctgccggcagccccacctccacagaggagggaaccagcaccgagcccagcgaaggcagcgccccaggcaccagcaccgagcctagtgagcaggagattaaacggatcaacaagatcagaagaagacttgtgaaagacagcaacaccaagaaggccggcaagacaggccccatgaaaaccctgctggttagagtgatgacacccgatctgagagagcggctggaaaacctgagaaagaagcctgaaaatatcccccagcccatcagcaatacatctagagccaacctgaataagctgctgaccgattacaccgaaatgaagaaggcgatcctgcatgtgtactgggaagagttccagaaggaccctgtgggcctgatgagccgggtggcccagcctgccagcaagaagatcgatcagaacaagctgaaacctgagatggacgagaagggcaacctgaccaccgccggctttgcctgctctcagtgtggccagcccctgttcgtgtacaagctggagcaggtgtctgagaagggcaaggcttacaccaactacttcggacggtgcaatgtggccgagcacgaaaagctgatcctgctggcccagctgaagcccgagaaggatagcgacgaagccgtgacatatagcctgggaaagtttgggcagagggccctggatttctacagcattcatgtgaccaaggagtccacccaccccgtgaagcccctggcccagatcgccggaaacagatacgcctccggacctgtgggaaaggccctgagcgacgcatgtatgggcacaatcgcctccttcctgtctaagtaccaggacatcatcatcgaacaccagaaggtggtgaagggcaaccagaagagactggagagcctgcgggagctggccggcaaggaaaacctggaataccctagcgtgaccctgccacctcagcctcacaccaaggagggcgttgatgcctacaacgaagtgatcgcccgggtgcgaatgtgggtgaacctgaacctgtggcagaagctgaagctaagcagagatgatgccaagcctctgctgagactgaagggattcccttcctttcctctggtcgagagacaggccaacgaagtggactggtgggacatggtgtgtaacgtgaagaagctgatcaacgagaaaaaggaggatggcaaggtgttttggcagaatctggctggctacaagagacaggaagccctgagaccatacctgagcagcgaggaagatcggaagaagggaaagaaattcgctcggtaccagctgggcgacctgctgctgcacctggaaaagaagcacggcgaggactggggaaaggtgtacgacgaggcctgggagcggattgacaagaaagtggaaggcctgagcaagcacatcaagctggaagaggaacggagaagcgaggacgcccagagcaaggccgccctgaccgactggctgcgggctaaggccagcttcgtgatcgagggcctgaaggaggccgacaaggacgagttctgcagatgcgagctgaagctgcagaagtggtacggggacctgcggggaaagcccttcgccatcgaagccgagaacagcatcctggacatcagcggcttcagcaagcagtacaactgtgccttcatctggcagaaggacggcgtgaagaagctgaacctgtacctgatcatcaactacttcaagggcggcaagctgcggttcaagaagatcaaacctgaagccttcgaagccaacagattctacaccgtgatcaacaaaaagagcggcgagatcgtgcccatggaggtgaacttcaacttcgacgaccccaacctgatcatcctgcctctggcctttggcaagagacagggcagagaattcatctggaacgacctgctgtccctggaaaccggcagcctgaagctggccaacggaagagtgatcgagaagacactgtacaacagaagaacccggcaggatgagcctgccctgttcgtggccctgaccttcgagcggcgggaggtcctggactcctccaatatcaaaccaatgaacctgatcggcgtggcaagaggcgaaaacatccccgccgtgatcgccctgaccgaccccgagggctgcccactgagccggtttaaggatagcctgggaaacccaacccacatcctgagaatcggcgagagctataaggagaagcagcggaccatccaggccaagaaggaggtggagcagcggagagccggcggctacagccggaagtacgccagcaaagccaagaatctggcagacgatatggtgagaaacaccgctagagatctgctgtactacgccgtgacccaggatgccatgctgatcttcgccaacctgagccggggcttcggccggcagggcaagcggaccttcatggccgagagacagtacacacggatggaggactggctgaccgccaagctggcctacgagggcctgagcaagacctacctgtccaagacactggcccagtacacctccaagacatgcagcaactgtgggtttaccatcaccagcgccgactacgacagggtgctggagaagctgaagaagacagcaacaggctggatgaccacaattaacggcaaggagctgaaggtggagggccagattacctactacaacagatacaagagacagaacgtagtcaaggacctgtccgtcgagctggatagactgagcgaagaatctgtgaacaacgacatctcctcctggacaaagggcagaagcggagaagctctgagcctcctgaagaaaagattctcccatagacccgtgcaggagaagttcgtgtgcctgaactgcggcttcgagacacacgcagccgagcaagccgccctgaacatcgccagatcctggctgttcctgcggagccaggagtacaagaaataccagacaaacaagacaaccggcaacaccgataagagagccttcgtcgagacctggcagtccttttaccggaagaagcttaaggaggtgtggaaacctgccgtgcggtctggcggatctggcggaggctccaccagccccaagaaaaagagaaaagtctaagctgccttctgcggggcttgccttctggccatgcccttcttctctcccttgcacctgtacctcttggtctttgaataaagcctgagtaggaaggctagcaaaaaaaaaaaaaaaaaaaaaaaaaaaaaaaaaaaaaaaaaaaaaaaaaaaaaaaaaaaaaaaaaaaaaaaaaaaaaaaa

SEQ ID NO: 10302 - RNA, 8787 nt, synthetic construct
  source 1..8787: mol_type = other RNA
aggaaataagagagaaaagaagagtaagaagaaatataagagccaccatggcccctaagaagaagcgtaaagtgagccggatgaaccacgaccaggagttcgacccccctaaggtgtaccctcccgtccccgccgagaagagaaagcccatccgggtcctgagcctgttcgatggcatcgccaccggtctgctggtgctgaaggacctgggcatccaggtggataggtacattgcctccgaggtgtgcgaggactccatcaccgtgggaatggtgcgtcatcagggcaagatcatgtacgtgggcgacgtgcggagcgtgacacagaagcatatccaggagtggggccctttcgacctggtgatcggcggcagcccttgcaatgacctgagcatcgtgaacccagcccggaagggcctgtacgagggaaccggcagactgttcttcgagttttacagactgctgcacgacgcccggcctaaggaaggcgacgaccggcccttcttttggctgttcgagaatgtggtggccatgggagtcagcgacaagcgggatattagccggttcctggagagcaaccccgtgatgatcgatgccaaggaagtgagcgccgcccaccgggccagatacttctggggcaatctgcctggcatgaacagacccctggccagcaccgtgaacgacaagctggagctgcaggagtgcctggagcacggccggatcgccaagttcagcaaggtgagaaccatcaccacccgaagcaacagcatcaaacaaggcaaggaccagcactttcctgtgttcatgaacgagaaggaggacatcctgtggtgtaccgagatggagagagtgttcgggttcccagtccactacacagatgtcagcaacatgtctagactggccagacagagactgctgggaagaagctggtccgtccctgtgatcagacacctgttcgcccctctgaaggagtacttcgcctgcgtgagcagcggcaacagcaacgccaacagccggggccccagcttctctagcggcctggtgccactgtccctgagagggagccacatgggccccatggagatctacaaaaccgtgagcgcctggaagcggcagcctgtgcgcgtgctgagcctgtttcggaatatcgataaagtcctgaaaagcctgggattcctggagagcggctctggctccggcggtggcaccctgaagtacgtggaggatgtgacaaacgtggtcagacgggatgtggagaagtggggccccttcgatctggtgtacggcagcacccaacccctgggcagctcttgtgaccggtgccctggctggtacatgtttcagttccaccggatcctgcagtacgccctgccgagacaggagtcccagcggccattcttttggattttcatggacaacttgctgctgaccgaggatgaccaggaaactaccactcggttcctgcagaccgaagccgtgaccctgcaggacgtgagaggccgggactaccagaacgccatgcgggtgtggtccaacatccctggactgaaaagcaagcacgcacctctgacccctaaagaagaggagtacctgcaggcccaggtgcggagcagaagcaagctggacgcccctaaggtggatctgctggtgaagaattgcctcctgcccctgagagagtacttcaagtatttcagccagaatagtctgcccctgggaggcagcggcggcggcgcccacgccctggtgaccttcagggacgtggccatcgacttcagccagaaggagtgggagtgcctggacaccacccagaggaagctgtacagggacgtgatgctggagaactacagcaacctggtgagcctgggctacagcggcagcaagcccgacgtgatcaccctgctggagcagggcaaggagccctgcgtggccgtgagggacgtgaccggcacccagtaccccggcctgctgagcaggggcggcccaagcagcggcgcccctcctcccagcggcggcaggcggcccaagcagcggcgcccctcctcccagcggcggcagcccagccggctccccaacctctaccgaggagggcacctctgagtccgccacccccgagagcggccctggcacctccaccgagcccagcgagggcagcgcacccggcagccctgccggcagccccacctccacagaggagggaaccagcaccgagcccagcgaaggcagcgccccaggcaccagcaccgagcctagtgagcaggagattaaacggatcaacaagatcagaagaagacttgtgaaagacagcaacaccaagaaggccggcaagacaggccccatgaaaaccctgctggttagagtgatgacacccgatctgagagagcggctggaaaacctgagaaagaagcctgaaaatatcccccagcccatcagcaatacatctagagccaacctgaataagctgctgaccgattacaccgaaatgaagaaggcgatcctgcatgtgtactgggaagagttccagaaggaccctgtgggcctgatgagccgggtggcccagcctgccagcaagaagatcgatcagaacaagctgaaacctgagatggacgagaagggcaacctgaccaccgccggctttgcctgctctcagtgtggccagcccctgttcgtgtacaagctggagcaggtgtctgagaagggcaaggcttacaccaactacttcggacggtgcaatgtggccgagcacgaaaagctgatcctgctggcccagctgaagcccgagaaggatagcgacgaagccgtgacatatagcctgggaaagtttgggcagagggccctggatttctacagcattcatgtgaccaaggagtccacccaccccgtgaagcccctggcccagatcgccggaaacagatacgcctccggacctgtgggaaaggccctgagcgacgcatgtatgggcacaatcgcctccttcctgtctaagtaccaggacatcatcatcgaacaccagaaggtggtgaagggcaaccagaagagactggagagcctgcgggagctggccggcaaggaaaacctggaataccctagcgtgaccctgccacctcagcctcacaccaaggagggcgttgatgcctacaacgaagtgatcgcccgggtgcgaatgtgggtgaacctgaacctgtggcagaagctgaagctaagcagagatgatgccaagcctctgctgagactgaagggattcccttcctttcctctggtcgagagacaggccaacgaagtggactggtgggacatggtgtgtaacgtgaagaagctgatcaacgagaaaaaggaggatggcaaggtgttttggcagaatctggctggctacaagagacaggaagccctgagaccatacctgagcagcgaggaagatcggaagaagggaaagaaattcgctcggtaccagctgggcgacctgctgctgcacctggaaaagaagcacggcgaggactggggaaaggtgtacgacgaggcctgggagcggattgacaagaaagtggaaggcctgagcaagcacatcaagctggaagaggaacggagaagcgaggacgcccagagcaaggccgccctgaccgactggctgcgggctaaggccagcttcgtgatcgagggcctgaaggaggccgacaaggacgagttctgcagatgcgagctgaagctgcagaagtggtacggggacctgcggggaaagcccttcgccatcgaagccgagaacagcatcctggacatcagcggcttcagcaagcagtacaactgtgccttcatctggcagaaggacggcgtgaagaagctgaacctgtacctgatcatcaactacttcaagggcggcaagctgcggttcaagaagatcaaacctgaagccttcgaagccaacagattctacaccgtgatcaacaaaaagagcggcgagatcgtgcccatggaggtgaacttcaacttcgacgaccccaacctgatcatcctgcctctggcctttggcaagagacagggcagagaattcatctggaacgacctgctgtccctggaaaccggcagcctgaagctggccaacggaagagtgatcgagaagacactgtacaacagaagaacccggcaggatgagcctgccctgttcgtggccctgaccttcgagcggcgggaggtcctggactcctccaatatcaaaccaatgaacctgatcggcgtggcaagaggcgaaaacatccccgccgtgatcgccctgaccgaccccgagggctgcccactgagccggtttaaggatagcctgggaaacccaacccacatcctgagaatcggcgagagctataaggagaagcagcggaccatccaggccaagaaggaggtggagcagcggagagccggcggctacagccggaagtacgccagcaaagccaagaatctggcagacgatatggtgagaaacaccgctagagatctgctgtactacgccgtgacccaggatgccatgctgatcttcgccaacctgagccggggcttcggccggcagggcaagcggaccttcatggccgagagacagtacacacggatggaggactggctgaccgccaagctggcctacgagggcctgagcaagacctacctgtccaagacactggcccagtacacctccaagacatgcagcaactgtgggtttaccatcaccagcgccgactacgacagggtgctggagaagctgaagaagacagcaacaggctggatgaccacaattaacggcaaggagctgaaggtggagggccagattacctactacaacagatacaagagacagaacgtagtcaaggacctgtccgtcgagctggatagactgagcgaagaatctgtgaacaacgacatctcctcctggacaaagggcagaagcggagaagctctgagcctcctgaagaaaagattctcccatagacccgtgcaggagaagttcgtgtgcctgaactgcggcttcgagacacacgcagccgagcaagccgccctgaacatcgccagatcctggctgttcctgcggagccaggagtacaagaaataccagacaaacaagacaaccggcaacaccgataagagagccttcgtcgagacctggcagtccttttaccggaagaagcttaaggaggtgtggaaacctgccgtgcggtctggcggatctggcggaggctccaccagccccaagaaaaagagaaaagtctaagctgccttctgcggggcttgccttctggccatgcccttcttctctcccttgcacctgtacctcttggtctttgaataaagcctgagtaggaaggctagcaaaaaaaaaaaaaaaaaaaaaaaaaaaaaaaaaaaaaaaaaaaaaaaaaaaaaaaaaaaaaaaaaaaaaaaaaaaaaaaagcccagccggctccccaacctctaccgaggagggcacctctgagtccgccacccccgagagcggccctggcacctccaccgagcccagcgagggcagcgcacccggcagccctgccggcagccccacctccacagaggagggaaccagcaccgagcccagcgaaggcagcgccccaggcaccagcaccgagcctagtgagcaggagattaaacggatcaacaagatcagaagaagacttgtgaaagacagcaacaccaagaaggccggcaagacaggccccatgaaaaccctgctggttagagtgatgacacccgatctgagagagcggctggaaaacctgagaaagaagcctgaaaatatcccccagcccatcagcaatacatctagagccaacctgaataagctgctgaccgattacaccgaaatgaagaaggcgatcctgcatgtgtactgggaagagttccagaaggaccctgtgggcctgatgagccgggtggcccagcctgccagcaagaagatcgatcagaacaagctgaaacctgagatggacgagaagggcaacctgaccaccgccggctttgcctgctctcagtgtggccagcccctgttcgtgtacaagctggagcaggtgtctgagaagggcaaggcttacaccaactacttcggacggtgcaatgtggccgagcacgaaaagctgatcctgctggcccagctgaagcccgagaaggatagcgacgaagccgtgacatatagcctgggaaagtttgggcagagggccctggatttctacagcattcatgtgaccaaggagtccacccaccccgtgaagcccctggcccagatcgccggaaacagatacgcctccggacctgtgggaaaggccctgagcgacgcatgtatgggcacaatcgcctccttcctgtctaagtaccaggacatcatcatcgaacaccagaaggtggtgaagggcaaccagaagagactggagagcctgcgggagctggccggcaaggaaaacctggaataccctagcgtgaccctgccacctcagcctcacaccaaggagggcgttgatgcctacaacgaagtgatcgcccgggtgcgaatgtgggtgaacctgaacctgtggcagaagctgaagctaagcagagatgatgccaagcctctgctgagactgaagggattcccttcctttcctctggtcgagagacaggccaacgaagtggactggtgggacatggtgtgtaacgtgaagaagctgatcaacgagaaaaaggaggatggcaaggtgttttggcagaatctggctggctacaagagacaggaagccctgagaccatacctgagcagcgaggaagatcggaagaagggaaagaaattcgctcggtaccagctgggcgacctgctgctgcacctggaaaagaagcacggcgaggactggggaaaggtgtacgacgaggcctgggagcggattgacaagaaagtggaaggcctgagcaagcacatcaagctggaagaggaacggagaagcgaggacgcccagagcaaggccgccctgaccgactggctgcgggctaaggccagcttcgtgatcgagggcctgaaggaggccgacaaggacgagttctgcagatgcgagctgaagctgcagaagtggtacggggacctgcggggaaagcccttcgccatcgaagccgagaacagcatcctggacatcagcggcttcagcaagcagtacaactgtgccttcatctggcagaaggacggcgtgaagaagctgaacctgtacctgatcatcaactacttcaagggcggcaagctgcggttcaagaagatcaaacctgaagccttcgaagccaacagattctacaccgtgatcaacaaaaagagcggcgagatcgtgcccatggaggtgaacttcaacttcgacgaccccaacctgatcatcctgcctctggcctttggcaagagacagggcagagaattcatctggaacgacctgctgtccctggaaaccggcagcctgaagctggccaacggaagagtgatcgagaagacactgtacaacagaagaacccggcaggatgagcctgccctgttcgtggccctgaccttcgagcggcgggaggtcctggactcctccaatatcaaaccaatgaacctgatcggcgtggcaagaggcgaaaacatccccgccgtgatcgccctgaccgaccccgagggctgcccactgagccggtttaaggatagcctgggaaacccaacccacatcctgagaatcggcgagagctataaggagaagcagcggaccatccaggccaagaaggaggtggagcagcggagagccggcggctacagccggaagtacgccagcaaagccaagaatctggcagacgatatggtgagaaacaccgctagagatctgctgtactacgccgtgacccaggatgccatgctgatcttcgccaacctgagccggggcttcggccggcagggcaagcggaccttcatggccgagagacagtacacacggatggaggactggctgaccgccaagctggcctacgagggcctgagcaagacctacctgtccaagacactggcccagtacacctccaagacatgcagcaactgtgggtttaccatcaccagcgccgactacgacagggtgctggagaagctgaagaagacagcaacaggctggatgaccacaattaacggcaaggagctgaaggtggagggccagattacctactacaacagatacaagagacagaacgtagtcaaggacctgtccgtcgagctggatagactgagcgaagaatctgtgaacaacgacatctcctcctggacaaagggcagaagcggagaagctctgagcctcctgaagaaaagattctcccatagacccgtgcaggagaagttcgtgtgcctgaactgcggcttcgagacacacgcagccgagcaagccgccctgaacatcgccagatcctggctgttcctgcggagccaggagtacaagaaataccagacaaacaagacaaccggcaacaccgataagagagccttcgtcgagacctggcagtccttttaccggaagaagcttaaggaggtgtggaaacctgccgtgcggtctggcggatctggcggaggctccaccagccccaagaaaaagagaaaagtctaagctgccttctgcggggcttgccttctggccatgcccttcttctctcccttgcacctgtacctcttggtctttgaataaagcctgagtaggaaggctagcaaaaaaaaaaaaaaaaaaaaaaaaaaaaaaaaaaaaaaaaaaaaaaaaaaaaaaaaaaaaaaaaaaaaaaaaaaaaaaaa

SEQ ID NO: 10303 - RNA, 8787 nt, synthetic construct
  source 1..8787: mol_type = other RNA
aggaaataagagagaaaagaagagtaagaagaaatataagagccaccatggcccctaagaagaagcgtaaagtgagccggatgaaccacgaccaggagttcgacccccctaaggtgtaccctcccgtccccgccgagaagagaaagcccatccgggtcctgagcctgttcgatggcatcgccaccggtctgctggtgctgaaggacctgggcatccaggtggataggtacattgcctccgaggtgtgcgaggactccatcaccgtgggaatggtgcgtcatcagggcaagatcatgtacgtgggcgacgtgcggagcgtgacacagaagcatatccaggagtggggccctttcgacctggtgatcggcggcagcccttgcaatgacctgagcatcgtgaacccagcccggaagggcctgtacgagggaaccggcagactgttcttcgagttttacagactgctgcacgacgcccggcctaaggaaggcgacgaccggcccttcttttggctgttcgagaatgtggtggccatgggagtcagcgacaagcgggatattagccggttcctggagagcaaccccgtgatgatcgatgccaaggaagtgagcgccgcccaccgggccagatacttctggggcaatctgcctggcatgaacagacccctggccagcaccgtgaacgacaagctggagctgcaggagtgcctggagcacggccggatcgccaagttcagcaaggtgagaaccatcaccacccgaagcaacagcatcaaacaaggcaaggaccagcactttcctgtgttcatgaacgagaaggaggacatcctgtggtgtaccgagatggagagagtgttcgggttcccagtccactacacagatgtcagcaacatgtctagactggccagacagagactgctgggaagaagctggtccgtccctgtgatcagacacctgttcgcccctctgaaggagtacttcgcctgcgtgagcagcggcaacagcaacgccaacagccggggccccagcttctctagcggcctggtgccactgtccctgagagggagccacatgggccccatggagatctacaaaaccgtgagcgcctggaagcggcagcctgtgcgcgtgctgagcctgtttcggaatatcgataaagtcctgaaaagcctgggattcctggagagcggctctggctccggcggtggcaccctgaagtacgtggaggatgtgacaaacgtggtcagacgggatgtggagaagtggggccccttcgatctggtgtacggcagcacccaacccctgggcagctcttgtgaccggtgccctggctggtacatgtttcagttccaccggatcctgcagtacgccctgccgagacaggagtcccagcggccattcttttggattttcatggacaacttgctgctgaccgaggatgaccaggaaactaccactcggttcctgcagaccgaagccgtgaccctgcaggacgtgagaggccgggactaccagaacgccatgcgggtgtggtccaacatccctggactgaaaagcaagcacgcacctctgacccctaaagaagaggagtacctgcaggcccaggtgcggagcagaagcaagctggacgcccctaaggtggatctgctggtgaagaattgcctcctgcccctgagagagtacttcaagtatttcagccagaatagtctgcccctgggaggcagcggcggcggcttccagggcagcgtgaccttcagggacgtggccatcgacttcagccaggaggagtgggagtggctgcagcccgcccagagggacctgtacaggcacgtgatgctggagaactacggccacctggtgagcctggccggcttcaacatcagcaagccctacgtggtgagcctgctggagcagggcagggagccctggctggtgaagggcgacgtgaggagggaccccttcagcgagagcaacggcggcggcccaagcagcggcgcccctcctcccagcggcggcaggcggcccaagcagcggcgcccctcctcccagcggcggcagcccagccggctccccaacctctaccgaggagggcacctctgagtccgccacccccgagagcggccctggcacctccaccgagcccagcgagggcagcgcacccggcagccctgccggcagccccacctccacagaggagggaaccagcaccgagcccagcgaaggcagcgccccaggcaccagcaccgagcctagtgagcaggagattaaacggatcaacaagatcagaagaagacttgtgaaagacagcaacaccaagaaggccggcaagacaggccccatgaaaaccctgctggttagagtgatgacacccgatctgagagagcggctggaaaacctgagaaagaagcctgaaaatatcccccagcccatcagcaatacatctagagccaacctgaataagctgctgaccgattacaccgaaatgaagaaggcgatcctgcatgtgtactgggaagagttccagaaggaccctgtgggcctgatgagccgggtggcccagcctgccagcaagaagatcgatcagaacaagctgaaacctgagatggacgagaagggcaacctgaccaccgccggctttgcctgctctcagtgtggccagcccctgttcgtgtacaagctggagcaggtgtctgagaagggcaaggcttacaccaactacttcggacggtgcaatgtggccgagcacgaaaagctgatcctgctggcccagctgaagcccgagaaggatagcgacgaagccgtgacatatagcctgggaaagtttgggcagagggccctggatttctacagcattcatgtgaccaaggagtccacccaccccgtgaagcccctggcccagatcgccggaaacagatacgcctccggacctgtgggaaaggccctgagcgacgcatgtatgggcacaatcgcctccttcctgtctaagtaccaggacatcatcatcgaacaccagaaggtggtgaagggcaaccagaagagactggagagcctgcgggagctggccggcaaggaaaacctggaataccctagcgtgaccctgccacctcagcctcacaccaaggagggcgttgatgcctacaacgaagtgatcgcccgggtgcgaatgtgggtgaacctgaacctgtggcagaagctgaagctaagcagagatgatgccaagcctctgctgagactgaagggattcccttcctttcctctggtcgagagacaggccaacgaagtggactggtgggacatggtgtgtaacgtgaagaagctgatcaacgagaaaaaggaggatggcaaggtgttttggcagaatctggctggctacaagagacaggaagccctgagaccatacctgagcagcgaggaagatcggaagaagggaaagaaattcgctcggtaccagctgggcgacctgctgctgcacctggaaaagaagcacggcgaggactggggaaaggtgtacgacgaggcctgggagcggattgacaagaaagtggaaggcctgagcaagcacatcaagctggaagaggaacggagaagcgaggacgcccagagcaaggccgccctgaccgactggctgcgggctaaggccagcttcgtgatcgagggcctgaaggaggccgacaaggacgagttctgcagatgcgagctgaagctgcagaagtggtacggggacctgcggggaaagcccttcgccatcgaagccgagaacagcatcctggacatcagcggcttcagcaagcagtacaactgtgccttcatctggcagaaggacggcgtgaagaagctgaacctgtacctgatcatcaactacttcaagggcggcaagctgcggttcaagaagatcaaacctgaagccttcgaagccaacagattctacaccgtgatcaacaaaaagagcggcgagatcgtgcccatggaggtgaacttcaacttcgacgaccccaacctgatcatcctgcctctggcctttggcaagagacagggcagagaattcatctggaacgacctgctgtccctggaaaccggcagcctgaagctggccaacggaagagtgatcgagaagacactgtacaacagaagaacccggcaggatgagcctgccctgttcgtggccctgaccttcgagcggcgggaggtcctggactcctccaatatcaaaccaatgaacctgatcggcgtggcaagaggcgaaaacatccccgccgtgatcgccctgaccgaccccgagggctgcccactgagccggtttaaggatagcctgggaaacccaacccacatcctgagaatcggcgagagctataaggagaagcagcggaccatccaggccaagaaggaggtggagcagcggagagccggcggctacagccggaagtacgccagcaaagccaagaatctggcagacgatatggtgagaaacaccgctagagatctgctgtactacgccgtgacccaggatgccatgctgatcttcgccaacctgagccggggcttcggccggcagggcaagcggaccttcatggccgagagacagtacacacggatggaggactggctgaccgccaagctggcctacgagggcctgagcaagacctacctgtccaagacactggcccagtacacctccaagacatgcagcaactgtgggtttaccatcaccagcgccgactacgacagggtgctggagaagctgaagaagacagcaacaggctggatgaccacaattaacggcaaggagctgaaggtggagggccagattacctactacaacagatacaagagacagaacgtagtcaaggacctgtccgtcgagctggatagactgagcgaagaatctgtgaacaacgacatctcctcctggacaaagggcagaagcggagaagctctgagcctcctgaagaaaagattctcccatagacccgtgcaggagaagttcgtgtgcctgaactgcggcttcgagacacacgcagccgagcaagccgccctgaacatcgccagatcctggctgttcctgcggagccaggagtacaagaaataccagacaaacaagacaaccggcaacaccgataagagagccttcgtcgagacctggcagtccttttaccggaagaagcttaaggaggtgtggaaacctgccgtgcggtctggcggatctggcggaggctccaccagccccaagaaaaagagaaaagtctaagctgccttctgcggggcttgccttctggccatgcccttcttctctcccttgcacctgtacctcttggtctttgaataaagcctgagtaggaaggctagcaaaaaaaaaaaaaaaaaaaaaaaaaaaaaaaaaaaaaaaaaaaaaaaaaaaaaaaaaaaaaaaaaaaaaaaaaaaaaaaagcccagccggctccccaacctctaccgaggagggcacctctgagtccgccacccccgagagcggccctggcacctccaccgagcccagcgagggcagcgcacccggcagccctgccggcagccccacctccacagaggagggaaccagcaccgagcccagcgaaggcagcgccccaggcaccagcaccgagcctagtgagcaggagattaaacggatcaacaagatcagaagaagacttgtgaaagacagcaacaccaagaaggccggcaagacaggccccatgaaaaccctgctggttagagtgatgacacccgatctgagagagcggctggaaaacctgagaaagaagcctgaaaatatcccccagcccatcagcaatacatctagagccaacctgaataagctgctgaccgattacaccgaaatgaagaaggcgatcctgcatgtgtactgggaagagttccagaaggaccctgtgggcctgatgagccgggtggcccagcctgccagcaagaagatcgatcagaacaagctgaaacctgagatggacgagaagggcaacctgaccaccgccggctttgcctgctctcagtgtggccagcccctgttcgtgtacaagctggagcaggtgtctgagaagggcaaggcttacaccaactacttcggacggtgcaatgtggccgagcacgaaaagctgatcctgctggcccagctgaagcccgagaaggatagcgacgaagccgtgacatatagcctgggaaagtttgggcagagggccctggatttctacagcattcatgtgaccaaggagtccacccaccccgtgaagcccctggcccagatcgccggaaacagatacgcctccggacctgtgggaaaggccctgagcgacgcatgtatgggcacaatcgcctccttcctgtctaagtaccaggacatcatcatcgaacaccagaaggtggtgaagggcaaccagaagagactggagagcctgcgggagctggccggcaaggaaaacctggaataccctagcgtgaccctgccacctcagcctcacaccaaggagggcgttgatgcctacaacgaagtgatcgcccgggtgcgaatgtgggtgaacctgaacctgtggcagaagctgaagctaagcagagatgatgccaagcctctgctgagactgaagggattcccttcctttcctctggtcgagagacaggccaacgaagtggactggtgggacatggtgtgtaacgtgaagaagctgatcaacgagaaaaaggaggatggcaaggtgttttggcagaatctggctggctacaagagacaggaagccctgagaccatacctgagcagcgaggaagatcggaagaagggaaagaaattcgctcggtaccagctgggcgacctgctgctgcacctggaaaagaagcacggcgaggactggggaaaggtgtacgacgaggcctgggagcggattgacaagaaagtggaaggcctgagcaagcacatcaagctggaagaggaacggagaagcgaggacgcccagagcaaggccgccctgaccgactggctgcgggctaaggccagcttcgtgatcgagggcctgaaggaggccgacaaggacgagttctgcagatgcgagctgaagctgcagaagtggtacggggacctgcggggaaagcccttcgccatcgaagccgagaacagcatcctggacatcagcggcttcagcaagcagtacaactgtgccttcatctggcagaaggacggcgtgaagaagctgaacctgtacctgatcatcaactacttcaagggcggcaagctgcggttcaagaagatcaaacctgaagccttcgaagccaacagattctacaccgtgatcaacaaaaagagcggcgagatcgtgcccatggaggtgaacttcaacttcgacgaccccaacctgatcatcctgcctctggcctttggcaagagacagggcagagaattcatctggaacgacctgctgtccctggaaaccggcagcctgaagctggccaacggaagagtgatcgagaagacactgtacaacagaagaacccggcaggatgagcctgccctgttcgtggccctgaccttcgagcggcgggaggtcctggactcctccaatatcaaaccaatgaacctgatcggcgtggcaagaggcgaaaacatccccgccgtgatcgccctgaccgaccccgagggctgcccactgagccggtttaaggatagcctgggaaacccaacccacatcctgagaatcggcgagagctataaggagaagcagcggaccatccaggccaagaaggaggtggagcagcggagagccggcggctacagccggaagtacgccagcaaagccaagaatctggcagacgatatggtgagaaacaccgctagagatctgctgtactacgccgtgacccaggatgccatgctgatcttcgccaacctgagccggggcttcggccggcagggcaagcggaccttcatggccgagagacagtacacacggatggaggactggctgaccgccaagctggcctacgagggcctgagcaagacctacctgtccaagacactggcccagtacacctccaagacatgcagcaactgtgggtttaccatcaccagcgccgactacgacagggtgctggagaagctgaagaagacagcaacaggctggatgaccacaattaacggcaaggagctgaaggtggagggccagattacctactacaacagatacaagagacagaacgtagtcaaggacctgtccgtcgagctggatagactgagcgaagaatctgtgaacaacgacatctcctcctggacaaagggcagaagcggagaagctctgagcctcctgaagaaaagattctcccatagacccgtgcaggagaagttcgtgtgcctgaactgcggcttcgagacacacgcagccgagcaagccgccctgaacatcgccagatcctggctgttcctgcggagccaggagtacaagaaataccagacaaacaagacaaccggcaacaccgataagagagccttcgtcgagacctggcagtccttttaccggaagaagcttaaggaggtgtggaaacctgccgtgcggtctggcggatctggcggaggctccaccagccccaagaaaaagagaaaagtctaagctgccttctgcggggcttgccttctggccatgcccttcttctctcccttgcacctgtacctcttggtctttgaataaagcctgagtaggaaggctagcaaaaaaaaaaaaaaaaaaaaaaaaaaaaaaaaaaaaaaaaaaaaaaaaaaaaaaaaaaaaaaaaaaaaaaaaaaaaaaaa

SEQ ID NO: 10304 - RNA, 8787 nt, synthetic construct
  source 1..8787: mol_type = other RNA
aggaaataagagagaaaagaagagtaagaagaaatataagagccaccatggcccctaagaagaagcgtaaagtgagccggatgaaccacgaccaggagttcgacccccctaaggtgtaccctcccgtccccgccgagaagagaaagcccatccgggtcctgagcctgttcgatggcatcgccaccggtctgctggtgctgaaggacctgggcatccaggtggataggtacattgcctccgaggtgtgcgaggactccatcaccgtgggaatggtgcgtcatcagggcaagatcatgtacgtgggcgacgtgcggagcgtgacacagaagcatatccaggagtggggccctttcgacctggtgatcggcggcagcccttgcaatgacctgagcatcgtgaacccagcccggaagggcctgtacgagggaaccggcagactgttcttcgagttttacagactgctgcacgacgcccggcctaaggaaggcgacgaccggcccttcttttggctgttcgagaatgtggtggccatgggagtcagcgacaagcgggatattagccggttcctggagagcaaccccgtgatgatcgatgccaaggaagtgagcgccgcccaccgggccagatacttctggggcaatctgcctggcatgaacagacccctggccagcaccgtgaacgacaagctggagctgcaggagtgcctggagcacggccggatcgccaagttcagcaaggtgagaaccatcaccacccgaagcaacagcatcaaacaaggcaaggaccagcactttcctgtgttcatgaacgagaaggaggacatcctgtggtgtaccgagatggagagagtgttcgggttcccagtccactacacagatgtcagcaacatgtctagactggccagacagagactgctgggaagaagctggtccgtccctgtgatcagacacctgttcgcccctctgaaggagtacttcgcctgcgtgagcagcggcaacagcaacgccaacagccggggccccagcttctctagcggcctggtgccactgtccctgagagggagccacatgggccccatggagatctacaaaaccgtgagcgcctggaagcggcagcctgtgcgcgtgctgagcctgtttcggaatatcgataaagtcctgaaaagcctgggattcctggagagcggctctggctccggcggtggcaccctgaagtacgtggaggatgtgacaaacgtggtcagacgggatgtggagaagtggggccccttcgatctggtgtacggcagcacccaacccctgggcagctcttgtgaccggtgccctggctggtacatgtttcagttccaccggatcctgcagtacgccctgccgagacaggagtcccagcggccattcttttggattttcatggacaacttgctgctgaccgaggatgaccaggaaactaccactcggttcctgcagaccgaagccgtgaccctgcaggacgtgagaggccgggactaccagaacgccatgcgggtgtggtccaacatccctggactgaaaagcaagcacgcacctctgacccctaaagaagaggagtacctgcaggcccaggtgcggagcagaagcaagctggacgcccctaaggtggatctgctggtgaagaattgcctcctgcccctgagagagtacttcaagtatttcagccagaatagtctgcccctgggaggcagcggcggcggcgtggtggagctgctgaccttcgaggaggtggccgtgtacttcagcaaggaggagtgggccctgctggaccccggccagagggccctgtacagggacgtgatgcaggagaactacgaggccgtgagctggctgggcttccccgtgagcaagaccgacgtgatcagctgggtggagagggaggaggagttctgggtgcccgaccccaggagctgcgaggagggcgtgatcatcagcaacacccacggcggcccaagcagcggcgcccctcctcccagcggcggcaggcggcccaagcagcggcgcccctcctcccagcggcggcagcccagccggctccccaacctctaccgaggagggcacctctgagtccgccacccccgagagcggccctggcacctccaccgagcccagcgagggcagcgcacccggcagccctgccggcagccccacctccacagaggagggaaccagcaccgagcccagcgaaggcagcgccccaggcaccagcaccgagcctagtgagcaggagattaaacggatcaacaagatcagaagaagacttgtgaaagacagcaacaccaagaaggccggcaagacaggccccatgaaaaccctgctggttagagtgatgacacccgatctgagagagcggctggaaaacctgagaaagaagcctgaaaatatcccccagcccatcagcaatacatctagagccaacctgaataagctgctgaccgattacaccgaaatgaagaaggcgatcctgcatgtgtactgggaagagttccagaaggaccctgtgggcctgatgagccgggtggcccagcctgccagcaagaagatcgatcagaacaagctgaaacctgagatggacgagaagggcaacctgaccaccgccggctttgcctgctctcagtgtggccagcccctgttcgtgtacaagctggagcaggtgtctgagaagggcaaggcttacaccaactacttcggacggtgcaatgtggccgagcacgaaaagctgatcctgctggcccagctgaagcccgagaaggatagcgacgaagccgtgacatatagcctgggaaagtttgggcagagggccctggatttctacagcattcatgtgaccaaggagtccacccaccccgtgaagcccctggcccagatcgccggaaacagatacgcctccggacctgtgggaaaggccctgagcgacgcatgtatgggcacaatcgcctccttcctgtctaagtaccaggacatcatcatcgaacaccagaaggtggtgaagggcaaccagaagagactggagagcctgcgggagctggccggcaaggaaaacctggaataccctagcgtgaccctgccacctcagcctcacaccaaggagggcgttgatgcctacaacgaagtgatcgcccgggtgcgaatgtgggtgaacctgaacctgtggcagaagctgaagctaagcagagatgatgccaagcctctgctgagactgaagggattcccttcctttcctctggtcgagagacaggccaacgaagtggactggtgggacatggtgtgtaacgtgaagaagctgatcaacgagaaaaaggaggatggcaaggtgttttggcagaatctggctggctacaagagacaggaagccctgagaccatacctgagcagcgaggaagatcggaagaagggaaagaaattcgctcggtaccagctgggcgacctgctgctgcacctggaaaagaagcacggcgaggactggggaaaggtgtacgacgaggcctgggagcggattgacaagaaagtggaaggcctgagcaagcacatcaagctggaagaggaacggagaagcgaggacgcccagagcaaggccgccctgaccgactggctgcgggctaaggccagcttcgtgatcgagggcctgaaggaggccgacaaggacgagttctgcagatgcgagctgaagctgcagaagtggtacggggacctgcggggaaagcccttcgccatcgaagccgagaacagcatcctggacatcagcggcttcagcaagcagtacaactgtgccttcatctggcagaaggacggcgtgaagaagctgaacctgtacctgatcatcaactacttcaagggcggcaagctgcggttcaagaagatcaaacctgaagccttcgaagccaacagattctacaccgtgatcaacaaaaagagcggcgagatcgtgcccatggaggtgaacttcaacttcgacgaccccaacctgatcatcctgcctctggcctttggcaagagacagggcagagaattcatctggaacgacctgctgtccctggaaaccggcagcctgaagctggccaacggaagagtgatcgagaagacactgtacaacagaagaacccggcaggatgagcctgccctgttcgtggccctgaccttcgagcggcgggaggtcctggactcctccaatatcaaaccaatgaacctgatcggcgtggcaagaggcgaaaacatccccgccgtgatcgccctgaccgaccccgagggctgcccactgagccggtttaaggatagcctgggaaacccaacccacatcctgagaatcggcgagagctataaggagaagcagcggaccatccaggccaagaaggaggtggagcagcggagagccggcggctacagccggaagtacgccagcaaagccaagaatctggcagacgatatggtgagaaacaccgctagagatctgctgtactacgccgtgacccaggatgccatgctgatcttcgccaacctgagccggggcttcggccggcagggcaagcggaccttcatggccgagagacagtacacacggatggaggactggctgaccgccaagctggcctacgagggcctgagcaagacctacctgtccaagacactggcccagtacacctccaagacatgcagcaactgtgggtttaccatcaccagcgccgactacgacagggtgctggagaagctgaagaagacagcaacaggctggatgaccacaattaacggcaaggagctgaaggtggagggccagattacctactacaacagatacaagagacagaacgtagtcaaggacctgtccgtcgagctggatagactgagcgaagaatctgtgaacaacgacatctcctcctggacaaagggcagaagcggagaagctctgagcctcctgaagaaaagattctcccatagacccgtgcaggagaagttcgtgtgcctgaactgcggcttcgagacacacgcagccgagcaagccgccctgaacatcgccagatcctggctgttcctgcggagccaggagtacaagaaataccagacaaacaagacaaccggcaacaccgataagagagccttcgtcgagacctggcagtccttttaccggaagaagcttaaggaggtgtggaaacctgccgtgcggtctggcggatctggcggaggctccaccagccccaagaaaaagagaaaagtctaagctgccttctgcggggcttgccttctggccatgcccttcttctctcccttgcacctgtacctcttggtctttgaataaagcctgagtaggaaggctagcaaaaaaaaaaaaaaaaaaaaaaaaaaaaaaaaaaaaaaaaaaaaaaaaaaaaaaaaaaaaaaaaaaaaaaaaaaaaaaaagcccagccggctccccaacctctaccgaggagggcacctctgagtccgccacccccgagagcggccctggcacctccaccgagcccagcgagggcagcgcacccggcagccctgccggcagccccacctccacagaggagggaaccagcaccgagcccagcgaaggcagcgccccaggcaccagcaccgagcctagtgagcaggagattaaacggatcaacaagatcagaagaagacttgtgaaagacagcaacaccaagaaggccggcaagacaggccccatgaaaaccctgctggttagagtgatgacacccgatctgagagagcggctggaaaacctgagaaagaagcctgaaaatatcccccagcccatcagcaatacatctagagccaacctgaataagctgctgaccgattacaccgaaatgaagaaggcgatcctgcatgtgtactgggaagagttccagaaggaccctgtgggcctgatgagccgggtggcccagcctgccagcaagaagatcgatcagaacaagctgaaacctgagatggacgagaagggcaacctgaccaccgccggctttgcctgctctcagtgtggccagcccctgttcgtgtacaagctggagcaggtgtctgagaagggcaaggcttacaccaactacttcggacggtgcaatgtggccgagcacgaaaagctgatcctgctggcccagctgaagcccgagaaggatagcgacgaagccgtgacatatagcctgggaaagtttgggcagagggccctggatttctacagcattcatgtgaccaaggagtccacccaccccgtgaagcccctggcccagatcgccggaaacagatacgcctccggacctgtgggaaaggccctgagcgacgcatgtatgggcacaatcgcctccttcctgtctaagtaccaggacatcatcatcgaacaccagaaggtggtgaagggcaaccagaagagactggagagcctgcgggagctggccggcaaggaaaacctggaataccctagcgtgaccctgccacctcagcctcacaccaaggagggcgttgatgcctacaacgaagtgatcgcccgggtgcgaatgtgggtgaacctgaacctgtggcagaagctgaagctaagcagagatgatgccaagcctctgctgagactgaagggattcccttcctttcctctggtcgagagacaggccaacgaagtggactggtgggacatggtgtgtaacgtgaagaagctgatcaacgagaaaaaggaggatggcaaggtgttttggcagaatctggctggctacaagagacaggaagccctgagaccatacctgagcagcgaggaagatcggaagaagggaaagaaattcgctcggtaccagctgggcgacctgctgctgcacctggaaaagaagcacggcgaggactggggaaaggtgtacgacgaggcctgggagcggattgacaagaaagtggaaggcctgagcaagcacatcaagctggaagaggaacggagaagcgaggacgcccagagcaaggccgccctgaccgactggctgcgggctaaggccagcttcgtgatcgagggcctgaaggaggccgacaaggacgagttctgcagatgcgagctgaagctgcagaagtggtacggggacctgcggggaaagcccttcgccatcgaagccgagaacagcatcctggacatcagcggcttcagcaagcagtacaactgtgccttcatctggcagaaggacggcgtgaagaagctgaacctgtacctgatcatcaactacttcaagggcggcaagctgcggttcaagaagatcaaacctgaagccttcgaagccaacagattctacaccgtgatcaacaaaaagagcggcgagatcgtgcccatggaggtgaacttcaacttcgacgaccccaacctgatcatcctgcctctggcctttggcaagagacagggcagagaattcatctggaacgacctgctgtccctggaaaccggcagcctgaagctggccaacggaagagtgatcgagaagacactgtacaacagaagaacccggcaggatgagcctgccctgttcgtggccctgaccttcgagcggcgggaggtcctggactcctccaatatcaaaccaatgaacctgatcggcgtggcaagaggcgaaaacatccccgccgtgatcgccctgaccgaccccgagggctgcccactgagccggtttaaggatagcctgggaaacccaacccacatcctgagaatcggcgagagctataaggagaagcagcggaccatccaggccaagaaggaggtggagcagcggagagccggcggctacagccggaagtacgccagcaaagccaagaatctggcagacgatatggtgagaaacaccgctagagatctgctgtactacgccgtgacccaggatgccatgctgatcttcgccaacctgagccggggcttcggccggcagggcaagcggaccttcatggccgagagacagtacacacggatggaggactggctgaccgccaagctggcctacgagggcctgagcaagacctacctgtccaagacactggcccagtacacctccaagacatgcagcaactgtgggtttaccatcaccagcgccgactacgacagggtgctggagaagctgaagaagacagcaacaggctggatgaccacaattaacggcaaggagctgaaggtggagggccagattacctactacaacagatacaagagacagaacgtagtcaaggacctgtccgtcgagctggatagactgagcgaagaatctgtgaacaacgacatctcctcctggacaaagggcagaagcggagaagctctgagcctcctgaagaaaagattctcccatagacccgtgcaggagaagttcgtgtgcctgaactgcggcttcgagacacacgcagccgagcaagccgccctgaacatcgccagatcctggctgttcctgcggagccaggagtacaagaaataccagacaaacaagacaaccggcaacaccgataagagagccttcgtcgagacctggcagtccttttaccggaagaagcttaaggaggtgtggaaacctgccgtgcggtctggcggatctggcggaggctccaccagccccaagaaaaagagaaaagtctaagctgccttctgcggggcttgccttctggccatgcccttcttctctcccttgcacctgtacctcttggtctttgaataaagcctgagtaggaaggctagcaaaaaaaaaaaaaaaaaaaaaaaaaaaaaaaaaaaaaaaaaaaaaaaaaaaaaaaaaaaaaaaaaaaaaaaaaaaaaaaa

SEQ ID NO: 10305 - RNA, 8787 nt, synthetic construct
  source 1..8787: mol_type = other RNA
aggaaataagagagaaaagaagagtaagaagaaatataagagccaccatggcccctaagaagaagcgtaaagtgagccggatgaaccacgaccaggagttcgacccccctaaggtgtaccctcccgtccccgccgagaagagaaagcccatccgggtcctgagcctgttcgatggcatcgccaccggtctgctggtgctgaaggacctgggcatccaggtggataggtacattgcctccgaggtgtgcgaggactccatcaccgtgggaatggtgcgtcatcagggcaagatcatgtacgtgggcgacgtgcggagcgtgacacagaagcatatccaggagtggggccctttcgacctggtgatcggcggcagcccttgcaatgacctgagcatcgtgaacccagcccggaagggcctgtacgagggaaccggcagactgttcttcgagttttacagactgctgcacgacgcccggcctaaggaaggcgacgaccggcccttcttttggctgttcgagaatgtggtggccatgggagtcagcgacaagcgggatattagccggttcctggagagcaaccccgtgatgatcgatgccaaggaagtgagcgccgcccaccgggccagatacttctggggcaatctgcctggcatgaacagacccctggccagcaccgtgaacgacaagctggagctgcaggagtgcctggagcacggccggatcgccaagttcagcaaggtgagaaccatcaccacccgaagcaacagcatcaaacaaggcaaggaccagcactttcctgtgttcatgaacgagaaggaggacatcctgtggtgtaccgagatggagagagtgttcgggttcccagtccactacacagatgtcagcaacatgtctagactggccagacagagactgctgggaagaagctggtccgtccctgtgatcagacacctgttcgcccctctgaaggagtacttcgcctgcgtgagcagcggcaacagcaacgccaacagccggggccccagcttctctagcggcctggtgccactgtccctgagagggagccacatgggccccatggagatctacaaaaccgtgagcgcctggaagcggcagcctgtgcgcgtgctgagcctgtttcggaatatcgataaagtcctgaaaagcctgggattcctggagagcggctctggctccggcggtggcaccctgaagtacgtggaggatgtgacaaacgtggtcagacgggatgtggagaagtggggccccttcgatctggtgtacggcagcacccaacccctgggcagctcttgtgaccggtgccctggctggtacatgtttcagttccaccggatcctgcagtacgccctgccgagacaggagtcccagcggccattcttttggattttcatggacaacttgctgctgaccgaggatgaccaggaaactaccactcggttcctgcagaccgaagccgtgaccctgcaggacgtgagaggccgggactaccagaacgccatgcgggtgtggtccaacatccctggactgaaaagcaagcacgcacctctgacccctaaagaagaggagtacctgcaggcccaggtgcggagcagaagcaagctggacgcccctaaggtggatctgctggtgaagaattgcctcctgcccctgagagagtacttcaagtatttcagccagaatagtctgcccctgggaggcagcggcggcggcagcaaggtgcccgtgaccttcggcgacctggccatctacttcagccaggaggagtgggagtggctgcaccccgcccagagggacctgtacaggcacgtgatgctggagaactacggccacctggtgagcctgggcctgaacatcagcaagccctacgtggtgagcctgctggagcagggcagggacccctggctggacaacagggacgtgaggagggacctgttcagcgagagcaagggcgagggcggcccaagcagcggcgcccctcctcccagcggcggcaggcggcccaagcagcggcgcccctcctcccagcggcggcagcccagccggctccccaacctctaccgaggagggcacctctgagtccgccacccccgagagcggccctggcacctccaccgagcccagcgagggcagcgcacccggcagccctgccggcagccccacctccacagaggagggaaccagcaccgagcccagcgaaggcagcgccccaggcaccagcaccgagcctagtgagcaggagattaaacggatcaacaagatcagaagaagacttgtgaaagacagcaacaccaagaaggccggcaagacaggccccatgaaaaccctgctggttagagtgatgacacccgatctgagagagcggctggaaaacctgagaaagaagcctgaaaatatcccccagcccatcagcaatacatctagagccaacctgaataagctgctgaccgattacaccgaaatgaagaaggcgatcctgcatgtgtactgggaagagttccagaaggaccctgtgggcctgatgagccgggtggcccagcctgccagcaagaagatcgatcagaacaagctgaaacctgagatggacgagaagggcaacctgaccaccgccggctttgcctgctctcagtgtggccagcccctgttcgtgtacaagctggagcaggtgtctgagaagggcaaggcttacaccaactacttcggacggtgcaatgtggccgagcacgaaaagctgatcctgctggcccagctgaagcccgagaaggatagcgacgaagccgtgacatatagcctgggaaagtttgggcagagggccctggatttctacagcattcatgtgaccaaggagtccacccaccccgtgaagcccctggcccagatcgccggaaacagatacgcctccggacctgtgggaaaggccctgagcgacgcatgtatgggcacaatcgcctccttcctgtctaagtaccaggacatcatcatcgaacaccagaaggtggtgaagggcaaccagaagagactggagagcctgcgggagctggccggcaaggaaaacctggaataccctagcgtgaccctgccacctcagcctcacaccaaggagggcgttgatgcctacaacgaagtgatcgcccgggtgcgaatgtgggtgaacctgaacctgtggcagaagctgaagctaagcagagatgatgccaagcctctgctgagactgaagggattcccttcctttcctctggtcgagagacaggccaacgaagtggactggtgggacatggtgtgtaacgtgaagaagctgatcaacgagaaaaaggaggatggcaaggtgttttggcagaatctggctggctacaagagacaggaagccctgagaccatacctgagcagcgaggaagatcggaagaagggaaagaaattcgctcggtaccagctgggcgacctgctgctgcacctggaaaagaagcacggcgaggactggggaaaggtgtacgacgaggcctgggagcggattgacaagaaagtggaaggcctgagcaagcacatcaagctggaagaggaacggagaagcgaggacgcccagagcaaggccgccctgaccgactggctgcgggctaaggccagcttcgtgatcgagggcctgaaggaggccgacaaggacgagttctgcagatgcgagctgaagctgcagaagtggtacggggacctgcggggaaagcccttcgccatcgaagccgagaacagcatcctggacatcagcggcttcagcaagcagtacaactgtgccttcatctggcagaaggacggcgtgaagaagctgaacctgtacctgatcatcaactacttcaagggcggcaagctgcggttcaagaagatcaaacctgaagccttcgaagccaacagattctacaccgtgatcaacaaaaagagcggcgagatcgtgcccatggaggtgaacttcaacttcgacgaccccaacctgatcatcctgcctctggcctttggcaagagacagggcagagaattcatctggaacgacctgctgtccctggaaaccggcagcctgaagctggccaacggaagagtgatcgagaagacactgtacaacagaagaacccggcaggatgagcctgccctgttcgtggccctgaccttcgagcggcgggaggtcctggactcctccaatatcaaaccaatgaacctgatcggcgtggcaagaggcgaaaacatccccgccgtgatcgccctgaccgaccccgagggctgcccactgagccggtttaaggatagcctgggaaacccaacccacatcctgagaatcggcgagagctataaggagaagcagcggaccatccaggccaagaaggaggtggagcagcggagagccggcggctacagccggaagtacgccagcaaagccaagaatctggcagacgatatggtgagaaacaccgctagagatctgctgtactacgccgtgacccaggatgccatgctgatcttcgccaacctgagccggggcttcggccggcagggcaagcggaccttcatggccgagagacagtacacacggatggaggactggctgaccgccaagctggcctacgagggcctgagcaagacctacctgtccaagacactggcccagtacacctccaagacatgcagcaactgtgggtttaccatcaccagcgccgactacgacagggtgctggagaagctgaagaagacagcaacaggctggatgaccacaattaacggcaaggagctgaaggtggagggccagattacctactacaacagatacaagagacagaacgtagtcaaggacctgtccgtcgagctggatagactgagcgaagaatctgtgaacaacgacatctcctcctggacaaagggcagaagcggagaagctctgagcctcctgaagaaaagattctcccatagacccgtgcaggagaagttcgtgtgcctgaactgcggcttcgagacacacgcagccgagcaagccgccctgaacatcgccagatcctggctgttcctgcggagccaggagtacaagaaataccagacaaacaagacaaccggcaacaccgataagagagccttcgtcgagacctggcagtccttttaccggaagaagcttaaggaggtgtggaaacctgccgtgcggtctggcggatctggcggaggctccaccagccccaagaaaaagagaaaagtctaagctgccttctgcggggcttgccttctggccatgcccttcttctctcccttgcacctgtacctcttggtctttgaataaagcctgagtaggaaggctagcaaaaaaaaaaaaaaaaaaaaaaaaaaaaaaaaaaaaaaaaaaaaaaaaaaaaaaaaaaaaaaaaaaaaaaaaaaaaaaaagcccagccggctccccaacctctaccgaggagggcacctctgagtccgccacccccgagagcggccctggcacctccaccgagcccagcgagggcagcgcacccggcagccctgccggcagccccacctccacagaggagggaaccagcaccgagcccagcgaaggcagcgccccaggcaccagcaccgagcctagtgagcaggagattaaacggatcaacaagatcagaagaagacttgtgaaagacagcaacaccaagaaggccggcaagacaggccccatgaaaaccctgctggttagagtgatgacacccgatctgagagagcggctggaaaacctgagaaagaagcctgaaaatatcccccagcccatcagcaatacatctagagccaacctgaataagctgctgaccgattacaccgaaatgaagaaggcgatcctgcatgtgtactgggaagagttccagaaggaccctgtgggcctgatgagccgggtggcccagcctgccagcaagaagatcgatcagaacaagctgaaacctgagatggacgagaagggcaacctgaccaccgccggctttgcctgctctcagtgtggccagcccctgttcgtgtacaagctggagcaggtgtctgagaagggcaaggcttacaccaactacttcggacggtgcaatgtggccgagcacgaaaagctgatcctgctggcccagctgaagcccgagaaggatagcgacgaagccgtgacatatagcctgggaaagtttgggcagagggccctggatttctacagcattcatgtgaccaaggagtccacccaccccgtgaagcccctggcccagatcgccggaaacagatacgcctccggacctgtgggaaaggccctgagcgacgcatgtatgggcacaatcgcctccttcctgtctaagtaccaggacatcatcatcgaacaccagaaggtggtgaagggcaaccagaagagactggagagcctgcgggagctggccggcaaggaaaacctggaataccctagcgtgaccctgccacctcagcctcacaccaaggagggcgttgatgcctacaacgaagtgatcgcccgggtgcgaatgtgggtgaacctgaacctgtggcagaagctgaagctaagcagagatgatgccaagcctctgctgagactgaagggattcccttcctttcctctggtcgagagacaggccaacgaagtggactggtgggacatggtgtgtaacgtgaagaagctgatcaacgagaaaaaggaggatggcaaggtgttttggcagaatctggctggctacaagagacaggaagccctgagaccatacctgagcagcgaggaagatcggaagaagggaaagaaattcgctcggtaccagctgggcgacctgctgctgcacctggaaaagaagcacggcgaggactggggaaaggtgtacgacgaggcctgggagcggattgacaagaaagtggaaggcctgagcaagcacatcaagctggaagaggaacggagaagcgaggacgcccagagcaaggccgccctgaccgactggctgcgggctaaggccagcttcgtgatcgagggcctgaaggaggccgacaaggacgagttctgcagatgcgagctgaagctgcagaagtggtacggggacctgcggggaaagcccttcgccatcgaagccgagaacagcatcctggacatcagcggcttcagcaagcagtacaactgtgccttcatctggcagaaggacggcgtgaagaagctgaacctgtacctgatcatcaactacttcaagggcggcaagctgcggttcaagaagatcaaacctgaagccttcgaagccaacagattctacaccgtgatcaacaaaaagagcggcgagatcgtgcccatggaggtgaacttcaacttcgacgaccccaacctgatcatcctgcctctggcctttggcaagagacagggcagagaattcatctggaacgacctgctgtccctggaaaccggcagcctgaagctggccaacggaagagtgatcgagaagacactgtacaacagaagaacccggcaggatgagcctgccctgttcgtggccctgaccttcgagcggcgggaggtcctggactcctccaatatcaaaccaatgaacctgatcggcgtggcaagaggcgaaaacatccccgccgtgatcgccctgaccgaccccgagggctgcccactgagccggtttaaggatagcctgggaaacccaacccacatcctgagaatcggcgagagctataaggagaagcagcggaccatccaggccaagaaggaggtggagcagcggagagccggcggctacagccggaagtacgccagcaaagccaagaatctggcagacgatatggtgagaaacaccgctagagatctgctgtactacgccgtgacccaggatgccatgctgatcttcgccaacctgagccggggcttcggccggcagggcaagcggaccttcatggccgagagacagtacacacggatggaggactggctgaccgccaagctggcctacgagggcctgagcaagacctacctgtccaagacactggcccagtacacctccaagacatgcagcaactgtgggtttaccatcaccagcgccgactacgacagggtgctggagaagctgaagaagacagcaacaggctggatgaccacaattaacggcaaggagctgaaggtggagggccagattacctactacaacagatacaagagacagaacgtagtcaaggacctgtccgtcgagctggatagactgagcgaagaatctgtgaacaacgacatctcctcctggacaaagggcagaagcggagaagctctgagcctcctgaagaaaagattctcccatagacccgtgcaggagaagttcgtgtgcctgaactgcggcttcgagacacacgcagccgagcaagccgccctgaacatcgccagatcctggctgttcctgcggagccaggagtacaagaaataccagacaaacaagacaaccggcaacaccgataagagagccttcgtcgagacctggcagtccttttaccggaagaagcttaaggaggtgtggaaacctgccgtgcggtctggcggatctggcggaggctccaccagccccaagaaaaagagaaaagtctaagctgccttctgcggggcttgccttctggccatgcccttcttctctcccttgcacctgtacctcttggtctttgaataaagcctgagtaggaaggctagcaaaaaaaaaaaaaaaaaaaaaaaaaaaaaaaaaaaaaaaaaaaaaaaaaaaaaaaaaaaaaaaaaaaaaaaaaaaaaaaa

SEQ ID NO: 10306 - RNA, 8787 nt, synthetic construct
  source 1..8787: mol_type = other RNA
aggaaataagagagaaaagaagagtaagaagaaatataagagccaccatggcccctaagaagaagcgtaaagtgagccggatgaaccacgaccaggagttcgacccccctaaggtgtaccctcccgtccccgccgagaagagaaagcccatccgggtcctgagcctgttcgatggcatcgccaccggtctgctggtgctgaaggacctgggcatccaggtggataggtacattgcctccgaggtgtgcgaggactccatcaccgtgggaatggtgcgtcatcagggcaagatcatgtacgtgggcgacgtgcggagcgtgacacagaagcatatccaggagtggggccctttcgacctggtgatcggcggcagcccttgcaatgacctgagcatcgtgaacccagcccggaagggcctgtacgagggaaccggcagactgttcttcgagttttacagactgctgcacgacgcccggcctaaggaaggcgacgaccggcccttcttttggctgttcgagaatgtggtggccatgggagtcagcgacaagcgggatattagccggttcctggagagcaaccccgtgatgatcgatgccaaggaagtgagcgccgcccaccgggccagatacttctggggcaatctgcctggcatgaacagacccctggccagcaccgtgaacgacaagctggagctgcaggagtgcctggagcacggccggatcgccaagttcagcaaggtgagaaccatcaccacccgaagcaacagcatcaaacaaggcaaggaccagcactttcctgtgttcatgaacgagaaggaggacatcctgtggtgtaccgagatggagagagtgttcgggttcccagtccactacacagatgtcagcaacatgtctagactggccagacagagactgctgggaagaagctggtccgtccctgtgatcagacacctgttcgcccctctgaaggagtacttcgcctgcgtgagcagcggcaacagcaacgccaacagccggggccccagcttctctagcggcctggtgccactgtccctgagagggagccacatgggccccatggagatctacaaaaccgtgagcgcctggaagcggcagcctgtgcgcgtgctgagcctgtttcggaatatcgataaagtcctgaaaagcctgggattcctggagagcggctctggctccggcggtggcaccctgaagtacgtggaggatgtgacaaacgtggtcagacgggatgtggagaagtggggccccttcgatctggtgtacggcagcacccaacccctgggcagctcttgtgaccggtgccctggctggtacatgtttcagttccaccggatcctgcagtacgccctgccgagacaggagtcccagcggccattcttttggattttcatggacaacttgctgctgaccgaggatgaccaggaaactaccactcggttcctgcagaccgaagccgtgaccctgcaggacgtgagaggccgggactaccagaacgccatgcgggtgtggtccaacatccctggactgaaaagcaagcacgcacctctgacccctaaagaagaggagtacctgcaggcccaggtgcggagcagaagcaagctggacgcccctaaggtggatctgctggtgaagaattgcctcctgcccctgagagagtacttcaagtatttcagccagaatagtctgcccctgggaggcagcggcggcggcttccaggagctggtgaccttcagggacgtggccatcgacttcagcaggcaggagtgggagtacctggaccccaaccagagggacctgtacagggacgtgatgctggagaactacagcaacctggtgagcctgggccacagcatcagcaagcccgacgtggtggacctgctggagcagggcaaggagccctggatgctgctgggcgaggagacccagtacagcggcagcaaccccgagcccgtgggcggcccaagcagcggcgcccctcctcccagcggcggcaggcggcccaagcagcggcgcccctcctcccagcggcggcagcccagccggctccccaacctctaccgaggagggcacctctgagtccgccacccccgagagcggccctggcacctccaccgagcccagcgagggcagcgcacccggcagccctgccggcagccccacctccacagaggagggaaccagcaccgagcccagcgaaggcagcgccccaggcaccagcaccgagcctagtgagcaggagattaaacggatcaacaagatcagaagaagacttgtgaaagacagcaacaccaagaaggccggcaagacaggccccatgaaaaccctgctggttagagtgatgacacccgatctgagagagcggctggaaaacctgagaaagaagcctgaaaatatcccccagcccatcagcaatacatctagagccaacctgaataagctgctgaccgattacaccgaaatgaagaaggcgatcctgcatgtgtactgggaagagttccagaaggaccctgtgggcctgatgagccgggtggcccagcctgccagcaagaagatcgatcagaacaagctgaaacctgagatggacgagaagggcaacctgaccaccgccggctttgcctgctctcagtgtggccagcccctgttcgtgtacaagctggagcaggtgtctgagaagggcaaggcttacaccaactacttcggacggtgcaatgtggccgagcacgaaaagctgatcctgctggcccagctgaagcccgagaaggatagcgacgaagccgtgacatatagcctgggaaagtttgggcagagggccctggatttctacagcattcatgtgaccaaggagtccacccaccccgtgaagcccctggcccagatcgccggaaacagatacgcctccggacctgtgggaaaggccctgagcgacgcatgtatgggcacaatcgcctccttcctgtctaagtaccaggacatcatcatcgaacaccagaaggtggtgaagggcaaccagaagagactggagagcctgcgggagctggccggcaaggaaaacctggaataccctagcgtgaccctgccacctcagcctcacaccaaggagggcgttgatgcctacaacgaagtgatcgcccgggtgcgaatgtgggtgaacctgaacctgtggcagaagctgaagctaagcagagatgatgccaagcctctgctgagactgaagggattcccttcctttcctctggtcgagagacaggccaacgaagtggactggtgggacatggtgtgtaacgtgaagaagctgatcaacgagaaaaaggaggatggcaaggtgttttggcagaatctggctggctacaagagacaggaagccctgagaccatacctgagcagcgaggaagatcggaagaagggaaagaaattcgctcggtaccagctgggcgacctgctgctgcacctggaaaagaagcacggcgaggactggggaaaggtgtacgacgaggcctgggagcggattgacaagaaagtggaaggcctgagcaagcacatcaagctggaagaggaacggagaagcgaggacgcccagagcaaggccgccctgaccgactggctgcgggctaaggccagcttcgtgatcgagggcctgaaggaggccgacaaggacgagttctgcagatgcgagctgaagctgcagaagtggtacggggacctgcggggaaagcccttcgccatcgaagccgagaacagcatcctggacatcagcggcttcagcaagcagtacaactgtgccttcatctggcagaaggacggcgtgaagaagctgaacctgtacctgatcatcaactacttcaagggcggcaagctgcggttcaagaagatcaaacctgaagccttcgaagccaacagattctacaccgtgatcaacaaaaagagcggcgagatcgtgcccatggaggtgaacttcaacttcgacgaccccaacctgatcatcctgcctctggcctttggcaagagacagggcagagaattcatctggaacgacctgctgtccctggaaaccggcagcctgaagctggccaacggaagagtgatcgagaagacactgtacaacagaagaacccggcaggatgagcctgccctgttcgtggccctgaccttcgagcggcgggaggtcctggactcctccaatatcaaaccaatgaacctgatcggcgtggcaagaggcgaaaacatccccgccgtgatcgccctgaccgaccccgagggctgcccactgagccggtttaaggatagcctgggaaacccaacccacatcctgagaatcggcgagagctataaggagaagcagcggaccatccaggccaagaaggaggtggagcagcggagagccggcggctacagccggaagtacgccagcaaagccaagaatctggcagacgatatggtgagaaacaccgctagagatctgctgtactacgccgtgacccaggatgccatgctgatcttcgccaacctgagccggggcttcggccggcagggcaagcggaccttcatggccgagagacagtacacacggatggaggactggctgaccgccaagctggcctacgagggcctgagcaagacctacctgtccaagacactggcccagtacacctccaagacatgcagcaactgtgggtttaccatcaccagcgccgactacgacagggtgctggagaagctgaagaagacagcaacaggctggatgaccacaattaacggcaaggagctgaaggtggagggccagattacctactacaacagatacaagagacagaacgtagtcaaggacctgtccgtcgagctggatagactgagcgaagaatctgtgaacaacgacatctcctcctggacaaagggcagaagcggagaagctctgagcctcctgaagaaaagattctcccatagacccgtgcaggagaagttcgtgtgcctgaactgcggcttcgagacacacgcagccgagcaagccgccctgaacatcgccagatcctggctgttcctgcggagccaggagtacaagaaataccagacaaacaagacaaccggcaacaccgataagagagccttcgtcgagacctggcagtccttttaccggaagaagcttaaggaggtgtggaaacctgccgtgcggtctggcggatctggcggaggctccaccagccccaagaaaaagagaaaagtctaagctgccttctgcggggcttgccttctggccatgcccttcttctctcccttgcacctgtacctcttggtctttgaataaagcctgagtaggaaggctagcaaaaaaaaaaaaaaaaaaaaaaaaaaaaaaaaaaaaaaaaaaaaaaaaaaaaaaaaaaaaaaaaaaaaaaaaaaaaaaaagcccagccggctccccaacctctaccgaggagggcacctctgagtccgccacccccgagagcggccctggcacctccaccgagcccagcgagggcagcgcacccggcagccctgccggcagccccacctccacagaggagggaaccagcaccgagcccagcgaaggcagcgccccaggcaccagcaccgagcctagtgagcaggagattaaacggatcaacaagatcagaagaagacttgtgaaagacagcaacaccaagaaggccggcaagacaggccccatgaaaaccctgctggttagagtgatgacacccgatctgagagagcggctggaaaacctgagaaagaagcctgaaaatatcccccagcccatcagcaatacatctagagccaacctgaataagctgctgaccgattacaccgaaatgaagaaggcgatcctgcatgtgtactgggaagagttccagaaggaccctgtgggcctgatgagccgggtggcccagcctgccagcaagaagatcgatcagaacaagctgaaacctgagatggacgagaagggcaacctgaccaccgccggctttgcctgctctcagtgtggccagcccctgttcgtgtacaagctggagcaggtgtctgagaagggcaaggcttacaccaactacttcggacggtgcaatgtggccgagcacgaaaagctgatcctgctggcccagctgaagcccgagaaggatagcgacgaagccgtgacatatagcctgggaaagtttgggcagagggccctggatttctacagcattcatgtgaccaaggagtccacccaccccgtgaagcccctggcccagatcgccggaaacagatacgcctccggacctgtgggaaaggccctgagcgacgcatgtatgggcacaatcgcctccttcctgtctaagtaccaggacatcatcatcgaacaccagaaggtggtgaagggcaaccagaagagactggagagcctgcgggagctggccggcaaggaaaacctggaataccctagcgtgaccctgccacctcagcctcacaccaaggagggcgttgatgcctacaacgaagtgatcgcccgggtgcgaatgtgggtgaacctgaacctgtggcagaagctgaagctaagcagagatgatgccaagcctctgctgagactgaagggattcccttcctttcctctggtcgagagacaggccaacgaagtggactggtgggacatggtgtgtaacgtgaagaagctgatcaacgagaaaaaggaggatggcaaggtgttttggcagaatctggctggctacaagagacaggaagccctgagaccatacctgagcagcgaggaagatcggaagaagggaaagaaattcgctcggtaccagctgggcgacctgctgctgcacctggaaaagaagcacggcgaggactggggaaaggtgtacgacgaggcctgggagcggattgacaagaaagtggaaggcctgagcaagcacatcaagctggaagaggaacggagaagcgaggacgcccagagcaaggccgccctgaccgactggctgcgggctaaggccagcttcgtgatcgagggcctgaaggaggccgacaaggacgagttctgcagatgcgagctgaagctgcagaagtggtacggggacctgcggggaaagcccttcgccatcgaagccgagaacagcatcctggacatcagcggcttcagcaagcagtacaactgtgccttcatctggcagaaggacggcgtgaagaagctgaacctgtacctgatcatcaactacttcaagggcggcaagctgcggttcaagaagatcaaacctgaagccttcgaagccaacagattctacaccgtgatcaacaaaaagagcggcgagatcgtgcccatggaggtgaacttcaacttcgacgaccccaacctgatcatcctgcctctggcctttggcaagagacagggcagagaattcatctggaacgacctgctgtccctggaaaccggcagcctgaagctggccaacggaagagtgatcgagaagacactgtacaacagaagaacccggcaggatgagcctgccctgttcgtggccctgaccttcgagcggcgggaggtcctggactcctccaatatcaaaccaatgaacctgatcggcgtggcaagaggcgaaaacatccccgccgtgatcgccctgaccgaccccgagggctgcccactgagccggtttaaggatagcctgggaaacccaacccacatcctgagaatcggcgagagctataaggagaagcagcggaccatccaggccaagaaggaggtggagcagcggagagccggcggctacagccggaagtacgccagcaaagccaagaatctggcagacgatatggtgagaaacaccgctagagatctgctgtactacgccgtgacccaggatgccatgctgatcttcgccaacctgagccggggcttcggccggcagggcaagcggaccttcatggccgagagacagtacacacggatggaggactggctgaccgccaagctggcctacgagggcctgagcaagacctacctgtccaagacactggcccagtacacctccaagacatgcagcaactgtgggtttaccatcaccagcgccgactacgacagggtgctggagaagctgaagaagacagcaacaggctggatgaccacaattaacggcaaggagctgaaggtggagggccagattacctactacaacagatacaagagacagaacgtagtcaaggacctgtccgtcgagctggatagactgagcgaagaatctgtgaacaacgacatctcctcctggacaaagggcagaagcggagaagctctgagcctcctgaagaaaagattctcccatagacccgtgcaggagaagttcgtgtgcctgaactgcggcttcgagacacacgcagccgagcaagccgccctgaacatcgccagatcctggctgttcctgcggagccaggagtacaagaaataccagacaaacaagacaaccggcaacaccgataagagagccttcgtcgagacctggcagtccttttaccggaagaagcttaaggaggtgtggaaacctgccgtgcggtctggcggatctggcggaggctccaccagccccaagaaaaagagaaaagtctaagctgccttctgcggggcttgccttctggccatgcccttcttctctcccttgcacctgtacctcttggtctttgaataaagcctgagtaggaaggctagcaaaaaaaaaaaaaaaaaaaaaaaaaaaaaaaaaaaaaaaaaaaaaaaaaaaaaaaaaaaaaaaaaaaaaaaaaaaaaaaa

SEQ ID NO: 10307 - RNA, 8787 nt, synthetic construct
  source 1..8787: mol_type = other RNA
aggaaataagagagaaaagaagagtaagaagaaatataagagccaccatggcccctaagaagaagcgtaaagtgagccggatgaaccacgaccaggagttcgacccccctaaggtgtaccctcccgtccccgccgagaagagaaagcccatccgggtcctgagcctgttcgatggcatcgccaccggtctgctggtgctgaaggacctgggcatccaggtggataggtacattgcctccgaggtgtgcgaggactccatcaccgtgggaatggtgcgtcatcagggcaagatcatgtacgtgggcgacgtgcggagcgtgacacagaagcatatccaggagtggggccctttcgacctggtgatcggcggcagcccttgcaatgacctgagcatcgtgaacccagcccggaagggcctgtacgagggaaccggcagactgttcttcgagttttacagactgctgcacgacgcccggcctaaggaaggcgacgaccggcccttcttttggctgttcgagaatgtggtggccatgggagtcagcgacaagcgggatattagccggttcctggagagcaaccccgtgatgatcgatgccaaggaagtgagcgccgcccaccgggccagatacttctggggcaatctgcctggcatgaacagacccctggccagcaccgtgaacgacaagctggagctgcaggagtgcctggagcacggccggatcgccaagttcagcaaggtgagaaccatcaccacccgaagcaacagcatcaaacaaggcaaggaccagcactttcctgtgttcatgaacgagaaggaggacatcctgtggtgtaccgagatggagagagtgttcgggttcccagtccactacacagatgtcagcaacatgtctagactggccagacagagactgctgggaagaagctggtccgtccctgtgatcagacacctgttcgcccctctgaaggagtacttcgcctgcgtgagcagcggcaacagcaacgccaacagccggggccccagcttctctagcggcctggtgccactgtccctgagagggagccacatgggccccatggagatctacaaaaccgtgagcgcctggaagcggcagcctgtgcgcgtgctgagcctgtttcggaatatcgataaagtcctgaaaagcctgggattcctggagagcggctctggctccggcggtggcaccctgaagtacgtggaggatgtgacaaacgtggtcagacgggatgtggagaagtggggccccttcgatctggtgtacggcagcacccaacccctgggcagctcttgtgaccggtgccctggctggtacatgtttcagttccaccggatcctgcagtacgccctgccgagacaggagtcccagcggccattcttttggattttcatggacaacttgctgctgaccgaggatgaccaggaaactaccactcggttcctgcagaccgaagccgtgaccctgcaggacgtgagaggccgggactaccagaacgccatgcgggtgtggtccaacatccctggactgaaaagcaagcacgcacctctgacccctaaagaagaggagtacctgcaggcccaggtgcggagcagaagcaagctggacgcccctaaggtggatctgctggtgaagaattgcctcctgcccctgagagagtacttcaagtatttcagccagaatagtctgcccctgggaggcagcggcggcggcgccaggggccccgtgagcttcgccgacgtggccgtgtacttcagccccgaggagtggggcaggctgaggcccgcccagagggccctgtacagggacgtgatgagggagacctacggccacctgggcgccctgggcttccccggccccaagcccgccctgatgtgctggatggacgaggagaccgaggtgtggggccccgacgccagggaccccgaggaggccggcgagaagggcaccgagaacggcggcccaagcagcggcgcccctcctcccagcggcggcaggcggcccaagcagcggcgcccctcctcccagcggcggcagcccagccggctccccaacctctaccgaggagggcacctctgagtccgccacccccgagagcggccctggcacctccaccgagcccagcgagggcagcgcacccggcagccctgccggcagccccacctccacagaggagggaaccagcaccgagcccagcgaaggcagcgccccaggcaccagcaccgagcctagtgagcaggagattaaacggatcaacaagatcagaagaagacttgtgaaagacagcaacaccaagaaggccggcaagacaggccccatgaaaaccctgctggttagagtgatgacacccgatctgagagagcggctggaaaacctgagaaagaagcctgaaaatatcccccagcccatcagcaatacatctagagccaacctgaataagctgctgaccgattacaccgaaatgaagaaggcgatcctgcatgtgtactgggaagagttccagaaggaccctgtgggcctgatgagccgggtggcccagcctgccagcaagaagatcgatcagaacaagctgaaacctgagatggacgagaagggcaacctgaccaccgccggctttgcctgctctcagtgtggccagcccctgttcgtgtacaagctggagcaggtgtctgagaagggcaaggcttacaccaactacttcggacggtgcaatgtggccgagcacgaaaagctgatcctgctggcccagctgaagcccgagaaggatagcgacgaagccgtgacatatagcctgggaaagtttgggcagagggccctggatttctacagcattcatgtgaccaaggagtccacccaccccgtgaagcccctggcccagatcgccggaaacagatacgcctccggacctgtgggaaaggccctgagcgacgcatgtatgggcacaatcgcctccttcctgtctaagtaccaggacatcatcatcgaacaccagaaggtggtgaagggcaaccagaagagactggagagcctgcgggagctggccggcaaggaaaacctggaataccctagcgtgaccctgccacctcagcctcacaccaaggagggcgttgatgcctacaacgaagtgatcgcccgggtgcgaatgtgggtgaacctgaacctgtggcagaagctgaagctaagcagagatgatgccaagcctctgctgagactgaagggattcccttcctttcctctggtcgagagacaggccaacgaagtggactggtgggacatggtgtgtaacgtgaagaagctgatcaacgagaaaaaggaggatggcaaggtgttttggcagaatctggctggctacaagagacaggaagccctgagaccatacctgagcagcgaggaagatcggaagaagggaaagaaattcgctcggtaccagctgggcgacctgctgctgcacctggaaaagaagcacggcgaggactggggaaaggtgtacgacgaggcctgggagcggattgacaagaaagtggaaggcctgagcaagcacatcaagctggaagaggaacggagaagcgaggacgcccagagcaaggccgccctgaccgactggctgcgggctaaggccagcttcgtgatcgagggcctgaaggaggccgacaaggacgagttctgcagatgcgagctgaagctgcagaagtggtacggggacctgcggggaaagcccttcgccatcgaagccgagaacagcatcctggacatcagcggcttcagcaagcagtacaactgtgccttcatctggcagaaggacggcgtgaagaagctgaacctgtacctgatcatcaactacttcaagggcggcaagctgcggttcaagaagatcaaacctgaagccttcgaagccaacagattctacaccgtgatcaacaaaaagagcggcgagatcgtgcccatggaggtgaacttcaacttcgacgaccccaacctgatcatcctgcctctggcctttggcaagagacagggcagagaattcatctggaacgacctgctgtccctggaaaccggcagcctgaagctggccaacggaagagtgatcgagaagacactgtacaacagaagaacccggcaggatgagcctgccctgttcgtggccctgaccttcgagcggcgggaggtcctggactcctccaatatcaaaccaatgaacctgatcggcgtggcaagaggcgaaaacatccccgccgtgatcgccctgaccgaccccgagggctgcccactgagccggtttaaggatagcctgggaaacccaacccacatcctgagaatcggcgagagctataaggagaagcagcggaccatccaggccaagaaggaggtggagcagcggagagccggcggctacagccggaagtacgccagcaaagccaagaatctggcagacgatatggtgagaaacaccgctagagatctgctgtactacgccgtgacccaggatgccatgctgatcttcgccaacctgagccggggcttcggccggcagggcaagcggaccttcatggccgagagacagtacacacggatggaggactggctgaccgccaagctggcctacgagggcctgagcaagacctacctgtccaagacactggcccagtacacctccaagacatgcagcaactgtgggtttaccatcaccagcgccgactacgacagggtgctggagaagctgaagaagacagcaacaggctggatgaccacaattaacggcaaggagctgaaggtggagggccagattacctactacaacagatacaagagacagaacgtagtcaaggacctgtccgtcgagctggatagactgagcgaagaatctgtgaacaacgacatctcctcctggacaaagggcagaagcggagaagctctgagcctcctgaagaaaagattctcccatagacccgtgcaggagaagttcgtgtgcctgaactgcggcttcgagacacacgcagccgagcaagccgccctgaacatcgccagatcctggctgttcctgcggagccaggagtacaagaaataccagacaaacaagacaaccggcaacaccgataagagagccttcgtcgagacctggcagtccttttaccggaagaagcttaaggaggtgtggaaacctgccgtgcggtctggcggatctggcggaggctccaccagccccaagaaaaagagaaaagtctaagctgccttctgcggggcttgccttctggccatgcccttcttctctcccttgcacctgtacctcttggtctttgaataaagcctgagtaggaaggctagcaaaaaaaaaaaaaaaaaaaaaaaaaaaaaaaaaaaaaaaaaaaaaaaaaaaaaaaaaaaaaaaaaaaaaaaaaaaaaaaagcccagccggctccccaacctctaccgaggagggcacctctgagtccgccacccccgagagcggccctggcacctccaccgagcccagcgagggcagcgcacccggcagccctgccggcagccccacctccacagaggagggaaccagcaccgagcccagcgaaggcagcgccccaggcaccagcaccgagcctagtgagcaggagattaaacggatcaacaagatcagaagaagacttgtgaaagacagcaacaccaagaaggccggcaagacaggccccatgaaaaccctgctggttagagtgatgacacccgatctgagagagcggctggaaaacctgagaaagaagcctgaaaatatcccccagcccatcagcaatacatctagagccaacctgaataagctgctgaccgattacaccgaaatgaagaaggcgatcctgcatgtgtactgggaagagttccagaaggaccctgtgggcctgatgagccgggtggcccagcctgccagcaagaagatcgatcagaacaagctgaaacctgagatggacgagaagggcaacctgaccaccgccggctttgcctgctctcagtgtggccagcccctgttcgtgtacaagctggagcaggtgtctgagaagggcaaggcttacaccaactacttcggacggtgcaatgtggccgagcacgaaaagctgatcctgctggcccagctgaagcccgagaaggatagcgacgaagccgtgacatatagcctgggaaagtttgggcagagggccctggatttctacagcattcatgtgaccaaggagtccacccaccccgtgaagcccctggcccagatcgccggaaacagatacgcctccggacctgtgggaaaggccctgagcgacgcatgtatgggcacaatcgcctccttcctgtctaagtaccaggacatcatcatcgaacaccagaaggtggtgaagggcaaccagaagagactggagagcctgcgggagctggccggcaaggaaaacctggaataccctagcgtgaccctgccacctcagcctcacaccaaggagggcgttgatgcctacaacgaagtgatcgcccgggtgcgaatgtgggtgaacctgaacctgtggcagaagctgaagctaagcagagatgatgccaagcctctgctgagactgaagggattcccttcctttcctctggtcgagagacaggccaacgaagtggactggtgggacatggtgtgtaacgtgaagaagctgatcaacgagaaaaaggaggatggcaaggtgttttggcagaatctggctggctacaagagacaggaagccctgagaccatacctgagcagcgaggaagatcggaagaagggaaagaaattcgctcggtaccagctgggcgacctgctgctgcacctggaaaagaagcacggcgaggactggggaaaggtgtacgacgaggcctgggagcggattgacaagaaagtggaaggcctgagcaagcacatcaagctggaagaggaacggagaagcgaggacgcccagagcaaggccgccctgaccgactggctgcgggctaaggccagcttcgtgatcgagggcctgaaggaggccgacaaggacgagttctgcagatgcgagctgaagctgcagaagtggtacggggacctgcggggaaagcccttcgccatcgaagccgagaacagcatcctggacatcagcggcttcagcaagcagtacaactgtgccttcatctggcagaaggacggcgtgaagaagctgaacctgtacctgatcatcaactacttcaagggcggcaagctgcggttcaagaagatcaaacctgaagccttcgaagccaacagattctacaccgtgatcaacaaaaagagcggcgagatcgtgcccatggaggtgaacttcaacttcgacgaccccaacctgatcatcctgcctctggcctttggcaagagacagggcagagaattcatctggaacgacctgctgtccctggaaaccggcagcctgaagctggccaacggaagagtgatcgagaagacactgtacaacagaagaacccggcaggatgagcctgccctgttcgtggccctgaccttcgagcggcgggaggtcctggactcctccaatatcaaaccaatgaacctgatcggcgtggcaagaggcgaaaacatccccgccgtgatcgccctgaccgaccccgagggctgcccactgagccggtttaaggatagcctgggaaacccaacccacatcctgagaatcggcgagagctataaggagaagcagcggaccatccaggccaagaaggaggtggagcagcggagagccggcggctacagccggaagtacgccagcaaagccaagaatctggcagacgatatggtgagaaacaccgctagagatctgctgtactacgccgtgacccaggatgccatgctgatcttcgccaacctgagccggggcttcggccggcagggcaagcggaccttcatggccgagagacagtacacacggatggaggactggctgaccgccaagctggcctacgagggcctgagcaagacctacctgtccaagacactggcccagtacacctccaagacatgcagcaactgtgggtttaccatcaccagcgccgactacgacagggtgctggagaagctgaagaagacagcaacaggctggatgaccacaattaacggcaaggagctgaaggtggagggccagattacctactacaacagatacaagagacagaacgtagtcaaggacctgtccgtcgagctggatagactgagcgaagaatctgtgaacaacgacatctcctcctggacaaagggcagaagcggagaagctctgagcctcctgaagaaaagattctcccatagacccgtgcaggagaagttcgtgtgcctgaactgcggcttcgagacacacgcagccgagcaagccgccctgaacatcgccagatcctggctgttcctgcggagccaggagtacaagaaataccagacaaacaagacaaccggcaacaccgataagagagccttcgtcgagacctggcagtccttttaccggaagaagcttaaggaggtgtggaaacctgccgtgcggtctggcggatctggcggaggctccaccagccccaagaaaaagagaaaagtctaagctgccttctgcggggcttgccttctggccatgcccttcttctctcccttgcacctgtacctcttggtctttgaataaagcctgagtaggaaggctagcaaaaaaaaaaaaaaaaaaaaaaaaaaaaaaaaaaaaaaaaaaaaaaaaaaaaaaaaaaaaaaaaaaaaaaaaaaaaaaaa

SEQ ID NO: 10308 - RNA, 8787 nt, synthetic construct
  source 1..8787: mol_type = other RNA
aggaaataagagagaaaagaagagtaagaagaaatataagagccaccatggcccctaagaagaagcgtaaagtgagccggatgaaccacgaccaggagttcgacccccctaaggtgtaccctcccgtccccgccgagaagagaaagcccatccgggtcctgagcctgttcgatggcatcgccaccggtctgctggtgctgaaggacctgggcatccaggtggataggtacattgcctccgaggtgtgcgaggactccatcaccgtgggaatggtgcgtcatcagggcaagatcatgtacgtgggcgacgtgcggagcgtgacacagaagcatatccaggagtggggccctttcgacctggtgatcggcggcagcccttgcaatgacctgagcatcgtgaacccagcccggaagggcctgtacgagggaaccggcagactgttcttcgagttttacagactgctgcacgacgcccggcctaaggaaggcgacgaccggcccttcttttggctgttcgagaatgtggtggccatgggagtcagcgacaagcgggatattagccggttcctggagagcaaccccgtgatgatcgatgccaaggaagtgagcgccgcccaccgggccagatacttctggggcaatctgcctggcatgaacagacccctggccagcaccgtgaacgacaagctggagctgcaggagtgcctggagcacggccggatcgccaagttcagcaaggtgagaaccatcaccacccgaagcaacagcatcaaacaaggcaaggaccagcactttcctgtgttcatgaacgagaaggaggacatcctgtggtgtaccgagatggagagagtgttcgggttcccagtccactacacagatgtcagcaacatgtctagactggccagacagagactgctgggaagaagctggtccgtccctgtgatcagacacctgttcgcccctctgaaggagtacttcgcctgcgtgagcagcggcaacagcaacgccaacagccggggccccagcttctctagcggcctggtgccactgtccctgagagggagccacatgggccccatggagatctacaaaaccgtgagcgcctggaagcggcagcctgtgcgcgtgctgagcctgtttcggaatatcgataaagtcctgaaaagcctgggattcctggagagcggctctggctccggcggtggcaccctgaagtacgtggaggatgtgacaaacgtggtcagacgggatgtggagaagtggggccccttcgatctggtgtacggcagcacccaacccctgggcagctcttgtgaccggtgccctggctggtacatgtttcagttccaccggatcctgcagtacgccctgccgagacaggagtcccagcggccattcttttggattttcatggacaacttgctgctgaccgaggatgaccaggaaactaccactcggttcctgcagaccgaagccgtgaccctgcaggacgtgagaggccgggactaccagaacgccatgcgggtgtggtccaacatccctggactgaaaagcaagcacgcacctctgacccctaaagaagaggagtacctgcaggcccaggtgcggagcagaagcaagctggacgcccctaaggtggatctgctggtgaagaattgcctcctgcccctgagagagtacttcaagtatttcagccagaatagtctgcccctgggaggcagcggcggcggccagatgctggtgaccttcgaggacatcgccgtgagcttcagcaaggaggagtgggagtacctggacgagggccagaaggagctgtacagggaggtgatgaaggagaactaccagaccctgatcagcctgggcaccggcttccccaccgtgatccccgagatcatcagccacatcgagcagggcgacgagcccggcagcgaggagagggagaacggcaagagcagctgcagcggcgagagcggcggcggcccaagcagcggcgcccctcctcccagcggcggcaggcggcccaagcagcggcgcccctcctcccagcggcggcagcccagccggctccccaacctctaccgaggagggcacctctgagtccgccacccccgagagcggccctggcacctccaccgagcccagcgagggcagcgcacccggcagccctgccggcagccccacctccacagaggagggaaccagcaccgagcccagcgaaggcagcgccccaggcaccagcaccgagcctagtgagcaggagattaaacggatcaacaagatcagaagaagacttgtgaaagacagcaacaccaagaaggccggcaagacaggccccatgaaaaccctgctggttagagtgatgacacccgatctgagagagcggctggaaaacctgagaaagaagcctgaaaatatcccccagcccatcagcaatacatctagagccaacctgaataagctgctgaccgattacaccgaaatgaagaaggcgatcctgcatgtgtactgggaagagttccagaaggaccctgtgggcctgatgagccgggtggcccagcctgccagcaagaagatcgatcagaacaagctgaaacctgagatggacgagaagggcaacctgaccaccgccggctttgcctgctctcagtgtggccagcccctgttcgtgtacaagctggagcaggtgtctgagaagggcaaggcttacaccaactacttcggacggtgcaatgtggccgagcacgaaaagctgatcctgctggcccagctgaagcccgagaaggatagcgacgaagccgtgacatatagcctgggaaagtttgggcagagggccctggatttctacagcattcatgtgaccaaggagtccacccaccccgtgaagcccctggcccagatcgccggaaacagatacgcctccggacctgtgggaaaggccctgagcgacgcatgtatgggcacaatcgcctccttcctgtctaagtaccaggacatcatcatcgaacaccagaaggtggtgaagggcaaccagaagagactggagagcctgcgggagctggccggcaaggaaaacctggaataccctagcgtgaccctgccacctcagcctcacaccaaggagggcgttgatgcctacaacgaagtgatcgcccgggtgcgaatgtgggtgaacctgaacctgtggcagaagctgaagctaagcagagatgatgccaagcctctgctgagactgaagggattcccttcctttcctctggtcgagagacaggccaacgaagtggactggtgggacatggtgtgtaacgtgaagaagctgatcaacgagaaaaaggaggatggcaaggtgttttggcagaatctggctggctacaagagacaggaagccctgagaccatacctgagcagcgaggaagatcggaagaagggaaagaaattcgctcggtaccagctgggcgacctgctgctgcacctggaaaagaagcacggcgaggactggggaaaggtgtacgacgaggcctgggagcggattgacaagaaagtggaaggcctgagcaagcacatcaagctggaagaggaacggagaagcgaggacgcccagagcaaggccgccctgaccgactggctgcgggctaaggccagcttcgtgatcgagggcctgaaggaggccgacaaggacgagttctgcagatgcgagctgaagctgcagaagtggtacggggacctgcggggaaagcccttcgccatcgaagccgagaacagcatcctggacatcagcggcttcagcaagcagtacaactgtgccttcatctggcagaaggacggcgtgaagaagctgaacctgtacctgatcatcaactacttcaagggcggcaagctgcggttcaagaagatcaaacctgaagccttcgaagccaacagattctacaccgtgatcaacaaaaagagcggcgagatcgtgcccatggaggtgaacttcaacttcgacgaccccaacctgatcatcctgcctctggcctttggcaagagacagggcagagaattcatctggaacgacctgctgtccctggaaaccggcagcctgaagctggccaacggaagagtgatcgagaagacactgtacaacagaagaacccggcaggatgagcctgccctgttcgtggccctgaccttcgagcggcgggaggtcctggactcctccaatatcaaaccaatgaacctgatcggcgtggcaagaggcgaaaacatccccgccgtgatcgccctgaccgaccccgagggctgcccactgagccggtttaaggatagcctgggaaacccaacccacatcctgagaatcggcgagagctataaggagaagcagcggaccatccaggccaagaaggaggtggagcagcggagagccggcggctacagccggaagtacgccagcaaagccaagaatctggcagacgatatggtgagaaacaccgctagagatctgctgtactacgccgtgacccaggatgccatgctgatcttcgccaacctgagccggggcttcggccggcagggcaagcggaccttcatggccgagagacagtacacacggatggaggactggctgaccgccaagctggcctacgagggcctgagcaagacctacctgtccaagacactggcccagtacacctccaagacatgcagcaactgtgggtttaccatcaccagcgccgactacgacagggtgctggagaagctgaagaagacagcaacaggctggatgaccacaattaacggcaaggagctgaaggtggagggccagattacctactacaacagatacaagagacagaacgtagtcaaggacctgtccgtcgagctggatagactgagcgaagaatctgtgaacaacgacatctcctcctggacaaagggcagaagcggagaagctctgagcctcctgaagaaaagattctcccatagacccgtgcaggagaagttcgtgtgcctgaactgcggcttcgagacacacgcagccgagcaagccgccctgaacatcgccagatcctggctgttcctgcggagccaggagtacaagaaataccagacaaacaagacaaccggcaacaccgataagagagccttcgtcgagacctggcagtccttttaccggaagaagcttaaggaggtgtggaaacctgccgtgcggtctggcggatctggcggaggctccaccagccccaagaaaaagagaaaagtctaagctgccttctgcggggcttgccttctggccatgcccttcttctctcccttgcacctgtacctcttggtctttgaataaagcctgagtaggaaggctagcaaaaaaaaaaaaaaaaaaaaaaaaaaaaaaaaaaaaaaaaaaaaaaaaaaaaaaaaaaaaaaaaaaaaaaaaaaaaaaaagcccagccggctccccaacctctaccgaggagggcacctctgagtccgccacccccgagagcggccctggcacctccaccgagcccagcgagggcagcgcacccggcagccctgccggcagccccacctccacagaggagggaaccagcaccgagcccagcgaaggcagcgccccaggcaccagcaccgagcctagtgagcaggagattaaacggatcaacaagatcagaagaagacttgtgaaagacagcaacaccaagaaggccggcaagacaggccccatgaaaaccctgctggttagagtgatgacacccgatctgagagagcggctggaaaacctgagaaagaagcctgaaaatatcccccagcccatcagcaatacatctagagccaacctgaataagctgctgaccgattacaccgaaatgaagaaggcgatcctgcatgtgtactgggaagagttccagaaggaccctgtgggcctgatgagccgggtggcccagcctgccagcaagaagatcgatcagaacaagctgaaacctgagatggacgagaagggcaacctgaccaccgccggctttgcctgctctcagtgtggccagcccctgttcgtgtacaagctggagcaggtgtctgagaagggcaaggcttacaccaactacttcggacggtgcaatgtggccgagcacgaaaagctgatcctgctggcccagctgaagcccgagaaggatagcgacgaagccgtgacatatagcctgggaaagtttgggcagagggccctggatttctacagcattcatgtgaccaaggagtccacccaccccgtgaagcccctggcccagatcgccggaaacagatacgcctccggacctgtgggaaaggccctgagcgacgcatgtatgggcacaatcgcctccttcctgtctaagtaccaggacatcatcatcgaacaccagaaggtggtgaagggcaaccagaagagactggagagcctgcgggagctggccggcaaggaaaacctggaataccctagcgtgaccctgccacctcagcctcacaccaaggagggcgttgatgcctacaacgaagtgatcgcccgggtgcgaatgtgggtgaacctgaacctgtggcagaagctgaagctaagcagagatgatgccaagcctctgctgagactgaagggattcccttcctttcctctggtcgagagacaggccaacgaagtggactggtgggacatggtgtgtaacgtgaagaagctgatcaacgagaaaaaggaggatggcaaggtgttttggcagaatctggctggctacaagagacaggaagccctgagaccatacctgagcagcgaggaagatcggaagaagggaaagaaattcgctcggtaccagctgggcgacctgctgctgcacctggaaaagaagcacggcgaggactggggaaaggtgtacgacgaggcctgggagcggattgacaagaaagtggaaggcctgagcaagcacatcaagctggaagaggaacggagaagcgaggacgcccagagcaaggccgccctgaccgactggctgcgggctaaggccagcttcgtgatcgagggcctgaaggaggccgacaaggacgagttctgcagatgcgagctgaagctgcagaagtggtacggggacctgcggggaaagcccttcgccatcgaagccgagaacagcatcctggacatcagcggcttcagcaagcagtacaactgtgccttcatctggcagaaggacggcgtgaagaagctgaacctgtacctgatcatcaactacttcaagggcggcaagctgcggttcaagaagatcaaacctgaagccttcgaagccaacagattctacaccgtgatcaacaaaaagagcggcgagatcgtgcccatggaggtgaacttcaacttcgacgaccccaacctgatcatcctgcctctggcctttggcaagagacagggcagagaattcatctggaacgacctgctgtccctggaaaccggcagcctgaagctggccaacggaagagtgatcgagaagacactgtacaacagaagaacccggcaggatgagcctgccctgttcgtggccctgaccttcgagcggcgggaggtcctggactcctccaatatcaaaccaatgaacctgatcggcgtggcaagaggcgaaaacatccccgccgtgatcgccctgaccgaccccgagggctgcccactgagccggtttaaggatagcctgggaaacccaacccacatcctgagaatcggcgagagctataaggagaagcagcggaccatccaggccaagaaggaggtggagcagcggagagccggcggctacagccggaagtacgccagcaaagccaagaatctggcagacgatatggtgagaaacaccgctagagatctgctgtactacgccgtgacccaggatgccatgctgatcttcgccaacctgagccggggcttcggccggcagggcaagcggaccttcatggccgagagacagtacacacggatggaggactggctgaccgccaagctggcctacgagggcctgagcaagacctacctgtccaagacactggcccagtacacctccaagacatgcagcaactgtgggtttaccatcaccagcgccgactacgacagggtgctggagaagctgaagaagacagcaacaggctggatgaccacaattaacggcaaggagctgaaggtggagggccagattacctactacaacagatacaagagacagaacgtagtcaaggacctgtccgtcgagctggatagactgagcgaagaatctgtgaacaacgacatctcctcctggacaaagggcagaagcggagaagctctgagcctcctgaagaaaagattctcccatagacccgtgcaggagaagttcgtgtgcctgaactgcggcttcgagacacacgcagccgagcaagccgccctgaacatcgccagatcctggctgttcctgcggagccaggagtacaagaaataccagacaaacaagacaaccggcaacaccgataagagagccttcgtcgagacctggcagtccttttaccggaagaagcttaaggaggtgtggaaacctgccgtgcggtctggcggatctggcggaggctccaccagccccaagaaaaagagaaaagtctaagctgccttctgcggggcttgccttctggccatgcccttcttctctcccttgcacctgtacctcttggtctttgaataaagcctgagtaggaaggctagcaaaaaaaaaaaaaaaaaaaaaaaaaaaaaaaaaaaaaaaaaaaaaaaaaaaaaaaaaaaaaaaaaaaaaaaaaaaaaaaa

SEQ ID NO: 10309 - RNA, 8787 nt, synthetic construct
  source 1..8787: mol_type = other RNA
aggaaataagagagaaaagaagagtaagaagaaatataagagccaccatggcccctaagaagaagcgtaaagtgagccggatgaaccacgaccaggagttcgacccccctaaggtgtaccctcccgtccccgccgagaagagaaagcccatccgggtcctgagcctgttcgatggcatcgccaccggtctgctggtgctgaaggacctgggcatccaggtggataggtacattgcctccgaggtgtgcgaggactccatcaccgtgggaatggtgcgtcatcagggcaagatcatgtacgtgggcgacgtgcggagcgtgacacagaagcatatccaggagtggggccctttcgacctggtgatcggcggcagcccttgcaatgacctgagcatcgtgaacccagcccggaagggcctgtacgagggaaccggcagactgttcttcgagttttacagactgctgcacgacgcccggcctaaggaaggcgacgaccggcccttcttttggctgttcgagaatgtggtggccatgggagtcagcgacaagcgggatattagccggttcctggagagcaaccccgtgatgatcgatgccaaggaagtgagcgccgcccaccgggccagatacttctggggcaatctgcctggcatgaacagacccctggccagcaccgtgaacgacaagctggagctgcaggagtgcctggagcacggccggatcgccaagttcagcaaggtgagaaccatcaccacccgaagcaacagcatcaaacaaggcaaggaccagcactttcctgtgttcatgaacgagaaggaggacatcctgtggtgtaccgagatggagagagtgttcgggttcccagtccactacacagatgtcagcaacatgtctagactggccagacagagactgctgggaagaagctggtccgtccctgtgatcagacacctgttcgcccctctgaaggagtacttcgcctgcgtgagcagcggcaacagcaacgccaacagccggggccccagcttctctagcggcctggtgccactgtccctgagagggagccacatgggccccatggagatctacaaaaccgtgagcgcctggaagcggcagcctgtgcgcgtgctgagcctgtttcggaatatcgataaagtcctgaaaagcctgggattcctggagagcggctctggctccggcggtggcaccctgaagtacgtggaggatgtgacaaacgtggtcagacgggatgtggagaagtggggccccttcgatctggtgtacggcagcacccaacccctgggcagctcttgtgaccggtgccctggctggtacatgtttcagttccaccggatcctgcagtacgccctgccgagacaggagtcccagcggccattcttttggattttcatggacaacttgctgctgaccgaggatgaccaggaaactaccactcggttcctgcagaccgaagccgtgaccctgcaggacgtgagaggccgggactaccagaacgccatgcgggtgtggtccaacatccctggactgaaaagcaagcacgcacctctgacccctaaagaagaggagtacctgcaggcccaggtgcggagcagaagcaagctggacgcccctaaggtggatctgctggtgaagaattgcctcctgcccctgagagagtacttcaagtatttcagccagaatagtctgcccctgggaggcagcggcggcggcgagcccggcgccgtgagcttcgccgacgtggccgtgtacttcagcctggaggagtggggctgcctgaggcccagccagagggccctgtacagggacgtgatgagggagacctacctgcacctgagcgccctgggcggcggcggcaccaagcccgccctgatcagctgggtggaggaggaggccgagctgtggcaccccgacgcccaggaccccgaggtggccaagtgccccaccgaggccgacggcggcccaagcagcggcgcccctcctcccagcggcggcaggcggcccaagcagcggcgcccctcctcccagcggcggcagcccagccggctccccaacctctaccgaggagggcacctctgagtccgccacccccgagagcggccctggcacctccaccgagcccagcgagggcagcgcacccggcagccctgccggcagccccacctccacagaggagggaaccagcaccgagcccagcgaaggcagcgccccaggcaccagcaccgagcctagtgagcaggagattaaacggatcaacaagatcagaagaagacttgtgaaagacagcaacaccaagaaggccggcaagacaggccccatgaaaaccctgctggttagagtgatgacacccgatctgagagagcggctggaaaacctgagaaagaagcctgaaaatatcccccagcccatcagcaatacatctagagccaacctgaataagctgctgaccgattacaccgaaatgaagaaggcgatcctgcatgtgtactgggaagagttccagaaggaccctgtgggcctgatgagccgggtggcccagcctgccagcaagaagatcgatcagaacaagctgaaacctgagatggacgagaagggcaacctgaccaccgccggctttgcctgctctcagtgtggccagcccctgttcgtgtacaagctggagcaggtgtctgagaagggcaaggcttacaccaactacttcggacggtgcaatgtggccgagcacgaaaagctgatcctgctggcccagctgaagcccgagaaggatagcgacgaagccgtgacatatagcctgggaaagtttgggcagagggccctggatttctacagcattcatgtgaccaaggagtccacccaccccgtgaagcccctggcccagatcgccggaaacagatacgcctccggacctgtgggaaaggccctgagcgacgcatgtatgggcacaatcgcctccttcctgtctaagtaccaggacatcatcatcgaacaccagaaggtggtgaagggcaaccagaagagactggagagcctgcgggagctggccggcaaggaaaacctggaataccctagcgtgaccctgccacctcagcctcacaccaaggagggcgttgatgcctacaacgaagtgatcgcccgggtgcgaatgtgggtgaacctgaacctgtggcagaagctgaagctaagcagagatgatgccaagcctctgctgagactgaagggattcccttcctttcctctggtcgagagacaggccaacgaagtggactggtgggacatggtgtgtaacgtgaagaagctgatcaacgagaaaaaggaggatggcaaggtgttttggcagaatctggctggctacaagagacaggaagccctgagaccatacctgagcagcgaggaagatcggaagaagggaaagaaattcgctcggtaccagctgggcgacctgctgctgcacctggaaaagaagcacggcgaggactggggaaaggtgtacgacgaggcctgggagcggattgacaagaaagtggaaggcctgagcaagcacatcaagctggaagaggaacggagaagcgaggacgcccagagcaaggccgccctgaccgactggctgcgggctaaggccagcttcgtgatcgagggcctgaaggaggccgacaaggacgagttctgcagatgcgagctgaagctgcagaagtggtacggggacctgcggggaaagcccttcgccatcgaagccgagaacagcatcctggacatcagcggcttcagcaagcagtacaactgtgccttcatctggcagaaggacggcgtgaagaagctgaacctgtacctgatcatcaactacttcaagggcggcaagctgcggttcaagaagatcaaacctgaagccttcgaagccaacagattctacaccgtgatcaacaaaaagagcggcgagatcgtgcccatggaggtgaacttcaacttcgacgaccccaacctgatcatcctgcctctggcctttggcaagagacagggcagagaattcatctggaacgacctgctgtccctggaaaccggcagcctgaagctggccaacggaagagtgatcgagaagacactgtacaacagaagaacccggcaggatgagcctgccctgttcgtggccctgaccttcgagcggcgggaggtcctggactcctccaatatcaaaccaatgaacctgatcggcgtggcaagaggcgaaaacatccccgccgtgatcgccctgaccgaccccgagggctgcccactgagccggtttaaggatagcctgggaaacccaacccacatcctgagaatcggcgagagctataaggagaagcagcggaccatccaggccaagaaggaggtggagcagcggagagccggcggctacagccggaagtacgccagcaaagccaagaatctggcagacgatatggtgagaaacaccgctagagatctgctgtactacgccgtgacccaggatgccatgctgatcttcgccaacctgagccggggcttcggccggcagggcaagcggaccttcatggccgagagacagtacacacggatggaggactggctgaccgccaagctggcctacgagggcctgagcaagacctacctgtccaagacactggcccagtacacctccaagacatgcagcaactgtgggtttaccatcaccagcgccgactacgacagggtgctggagaagctgaagaagacagcaacaggctggatgaccacaattaacggcaaggagctgaaggtggagggccagattacctactacaacagatacaagagacagaacgtagtcaaggacctgtccgtcgagctggatagactgagcgaagaatctgtgaacaacgacatctcctcctggacaaagggcagaagcggagaagctctgagcctcctgaagaaaagattctcccatagacccgtgcaggagaagttcgtgtgcctgaactgcggcttcgagacacacgcagccgagcaagccgccctgaacatcgccagatcctggctgttcctgcggagccaggagtacaagaaataccagacaaacaagacaaccggcaacaccgataagagagccttcgtcgagacctggcagtccttttaccggaagaagcttaaggaggtgtggaaacctgccgtgcggtctggcggatctggcggaggctccaccagccccaagaaaaagagaaaagtctaagctgccttctgcggggcttgccttctggccatgcccttcttctctcccttgcacctgtacctcttggtctttgaataaagcctgagtaggaaggctagcaaaaaaaaaaaaaaaaaaaaaaaaaaaaaaaaaaaaaaaaaaaaaaaaaaaaaaaaaaaaaaaaaaaaaaaaaaaaaaaagcccagccggctccccaacctctaccgaggagggcacctctgagtccgccacccccgagagcggccctggcacctccaccgagcccagcgagggcagcgcacccggcagccctgccggcagccccacctccacagaggagggaaccagcaccgagcccagcgaaggcagcgccccaggcaccagcaccgagcctagtgagcaggagattaaacggatcaacaagatcagaagaagacttgtgaaagacagcaacaccaagaaggccggcaagacaggccccatgaaaaccctgctggttagagtgatgacacccgatctgagagagcggctggaaaacctgagaaagaagcctgaaaatatcccccagcccatcagcaatacatctagagccaacctgaataagctgctgaccgattacaccgaaatgaagaaggcgatcctgcatgtgtactgggaagagttccagaaggaccctgtgggcctgatgagccgggtggcccagcctgccagcaagaagatcgatcagaacaagctgaaacctgagatggacgagaagggcaacctgaccaccgccggctttgcctgctctcagtgtggccagcccctgttcgtgtacaagctggagcaggtgtctgagaagggcaaggcttacaccaactacttcggacggtgcaatgtggccgagcacgaaaagctgatcctgctggcccagctgaagcccgagaaggatagcgacgaagccgtgacatatagcctgggaaagtttgggcagagggccctggatttctacagcattcatgtgaccaaggagtccacccaccccgtgaagcccctggcccagatcgccggaaacagatacgcctccggacctgtgggaaaggccctgagcgacgcatgtatgggcacaatcgcctccttcctgtctaagtaccaggacatcatcatcgaacaccagaaggtggtgaagggcaaccagaagagactggagagcctgcgggagctggccggcaaggaaaacctggaataccctagcgtgaccctgccacctcagcctcacaccaaggagggcgttgatgcctacaacgaagtgatcgcccgggtgcgaatgtgggtgaacctgaacctgtggcagaagctgaagctaagcagagatgatgccaagcctctgctgagactgaagggattcccttcctttcctctggtcgagagacaggccaacgaagtggactggtgggacatggtgtgtaacgtgaagaagctgatcaacgagaaaaaggaggatggcaaggtgttttggcagaatctggctggctacaagagacaggaagccctgagaccatacctgagcagcgaggaagatcggaagaagggaaagaaattcgctcggtaccagctgggcgacctgctgctgcacctggaaaagaagcacggcgaggactggggaaaggtgtacgacgaggcctgggagcggattgacaagaaagtggaaggcctgagcaagcacatcaagctggaagaggaacggagaagcgaggacgcccagagcaaggccgccctgaccgactggctgcgggctaaggccagcttcgtgatcgagggcctgaaggaggccgacaaggacgagttctgcagatgcgagctgaagctgcagaagtggtacggggacctgcggggaaagcccttcgccatcgaagccgagaacagcatcctggacatcagcggcttcagcaagcagtacaactgtgccttcatctggcagaaggacggcgtgaagaagctgaacctgtacctgatcatcaactacttcaagggcggcaagctgcggttcaagaagatcaaacctgaagccttcgaagccaacagattctacaccgtgatcaacaaaaagagcggcgagatcgtgcccatggaggtgaacttcaacttcgacgaccccaacctgatcatcctgcctctggcctttggcaagagacagggcagagaattcatctggaacgacctgctgtccctggaaaccggcagcctgaagctggccaacggaagagtgatcgagaagacactgtacaacagaagaacccggcaggatgagcctgccctgttcgtggccctgaccttcgagcggcgggaggtcctggactcctccaatatcaaaccaatgaacctgatcggcgtggcaagaggcgaaaacatccccgccgtgatcgccctgaccgaccccgagggctgcccactgagccggtttaaggatagcctgggaaacccaacccacatcctgagaatcggcgagagctataaggagaagcagcggaccatccaggccaagaaggaggtggagcagcggagagccggcggctacagccggaagtacgccagcaaagccaagaatctggcagacgatatggtgagaaacaccgctagagatctgctgtactacgccgtgacccaggatgccatgctgatcttcgccaacctgagccggggcttcggccggcagggcaagcggaccttcatggccgagagacagtacacacggatggaggactggctgaccgccaagctggcctacgagggcctgagcaagacctacctgtccaagacactggcccagtacacctccaagacatgcagcaactgtgggtttaccatcaccagcgccgactacgacagggtgctggagaagctgaagaagacagcaacaggctggatgaccacaattaacggcaaggagctgaaggtggagggccagattacctactacaacagatacaagagacagaacgtagtcaaggacctgtccgtcgagctggatagactgagcgaagaatctgtgaacaacgacatctcctcctggacaaagggcagaagcggagaagctctgagcctcctgaagaaaagattctcccatagacccgtgcaggagaagttcgtgtgcctgaactgcggcttcgagacacacgcagccgagcaagccgccctgaacatcgccagatcctggctgttcctgcggagccaggagtacaagaaataccagacaaacaagacaaccggcaacaccgataagagagccttcgtcgagacctggcagtccttttaccggaagaagcttaaggaggtgtggaaacctgccgtgcggtctggcggatctggcggaggctccaccagccccaagaaaaagagaaaagtctaagctgccttctgcggggcttgccttctggccatgcccttcttctctcccttgcacctgtacctcttggtctttgaataaagcctgagtaggaaggctagcaaaaaaaaaaaaaaaaaaaaaaaaaaaaaaaaaaaaaaaaaaaaaaaaaaaaaaaaaaaaaaaaaaaaaaaaaaaaaaaa

SEQ ID NO: 10310 - RNA, 8787 nt, synthetic construct
  source 1..8787: mol_type = other RNA
aggaaataagagagaaaagaagagtaagaagaaatataagagccaccatggcccctaagaagaagcgtaaagtgagccggatgaaccacgaccaggagttcgacccccctaaggtgtaccctcccgtccccgccgagaagagaaagcccatccgggtcctgagcctgttcgatggcatcgccaccggtctgctggtgctgaaggacctgggcatccaggtggataggtacattgcctccgaggtgtgcgaggactccatcaccgtgggaatggtgcgtcatcagggcaagatcatgtacgtgggcgacgtgcggagcgtgacacagaagcatatccaggagtggggccctttcgacctggtgatcggcggcagcccttgcaatgacctgagcatcgtgaacccagcccggaagggcctgtacgagggaaccggcagactgttcttcgagttttacagactgctgcacgacgcccggcctaaggaaggcgacgaccggcccttcttttggctgttcgagaatgtggtggccatgggagtcagcgacaagcgggatattagccggttcctggagagcaaccccgtgatgatcgatgccaaggaagtgagcgccgcccaccgggccagatacttctggggcaatctgcctggcatgaacagacccctggccagcaccgtgaacgacaagctggagctgcaggagtgcctggagcacggccggatcgccaagttcagcaaggtgagaaccatcaccacccgaagcaacagcatcaaacaaggcaaggaccagcactttcctgtgttcatgaacgagaaggaggacatcctgtggtgtaccgagatggagagagtgttcgggttcccagtccactacacagatgtcagcaacatgtctagactggccagacagagactgctgggaagaagctggtccgtccctgtgatcagacacctgttcgcccctctgaaggagtacttcgcctgcgtgagcagcggcaacagcaacgccaacagccggggccccagcttctctagcggcctggtgccactgtccctgagagggagccacatgggccccatggagatctacaaaaccgtgagcgcctggaagcggcagcctgtgcgcgtgctgagcctgtttcggaatatcgataaagtcctgaaaagcctgggattcctggagagcggctctggctccggcggtggcaccctgaagtacgtggaggatgtgacaaacgtggtcagacgggatgtggagaagtggggccccttcgatctggtgtacggcagcacccaacccctgggcagctcttgtgaccggtgccctggctggtacatgtttcagttccaccggatcctgcagtacgccctgccgagacaggagtcccagcggccattcttttggattttcatggacaacttgctgctgaccgaggatgaccaggaaactaccactcggttcctgcagaccgaagccgtgaccctgcaggacgtgagaggccgggactaccagaacgccatgcgggtgtggtccaacatccctggactgaaaagcaagcacgcacctctgacccctaaagaagaggagtacctgcaggcccaggtgcggagcagaagcaagctggacgcccctaaggtggatctgctggtgaagaattgcctcctgcccctgagagagtacttcaagtatttcagccagaatagtctgcccctgggaggcagcggcggcggcccccagaagctggtgaccttcgaggacgtggccgtgtacttcacccaggccgagtgggacggcctgagccccgcccagaggatcctgtacagggacgtgatgctggagaactacggcaacgtggccagcctgggcttccccctgctgaagcccgccgtgatcagccagctggagggcggcggcgagctgggcgcccccagccccctggccgccggcaccggcctgcacggcctgaggaccgtgggcggcccaagcagcggcgcccctcctcccagcggcggcaggcggcccaagcagcggcgcccctcctcccagcggcggcagcccagccggctccccaacctctaccgaggagggcacctctgagtccgccacccccgagagcggccctggcacctccaccgagcccagcgagggcagcgcacccggcagccctgccggcagccccacctccacagaggagggaaccagcaccgagcccagcgaaggcagcgccccaggcaccagcaccgagcctagtgagcaggagattaaacggatcaacaagatcagaagaagacttgtgaaagacagcaacaccaagaaggccggcaagacaggccccatgaaaaccctgctggttagagtgatgacacccgatctgagagagcggctggaaaacctgagaaagaagcctgaaaatatcccccagcccatcagcaatacatctagagccaacctgaataagctgctgaccgattacaccgaaatgaagaaggcgatcctgcatgtgtactgggaagagttccagaaggaccctgtgggcctgatgagccgggtggcccagcctgccagcaagaagatcgatcagaacaagctgaaacctgagatggacgagaagggcaacctgaccaccgccggctttgcctgctctcagtgtggccagcccctgttcgtgtacaagctggagcaggtgtctgagaagggcaaggcttacaccaactacttcggacggtgcaatgtggccgagcacgaaaagctgatcctgctggcccagctgaagcccgagaaggatagcgacgaagccgtgacatatagcctgggaaagtttgggcagagggccctggatttctacagcattcatgtgaccaaggagtccacccaccccgtgaagcccctggcccagatcgccggaaacagatacgcctccggacctgtgggaaaggccctgagcgacgcatgtatgggcacaatcgcctccttcctgtctaagtaccaggacatcatcatcgaacaccagaaggtggtgaagggcaaccagaagagactggagagcctgcgggagctggccggcaaggaaaacctggaataccctagcgtgaccctgccacctcagcctcacaccaaggagggcgttgatgcctacaacgaagtgatcgcccgggtgcgaatgtgggtgaacctgaacctgtggcagaagctgaagctaagcagagatgatgccaagcctctgctgagactgaagggattcccttcctttcctctggtcgagagacaggccaacgaagtggactggtgggacatggtgtgtaacgtgaagaagctgatcaacgagaaaaaggaggatggcaaggtgttttggcagaatctggctggctacaagagacaggaagccctgagaccatacctgagcagcgaggaagatcggaagaagggaaagaaattcgctcggtaccagctgggcgacctgctgctgcacctggaaaagaagcacggcgaggactggggaaaggtgtacgacgaggcctgggagcggattgacaagaaagtggaaggcctgagcaagcacatcaagctggaagaggaacggagaagcgaggacgcccagagcaaggccgccctgaccgactggctgcgggctaaggccagcttcgtgatcgagggcctgaaggaggccgacaaggacgagttctgcagatgcgagctgaagctgcagaagtggtacggggacctgcggggaaagcccttcgccatcgaagccgagaacagcatcctggacatcagcggcttcagcaagcagtacaactgtgccttcatctggcagaaggacggcgtgaagaagctgaacctgtacctgatcatcaactacttcaagggcggcaagctgcggttcaagaagatcaaacctgaagccttcgaagccaacagattctacaccgtgatcaacaaaaagagcggcgagatcgtgcccatggaggtgaacttcaacttcgacgaccccaacctgatcatcctgcctctggcctttggcaagagacagggcagagaattcatctggaacgacctgctgtccctggaaaccggcagcctgaagctggccaacggaagagtgatcgagaagacactgtacaacagaagaacccggcaggatgagcctgccctgttcgtggccctgaccttcgagcggcgggaggtcctggactcctccaatatcaaaccaatgaacctgatcggcgtggcaagaggcgaaaacatccccgccgtgatcgccctgaccgaccccgagggctgcccactgagccggtttaaggatagcctgggaaacccaacccacatcctgagaatcggcgagagctataaggagaagcagcggaccatccaggccaagaaggaggtggagcagcggagagccggcggctacagccggaagtacgccagcaaagccaagaatctggcagacgatatggtgagaaacaccgctagagatctgctgtactacgccgtgacccaggatgccatgctgatcttcgccaacctgagccggggcttcggccggcagggcaagcggaccttcatggccgagagacagtacacacggatggaggactggctgaccgccaagctggcctacgagggcctgagcaagacctacctgtccaagacactggcccagtacacctccaagacatgcagcaactgtgggtttaccatcaccagcgccgactacgacagggtgctggagaagctgaagaagacagcaacaggctggatgaccacaattaacggcaaggagctgaaggtggagggccagattacctactacaacagatacaagagacagaacgtagtcaaggacctgtccgtcgagctggatagactgagcgaagaatctgtgaacaacgacatctcctcctggacaaagggcagaagcggagaagctctgagcctcctgaagaaaagattctcccatagacccgtgcaggagaagttcgtgtgcctgaactgcggcttcgagacacacgcagccgagcaagccgccctgaacatcgccagatcctggctgttcctgcggagccaggagtacaagaaataccagacaaacaagacaaccggcaacaccgataagagagccttcgtcgagacctggcagtccttttaccggaagaagcttaaggaggtgtggaaacctgccgtgcggtctggcggatctggcggaggctccaccagccccaagaaaaagagaaaagtctaagctgccttctgcggggcttgccttctggccatgcccttcttctctcccttgcacctgtacctcttggtctttgaataaagcctgagtaggaaggctagcaaaaaaaaaaaaaaaaaaaaaaaaaaaaaaaaaaaaaaaaaaaaaaaaaaaaaaaaaaaaaaaaaaaaaaaaaaaaaaaagcccagccggctccccaacctctaccgaggagggcacctctgagtccgccacccccgagagcggccctggcacctccaccgagcccagcgagggcagcgcacccggcagccctgccggcagccccacctccacagaggagggaaccagcaccgagcccagcgaaggcagcgccccaggcaccagcaccgagcctagtgagcaggagattaaacggatcaacaagatcagaagaagacttgtgaaagacagcaacaccaagaaggccggcaagacaggccccatgaaaaccctgctggttagagtgatgacacccgatctgagagagcggctggaaaacctgagaaagaagcctgaaaatatcccccagcccatcagcaatacatctagagccaacctgaataagctgctgaccgattacaccgaaatgaagaaggcgatcctgcatgtgtactgggaagagttccagaaggaccctgtgggcctgatgagccgggtggcccagcctgccagcaagaagatcgatcagaacaagctgaaacctgagatggacgagaagggcaacctgaccaccgccggctttgcctgctctcagtgtggccagcccctgttcgtgtacaagctggagcaggtgtctgagaagggcaaggcttacaccaactacttcggacggtgcaatgtggccgagcacgaaaagctgatcctgctggcccagctgaagcccgagaaggatagcgacgaagccgtgacatatagcctgggaaagtttgggcagagggccctggatttctacagcattcatgtgaccaaggagtccacccaccccgtgaagcccctggcccagatcgccggaaacagatacgcctccggacctgtgggaaaggccctgagcgacgcatgtatgggcacaatcgcctccttcctgtctaagtaccaggacatcatcatcgaacaccagaaggtggtgaagggcaaccagaagagactggagagcctgcgggagctggccggcaaggaaaacctggaataccctagcgtgaccctgccacctcagcctcacaccaaggagggcgttgatgcctacaacgaagtgatcgcccgggtgcgaatgtgggtgaacctgaacctgtggcagaagctgaagctaagcagagatgatgccaagcctctgctgagactgaagggattcccttcctttcctctggtcgagagacaggccaacgaagtggactggtgggacatggtgtgtaacgtgaagaagctgatcaacgagaaaaaggaggatggcaaggtgttttggcagaatctggctggctacaagagacaggaagccctgagaccatacctgagcagcgaggaagatcggaagaagggaaagaaattcgctcggtaccagctgggcgacctgctgctgcacctggaaaagaagcacggcgaggactggggaaaggtgtacgacgaggcctgggagcggattgacaagaaagtggaaggcctgagcaagcacatcaagctggaagaggaacggagaagcgaggacgcccagagcaaggccgccctgaccgactggctgcgggctaaggccagcttcgtgatcgagggcctgaaggaggccgacaaggacgagttctgcagatgcgagctgaagctgcagaagtggtacggggacctgcggggaaagcccttcgccatcgaagccgagaacagcatcctggacatcagcggcttcagcaagcagtacaactgtgccttcatctggcagaaggacggcgtgaagaagctgaacctgtacctgatcatcaactacttcaagggcggcaagctgcggttcaagaagatcaaacctgaagccttcgaagccaacagattctacaccgtgatcaacaaaaagagcggcgagatcgtgcccatggaggtgaacttcaacttcgacgaccccaacctgatcatcctgcctctggcctttggcaagagacagggcagagaattcatctggaacgacctgctgtccctggaaaccggcagcctgaagctggccaacggaagagtgatcgagaagacactgtacaacagaagaacccggcaggatgagcctgccctgttcgtggccctgaccttcgagcggcgggaggtcctggactcctccaatatcaaaccaatgaacctgatcggcgtggcaagaggcgaaaacatccccgccgtgatcgccctgaccgaccccgagggctgcccactgagccggtttaaggatagcctgggaaacccaacccacatcctgagaatcggcgagagctataaggagaagcagcggaccatccaggccaagaaggaggtggagcagcggagagccggcggctacagccggaagtacgccagcaaagccaagaatctggcagacgatatggtgagaaacaccgctagagatctgctgtactacgccgtgacccaggatgccatgctgatcttcgccaacctgagccggggcttcggccggcagggcaagcggaccttcatggccgagagacagtacacacggatggaggactggctgaccgccaagctggcctacgagggcctgagcaagacctacctgtccaagacactggcccagtacacctccaagacatgcagcaactgtgggtttaccatcaccagcgccgactacgacagggtgctggagaagctgaagaagacagcaacaggctggatgaccacaattaacggcaaggagctgaaggtggagggccagattacctactacaacagatacaagagacagaacgtagtcaaggacctgtccgtcgagctggatagactgagcgaagaatctgtgaacaacgacatctcctcctggacaaagggcagaagcggagaagctctgagcctcctgaagaaaagattctcccatagacccgtgcaggagaagttcgtgtgcctgaactgcggcttcgagacacacgcagccgagcaagccgccctgaacatcgccagatcctggctgttcctgcggagccaggagtacaagaaataccagacaaacaagacaaccggcaacaccgataagagagccttcgtcgagacctggcagtccttttaccggaagaagcttaaggaggtgtggaaacctgccgtgcggtctggcggatctggcggaggctccaccagccccaagaaaaagagaaaagtctaagctgccttctgcggggcttgccttctggccatgcccttcttctctcccttgcacctgtacctcttggtctttgaataaagcctgagtaggaaggctagcaaaaaaaaaaaaaaaaaaaaaaaaaaaaaaaaaaaaaaaaaaaaaaaaaaaaaaaaaaaaaaaaaaaaaaaaaaaaaaaa

SEQ ID NO: 10311 - RNA, 8787 nt, synthetic construct
  source 1..8787: mol_type = other RNA
aggaaataagagagaaaagaagagtaagaagaaatataagagccaccatggcccctaagaagaagcgtaaagtgagccggatgaaccacgaccaggagttcgacccccctaaggtgtaccctcccgtccccgccgagaagagaaagcccatccgggtcctgagcctgttcgatggcatcgccaccggtctgctggtgctgaaggacctgggcatccaggtggataggtacattgcctccgaggtgtgcgaggactccatcaccgtgggaatggtgcgtcatcagggcaagatcatgtacgtgggcgacgtgcggagcgtgacacagaagcatatccaggagtggggccctttcgacctggtgatcggcggcagcccttgcaatgacctgagcatcgtgaacccagcccggaagggcctgtacgagggaaccggcagactgttcttcgagttttacagactgctgcacgacgcccggcctaaggaaggcgacgaccggcccttcttttggctgttcgagaatgtggtggccatgggagtcagcgacaagcgggatattagccggttcctggagagcaaccccgtgatgatcgatgccaaggaagtgagcgccgcccaccgggccagatacttctggggcaatctgcctggcatgaacagacccctggccagcaccgtgaacgacaagctggagctgcaggagtgcctggagcacggccggatcgccaagttcagcaaggtgagaaccatcaccacccgaagcaacagcatcaaacaaggcaaggaccagcactttcctgtgttcatgaacgagaaggaggacatcctgtggtgtaccgagatggagagagtgttcgggttcccagtccactacacagatgtcagcaacatgtctagactggccagacagagactgctgggaagaagctggtccgtccctgtgatcagacacctgttcgcccctctgaaggagtacttcgcctgcgtgagcagcggcaacagcaacgccaacagccggggccccagcttctctagcggcctggtgccactgtccctgagagggagccacatgggccccatggagatctacaaaaccgtgagcgcctggaagcggcagcctgtgcgcgtgctgagcctgtttcggaatatcgataaagtcctgaaaagcctgggattcctggagagcggctctggctccggcggtggcaccctgaagtacgtggaggatgtgacaaacgtggtcagacgggatgtggagaagtggggccccttcgatctggtgtacggcagcacccaacccctgggcagctcttgtgaccggtgccctggctggtacatgtttcagttccaccggatcctgcagtacgccctgccgagacaggagtcccagcggccattcttttggattttcatggacaacttgctgctgaccgaggatgaccaggaaactaccactcggttcctgcagaccgaagccgtgaccctgcaggacgtgagaggccgggactaccagaacgccatgcgggtgtggtccaacatccctggactgaaaagcaagcacgcacctctgacccctaaagaagaggagtacctgcaggcccaggtgcggagcagaagcaagctggacgcccctaaggtggatctgctggtgaagaattgcctcctgcccctgagagagtacttcaagtatttcagccagaatagtctgcccctgggaggcagcggcggcggcagctacgagggcagcgtgagcttcagggacgtggccatcaacttcagcagggaggagtggcagcacctggacctgagccagaggaacctgtacagggacgtgatgctggagacctgcagccacctgctgagcgtgggctaccaggtgcccaagcccgaggtggtgatgctggagcagggcaaggagccctgggccctgcagggcgagaggcccaggcagagctgccccggcgagaagctgtggggcggcccaagcagcggcgcccctcctcccagcggcggcaggcggcccaagcagcggcgcccctcctcccagcggcggcagcccagccggctccccaacctctaccgaggagggcacctctgagtccgccacccccgagagcggccctggcacctccaccgagcccagcgagggcagcgcacccggcagccctgccggcagccccacctccacagaggagggaaccagcaccgagcccagcgaaggcagcgccccaggcaccagcaccgagcctagtgagcaggagattaaacggatcaacaagatcagaagaagacttgtgaaagacagcaacaccaagaaggccggcaagacaggccccatgaaaaccctgctggttagagtgatgacacccgatctgagagagcggctggaaaacctgagaaagaagcctgaaaatatcccccagcccatcagcaatacatctagagccaacctgaataagctgctgaccgattacaccgaaatgaagaaggcgatcctgcatgtgtactgggaagagttccagaaggaccctgtgggcctgatgagccgggtggcccagcctgccagcaagaagatcgatcagaacaagctgaaacctgagatggacgagaagggcaacctgaccaccgccggctttgcctgctctcagtgtggccagcccctgttcgtgtacaagctggagcaggtgtctgagaagggcaaggcttacaccaactacttcggacggtgcaatgtggccgagcacgaaaagctgatcctgctggcccagctgaagcccgagaaggatagcgacgaagccgtgacatatagcctgggaaagtttgggcagagggccctggatttctacagcattcatgtgaccaaggagtccacccaccccgtgaagcccctggcccagatcgccggaaacagatacgcctccggacctgtgggaaaggccctgagcgacgcatgtatgggcacaatcgcctccttcctgtctaagtaccaggacatcatcatcgaacaccagaaggtggtgaagggcaaccagaagagactggagagcctgcgggagctggccggcaaggaaaacctggaataccctagcgtgaccctgccacctcagcctcacaccaaggagggcgttgatgcctacaacgaagtgatcgcccgggtgcgaatgtgggtgaacctgaacctgtggcagaagctgaagctaagcagagatgatgccaagcctctgctgagactgaagggattcccttcctttcctctggtcgagagacaggccaacgaagtggactggtgggacatggtgtgtaacgtgaagaagctgatcaacgagaaaaaggaggatggcaaggtgttttggcagaatctggctggctacaagagacaggaagccctgagaccatacctgagcagcgaggaagatcggaagaagggaaagaaattcgctcggtaccagctgggcgacctgctgctgcacctggaaaagaagcacggcgaggactggggaaaggtgtacgacgaggcctgggagcggattgacaagaaagtggaaggcctgagcaagcacatcaagctggaagaggaacggagaagcgaggacgcccagagcaaggccgccctgaccgactggctgcgggctaaggccagcttcgtgatcgagggcctgaaggaggccgacaaggacgagttctgcagatgcgagctgaagctgcagaagtggtacggggacctgcggggaaagcccttcgccatcgaagccgagaacagcatcctggacatcagcggcttcagcaagcagtacaactgtgccttcatctggcagaaggacggcgtgaagaagctgaacctgtacctgatcatcaactacttcaagggcggcaagctgcggttcaagaagatcaaacctgaagccttcgaagccaacagattctacaccgtgatcaacaaaaagagcggcgagatcgtgcccatggaggtgaacttcaacttcgacgaccccaacctgatcatcctgcctctggcctttggcaagagacagggcagagaattcatctggaacgacctgctgtccctggaaaccggcagcctgaagctggccaacggaagagtgatcgagaagacactgtacaacagaagaacccggcaggatgagcctgccctgttcgtggccctgaccttcgagcggcgggaggtcctggactcctccaatatcaaaccaatgaacctgatcggcgtggcaagaggcgaaaacatccccgccgtgatcgccctgaccgaccccgagggctgcccactgagccggtttaaggatagcctgggaaacccaacccacatcctgagaatcggcgagagctataaggagaagcagcggaccatccaggccaagaaggaggtggagcagcggagagccggcggctacagccggaagtacgccagcaaagccaagaatctggcagacgatatggtgagaaacaccgctagagatctgctgtactacgccgtgacccaggatgccatgctgatcttcgccaacctgagccggggcttcggccggcagggcaagcggaccttcatggccgagagacagtacacacggatggaggactggctgaccgccaagctggcctacgagggcctgagcaagacctacctgtccaagacactggcccagtacacctccaagacatgcagcaactgtgggtttaccatcaccagcgccgactacgacagggtgctggagaagctgaagaagacagcaacaggctggatgaccacaattaacggcaaggagctgaaggtggagggccagattacctactacaacagatacaagagacagaacgtagtcaaggacctgtccgtcgagctggatagactgagcgaagaatctgtgaacaacgacatctcctcctggacaaagggcagaagcggagaagctctgagcctcctgaagaaaagattctcccatagacccgtgcaggagaagttcgtgtgcctgaactgcggcttcgagacacacgcagccgagcaagccgccctgaacatcgccagatcctggctgttcctgcggagccaggagtacaagaaataccagacaaacaagacaaccggcaacaccgataagagagccttcgtcgagacctggcagtccttttaccggaagaagcttaaggaggtgtggaaacctgccgtgcggtctggcggatctggcggaggctccaccagccccaagaaaaagagaaaagtctaagctgccttctgcggggcttgccttctggccatgcccttcttctctcccttgcacctgtacctcttggtctttgaataaagcctgagtaggaaggctagcaaaaaaaaaaaaaaaaaaaaaaaaaaaaaaaaaaaaaaaaaaaaaaaaaaaaaaaaaaaaaaaaaaaaaaaaaaaaaaaagcccagccggctccccaacctctaccgaggagggcacctctgagtccgccacccccgagagcggccctggcacctccaccgagcccagcgagggcagcgcacccggcagccctgccggcagccccacctccacagaggagggaaccagcaccgagcccagcgaaggcagcgccccaggcaccagcaccgagcctagtgagcaggagattaaacggatcaacaagatcagaagaagacttgtgaaagacagcaacaccaagaaggccggcaagacaggccccatgaaaaccctgctggttagagtgatgacacccgatctgagagagcggctggaaaacctgagaaagaagcctgaaaatatcccccagcccatcagcaatacatctagagccaacctgaataagctgctgaccgattacaccgaaatgaagaaggcgatcctgcatgtgtactgggaagagttccagaaggaccctgtgggcctgatgagccgggtggcccagcctgccagcaagaagatcgatcagaacaagctgaaacctgagatggacgagaagggcaacctgaccaccgccggctttgcctgctctcagtgtggccagcccctgttcgtgtacaagctggagcaggtgtctgagaagggcaaggcttacaccaactacttcggacggtgcaatgtggccgagcacgaaaagctgatcctgctggcccagctgaagcccgagaaggatagcgacgaagccgtgacatatagcctgggaaagtttgggcagagggccctggatttctacagcattcatgtgaccaaggagtccacccaccccgtgaagcccctggcccagatcgccggaaacagatacgcctccggacctgtgggaaaggccctgagcgacgcatgtatgggcacaatcgcctccttcctgtctaagtaccaggacatcatcatcgaacaccagaaggtggtgaagggcaaccagaagagactggagagcctgcgggagctggccggcaaggaaaacctggaataccctagcgtgaccctgccacctcagcctcacaccaaggagggcgttgatgcctacaacgaagtgatcgcccgggtgcgaatgtgggtgaacctgaacctgtggcagaagctgaagctaagcagagatgatgccaagcctctgctgagactgaagggattcccttcctttcctctggtcgagagacaggccaacgaagtggactggtgggacatggtgtgtaacgtgaagaagctgatcaacgagaaaaaggaggatggcaaggtgttttggcagaatctggctggctacaagagacaggaagccctgagaccatacctgagcagcgaggaagatcggaagaagggaaagaaattcgctcggtaccagctgggcgacctgctgctgcacctggaaaagaagcacggcgaggactggggaaaggtgtacgacgaggcctgggagcggattgacaagaaagtggaaggcctgagcaagcacatcaagctggaagaggaacggagaagcgaggacgcccagagcaaggccgccctgaccgactggctgcgggctaaggccagcttcgtgatcgagggcctgaaggaggccgacaaggacgagttctgcagatgcgagctgaagctgcagaagtggtacggggacctgcggggaaagcccttcgccatcgaagccgagaacagcatcctggacatcagcggcttcagcaagcagtacaactgtgccttcatctggcagaaggacggcgtgaagaagctgaacctgtacctgatcatcaactacttcaagggcggcaagctgcggttcaagaagatcaaacctgaagccttcgaagccaacagattctacaccgtgatcaacaaaaagagcggcgagatcgtgcccatggaggtgaacttcaacttcgacgaccccaacctgatcatcctgcctctggcctttggcaagagacagggcagagaattcatctggaacgacctgctgtccctggaaaccggcagcctgaagctggccaacggaagagtgatcgagaagacactgtacaacagaagaacccggcaggatgagcctgccctgttcgtggccctgaccttcgagcggcgggaggtcctggactcctccaatatcaaaccaatgaacctgatcggcgtggcaagaggcgaaaacatccccgccgtgatcgccctgaccgaccccgagggctgcccactgagccggtttaaggatagcctgggaaacccaacccacatcctgagaatcggcgagagctataaggagaagcagcggaccatccaggccaagaaggaggtggagcagcggagagccggcggctacagccggaagtacgccagcaaagccaagaatctggcagacgatatggtgagaaacaccgctagagatctgctgtactacgccgtgacccaggatgccatgctgatcttcgccaacctgagccggggcttcggccggcagggcaagcggaccttcatggccgagagacagtacacacggatggaggactggctgaccgccaagctggcctacgagggcctgagcaagacctacctgtccaagacactggcccagtacacctccaagacatgcagcaactgtgggtttaccatcaccagcgccgactacgacagggtgctggagaagctgaagaagacagcaacaggctggatgaccacaattaacggcaaggagctgaaggtggagggccagattacctactacaacagatacaagagacagaacgtagtcaaggacctgtccgtcgagctggatagactgagcgaagaatctgtgaacaacgacatctcctcctggacaaagggcagaagcggagaagctctgagcctcctgaagaaaagattctcccatagacccgtgcaggagaagttcgtgtgcctgaactgcggcttcgagacacacgcagccgagcaagccgccctgaacatcgccagatcctggctgttcctgcggagccaggagtacaagaaataccagacaaacaagacaaccggcaacaccgataagagagccttcgtcgagacctggcagtccttttaccggaagaagcttaaggaggtgtggaaacctgccgtgcggtctggcggatctggcggaggctccaccagccccaagaaaaagagaaaagtctaagctgccttctgcggggcttgccttctggccatgcccttcttctctcccttgcacctgtacctcttggtctttgaataaagcctgagtaggaaggctagcaaaaaaaaaaaaaaaaaaaaaaaaaaaaaaaaaaaaaaaaaaaaaaaaaaaaaaaaaaaaaaaaaaaaaaaaaaaaaaaa

SEQ ID NO: 10312 - RNA, 8787 nt, synthetic construct
  source 1..8787: mol_type = other RNA
aggaaataagagagaaaagaagagtaagaagaaatataagagccaccatggcccctaagaagaagcgtaaagtgagccggatgaaccacgaccaggagttcgacccccctaaggtgtaccctcccgtccccgccgagaagagaaagcccatccgggtcctgagcctgttcgatggcatcgccaccggtctgctggtgctgaaggacctgggcatccaggtggataggtacattgcctccgaggtgtgcgaggactccatcaccgtgggaatggtgcgtcatcagggcaagatcatgtacgtgggcgacgtgcggagcgtgacacagaagcatatccaggagtggggccctttcgacctggtgatcggcggcagcccttgcaatgacctgagcatcgtgaacccagcccggaagggcctgtacgagggaaccggcagactgttcttcgagttttacagactgctgcacgacgcccggcctaaggaaggcgacgaccggcccttcttttggctgttcgagaatgtggtggccatgggagtcagcgacaagcgggatattagccggttcctggagagcaaccccgtgatgatcgatgccaaggaagtgagcgccgcccaccgggccagatacttctggggcaatctgcctggcatgaacagacccctggccagcaccgtgaacgacaagctggagctgcaggagtgcctggagcacggccggatcgccaagttcagcaaggtgagaaccatcaccacccgaagcaacagcatcaaacaaggcaaggaccagcactttcctgtgttcatgaacgagaaggaggacatcctgtggtgtaccgagatggagagagtgttcgggttcccagtccactacacagatgtcagcaacatgtctagactggccagacagagactgctgggaagaagctggtccgtccctgtgatcagacacctgttcgcccctctgaaggagtacttcgcctgcgtgagcagcggcaacagcaacgccaacagccggggccccagcttctctagcggcctggtgccactgtccctgagagggagccacatgggccccatggagatctacaaaaccgtgagcgcctggaagcggcagcctgtgcgcgtgctgagcctgtttcggaatatcgataaagtcctgaaaagcctgggattcctggagagcggctctggctccggcggtggcaccctgaagtacgtggaggatgtgacaaacgtggtcagacgggatgtggagaagtggggccccttcgatctggtgtacggcagcacccaacccctgggcagctcttgtgaccggtgccctggctggtacatgtttcagttccaccggatcctgcagtacgccctgccgagacaggagtcccagcggccattcttttggattttcatggacaacttgctgctgaccgaggatgaccaggaaactaccactcggttcctgcagaccgaagccgtgaccctgcaggacgtgagaggccgggactaccagaacgccatgcgggtgtggtccaacatccctggactgaaaagcaagcacgcacctctgacccctaaagaagaggagtacctgcaggcccaggtgcggagcagaagcaagctggacgcccctaaggtggatctgctggtgaagaattgcctcctgcccctgagagagtacttcaagtatttcagccagaatagtctgcccctgggaggcagcggcggcggcttccaggacagcgtgaccttccaggacgtggccgtgaccttcacccccgaggagtggggcaggctggccgccccccagaaggagctgtacagggaggtgatgctggagaacttcggccacctggcctgcctgggcctggccctgagcaagcccgacgtgatctgccagctggagaggggcgaggccccctggatgcccaggggcgacgtgccccagaggcccagcgccgcccccagcggcgacggcggcccaagcagcggcgcccctcctcccagcggcggcaggcggcccaagcagcggcgcccctcctcccagcggcggcagcccagccggctccccaacctctaccgaggagggcacctctgagtccgccacccccgagagcggccctggcacctccaccgagcccagcgagggcagcgcacccggcagccctgccggcagccccacctccacagaggagggaaccagcaccgagcccagcgaaggcagcgccccaggcaccagcaccgagcctagtgagcaggagattaaacggatcaacaagatcagaagaagacttgtgaaagacagcaacaccaagaaggccggcaagacaggccccatgaaaaccctgctggttagagtgatgacacccgatctgagagagcggctggaaaacctgagaaagaagcctgaaaatatcccccagcccatcagcaatacatctagagccaacctgaataagctgctgaccgattacaccgaaatgaagaaggcgatcctgcatgtgtactgggaagagttccagaaggaccctgtgggcctgatgagccgggtggcccagcctgccagcaagaagatcgatcagaacaagctgaaacctgagatggacgagaagggcaacctgaccaccgccggctttgcctgctctcagtgtggccagcccctgttcgtgtacaagctggagcaggtgtctgagaagggcaaggcttacaccaactacttcggacggtgcaatgtggccgagcacgaaaagctgatcctgctggcccagctgaagcccgagaaggatagcgacgaagccgtgacatatagcctgggaaagtttgggcagagggccctggatttctacagcattcatgtgaccaaggagtccacccaccccgtgaagcccctggcccagatcgccggaaacagatacgcctccggacctgtgggaaaggccctgagcgacgcatgtatgggcacaatcgcctccttcctgtctaagtaccaggacatcatcatcgaacaccagaaggtggtgaagggcaaccagaagagactggagagcctgcgggagctggccggcaaggaaaacctggaataccctagcgtgaccctgccacctcagcctcacaccaaggagggcgttgatgcctacaacgaagtgatcgcccgggtgcgaatgtgggtgaacctgaacctgtggcagaagctgaagctaagcagagatgatgccaagcctctgctgagactgaagggattcccttcctttcctctggtcgagagacaggccaacgaagtggactggtgggacatggtgtgtaacgtgaagaagctgatcaacgagaaaaaggaggatggcaaggtgttttggcagaatctggctggctacaagagacaggaagccctgagaccatacctgagcagcgaggaagatcggaagaagggaaagaaattcgctcggtaccagctgggcgacctgctgctgcacctggaaaagaagcacggcgaggactggggaaaggtgtacgacgaggcctgggagcggattgacaagaaagtggaaggcctgagcaagcacatcaagctggaagaggaacggagaagcgaggacgcccagagcaaggccgccctgaccgactggctgcgggctaaggccagcttcgtgatcgagggcctgaaggaggccgacaaggacgagttctgcagatgcgagctgaagctgcagaagtggtacggggacctgcggggaaagcccttcgccatcgaagccgagaacagcatcctggacatcagcggcttcagcaagcagtacaactgtgccttcatctggcagaaggacggcgtgaagaagctgaacctgtacctgatcatcaactacttcaagggcggcaagctgcggttcaagaagatcaaacctgaagccttcgaagccaacagattctacaccgtgatcaacaaaaagagcggcgagatcgtgcccatggaggtgaacttcaacttcgacgaccccaacctgatcatcctgcctctggcctttggcaagagacagggcagagaattcatctggaacgacctgctgtccctggaaaccggcagcctgaagctggccaacggaagagtgatcgagaagacactgtacaacagaagaacccggcaggatgagcctgccctgttcgtggccctgaccttcgagcggcgggaggtcctggactcctccaatatcaaaccaatgaacctgatcggcgtggcaagaggcgaaaacatccccgccgtgatcgccctgaccgaccccgagggctgcccactgagccggtttaaggatagcctgggaaacccaacccacatcctgagaatcggcgagagctataaggagaagcagcggaccatccaggccaagaaggaggtggagcagcggagagccggcggctacagccggaagtacgccagcaaagccaagaatctggcagacgatatggtgagaaacaccgctagagatctgctgtactacgccgtgacccaggatgccatgctgatcttcgccaacctgagccggggcttcggccggcagggcaagcggaccttcatggccgagagacagtacacacggatggaggactggctgaccgccaagctggcctacgagggcctgagcaagacctacctgtccaagacactggcccagtacacctccaagacatgcagcaactgtgggtttaccatcaccagcgccgactacgacagggtgctggagaagctgaagaagacagcaacaggctggatgaccacaattaacggcaaggagctgaaggtggagggccagattacctactacaacagatacaagagacagaacgtagtcaaggacctgtccgtcgagctggatagactgagcgaagaatctgtgaacaacgacatctcctcctggacaaagggcagaagcggagaagctctgagcctcctgaagaaaagattctcccatagacccgtgcaggagaagttcgtgtgcctgaactgcggcttcgagacacacgcagccgagcaagccgccctgaacatcgccagatcctggctgttcctgcggagccaggagtacaagaaataccagacaaacaagacaaccggcaacaccgataagagagccttcgtcgagacctggcagtccttttaccggaagaagcttaaggaggtgtggaaacctgccgtgcggtctggcggatctggcggaggctccaccagccccaagaaaaagagaaaagtctaagctgccttctgcggggcttgccttctggccatgcccttcttctctcccttgcacctgtacctcttggtctttgaataaagcctgagtaggaaggctagcaaaaaaaaaaaaaaaaaaaaaaaaaaaaaaaaaaaaaaaaaaaaaaaaaaaaaaaaaaaaaaaaaaaaaaaaaaaaaaaagcccagccggctccccaacctctaccgaggagggcacctctgagtccgccacccccgagagcggccctggcacctccaccgagcccagcgagggcagcgcacccggcagccctgccggcagccccacctccacagaggagggaaccagcaccgagcccagcgaaggcagcgccccaggcaccagcaccgagcctagtgagcaggagattaaacggatcaacaagatcagaagaagacttgtgaaagacagcaacaccaagaaggccggcaagacaggccccatgaaaaccctgctggttagagtgatgacacccgatctgagagagcggctggaaaacctgagaaagaagcctgaaaatatcccccagcccatcagcaatacatctagagccaacctgaataagctgctgaccgattacaccgaaatgaagaaggcgatcctgcatgtgtactgggaagagttccagaaggaccctgtgggcctgatgagccgggtggcccagcctgccagcaagaagatcgatcagaacaagctgaaacctgagatggacgagaagggcaacctgaccaccgccggctttgcctgctctcagtgtggccagcccctgttcgtgtacaagctggagcaggtgtctgagaagggcaaggcttacaccaactacttcggacggtgcaatgtggccgagcacgaaaagctgatcctgctggcccagctgaagcccgagaaggatagcgacgaagccgtgacatatagcctgggaaagtttgggcagagggccctggatttctacagcattcatgtgaccaaggagtccacccaccccgtgaagcccctggcccagatcgccggaaacagatacgcctccggacctgtgggaaaggccctgagcgacgcatgtatgggcacaatcgcctccttcctgtctaagtaccaggacatcatcatcgaacaccagaaggtggtgaagggcaaccagaagagactggagagcctgcgggagctggccggcaaggaaaacctggaataccctagcgtgaccctgccacctcagcctcacaccaaggagggcgttgatgcctacaacgaagtgatcgcccgggtgcgaatgtgggtgaacctgaacctgtggcagaagctgaagctaagcagagatgatgccaagcctctgctgagactgaagggattcccttcctttcctctggtcgagagacaggccaacgaagtggactggtgggacatggtgtgtaacgtgaagaagctgatcaacgagaaaaaggaggatggcaaggtgttttggcagaatctggctggctacaagagacaggaagccctgagaccatacctgagcagcgaggaagatcggaagaagggaaagaaattcgctcggtaccagctgggcgacctgctgctgcacctggaaaagaagcacggcgaggactggggaaaggtgtacgacgaggcctgggagcggattgacaagaaagtggaaggcctgagcaagcacatcaagctggaagaggaacggagaagcgaggacgcccagagcaaggccgccctgaccgactggctgcgggctaaggccagcttcgtgatcgagggcctgaaggaggccgacaaggacgagttctgcagatgcgagctgaagctgcagaagtggtacggggacctgcggggaaagcccttcgccatcgaagccgagaacagcatcctggacatcagcggcttcagcaagcagtacaactgtgccttcatctggcagaaggacggcgtgaagaagctgaacctgtacctgatcatcaactacttcaagggcggcaagctgcggttcaagaagatcaaacctgaagccttcgaagccaacagattctacaccgtgatcaacaaaaagagcggcgagatcgtgcccatggaggtgaacttcaacttcgacgaccccaacctgatcatcctgcctctggcctttggcaagagacagggcagagaattcatctggaacgacctgctgtccctggaaaccggcagcctgaagctggccaacggaagagtgatcgagaagacactgtacaacagaagaacccggcaggatgagcctgccctgttcgtggccctgaccttcgagcggcgggaggtcctggactcctccaatatcaaaccaatgaacctgatcggcgtggcaagaggcgaaaacatccccgccgtgatcgccctgaccgaccccgagggctgcccactgagccggtttaaggatagcctgggaaacccaacccacatcctgagaatcggcgagagctataaggagaagcagcggaccatccaggccaagaaggaggtggagcagcggagagccggcggctacagccggaagtacgccagcaaagccaagaatctggcagacgatatggtgagaaacaccgctagagatctgctgtactacgccgtgacccaggatgccatgctgatcttcgccaacctgagccggggcttcggccggcagggcaagcggaccttcatggccgagagacagtacacacggatggaggactggctgaccgccaagctggcctacgagggcctgagcaagacctacctgtccaagacactggcccagtacacctccaagacatgcagcaactgtgggtttaccatcaccagcgccgactacgacagggtgctggagaagctgaagaagacagcaacaggctggatgaccacaattaacggcaaggagctgaaggtggagggccagattacctactacaacagatacaagagacagaacgtagtcaaggacctgtccgtcgagctggatagactgagcgaagaatctgtgaacaacgacatctcctcctggacaaagggcagaagcggagaagctctgagcctcctgaagaaaagattctcccatagacccgtgcaggagaagttcgtgtgcctgaactgcggcttcgagacacacgcagccgagcaagccgccctgaacatcgccagatcctggctgttcctgcggagccaggagtacaagaaataccagacaaacaagacaaccggcaacaccgataagagagccttcgtcgagacctggcagtccttttaccggaagaagcttaaggaggtgtggaaacctgccgtgcggtctggcggatctggcggaggctccaccagccccaagaaaaagagaaaagtctaagctgccttctgcggggcttgccttctggccatgcccttcttctctcccttgcacctgtacctcttggtctttgaataaagcctgagtaggaaggctagcaaaaaaaaaaaaaaaaaaaaaaaaaaaaaaaaaaaaaaaaaaaaaaaaaaaaaaaaaaaaaaaaaaaaaaaaaaaaaaaa

SEQ ID NO: 10313 - RNA, 8787 nt, synthetic construct
  source 1..8787: mol_type = other RNA
aggaaataagagagaaaagaagagtaagaagaaatataagagccaccatggcccctaagaagaagcgtaaagtgagccggatgaaccacgaccaggagttcgacccccctaaggtgtaccctcccgtccccgccgagaagagaaagcccatccgggtcctgagcctgttcgatggcatcgccaccggtctgctggtgctgaaggacctgggcatccaggtggataggtacattgcctccgaggtgtgcgaggactccatcaccgtgggaatggtgcgtcatcagggcaagatcatgtacgtgggcgacgtgcggagcgtgacacagaagcatatccaggagtggggccctttcgacctggtgatcggcggcagcccttgcaatgacctgagcatcgtgaacccagcccggaagggcctgtacgagggaaccggcagactgttcttcgagttttacagactgctgcacgacgcccggcctaaggaaggcgacgaccggcccttcttttggctgttcgagaatgtggtggccatgggagtcagcgacaagcgggatattagccggttcctggagagcaaccccgtgatgatcgatgccaaggaagtgagcgccgcccaccgggccagatacttctggggcaatctgcctggcatgaacagacccctggccagcaccgtgaacgacaagctggagctgcaggagtgcctggagcacggccggatcgccaagttcagcaaggtgagaaccatcaccacccgaagcaacagcatcaaacaaggcaaggaccagcactttcctgtgttcatgaacgagaaggaggacatcctgtggtgtaccgagatggagagagtgttcgggttcccagtccactacacagatgtcagcaacatgtctagactggccagacagagactgctgggaagaagctggtccgtccctgtgatcagacacctgttcgcccctctgaaggagtacttcgcctgcgtgagcagcggcaacagcaacgccaacagccggggccccagcttctctagcggcctggtgccactgtccctgagagggagccacatgggccccatggagatctacaaaaccgtgagcgcctggaagcggcagcctgtgcgcgtgctgagcctgtttcggaatatcgataaagtcctgaaaagcctgggattcctggagagcggctctggctccggcggtggcaccctgaagtacgtggaggatgtgacaaacgtggtcagacgggatgtggagaagtggggccccttcgatctggtgtacggcagcacccaacccctgggcagctcttgtgaccggtgccctggctggtacatgtttcagttccaccggatcctgcagtacgccctgccgagacaggagtcccagcggccattcttttggattttcatggacaacttgctgctgaccgaggatgaccaggaaactaccactcggttcctgcagaccgaagccgtgaccctgcaggacgtgagaggccgggactaccagaacgccatgcgggtgtggtccaacatccctggactgaaaagcaagcacgcacctctgacccctaaagaagaggagtacctgcaggcccaggtgcggagcagaagcaagctggacgcccctaaggtggatctgctggtgaagaattgcctcctgcccctgagagagtacttcaagtatttcagccagaatagtctgcccctgggaggcagcggcggcggcagcctgggcagcgagctgttcagggacgtggccatcgtgttcagccaggaggagtggcagtggctggcccccgcccagagggacctgtacagggacgtgatgctggagacctacagcaacctggtgagcctgggcctggccatcagcaagcccgacgtgatcagcttcctggagcagggcaaggagccctggatggtggagagggtggtgagcaggggcctgtgccccgtgctggagagcaggggcggcccaagcagcggcgcccctcctcccagcggcggcaggcggcccaagcagcggcgcccctcctcccagcggcggcagcccagccggctccccaacctctaccgaggagggcacctctgagtccgccacccccgagagcggccctggcacctccaccgagcccagcgagggcagcgcacccggcagccctgccggcagccccacctccacagaggagggaaccagcaccgagcccagcgaaggcagcgccccaggcaccagcaccgagcctagtgagcaggagattaaacggatcaacaagatcagaagaagacttgtgaaagacagcaacaccaagaaggccggcaagacaggccccatgaaaaccctgctggttagagtgatgacacccgatctgagagagcggctggaaaacctgagaaagaagcctgaaaatatcccccagcccatcagcaatacatctagagccaacctgaataagctgctgaccgattacaccgaaatgaagaaggcgatcctgcatgtgtactgggaagagttccagaaggaccctgtgggcctgatgagccgggtggcccagcctgccagcaagaagatcgatcagaacaagctgaaacctgagatggacgagaagggcaacctgaccaccgccggctttgcctgctctcagtgtggccagcccctgttcgtgtacaagctggagcaggtgtctgagaagggcaaggcttacaccaactacttcggacggtgcaatgtggccgagcacgaaaagctgatcctgctggcccagctgaagcccgagaaggatagcgacgaagccgtgacatatagcctgggaaagtttgggcagagggccctggatttctacagcattcatgtgaccaaggagtccacccaccccgtgaagcccctggcccagatcgccggaaacagatacgcctccggacctgtgggaaaggccctgagcgacgcatgtatgggcacaatcgcctccttcctgtctaagtaccaggacatcatcatcgaacaccagaaggtggtgaagggcaaccagaagagactggagagcctgcgggagctggccggcaaggaaaacctggaataccctagcgtgaccctgccacctcagcctcacaccaaggagggcgttgatgcctacaacgaagtgatcgcccgggtgcgaatgtgggtgaacctgaacctgtggcagaagctgaagctaagcagagatgatgccaagcctctgctgagactgaagggattcccttcctttcctctggtcgagagacaggccaacgaagtggactggtgggacatggtgtgtaacgtgaagaagctgatcaacgagaaaaaggaggatggcaaggtgttttggcagaatctggctggctacaagagacaggaagccctgagaccatacctgagcagcgaggaagatcggaagaagggaaagaaattcgctcggtaccagctgggcgacctgctgctgcacctggaaaagaagcacggcgaggactggggaaaggtgtacgacgaggcctgggagcggattgacaagaaagtggaaggcctgagcaagcacatcaagctggaagaggaacggagaagcgaggacgcccagagcaaggccgccctgaccgactggctgcgggctaaggccagcttcgtgatcgagggcctgaaggaggccgacaaggacgagttctgcagatgcgagctgaagctgcagaagtggtacggggacctgcggggaaagcccttcgccatcgaagccgagaacagcatcctggacatcagcggcttcagcaagcagtacaactgtgccttcatctggcagaaggacggcgtgaagaagctgaacctgtacctgatcatcaactacttcaagggcggcaagctgcggttcaagaagatcaaacctgaagccttcgaagccaacagattctacaccgtgatcaacaaaaagagcggcgagatcgtgcccatggaggtgaacttcaacttcgacgaccccaacctgatcatcctgcctctggcctttggcaagagacagggcagagaattcatctggaacgacctgctgtccctggaaaccggcagcctgaagctggccaacggaagagtgatcgagaagacactgtacaacagaagaacccggcaggatgagcctgccctgttcgtggccctgaccttcgagcggcgggaggtcctggactcctccaatatcaaaccaatgaacctgatcggcgtggcaagaggcgaaaacatccccgccgtgatcgccctgaccgaccccgagggctgcccactgagccggtttaaggatagcctgggaaacccaacccacatcctgagaatcggcgagagctataaggagaagcagcggaccatccaggccaagaaggaggtggagcagcggagagccggcggctacagccggaagtacgccagcaaagccaagaatctggcagacgatatggtgagaaacaccgctagagatctgctgtactacgccgtgacccaggatgccatgctgatcttcgccaacctgagccggggcttcggccggcagggcaagcggaccttcatggccgagagacagtacacacggatggaggactggctgaccgccaagctggcctacgagggcctgagcaagacctacctgtccaagacactggcccagtacacctccaagacatgcagcaactgtgggtttaccatcaccagcgccgactacgacagggtgctggagaagctgaagaagacagcaacaggctggatgaccacaattaacggcaaggagctgaaggtggagggccagattacctactacaacagatacaagagacagaacgtagtcaaggacctgtccgtcgagctggatagactgagcgaagaatctgtgaacaacgacatctcctcctggacaaagggcagaagcggagaagctctgagcctcctgaagaaaagattctcccatagacccgtgcaggagaagttcgtgtgcctgaactgcggcttcgagacacacgcagccgagcaagccgccctgaacatcgccagatcctggctgttcctgcggagccaggagtacaagaaataccagacaaacaagacaaccggcaacaccgataagagagccttcgtcgagacctggcagtccttttaccggaagaagcttaaggaggtgtggaaacctgccgtgcggtctggcggatctggcggaggctccaccagccccaagaaaaagagaaaagtctaagctgccttctgcggggcttgccttctggccatgcccttcttctctcccttgcacctgtacctcttggtctttgaataaagcctgagtaggaaggctagcaaaaaaaaaaaaaaaaaaaaaaaaaaaaaaaaaaaaaaaaaaaaaaaaaaaaaaaaaaaaaaaaaaaaaaaaaaaaaaaagcccagccggctccccaacctctaccgaggagggcacctctgagtccgccacccccgagagcggccctggcacctccaccgagcccagcgagggcagcgcacccggcagccctgccggcagccccacctccacagaggagggaaccagcaccgagcccagcgaaggcagcgccccaggcaccagcaccgagcctagtgagcaggagattaaacggatcaacaagatcagaagaagacttgtgaaagacagcaacaccaagaaggccggcaagacaggccccatgaaaaccctgctggttagagtgatgacacccgatctgagagagcggctggaaaacctgagaaagaagcctgaaaatatcccccagcccatcagcaatacatctagagccaacctgaataagctgctgaccgattacaccgaaatgaagaaggcgatcctgcatgtgtactgggaagagttccagaaggaccctgtgggcctgatgagccgggtggcccagcctgccagcaagaagatcgatcagaacaagctgaaacctgagatggacgagaagggcaacctgaccaccgccggctttgcctgctctcagtgtggccagcccctgttcgtgtacaagctggagcaggtgtctgagaagggcaaggcttacaccaactacttcggacggtgcaatgtggccgagcacgaaaagctgatcctgctggcccagctgaagcccgagaaggatagcgacgaagccgtgacatatagcctgggaaagtttgggcagagggccctggatttctacagcattcatgtgaccaaggagtccacccaccccgtgaagcccctggcccagatcgccggaaacagatacgcctccggacctgtgggaaaggccctgagcgacgcatgtatgggcacaatcgcctccttcctgtctaagtaccaggacatcatcatcgaacaccagaaggtggtgaagggcaaccagaagagactggagagcctgcgggagctggccggcaaggaaaacctggaataccctagcgtgaccctgccacctcagcctcacaccaaggagggcgttgatgcctacaacgaagtgatcgcccgggtgcgaatgtgggtgaacctgaacctgtggcagaagctgaagctaagcagagatgatgccaagcctctgctgagactgaagggattcccttcctttcctctggtcgagagacaggccaacgaagtggactggtgggacatggtgtgtaacgtgaagaagctgatcaacgagaaaaaggaggatggcaaggtgttttggcagaatctggctggctacaagagacaggaagccctgagaccatacctgagcagcgaggaagatcggaagaagggaaagaaattcgctcggtaccagctgggcgacctgctgctgcacctggaaaagaagcacggcgaggactggggaaaggtgtacgacgaggcctgggagcggattgacaagaaagtggaaggcctgagcaagcacatcaagctggaagaggaacggagaagcgaggacgcccagagcaaggccgccctgaccgactggctgcgggctaaggccagcttcgtgatcgagggcctgaaggaggccgacaaggacgagttctgcagatgcgagctgaagctgcagaagtggtacggggacctgcggggaaagcccttcgccatcgaagccgagaacagcatcctggacatcagcggcttcagcaagcagtacaactgtgccttcatctggcagaaggacggcgtgaagaagctgaacctgtacctgatcatcaactacttcaagggcggcaagctgcggttcaagaagatcaaacctgaagccttcgaagccaacagattctacaccgtgatcaacaaaaagagcggcgagatcgtgcccatggaggtgaacttcaacttcgacgaccccaacctgatcatcctgcctctggcctttggcaagagacagggcagagaattcatctggaacgacctgctgtccctggaaaccggcagcctgaagctggccaacggaagagtgatcgagaagacactgtacaacagaagaacccggcaggatgagcctgccctgttcgtggccctgaccttcgagcggcgggaggtcctggactcctccaatatcaaaccaatgaacctgatcggcgtggcaagaggcgaaaacatccccgccgtgatcgccctgaccgaccccgagggctgcccactgagccggtttaaggatagcctgggaaacccaacccacatcctgagaatcggcgagagctataaggagaagcagcggaccatccaggccaagaaggaggtggagcagcggagagccggcggctacagccggaagtacgccagcaaagccaagaatctggcagacgatatggtgagaaacaccgctagagatctgctgtactacgccgtgacccaggatgccatgctgatcttcgccaacctgagccggggcttcggccggcagggcaagcggaccttcatggccgagagacagtacacacggatggaggactggctgaccgccaagctggcctacgagggcctgagcaagacctacctgtccaagacactggcccagtacacctccaagacatgcagcaactgtgggtttaccatcaccagcgccgactacgacagggtgctggagaagctgaagaagacagcaacaggctggatgaccacaattaacggcaaggagctgaaggtggagggccagattacctactacaacagatacaagagacagaacgtagtcaaggacctgtccgtcgagctggatagactgagcgaagaatctgtgaacaacgacatctcctcctggacaaagggcagaagcggagaagctctgagcctcctgaagaaaagattctcccatagacccgtgcaggagaagttcgtgtgcctgaactgcggcttcgagacacacgcagccgagcaagccgccctgaacatcgccagatcctggctgttcctgcggagccaggagtacaagaaataccagacaaacaagacaaccggcaacaccgataagagagccttcgtcgagacctggcagtccttttaccggaagaagcttaaggaggtgtggaaacctgccgtgcggtctggcggatctggcggaggctccaccagccccaagaaaaagagaaaagtctaagctgccttctgcggggcttgccttctggccatgcccttcttctctcccttgcacctgtacctcttggtctttgaataaagcctgagtaggaaggctagcaaaaaaaaaaaaaaaaaaaaaaaaaaaaaaaaaaaaaaaaaaaaaaaaaaaaaaaaaaaaaaaaaaaaaaaaaaaaaaaa

SEQ ID NO: 10314 - RNA, 8787 nt, synthetic construct
  source 1..8787: mol_type = other RNA
aggaaataagagagaaaagaagagtaagaagaaatataagagccaccatggcccctaagaagaagcgtaaagtgagccggatgaaccacgaccaggagttcgacccccctaaggtgtaccctcccgtccccgccgagaagagaaagcccatccgggtcctgagcctgttcgatggcatcgccaccggtctgctggtgctgaaggacctgggcatccaggtggataggtacattgcctccgaggtgtgcgaggactccatcaccgtgggaatggtgcgtcatcagggcaagatcatgtacgtgggcgacgtgcggagcgtgacacagaagcatatccaggagtggggccctttcgacctggtgatcggcggcagcccttgcaatgacctgagcatcgtgaacccagcccggaagggcctgtacgagggaaccggcagactgttcttcgagttttacagactgctgcacgacgcccggcctaaggaaggcgacgaccggcccttcttttggctgttcgagaatgtggtggccatgggagtcagcgacaagcgggatattagccggttcctggagagcaaccccgtgatgatcgatgccaaggaagtgagcgccgcccaccgggccagatacttctggggcaatctgcctggcatgaacagacccctggccagcaccgtgaacgacaagctggagctgcaggagtgcctggagcacggccggatcgccaagttcagcaaggtgagaaccatcaccacccgaagcaacagcatcaaacaaggcaaggaccagcactttcctgtgttcatgaacgagaaggaggacatcctgtggtgtaccgagatggagagagtgttcgggttcccagtccactacacagatgtcagcaacatgtctagactggccagacagagactgctgggaagaagctggtccgtccctgtgatcagacacctgttcgcccctctgaaggagtacttcgcctgcgtgagcagcggcaacagcaacgccaacagccggggccccagcttctctagcggcctggtgccactgtccctgagagggagccacatgggccccatggagatctacaaaaccgtgagcgcctggaagcggcagcctgtgcgcgtgctgagcctgtttcggaatatcgataaagtcctgaaaagcctgggattcctggagagcggctctggctccggcggtggcaccctgaagtacgtggaggatgtgacaaacgtggtcagacgggatgtggagaagtggggccccttcgatctggtgtacggcagcacccaacccctgggcagctcttgtgaccggtgccctggctggtacatgtttcagttccaccggatcctgcagtacgccctgccgagacaggagtcccagcggccattcttttggattttcatggacaacttgctgctgaccgaggatgaccaggaaactaccactcggttcctgcagaccgaagccgtgaccctgcaggacgtgagaggccgggactaccagaacgccatgcgggtgtggtccaacatccctggactgaaaagcaagcacgcacctctgacccctaaagaagaggagtacctgcaggcccaggtgcggagcagaagcaagctggacgcccctaaggtggatctgctggtgaagaattgcctcctgcccctgagagagtacttcaagtatttcagccagaatagtctgcccctgggaggcagcggcggcggcggcgaggaggccgtgaccttcagggacgtggccctggacttcacctgggaggagtggggctgcctgagcgccgcccagagggagctgtacaaggacgtgatgctggagaactacaggaacctggtgagcctggccggcctgcccggccccaagcccggcctgatcagctggctggagggcgaggaggagccccacccctgggacagcctggtgcacgccgccaggagcaccagcctgagcaagggcggcccaagcagcggcgcccctcctcccagcggcggcaggcggcccaagcagcggcgcccctcctcccagcggcggcagcccagccggctccccaacctctaccgaggagggcacctctgagtccgccacccccgagagcggccctggcacctccaccgagcccagcgagggcagcgcacccggcagccctgccggcagccccacctccacagaggagggaaccagcaccgagcccagcgaaggcagcgccccaggcaccagcaccgagcctagtgagcaggagattaaacggatcaacaagatcagaagaagacttgtgaaagacagcaacaccaagaaggccggcaagacaggccccatgaaaaccctgctggttagagtgatgacacccgatctgagagagcggctggaaaacctgagaaagaagcctgaaaatatcccccagcccatcagcaatacatctagagccaacctgaataagctgctgaccgattacaccgaaatgaagaaggcgatcctgcatgtgtactgggaagagttccagaaggaccctgtgggcctgatgagccgggtggcccagcctgccagcaagaagatcgatcagaacaagctgaaacctgagatggacgagaagggcaacctgaccaccgccggctttgcctgctctcagtgtggccagcccctgttcgtgtacaagctggagcaggtgtctgagaagggcaaggcttacaccaactacttcggacggtgcaatgtggccgagcacgaaaagctgatcctgctggcccagctgaagcccgagaaggatagcgacgaagccgtgacatatagcctgggaaagtttgggcagagggccctggatttctacagcattcatgtgaccaaggagtccacccaccccgtgaagcccctggcccagatcgccggaaacagatacgcctccggacctgtgggaaaggccctgagcgacgcatgtatgggcacaatcgcctccttcctgtctaagtaccaggacatcatcatcgaacaccagaaggtggtgaagggcaaccagaagagactggagagcctgcgggagctggccggcaaggaaaacctggaataccctagcgtgaccctgccacctcagcctcacaccaaggagggcgttgatgcctacaacgaagtgatcgcccgggtgcgaatgtgggtgaacctgaacctgtggcagaagctgaagctaagcagagatgatgccaagcctctgctgagactgaagggattcccttcctttcctctggtcgagagacaggccaacgaagtggactggtgggacatggtgtgtaacgtgaagaagctgatcaacgagaaaaaggaggatggcaaggtgttttggcagaatctggctggctacaagagacaggaagccctgagaccatacctgagcagcgaggaagatcggaagaagggaaagaaattcgctcggtaccagctgggcgacctgctgctgcacctggaaaagaagcacggcgaggactggggaaaggtgtacgacgaggcctgggagcggattgacaagaaagtggaaggcctgagcaagcacatcaagctggaagaggaacggagaagcgaggacgcccagagcaaggccgccctgaccgactggctgcgggctaaggccagcttcgtgatcgagggcctgaaggaggccgacaaggacgagttctgcagatgcgagctgaagctgcagaagtggtacggggacctgcggggaaagcccttcgccatcgaagccgagaacagcatcctggacatcagcggcttcagcaagcagtacaactgtgccttcatctggcagaaggacggcgtgaagaagctgaacctgtacctgatcatcaactacttcaagggcggcaagctgcggttcaagaagatcaaacctgaagccttcgaagccaacagattctacaccgtgatcaacaaaaagagcggcgagatcgtgcccatggaggtgaacttcaacttcgacgaccccaacctgatcatcctgcctctggcctttggcaagagacagggcagagaattcatctggaacgacctgctgtccctggaaaccggcagcctgaagctggccaacggaagagtgatcgagaagacactgtacaacagaagaacccggcaggatgagcctgccctgttcgtggccctgaccttcgagcggcgggaggtcctggactcctccaatatcaaaccaatgaacctgatcggcgtggcaagaggcgaaaacatccccgccgtgatcgccctgaccgaccccgagggctgcccactgagccggtttaaggatagcctgggaaacccaacccacatcctgagaatcggcgagagctataaggagaagcagcggaccatccaggccaagaaggaggtggagcagcggagagccggcggctacagccggaagtacgccagcaaagccaagaatctggcagacgatatggtgagaaacaccgctagagatctgctgtactacgccgtgacccaggatgccatgctgatcttcgccaacctgagccggggcttcggccggcagggcaagcggaccttcatggccgagagacagtacacacggatggaggactggctgaccgccaagctggcctacgagggcctgagcaagacctacctgtccaagacactggcccagtacacctccaagacatgcagcaactgtgggtttaccatcaccagcgccgactacgacagggtgctggagaagctgaagaagacagcaacaggctggatgaccacaattaacggcaaggagctgaaggtggagggccagattacctactacaacagatacaagagacagaacgtagtcaaggacctgtccgtcgagctggatagactgagcgaagaatctgtgaacaacgacatctcctcctggacaaagggcagaagcggagaagctctgagcctcctgaagaaaagattctcccatagacccgtgcaggagaagttcgtgtgcctgaactgcggcttcgagacacacgcagccgagcaagccgccctgaacatcgccagatcctggctgttcctgcggagccaggagtacaagaaataccagacaaacaagacaaccggcaacaccgataagagagccttcgtcgagacctggcagtccttttaccggaagaagcttaaggaggtgtggaaacctgccgtgcggtctggcggatctggcggaggctccaccagccccaagaaaaagagaaaagtctaagctgccttctgcggggcttgccttctggccatgcccttcttctctcccttgcacctgtacctcttggtctttgaataaagcctgagtaggaaggctagcaaaaaaaaaaaaaaaaaaaaaaaaaaaaaaaaaaaaaaaaaaaaaaaaaaaaaaaaaaaaaaaaaaaaaaaaaaaaaaaagcccagccggctccccaacctctaccgaggagggcacctctgagtccgccacccccgagagcggccctggcacctccaccgagcccagcgagggcagcgcacccggcagccctgccggcagccccacctccacagaggagggaaccagcaccgagcccagcgaaggcagcgccccaggcaccagcaccgagcctagtgagcaggagattaaacggatcaacaagatcagaagaagacttgtgaaagacagcaacaccaagaaggccggcaagacaggccccatgaaaaccctgctggttagagtgatgacacccgatctgagagagcggctggaaaacctgagaaagaagcctgaaaatatcccccagcccatcagcaatacatctagagccaacctgaataagctgctgaccgattacaccgaaatgaagaaggcgatcctgcatgtgtactgggaagagttccagaaggaccctgtgggcctgatgagccgggtggcccagcctgccagcaagaagatcgatcagaacaagctgaaacctgagatggacgagaagggcaacctgaccaccgccggctttgcctgctctcagtgtggccagcccctgttcgtgtacaagctggagcaggtgtctgagaagggcaaggcttacaccaactacttcggacggtgcaatgtggccgagcacgaaaagctgatcctgctggcccagctgaagcccgagaaggatagcgacgaagccgtgacatatagcctgggaaagtttgggcagagggccctggatttctacagcattcatgtgaccaaggagtccacccaccccgtgaagcccctggcccagatcgccggaaacagatacgcctccggacctgtgggaaaggccctgagcgacgcatgtatgggcacaatcgcctccttcctgtctaagtaccaggacatcatcatcgaacaccagaaggtggtgaagggcaaccagaagagactggagagcctgcgggagctggccggcaaggaaaacctggaataccctagcgtgaccctgccacctcagcctcacaccaaggagggcgttgatgcctacaacgaagtgatcgcccgggtgcgaatgtgggtgaacctgaacctgtggcagaagctgaagctaagcagagatgatgccaagcctctgctgagactgaagggattcccttcctttcctctggtcgagagacaggccaacgaagtggactggtgggacatggtgtgtaacgtgaagaagctgatcaacgagaaaaaggaggatggcaaggtgttttggcagaatctggctggctacaagagacaggaagccctgagaccatacctgagcagcgaggaagatcggaagaagggaaagaaattcgctcggtaccagctgggcgacctgctgctgcacctggaaaagaagcacggcgaggactggggaaaggtgtacgacgaggcctgggagcggattgacaagaaagtggaaggcctgagcaagcacatcaagctggaagaggaacggagaagcgaggacgcccagagcaaggccgccctgaccgactggctgcgggctaaggccagcttcgtgatcgagggcctgaaggaggccgacaaggacgagttctgcagatgcgagctgaagctgcagaagtggtacggggacctgcggggaaagcccttcgccatcgaagccgagaacagcatcctggacatcagcggcttcagcaagcagtacaactgtgccttcatctggcagaaggacggcgtgaagaagctgaacctgtacctgatcatcaactacttcaagggcggcaagctgcggttcaagaagatcaaacctgaagccttcgaagccaacagattctacaccgtgatcaacaaaaagagcggcgagatcgtgcccatggaggtgaacttcaacttcgacgaccccaacctgatcatcctgcctctggcctttggcaagagacagggcagagaattcatctggaacgacctgctgtccctggaaaccggcagcctgaagctggccaacggaagagtgatcgagaagacactgtacaacagaagaacccggcaggatgagcctgccctgttcgtggccctgaccttcgagcggcgggaggtcctggactcctccaatatcaaaccaatgaacctgatcggcgtggcaagaggcgaaaacatccccgccgtgatcgccctgaccgaccccgagggctgcccactgagccggtttaaggatagcctgggaaacccaacccacatcctgagaatcggcgagagctataaggagaagcagcggaccatccaggccaagaaggaggtggagcagcggagagccggcggctacagccggaagtacgccagcaaagccaagaatctggcagacgatatggtgagaaacaccgctagagatctgctgtactacgccgtgacccaggatgccatgctgatcttcgccaacctgagccggggcttcggccggcagggcaagcggaccttcatggccgagagacagtacacacggatggaggactggctgaccgccaagctggcctacgagggcctgagcaagacctacctgtccaagacactggcccagtacacctccaagacatgcagcaactgtgggtttaccatcaccagcgccgactacgacagggtgctggagaagctgaagaagacagcaacaggctggatgaccacaattaacggcaaggagctgaaggtggagggccagattacctactacaacagatacaagagacagaacgtagtcaaggacctgtccgtcgagctggatagactgagcgaagaatctgtgaacaacgacatctcctcctggacaaagggcagaagcggagaagctctgagcctcctgaagaaaagattctcccatagacccgtgcaggagaagttcgtgtgcctgaactgcggcttcgagacacacgcagccgagcaagccgccctgaacatcgccagatcctggctgttcctgcggagccaggagtacaagaaataccagacaaacaagacaaccggcaacaccgataagagagccttcgtcgagacctggcagtccttttaccggaagaagcttaaggaggtgtggaaacctgccgtgcggtctggcggatctggcggaggctccaccagccccaagaaaaagagaaaagtctaagctgccttctgcggggcttgccttctggccatgcccttcttctctcccttgcacctgtacctcttggtctttgaataaagcctgagtaggaaggctagcaaaaaaaaaaaaaaaaaaaaaaaaaaaaaaaaaaaaaaaaaaaaaaaaaaaaaaaaaaaaaaaaaaaaaaaaaaaaaaaa

SEQ ID NO: 10315 - RNA, 8787 nt, synthetic construct
  source 1..8787: mol_type = other RNA
aggaaataagagagaaaagaagagtaagaagaaatataagagccaccatggcccctaagaagaagcgtaaagtgagccggatgaaccacgaccaggagttcgacccccctaaggtgtaccctcccgtccccgccgagaagagaaagcccatccgggtcctgagcctgttcgatggcatcgccaccggtctgctggtgctgaaggacctgggcatccaggtggataggtacattgcctccgaggtgtgcgaggactccatcaccgtgggaatggtgcgtcatcagggcaagatcatgtacgtgggcgacgtgcggagcgtgacacagaagcatatccaggagtggggccctttcgacctggtgatcggcggcagcccttgcaatgacctgagcatcgtgaacccagcccggaagggcctgtacgagggaaccggcagactgttcttcgagttttacagactgctgcacgacgcccggcctaaggaaggcgacgaccggcccttcttttggctgttcgagaatgtggtggccatgggagtcagcgacaagcgggatattagccggttcctggagagcaaccccgtgatgatcgatgccaaggaagtgagcgccgcccaccgggccagatacttctggggcaatctgcctggcatgaacagacccctggccagcaccgtgaacgacaagctggagctgcaggagtgcctggagcacggccggatcgccaagttcagcaaggtgagaaccatcaccacccgaagcaacagcatcaaacaaggcaaggaccagcactttcctgtgttcatgaacgagaaggaggacatcctgtggtgtaccgagatggagagagtgttcgggttcccagtccactacacagatgtcagcaacatgtctagactggccagacagagactgctgggaagaagctggtccgtccctgtgatcagacacctgttcgcccctctgaaggagtacttcgcctgcgtgagcagcggcaacagcaacgccaacagccggggccccagcttctctagcggcctggtgccactgtccctgagagggagccacatgggccccatggagatctacaaaaccgtgagcgcctggaagcggcagcctgtgcgcgtgctgagcctgtttcggaatatcgataaagtcctgaaaagcctgggattcctggagagcggctctggctccggcggtggcaccctgaagtacgtggaggatgtgacaaacgtggtcagacgggatgtggagaagtggggccccttcgatctggtgtacggcagcacccaacccctgggcagctcttgtgaccggtgccctggctggtacatgtttcagttccaccggatcctgcagtacgccctgccgagacaggagtcccagcggccattcttttggattttcatggacaacttgctgctgaccgaggatgaccaggaaactaccactcggttcctgcagaccgaagccgtgaccctgcaggacgtgagaggccgggactaccagaacgccatgcgggtgtggtccaacatccctggactgaaaagcaagcacgcacctctgacccctaaagaagaggagtacctgcaggcccaggtgcggagcagaagcaagctggacgcccctaaggtggatctgctggtgaagaattgcctcctgcccctgagagagtacttcaagtatttcagccagaatagtctgcccctgggaggcagcggcggcggcctgcagaggctgctgaccttcagggacgtggccatcgagttcagccaggaggagtggacctgcctgaaccacacccagaggaagctgtacagggacgtgatgctggagaactacggccacctgctgttcctgggcctgatcgtgagcaagcccgacctggtgagcttcctggagcagaagaaggagccctggagcgtgaagaggaagaagagggtgaccatccaccccggcaaggtggcccagggcggcccaagcagcggcgcccctcctcccagcggcggcaggcggcccaagcagcggcgcccctcctcccagcggcggcagcccagccggctccccaacctctaccgaggagggcacctctgagtccgccacccccgagagcggccctggcacctccaccgagcccagcgagggcagcgcacccggcagccctgccggcagccccacctccacagaggagggaaccagcaccgagcccagcgaaggcagcgccccaggcaccagcaccgagcctagtgagcaggagattaaacggatcaacaagatcagaagaagacttgtgaaagacagcaacaccaagaaggccggcaagacaggccccatgaaaaccctgctggttagagtgatgacacccgatctgagagagcggctggaaaacctgagaaagaagcctgaaaatatcccccagcccatcagcaatacatctagagccaacctgaataagctgctgaccgattacaccgaaatgaagaaggcgatcctgcatgtgtactgggaagagttccagaaggaccctgtgggcctgatgagccgggtggcccagcctgccagcaagaagatcgatcagaacaagctgaaacctgagatggacgagaagggcaacctgaccaccgccggctttgcctgctctcagtgtggccagcccctgttcgtgtacaagctggagcaggtgtctgagaagggcaaggcttacaccaactacttcggacggtgcaatgtggccgagcacgaaaagctgatcctgctggcccagctgaagcccgagaaggatagcgacgaagccgtgacatatagcctgggaaagtttgggcagagggccctggatttctacagcattcatgtgaccaaggagtccacccaccccgtgaagcccctggcccagatcgccggaaacagatacgcctccggacctgtgggaaaggccctgagcgacgcatgtatgggcacaatcgcctccttcctgtctaagtaccaggacatcatcatcgaacaccagaaggtggtgaagggcaaccagaagagactggagagcctgcgggagctggccggcaaggaaaacctggaataccctagcgtgaccctgccacctcagcctcacaccaaggagggcgttgatgcctacaacgaagtgatcgcccgggtgcgaatgtgggtgaacctgaacctgtggcagaagctgaagctaagcagagatgatgccaagcctctgctgagactgaagggattcccttcctttcctctggtcgagagacaggccaacgaagtggactggtgggacatggtgtgtaacgtgaagaagctgatcaacgagaaaaaggaggatggcaaggtgttttggcagaatctggctggctacaagagacaggaagccctgagaccatacctgagcagcgaggaagatcggaagaagggaaagaaattcgctcggtaccagctgggcgacctgctgctgcacctggaaaagaagcacggcgaggactggggaaaggtgtacgacgaggcctgggagcggattgacaagaaagtggaaggcctgagcaagcacatcaagctggaagaggaacggagaagcgaggacgcccagagcaaggccgccctgaccgactggctgcgggctaaggccagcttcgtgatcgagggcctgaaggaggccgacaaggacgagttctgcagatgcgagctgaagctgcagaagtggtacggggacctgcggggaaagcccttcgccatcgaagccgagaacagcatcctggacatcagcggcttcagcaagcagtacaactgtgccttcatctggcagaaggacggcgtgaagaagctgaacctgtacctgatcatcaactacttcaagggcggcaagctgcggttcaagaagatcaaacctgaagccttcgaagccaacagattctacaccgtgatcaacaaaaagagcggcgagatcgtgcccatggaggtgaacttcaacttcgacgaccccaacctgatcatcctgcctctggcctttggcaagagacagggcagagaattcatctggaacgacctgctgtccctggaaaccggcagcctgaagctggccaacggaagagtgatcgagaagacactgtacaacagaagaacccggcaggatgagcctgccctgttcgtggccctgaccttcgagcggcgggaggtcctggactcctccaatatcaaaccaatgaacctgatcggcgtggcaagaggcgaaaacatccccgccgtgatcgccctgaccgaccccgagggctgcccactgagccggtttaaggatagcctgggaaacccaacccacatcctgagaatcggcgagagctataaggagaagcagcggaccatccaggccaagaaggaggtggagcagcggagagccggcggctacagccggaagtacgccagcaaagccaagaatctggcagacgatatggtgagaaacaccgctagagatctgctgtactacgccgtgacccaggatgccatgctgatcttcgccaacctgagccggggcttcggccggcagggcaagcggaccttcatggccgagagacagtacacacggatggaggactggctgaccgccaagctggcctacgagggcctgagcaagacctacctgtccaagacactggcccagtacacctccaagacatgcagcaactgtgggtttaccatcaccagcgccgactacgacagggtgctggagaagctgaagaagacagcaacaggctggatgaccacaattaacggcaaggagctgaaggtggagggccagattacctactacaacagatacaagagacagaacgtagtcaaggacctgtccgtcgagctggatagactgagcgaagaatctgtgaacaacgacatctcctcctggacaaagggcagaagcggagaagctctgagcctcctgaagaaaagattctcccatagacccgtgcaggagaagttcgtgtgcctgaactgcggcttcgagacacacgcagccgagcaagccgccctgaacatcgccagatcctggctgttcctgcggagccaggagtacaagaaataccagacaaacaagacaaccggcaacaccgataagagagccttcgtcgagacctggcagtccttttaccggaagaagcttaaggaggtgtggaaacctgccgtgcggtctggcggatctggcggaggctccaccagccccaagaaaaagagaaaagtctaagctgccttctgcggggcttgccttctggccatgcccttcttctctcccttgcacctgtacctcttggtctttgaataaagcctgagtaggaaggctagcaaaaaaaaaaaaaaaaaaaaaaaaaaaaaaaaaaaaaaaaaaaaaaaaaaaaaaaaaaaaaaaaaaaaaaaaaaaaaaaagcccagccggctccccaacctctaccgaggagggcacctctgagtccgccacccccgagagcggccctggcacctccaccgagcccagcgagggcagcgcacccggcagccctgccggcagccccacctccacagaggagggaaccagcaccgagcccagcgaaggcagcgccccaggcaccagcaccgagcctagtgagcaggagattaaacggatcaacaagatcagaagaagacttgtgaaagacagcaacaccaagaaggccggcaagacaggccccatgaaaaccctgctggttagagtgatgacacccgatctgagagagcggctggaaaacctgagaaagaagcctgaaaatatcccccagcccatcagcaatacatctagagccaacctgaataagctgctgaccgattacaccgaaatgaagaaggcgatcctgcatgtgtactgggaagagttccagaaggaccctgtgggcctgatgagccgggtggcccagcctgccagcaagaagatcgatcagaacaagctgaaacctgagatggacgagaagggcaacctgaccaccgccggctttgcctgctctcagtgtggccagcccctgttcgtgtacaagctggagcaggtgtctgagaagggcaaggcttacaccaactacttcggacggtgcaatgtggccgagcacgaaaagctgatcctgctggcccagctgaagcccgagaaggatagcgacgaagccgtgacatatagcctgggaaagtttgggcagagggccctggatttctacagcattcatgtgaccaaggagtccacccaccccgtgaagcccctggcccagatcgccggaaacagatacgcctccggacctgtgggaaaggccctgagcgacgcatgtatgggcacaatcgcctccttcctgtctaagtaccaggacatcatcatcgaacaccagaaggtggtgaagggcaaccagaagagactggagagcctgcgggagctggccggcaaggaaaacctggaataccctagcgtgaccctgccacctcagcctcacaccaaggagggcgttgatgcctacaacgaagtgatcgcccgggtgcgaatgtgggtgaacctgaacctgtggcagaagctgaagctaagcagagatgatgccaagcctctgctgagactgaagggattcccttcctttcctctggtcgagagacaggccaacgaagtggactggtgggacatggtgtgtaacgtgaagaagctgatcaacgagaaaaaggaggatggcaaggtgttttggcagaatctggctggctacaagagacaggaagccctgagaccatacctgagcagcgaggaagatcggaagaagggaaagaaattcgctcggtaccagctgggcgacctgctgctgcacctggaaaagaagcacggcgaggactggggaaaggtgtacgacgaggcctgggagcggattgacaagaaagtggaaggcctgagcaagcacatcaagctggaagaggaacggagaagcgaggacgcccagagcaaggccgccctgaccgactggctgcgggctaaggccagcttcgtgatcgagggcctgaaggaggccgacaaggacgagttctgcagatgcgagctgaagctgcagaagtggtacggggacctgcggggaaagcccttcgccatcgaagccgagaacagcatcctggacatcagcggcttcagcaagcagtacaactgtgccttcatctggcagaaggacggcgtgaagaagctgaacctgtacctgatcatcaactacttcaagggcggcaagctgcggttcaagaagatcaaacctgaagccttcgaagccaacagattctacaccgtgatcaacaaaaagagcggcgagatcgtgcccatggaggtgaacttcaacttcgacgaccccaacctgatcatcctgcctctggcctttggcaagagacagggcagagaattcatctggaacgacctgctgtccctggaaaccggcagcctgaagctggccaacggaagagtgatcgagaagacactgtacaacagaagaacccggcaggatgagcctgccctgttcgtggccctgaccttcgagcggcgggaggtcctggactcctccaatatcaaaccaatgaacctgatcggcgtggcaagaggcgaaaacatccccgccgtgatcgccctgaccgaccccgagggctgcccactgagccggtttaaggatagcctgggaaacccaacccacatcctgagaatcggcgagagctataaggagaagcagcggaccatccaggccaagaaggaggtggagcagcggagagccggcggctacagccggaagtacgccagcaaagccaagaatctggcagacgatatggtgagaaacaccgctagagatctgctgtactacgccgtgacccaggatgccatgctgatcttcgccaacctgagccggggcttcggccggcagggcaagcggaccttcatggccgagagacagtacacacggatggaggactggctgaccgccaagctggcctacgagggcctgagcaagacctacctgtccaagacactggcccagtacacctccaagacatgcagcaactgtgggtttaccatcaccagcgccgactacgacagggtgctggagaagctgaagaagacagcaacaggctggatgaccacaattaacggcaaggagctgaaggtggagggccagattacctactacaacagatacaagagacagaacgtagtcaaggacctgtccgtcgagctggatagactgagcgaagaatctgtgaacaacgacatctcctcctggacaaagggcagaagcggagaagctctgagcctcctgaagaaaagattctcccatagacccgtgcaggagaagttcgtgtgcctgaactgcggcttcgagacacacgcagccgagcaagccgccctgaacatcgccagatcctggctgttcctgcggagccaggagtacaagaaataccagacaaacaagacaaccggcaacaccgataagagagccttcgtcgagacctggcagtccttttaccggaagaagcttaaggaggtgtggaaacctgccgtgcggtctggcggatctggcggaggctccaccagccccaagaaaaagagaaaagtctaagctgccttctgcggggcttgccttctggccatgcccttcttctctcccttgcacctgtacctcttggtctttgaataaagcctgagtaggaaggctagcaaaaaaaaaaaaaaaaaaaaaaaaaaaaaaaaaaaaaaaaaaaaaaaaaaaaaaaaaaaaaaaaaaaaaaaaaaaaaaaa

SEQ ID NO: 10316 - RNA, 8787 nt, synthetic construct
  source 1..8787: mol_type = other RNA
aggaaataagagagaaaagaagagtaagaagaaatataagagccaccatggcccctaagaagaagcgtaaagtgagccggatgaaccacgaccaggagttcgacccccctaaggtgtaccctcccgtccccgccgagaagagaaagcccatccgggtcctgagcctgttcgatggcatcgccaccggtctgctggtgctgaaggacctgggcatccaggtggataggtacattgcctccgaggtgtgcgaggactccatcaccgtgggaatggtgcgtcatcagggcaagatcatgtacgtgggcgacgtgcggagcgtgacacagaagcatatccaggagtggggccctttcgacctggtgatcggcggcagcccttgcaatgacctgagcatcgtgaacccagcccggaagggcctgtacgagggaaccggcagactgttcttcgagttttacagactgctgcacgacgcccggcctaaggaaggcgacgaccggcccttcttttggctgttcgagaatgtggtggccatgggagtcagcgacaagcgggatattagccggttcctggagagcaaccccgtgatgatcgatgccaaggaagtgagcgccgcccaccgggccagatacttctggggcaatctgcctggcatgaacagacccctggccagcaccgtgaacgacaagctggagctgcaggagtgcctggagcacggccggatcgccaagttcagcaaggtgagaaccatcaccacccgaagcaacagcatcaaacaaggcaaggaccagcactttcctgtgttcatgaacgagaaggaggacatcctgtggtgtaccgagatggagagagtgttcgggttcccagtccactacacagatgtcagcaacatgtctagactggccagacagagactgctgggaagaagctggtccgtccctgtgatcagacacctgttcgcccctctgaaggagtacttcgcctgcgtgagcagcggcaacagcaacgccaacagccggggccccagcttctctagcggcctggtgccactgtccctgagagggagccacatgggccccatggagatctacaaaaccgtgagcgcctggaagcggcagcctgtgcgcgtgctgagcctgtttcggaatatcgataaagtcctgaaaagcctgggattcctggagagcggctctggctccggcggtggcaccctgaagtacgtggaggatgtgacaaacgtggtcagacgggatgtggagaagtggggccccttcgatctggtgtacggcagcacccaacccctgggcagctcttgtgaccggtgccctggctggtacatgtttcagttccaccggatcctgcagtacgccctgccgagacaggagtcccagcggccattcttttggattttcatggacaacttgctgctgaccgaggatgaccaggaaactaccactcggttcctgcagaccgaagccgtgaccctgcaggacgtgagaggccgggactaccagaacgccatgcgggtgtggtccaacatccctggactgaaaagcaagcacgcacctctgacccctaaagaagaggagtacctgcaggcccaggtgcggagcagaagcaagctggacgcccctaaggtggatctgctggtgaagaattgcctcctgcccctgagagagtacttcaagtatttcagccagaatagtctgcccctgggaggcagcggcggcggcggcaagcccggcgccctgagcttcgccgacgtggccgtgtacttcagcagcgaggagtggggctgcctgaggcccgcccagagggccctgtacagggacgtgatgagggagacctacggccacctgggcgccctgggcgaggccaggccccccgccctgatcagctggatggagaggaagaaggaggcctggagccccgaggccgaggaccccgaggacagggccaggcaccccggctacggcggcggcccaagcagcggcgcccctcctcccagcggcggcaggcggcccaagcagcggcgcccctcctcccagcggcggcagcccagccggctccccaacctctaccgaggagggcacctctgagtccgccacccccgagagcggccctggcacctccaccgagcccagcgagggcagcgcacccggcagccctgccggcagccccacctccacagaggagggaaccagcaccgagcccagcgaaggcagcgccccaggcaccagcaccgagcctagtgagcaggagattaaacggatcaacaagatcagaagaagacttgtgaaagacagcaacaccaagaaggccggcaagacaggccccatgaaaaccctgctggttagagtgatgacacccgatctgagagagcggctggaaaacctgagaaagaagcctgaaaatatcccccagcccatcagcaatacatctagagccaacctgaataagctgctgaccgattacaccgaaatgaagaaggcgatcctgcatgtgtactgggaagagttccagaaggaccctgtgggcctgatgagccgggtggcccagcctgccagcaagaagatcgatcagaacaagctgaaacctgagatggacgagaagggcaacctgaccaccgccggctttgcctgctctcagtgtggccagcccctgttcgtgtacaagctggagcaggtgtctgagaagggcaaggcttacaccaactacttcggacggtgcaatgtggccgagcacgaaaagctgatcctgctggcccagctgaagcccgagaaggatagcgacgaagccgtgacatatagcctgggaaagtttgggcagagggccctggatttctacagcattcatgtgaccaaggagtccacccaccccgtgaagcccctggcccagatcgccggaaacagatacgcctccggacctgtgggaaaggccctgagcgacgcatgtatgggcacaatcgcctccttcctgtctaagtaccaggacatcatcatcgaacaccagaaggtggtgaagggcaaccagaagagactggagagcctgcgggagctggccggcaaggaaaacctggaataccctagcgtgaccctgccacctcagcctcacaccaaggagggcgttgatgcctacaacgaagtgatcgcccgggtgcgaatgtgggtgaacctgaacctgtggcagaagctgaagctaagcagagatgatgccaagcctctgctgagactgaagggattcccttcctttcctctggtcgagagacaggccaacgaagtggactggtgggacatggtgtgtaacgtgaagaagctgatcaacgagaaaaaggaggatggcaaggtgttttggcagaatctggctggctacaagagacaggaagccctgagaccatacctgagcagcgaggaagatcggaagaagggaaagaaattcgctcggtaccagctgggcgacctgctgctgcacctggaaaagaagcacggcgaggactggggaaaggtgtacgacgaggcctgggagcggattgacaagaaagtggaaggcctgagcaagcacatcaagctggaagaggaacggagaagcgaggacgcccagagcaaggccgccctgaccgactggctgcgggctaaggccagcttcgtgatcgagggcctgaaggaggccgacaaggacgagttctgcagatgcgagctgaagctgcagaagtggtacggggacctgcggggaaagcccttcgccatcgaagccgagaacagcatcctggacatcagcggcttcagcaagcagtacaactgtgccttcatctggcagaaggacggcgtgaagaagctgaacctgtacctgatcatcaactacttcaagggcggcaagctgcggttcaagaagatcaaacctgaagccttcgaagccaacagattctacaccgtgatcaacaaaaagagcggcgagatcgtgcccatggaggtgaacttcaacttcgacgaccccaacctgatcatcctgcctctggcctttggcaagagacagggcagagaattcatctggaacgacctgctgtccctggaaaccggcagcctgaagctggccaacggaagagtgatcgagaagacactgtacaacagaagaacccggcaggatgagcctgccctgttcgtggccctgaccttcgagcggcgggaggtcctggactcctccaatatcaaaccaatgaacctgatcggcgtggcaagaggcgaaaacatccccgccgtgatcgccctgaccgaccccgagggctgcccactgagccggtttaaggatagcctgggaaacccaacccacatcctgagaatcggcgagagctataaggagaagcagcggaccatccaggccaagaaggaggtggagcagcggagagccggcggctacagccggaagtacgccagcaaagccaagaatctggcagacgatatggtgagaaacaccgctagagatctgctgtactacgccgtgacccaggatgccatgctgatcttcgccaacctgagccggggcttcggccggcagggcaagcggaccttcatggccgagagacagtacacacggatggaggactggctgaccgccaagctggcctacgagggcctgagcaagacctacctgtccaagacactggcccagtacacctccaagacatgcagcaactgtgggtttaccatcaccagcgccgactacgacagggtgctggagaagctgaagaagacagcaacaggctggatgaccacaattaacggcaaggagctgaaggtggagggccagattacctactacaacagatacaagagacagaacgtagtcaaggacctgtccgtcgagctggatagactgagcgaagaatctgtgaacaacgacatctcctcctggacaaagggcagaagcggagaagctctgagcctcctgaagaaaagattctcccatagacccgtgcaggagaagttcgtgtgcctgaactgcggcttcgagacacacgcagccgagcaagccgccctgaacatcgccagatcctggctgttcctgcggagccaggagtacaagaaataccagacaaacaagacaaccggcaacaccgataagagagccttcgtcgagacctggcagtccttttaccggaagaagcttaaggaggtgtggaaacctgccgtgcggtctggcggatctggcggaggctccaccagccccaagaaaaagagaaaagtctaagctgccttctgcggggcttgccttctggccatgcccttcttctctcccttgcacctgtacctcttggtctttgaataaagcctgagtaggaaggctagcaaaaaaaaaaaaaaaaaaaaaaaaaaaaaaaaaaaaaaaaaaaaaaaaaaaaaaaaaaaaaaaaaaaaaaaaaaaaaaaagcccagccggctccccaacctctaccgaggagggcacctctgagtccgccacccccgagagcggccctggcacctccaccgagcccagcgagggcagcgcacccggcagccctgccggcagccccacctccacagaggagggaaccagcaccgagcccagcgaaggcagcgccccaggcaccagcaccgagcctagtgagcaggagattaaacggatcaacaagatcagaagaagacttgtgaaagacagcaacaccaagaaggccggcaagacaggccccatgaaaaccctgctggttagagtgatgacacccgatctgagagagcggctggaaaacctgagaaagaagcctgaaaatatcccccagcccatcagcaatacatctagagccaacctgaataagctgctgaccgattacaccgaaatgaagaaggcgatcctgcatgtgtactgggaagagttccagaaggaccctgtgggcctgatgagccgggtggcccagcctgccagcaagaagatcgatcagaacaagctgaaacctgagatggacgagaagggcaacctgaccaccgccggctttgcctgctctcagtgtggccagcccctgttcgtgtacaagctggagcaggtgtctgagaagggcaaggcttacaccaactacttcggacggtgcaatgtggccgagcacgaaaagctgatcctgctggcccagctgaagcccgagaaggatagcgacgaagccgtgacatatagcctgggaaagtttgggcagagggccctggatttctacagcattcatgtgaccaaggagtccacccaccccgtgaagcccctggcccagatcgccggaaacagatacgcctccggacctgtgggaaaggccctgagcgacgcatgtatgggcacaatcgcctccttcctgtctaagtaccaggacatcatcatcgaacaccagaaggtggtgaagggcaaccagaagagactggagagcctgcgggagctggccggcaaggaaaacctggaataccctagcgtgaccctgccacctcagcctcacaccaaggagggcgttgatgcctacaacgaagtgatcgcccgggtgcgaatgtgggtgaacctgaacctgtggcagaagctgaagctaagcagagatgatgccaagcctctgctgagactgaagggattcccttcctttcctctggtcgagagacaggccaacgaagtggactggtgggacatggtgtgtaacgtgaagaagctgatcaacgagaaaaaggaggatggcaaggtgttttggcagaatctggctggctacaagagacaggaagccctgagaccatacctgagcagcgaggaagatcggaagaagggaaagaaattcgctcggtaccagctgggcgacctgctgctgcacctggaaaagaagcacggcgaggactggggaaaggtgtacgacgaggcctgggagcggattgacaagaaagtggaaggcctgagcaagcacatcaagctggaagaggaacggagaagcgaggacgcccagagcaaggccgccctgaccgactggctgcgggctaaggccagcttcgtgatcgagggcctgaaggaggccgacaaggacgagttctgcagatgcgagctgaagctgcagaagtggtacggggacctgcggggaaagcccttcgccatcgaagccgagaacagcatcctggacatcagcggcttcagcaagcagtacaactgtgccttcatctggcagaaggacggcgtgaagaagctgaacctgtacctgatcatcaactacttcaagggcggcaagctgcggttcaagaagatcaaacctgaagccttcgaagccaacagattctacaccgtgatcaacaaaaagagcggcgagatcgtgcccatggaggtgaacttcaacttcgacgaccccaacctgatcatcctgcctctggcctttggcaagagacagggcagagaattcatctggaacgacctgctgtccctggaaaccggcagcctgaagctggccaacggaagagtgatcgagaagacactgtacaacagaagaacccggcaggatgagcctgccctgttcgtggccctgaccttcgagcggcgggaggtcctggactcctccaatatcaaaccaatgaacctgatcggcgtggcaagaggcgaaaacatccccgccgtgatcgccctgaccgaccccgagggctgcccactgagccggtttaaggatagcctgggaaacccaacccacatcctgagaatcggcgagagctataaggagaagcagcggaccatccaggccaagaaggaggtggagcagcggagagccggcggctacagccggaagtacgccagcaaagccaagaatctggcagacgatatggtgagaaacaccgctagagatctgctgtactacgccgtgacccaggatgccatgctgatcttcgccaacctgagccggggcttcggccggcagggcaagcggaccttcatggccgagagacagtacacacggatggaggactggctgaccgccaagctggcctacgagggcctgagcaagacctacctgtccaagacactggcccagtacacctccaagacatgcagcaactgtgggtttaccatcaccagcgccgactacgacagggtgctggagaagctgaagaagacagcaacaggctggatgaccacaattaacggcaaggagctgaaggtggagggccagattacctactacaacagatacaagagacagaacgtagtcaaggacctgtccgtcgagctggatagactgagcgaagaatctgtgaacaacgacatctcctcctggacaaagggcagaagcggagaagctctgagcctcctgaagaaaagattctcccatagacccgtgcaggagaagttcgtgtgcctgaactgcggcttcgagacacacgcagccgagcaagccgccctgaacatcgccagatcctggctgttcctgcggagccaggagtacaagaaataccagacaaacaagacaaccggcaacaccgataagagagccttcgtcgagacctggcagtccttttaccggaagaagcttaaggaggtgtggaaacctgccgtgcggtctggcggatctggcggaggctccaccagccccaagaaaaagagaaaagtctaagctgccttctgcggggcttgccttctggccatgcccttcttctctcccttgcacctgtacctcttggtctttgaataaagcctgagtaggaaggctagcaaaaaaaaaaaaaaaaaaaaaaaaaaaaaaaaaaaaaaaaaaaaaaaaaaaaaaaaaaaaaaaaaaaaaaaaaaaaaaaa

SEQ ID NO: 10317 - RNA, 8787 nt, synthetic construct
  source 1..8787: mol_type = other RNA
aggaaataagagagaaaagaagagtaagaagaaatataagagccaccatggcccctaagaagaagcgtaaagtgagccggatgaaccacgaccaggagttcgacccccctaaggtgtaccctcccgtccccgccgagaagagaaagcccatccgggtcctgagcctgttcgatggcatcgccaccggtctgctggtgctgaaggacctgggcatccaggtggataggtacattgcctccgaggtgtgcgaggactccatcaccgtgggaatggtgcgtcatcagggcaagatcatgtacgtgggcgacgtgcggagcgtgacacagaagcatatccaggagtggggccctttcgacctggtgatcggcggcagcccttgcaatgacctgagcatcgtgaacccagcccggaagggcctgtacgagggaaccggcagactgttcttcgagttttacagactgctgcacgacgcccggcctaaggaaggcgacgaccggcccttcttttggctgttcgagaatgtggtggccatgggagtcagcgacaagcgggatattagccggttcctggagagcaaccccgtgatgatcgatgccaaggaagtgagcgccgcccaccgggccagatacttctggggcaatctgcctggcatgaacagacccctggccagcaccgtgaacgacaagctggagctgcaggagtgcctggagcacggccggatcgccaagttcagcaaggtgagaaccatcaccacccgaagcaacagcatcaaacaaggcaaggaccagcactttcctgtgttcatgaacgagaaggaggacatcctgtggtgtaccgagatggagagagtgttcgggttcccagtccactacacagatgtcagcaacatgtctagactggccagacagagactgctgggaagaagctggtccgtccctgtgatcagacacctgttcgcccctctgaaggagtacttcgcctgcgtgagcagcggcaacagcaacgccaacagccggggccccagcttctctagcggcctggtgccactgtccctgagagggagccacatgggccccatggagatctacaaaaccgtgagcgcctggaagcggcagcctgtgcgcgtgctgagcctgtttcggaatatcgataaagtcctgaaaagcctgggattcctggagagcggctctggctccggcggtggcaccctgaagtacgtggaggatgtgacaaacgtggtcagacgggatgtggagaagtggggccccttcgatctggtgtacggcagcacccaacccctgggcagctcttgtgaccggtgccctggctggtacatgtttcagttccaccggatcctgcagtacgccctgccgagacaggagtcccagcggccattcttttggattttcatggacaacttgctgctgaccgaggatgaccaggaaactaccactcggttcctgcagaccgaagccgtgaccctgcaggacgtgagaggccgggactaccagaacgccatgcgggtgtggtccaacatccctggactgaaaagcaagcacgcacctctgacccctaaagaagaggagtacctgcaggcccaggtgcggagcagaagcaagctggacgcccctaaggtggatctgctggtgaagaattgcctcctgcccctgagagagtacttcaagtatttcagccagaatagtctgcccctgggaggcagcggcggcggccaccaggacctggtgaccttcaaggacgtggccgtggacttcacccccgaggagtggggccagctggtgcccagccagaaggagctgtacagggacgtgatgctggagaactaccagaacctggtgtggctgggcctggccgtgagcaagcccgacgtgatctaccagctggagcaggtgggcggcacctgggtgcccgagggcgagaccctgaccgtgagctgcagcgacttcgtgaccaggggcggcccaagcagcggcgcccctcctcccagcggcggcaggcggcccaagcagcggcgcccctcctcccagcggcggcagcccagccggctccccaacctctaccgaggagggcacctctgagtccgccacccccgagagcggccctggcacctccaccgagcccagcgagggcagcgcacccggcagccctgccggcagccccacctccacagaggagggaaccagcaccgagcccagcgaaggcagcgccccaggcaccagcaccgagcctagtgagcaggagattaaacggatcaacaagatcagaagaagacttgtgaaagacagcaacaccaagaaggccggcaagacaggccccatgaaaaccctgctggttagagtgatgacacccgatctgagagagcggctggaaaacctgagaaagaagcctgaaaatatcccccagcccatcagcaatacatctagagccaacctgaataagctgctgaccgattacaccgaaatgaagaaggcgatcctgcatgtgtactgggaagagttccagaaggaccctgtgggcctgatgagccgggtggcccagcctgccagcaagaagatcgatcagaacaagctgaaacctgagatggacgagaagggcaacctgaccaccgccggctttgcctgctctcagtgtggccagcccctgttcgtgtacaagctggagcaggtgtctgagaagggcaaggcttacaccaactacttcggacggtgcaatgtggccgagcacgaaaagctgatcctgctggcccagctgaagcccgagaaggatagcgacgaagccgtgacatatagcctgggaaagtttgggcagagggccctggatttctacagcattcatgtgaccaaggagtccacccaccccgtgaagcccctggcccagatcgccggaaacagatacgcctccggacctgtgggaaaggccctgagcgacgcatgtatgggcacaatcgcctccttcctgtctaagtaccaggacatcatcatcgaacaccagaaggtggtgaagggcaaccagaagagactggagagcctgcgggagctggccggcaaggaaaacctggaataccctagcgtgaccctgccacctcagcctcacaccaaggagggcgttgatgcctacaacgaagtgatcgcccgggtgcgaatgtgggtgaacctgaacctgtggcagaagctgaagctaagcagagatgatgccaagcctctgctgagactgaagggattcccttcctttcctctggtcgagagacaggccaacgaagtggactggtgggacatggtgtgtaacgtgaagaagctgatcaacgagaaaaaggaggatggcaaggtgttttggcagaatctggctggctacaagagacaggaagccctgagaccatacctgagcagcgaggaagatcggaagaagggaaagaaattcgctcggtaccagctgggcgacctgctgctgcacctggaaaagaagcacggcgaggactggggaaaggtgtacgacgaggcctgggagcggattgacaagaaagtggaaggcctgagcaagcacatcaagctggaagaggaacggagaagcgaggacgcccagagcaaggccgccctgaccgactggctgcgggctaaggccagcttcgtgatcgagggcctgaaggaggccgacaaggacgagttctgcagatgcgagctgaagctgcagaagtggtacggggacctgcggggaaagcccttcgccatcgaagccgagaacagcatcctggacatcagcggcttcagcaagcagtacaactgtgccttcatctggcagaaggacggcgtgaagaagctgaacctgtacctgatcatcaactacttcaagggcggcaagctgcggttcaagaagatcaaacctgaagccttcgaagccaacagattctacaccgtgatcaacaaaaagagcggcgagatcgtgcccatggaggtgaacttcaacttcgacgaccccaacctgatcatcctgcctctggcctttggcaagagacagggcagagaattcatctggaacgacctgctgtccctggaaaccggcagcctgaagctggccaacggaagagtgatcgagaagacactgtacaacagaagaacccggcaggatgagcctgccctgttcgtggccctgaccttcgagcggcgggaggtcctggactcctccaatatcaaaccaatgaacctgatcggcgtggcaagaggcgaaaacatccccgccgtgatcgccctgaccgaccccgagggctgcccactgagccggtttaaggatagcctgggaaacccaacccacatcctgagaatcggcgagagctataaggagaagcagcggaccatccaggccaagaaggaggtggagcagcggagagccggcggctacagccggaagtacgccagcaaagccaagaatctggcagacgatatggtgagaaacaccgctagagatctgctgtactacgccgtgacccaggatgccatgctgatcttcgccaacctgagccggggcttcggccggcagggcaagcggaccttcatggccgagagacagtacacacggatggaggactggctgaccgccaagctggcctacgagggcctgagcaagacctacctgtccaagacactggcccagtacacctccaagacatgcagcaactgtgggtttaccatcaccagcgccgactacgacagggtgctggagaagctgaagaagacagcaacaggctggatgaccacaattaacggcaaggagctgaaggtggagggccagattacctactacaacagatacaagagacagaacgtagtcaaggacctgtccgtcgagctggatagactgagcgaagaatctgtgaacaacgacatctcctcctggacaaagggcagaagcggagaagctctgagcctcctgaagaaaagattctcccatagacccgtgcaggagaagttcgtgtgcctgaactgcggcttcgagacacacgcagccgagcaagccgccctgaacatcgccagatcctggctgttcctgcggagccaggagtacaagaaataccagacaaacaagacaaccggcaacaccgataagagagccttcgtcgagacctggcagtccttttaccggaagaagcttaaggaggtgtggaaacctgccgtgcggtctggcggatctggcggaggctccaccagccccaagaaaaagagaaaagtctaagctgccttctgcggggcttgccttctggccatgcccttcttctctcccttgcacctgtacctcttggtctttgaataaagcctgagtaggaaggctagcaaaaaaaaaaaaaaaaaaaaaaaaaaaaaaaaaaaaaaaaaaaaaaaaaaaaaaaaaaaaaaaaaaaaaaaaaaaaaaaagcccagccggctccccaacctctaccgaggagggcacctctgagtccgccacccccgagagcggccctggcacctccaccgagcccagcgagggcagcgcacccggcagccctgccggcagccccacctccacagaggagggaaccagcaccgagcccagcgaaggcagcgccccaggcaccagcaccgagcctagtgagcaggagattaaacggatcaacaagatcagaagaagacttgtgaaagacagcaacaccaagaaggccggcaagacaggccccatgaaaaccctgctggttagagtgatgacacccgatctgagagagcggctggaaaacctgagaaagaagcctgaaaatatcccccagcccatcagcaatacatctagagccaacctgaataagctgctgaccgattacaccgaaatgaagaaggcgatcctgcatgtgtactgggaagagttccagaaggaccctgtgggcctgatgagccgggtggcccagcctgccagcaagaagatcgatcagaacaagctgaaacctgagatggacgagaagggcaacctgaccaccgccggctttgcctgctctcagtgtggccagcccctgttcgtgtacaagctggagcaggtgtctgagaagggcaaggcttacaccaactacttcggacggtgcaatgtggccgagcacgaaaagctgatcctgctggcccagctgaagcccgagaaggatagcgacgaagccgtgacatatagcctgggaaagtttgggcagagggccctggatttctacagcattcatgtgaccaaggagtccacccaccccgtgaagcccctggcccagatcgccggaaacagatacgcctccggacctgtgggaaaggccctgagcgacgcatgtatgggcacaatcgcctccttcctgtctaagtaccaggacatcatcatcgaacaccagaaggtggtgaagggcaaccagaagagactggagagcctgcgggagctggccggcaaggaaaacctggaataccctagcgtgaccctgccacctcagcctcacaccaaggagggcgttgatgcctacaacgaagtgatcgcccgggtgcgaatgtgggtgaacctgaacctgtggcagaagctgaagctaagcagagatgatgccaagcctctgctgagactgaagggattcccttcctttcctctggtcgagagacaggccaacgaagtggactggtgggacatggtgtgtaacgtgaagaagctgatcaacgagaaaaaggaggatggcaaggtgttttggcagaatctggctggctacaagagacaggaagccctgagaccatacctgagcagcgaggaagatcggaagaagggaaagaaattcgctcggtaccagctgggcgacctgctgctgcacctggaaaagaagcacggcgaggactggggaaaggtgtacgacgaggcctgggagcggattgacaagaaagtggaaggcctgagcaagcacatcaagctggaagaggaacggagaagcgaggacgcccagagcaaggccgccctgaccgactggctgcgggctaaggccagcttcgtgatcgagggcctgaaggaggccgacaaggacgagttctgcagatgcgagctgaagctgcagaagtggtacggggacctgcggggaaagcccttcgccatcgaagccgagaacagcatcctggacatcagcggcttcagcaagcagtacaactgtgccttcatctggcagaaggacggcgtgaagaagctgaacctgtacctgatcatcaactacttcaagggcggcaagctgcggttcaagaagatcaaacctgaagccttcgaagccaacagattctacaccgtgatcaacaaaaagagcggcgagatcgtgcccatggaggtgaacttcaacttcgacgaccccaacctgatcatcctgcctctggcctttggcaagagacagggcagagaattcatctggaacgacctgctgtccctggaaaccggcagcctgaagctggccaacggaagagtgatcgagaagacactgtacaacagaagaacccggcaggatgagcctgccctgttcgtggccctgaccttcgagcggcgggaggtcctggactcctccaatatcaaaccaatgaacctgatcggcgtggcaagaggcgaaaacatccccgccgtgatcgccctgaccgaccccgagggctgcccactgagccggtttaaggatagcctgggaaacccaacccacatcctgagaatcggcgagagctataaggagaagcagcggaccatccaggccaagaaggaggtggagcagcggagagccggcggctacagccggaagtacgccagcaaagccaagaatctggcagacgatatggtgagaaacaccgctagagatctgctgtactacgccgtgacccaggatgccatgctgatcttcgccaacctgagccggggcttcggccggcagggcaagcggaccttcatggccgagagacagtacacacggatggaggactggctgaccgccaagctggcctacgagggcctgagcaagacctacctgtccaagacactggcccagtacacctccaagacatgcagcaactgtgggtttaccatcaccagcgccgactacgacagggtgctggagaagctgaagaagacagcaacaggctggatgaccacaattaacggcaaggagctgaaggtggagggccagattacctactacaacagatacaagagacagaacgtagtcaaggacctgtccgtcgagctggatagactgagcgaagaatctgtgaacaacgacatctcctcctggacaaagggcagaagcggagaagctctgagcctcctgaagaaaagattctcccatagacccgtgcaggagaagttcgtgtgcctgaactgcggcttcgagacacacgcagccgagcaagccgccctgaacatcgccagatcctggctgttcctgcggagccaggagtacaagaaataccagacaaacaagacaaccggcaacaccgataagagagccttcgtcgagacctggcagtccttttaccggaagaagcttaaggaggtgtggaaacctgccgtgcggtctggcggatctggcggaggctccaccagccccaagaaaaagagaaaagtctaagctgccttctgcggggcttgccttctggccatgcccttcttctctcccttgcacctgtacctcttggtctttgaataaagcctgagtaggaaggctagcaaaaaaaaaaaaaaaaaaaaaaaaaaaaaaaaaaaaaaaaaaaaaaaaaaaaaaaaaaaaaaaaaaaaaaaaaaaaaaaa

SEQ ID NO: 10318 - RNA, 8805 nt, synthetic construct
  source 1..8805: mol_type = other RNA
aggaaataagagagaaaagaagagtaagaagaaatataagagccaccatggcccctaagaagaagcgtaaagtgagccggatgaaccacgaccaggagttcgacccccctaaggtgtaccctcccgtccccgccgagaagagaaagcccatccgggtcctgagcctgttcgatggcatcgccaccggtctgctggtgctgaaggacctgggcatccaggtggataggtacattgcctccgaggtgtgcgaggactccatcaccgtgggaatggtgcgtcatcagggcaagatcatgtacgtgggcgacgtgcggagcgtgacacagaagcatatccaggagtggggccctttcgacctggtgatcggcggcagcccttgcaatgacctgagcatcgtgaacccagcccggaagggcctgtacgagggaaccggcagactgttcttcgagttttacagactgctgcacgacgcccggcctaaggaaggcgacgaccggcccttcttttggctgttcgagaatgtggtggccatgggagtcagcgacaagcgggatattagccggttcctggagagcaaccccgtgatgatcgatgccaaggaagtgagcgccgcccaccgggccagatacttctggggcaatctgcctggcatgaacagacccctggccagcaccgtgaacgacaagctggagctgcaggagtgcctggagcacggccggatcgccaagttcagcaaggtgagaaccatcaccacccgaagcaacagcatcaaacaaggcaaggaccagcactttcctgtgttcatgaacgagaaggaggacatcctgtggtgtaccgagatggagagagtgttcgggttcccagtccactacacagatgtcagcaacatgtctagactggccagacagagactgctgggaagaagctggtccgtccctgtgatcagacacctgttcgcccctctgaaggagtacttcgcctgcgtgagcagcggcaacagcaacgccaacagccggggccccagcttctctagcggcctggtgccactgtccctgagagggagccacatgggccccatggagatctacaaaaccgtgagcgcctggaagcggcagcctgtgcgcgtgctgagcctgtttcggaatatcgataaagtcctgaaaagcctgggattcctggagagcggctctggctccggcggtggcaccctgaagtacgtggaggatgtgacaaacgtggtcagacgggatgtggagaagtggggccccttcgatctggtgtacggcagcacccaacccctgggcagctcttgtgaccggtgccctggctggtacatgtttcagttccaccggatcctgcagtacgccctgccgagacaggagtcccagcggccattcttttggattttcatggacaacttgctgctgaccgaggatgaccaggaaactaccactcggttcctgcagaccgaagccgtgaccctgcaggacgtgagaggccgggactaccagaacgccatgcgggtgtggtccaacatccctggactgaaaagcaagcacgcacctctgacccctaaagaagaggagtacctgcaggcccaggtgcggagcagaagcaagctggacgcccctaaggtggatctgctggtgaagaattgcctcctgcccctgagagagtacttcaagtatttcagccagaatagtctgcccctgggaggcagcggcggcggcgtgaccttcgaggacgtggccgtgaacttcagcctggaggagtgggccctgctggacctgagccagaagaagctgtacagggacgtgatgcaggagaccttcaggaacctggccagcgtgggcgagaagtgggacaaccacaacatcgaggactggaacaagacccagggcaggaagctgaggagccacatggtggagaagctgagcgagagcaaggagggcggccagcacggcgagaccgccagccagatccccaacctgggcggcccaagcagcggcgcccctcctcccagcggcggcaggcggcccaagcagcggcgcccctcctcccagcggcggcagcccagccggctccccaacctctaccgaggagggcacctctgagtccgccacccccgagagcggccctggcacctccaccgagcccagcgagggcagcgcacccggcagccctgccggcagccccacctccacagaggagggaaccagcaccgagcccagcgaaggcagcgccccaggcaccagcaccgagcctagtgagcaggagattaaacggatcaacaagatcagaagaagacttgtgaaagacagcaacaccaagaaggccggcaagacaggccccatgaaaaccctgctggttagagtgatgacacccgatctgagagagcggctggaaaacctgagaaagaagcctgaaaatatcccccagcccatcagcaatacatctagagccaacctgaataagctgctgaccgattacaccgaaatgaagaaggcgatcctgcatgtgtactgggaagagttccagaaggaccctgtgggcctgatgagccgggtggcccagcctgccagcaagaagatcgatcagaacaagctgaaacctgagatggacgagaagggcaacctgaccaccgccggctttgcctgctctcagtgtggccagcccctgttcgtgtacaagctggagcaggtgtctgagaagggcaaggcttacaccaactacttcggacggtgcaatgtggccgagcacgaaaagctgatcctgctggcccagctgaagcccgagaaggatagcgacgaagccgtgacatatagcctgggaaagtttgggcagagggccctggatttctacagcattcatgtgaccaaggagtccacccaccccgtgaagcccctggcccagatcgccggaaacagatacgcctccggacctgtgggaaaggccctgagcgacgcatgtatgggcacaatcgcctccttcctgtctaagtaccaggacatcatcatcgaacaccagaaggtggtgaagggcaaccagaagagactggagagcctgcgggagctggccggcaaggaaaacctggaataccctagcgtgaccctgccacctcagcctcacaccaaggagggcgttgatgcctacaacgaagtgatcgcccgggtgcgaatgtgggtgaacctgaacctgtggcagaagctgaagctaagcagagatgatgccaagcctctgctgagactgaagggattcccttcctttcctctggtcgagagacaggccaacgaagtggactggtgggacatggtgtgtaacgtgaagaagctgatcaacgagaaaaaggaggatggcaaggtgttttggcagaatctggctggctacaagagacaggaagccctgagaccatacctgagcagcgaggaagatcggaagaagggaaagaaattcgctcggtaccagctgggcgacctgctgctgcacctggaaaagaagcacggcgaggactggggaaaggtgtacgacgaggcctgggagcggattgacaagaaagtggaaggcctgagcaagcacatcaagctggaagaggaacggagaagcgaggacgcccagagcaaggccgccctgaccgactggctgcgggctaaggccagcttcgtgatcgagggcctgaaggaggccgacaaggacgagttctgcagatgcgagctgaagctgcagaagtggtacggggacctgcggggaaagcccttcgccatcgaagccgagaacagcatcctggacatcagcggcttcagcaagcagtacaactgtgccttcatctggcagaaggacggcgtgaagaagctgaacctgtacctgatcatcaactacttcaagggcggcaagctgcggttcaagaagatcaaacctgaagccttcgaagccaacagattctacaccgtgatcaacaaaaagagcggcgagatcgtgcccatggaggtgaacttcaacttcgacgaccccaacctgatcatcctgcctctggcctttggcaagagacagggcagagaattcatctggaacgacctgctgtccctggaaaccggcagcctgaagctggccaacggaagagtgatcgagaagacactgtacaacagaagaacccggcaggatgagcctgccctgttcgtggccctgaccttcgagcggcgggaggtcctggactcctccaatatcaaaccaatgaacctgatcggcgtggcaagaggcgaaaacatccccgccgtgatcgccctgaccgaccccgagggctgcccactgagccggtttaaggatagcctgggaaacccaacccacatcctgagaatcggcgagagctataaggagaagcagcggaccatccaggccaagaaggaggtggagcagcggagagccggcggctacagccggaagtacgccagcaaagccaagaatctggcagacgatatggtgagaaacaccgctagagatctgctgtactacgccgtgacccaggatgccatgctgatcttcgccaacctgagccggggcttcggccggcagggcaagcggaccttcatggccgagagacagtacacacggatggaggactggctgaccgccaagctggcctacgagggcctgagcaagacctacctgtccaagacactggcccagtacacctccaagacatgcagcaactgtgggtttaccatcaccagcgccgactacgacagggtgctggagaagctgaagaagacagcaacaggctggatgaccacaattaacggcaaggagctgaaggtggagggccagattacctactacaacagatacaagagacagaacgtagtcaaggacctgtccgtcgagctggatagactgagcgaagaatctgtgaacaacgacatctcctcctggacaaagggcagaagcggagaagctctgagcctcctgaagaaaagattctcccatagacccgtgcaggagaagttcgtgtgcctgaactgcggcttcgagacacacgcagccgagcaagccgccctgaacatcgccagatcctggctgttcctgcggagccaggagtacaagaaataccagacaaacaagacaaccggcaacaccgataagagagccttcgtcgagacctggcagtccttttaccggaagaagcttaaggaggtgtggaaacctgccgtgcggtctggcggatctggcggaggctccaccagccccaagaaaaagagaaaagtctaagctgccttctgcggggcttgccttctggccatgcccttcttctctcccttgcacctgtacctcttggtctttgaataaagcctgagtaggaaggctagcaaaaaaaaaaaaaaaaaaaaaaaaaaaaaaaaaaaaaaaaaaaaaaaaaaaaaaaaaaaaaaaaaaaaaaaaaaaaaaaagcccagccggctccccaacctctaccgaggagggcacctctgagtccgccacccccgagagcggccctggcacctccaccgagcccagcgagggcagcgcacccggcagccctgccggcagccccacctccacagaggagggaaccagcaccgagcccagcgaaggcagcgccccaggcaccagcaccgagcctagtgagcaggagattaaacggatcaacaagatcagaagaagacttgtgaaagacagcaacaccaagaaggccggcaagacaggccccatgaaaaccctgctggttagagtgatgacacccgatctgagagagcggctggaaaacctgagaaagaagcctgaaaatatcccccagcccatcagcaatacatctagagccaacctgaataagctgctgaccgattacaccgaaatgaagaaggcgatcctgcatgtgtactgggaagagttccagaaggaccctgtgggcctgatgagccgggtggcccagcctgccagcaagaagatcgatcagaacaagctgaaacctgagatggacgagaagggcaacctgaccaccgccggctttgcctgctctcagtgtggccagcccctgttcgtgtacaagctggagcaggtgtctgagaagggcaaggcttacaccaactacttcggacggtgcaatgtggccgagcacgaaaagctgatcctgctggcccagctgaagcccgagaaggatagcgacgaagccgtgacatatagcctgggaaagtttgggcagagggccctggatttctacagcattcatgtgaccaaggagtccacccaccccgtgaagcccctggcccagatcgccggaaacagatacgcctccggacctgtgggaaaggccctgagcgacgcatgtatgggcacaatcgcctccttcctgtctaagtaccaggacatcatcatcgaacaccagaaggtggtgaagggcaaccagaagagactggagagcctgcgggagctggccggcaaggaaaacctggaataccctagcgtgaccctgccacctcagcctcacaccaaggagggcgttgatgcctacaacgaagtgatcgcccgggtgcgaatgtgggtgaacctgaacctgtggcagaagctgaagctaagcagagatgatgccaagcctctgctgagactgaagggattcccttcctttcctctggtcgagagacaggccaacgaagtggactggtgggacatggtgtgtaacgtgaagaagctgatcaacgagaaaaaggaggatggcaaggtgttttggcagaatctggctggctacaagagacaggaagccctgagaccatacctgagcagcgaggaagatcggaagaagggaaagaaattcgctcggtaccagctgggcgacctgctgctgcacctggaaaagaagcacggcgaggactggggaaaggtgtacgacgaggcctgggagcggattgacaagaaagtggaaggcctgagcaagcacatcaagctggaagaggaacggagaagcgaggacgcccagagcaaggccgccctgaccgactggctgcgggctaaggccagcttcgtgatcgagggcctgaaggaggccgacaaggacgagttctgcagatgcgagctgaagctgcagaagtggtacggggacctgcggggaaagcccttcgccatcgaagccgagaacagcatcctggacatcagcggcttcagcaagcagtacaactgtgccttcatctggcagaaggacggcgtgaagaagctgaacctgtacctgatcatcaactacttcaagggcggcaagctgcggttcaagaagatcaaacctgaagccttcgaagccaacagattctacaccgtgatcaacaaaaagagcggcgagatcgtgcccatggaggtgaacttcaacttcgacgaccccaacctgatcatcctgcctctggcctttggcaagagacagggcagagaattcatctggaacgacctgctgtccctggaaaccggcagcctgaagctggccaacggaagagtgatcgagaagacactgtacaacagaagaacccggcaggatgagcctgccctgttcgtggccctgaccttcgagcggcgggaggtcctggactcctccaatatcaaaccaatgaacctgatcggcgtggcaagaggcgaaaacatccccgccgtgatcgccctgaccgaccccgagggctgcccactgagccggtttaaggatagcctgggaaacccaacccacatcctgagaatcggcgagagctataaggagaagcagcggaccatccaggccaagaaggaggtggagcagcggagagccggcggctacagccggaagtacgccagcaaagccaagaatctggcagacgatatggtgagaaacaccgctagagatctgctgtactacgccgtgacccaggatgccatgctgatcttcgccaacctgagccggggcttcggccggcagggcaagcggaccttcatggccgagagacagtacacacggatggaggactggctgaccgccaagctggcctacgagggcctgagcaagacctacctgtccaagacactggcccagtacacctccaagacatgcagcaactgtgggtttaccatcaccagcgccgactacgacagggtgctggagaagctgaagaagacagcaacaggctggatgaccacaattaacggcaaggagctgaaggtggagggccagattacctactacaacagatacaagagacagaacgtagtcaaggacctgtccgtcgagctggatagactgagcgaagaatctgtgaacaacgacatctcctcctggacaaagggcagaagcggagaagctctgagcctcctgaagaaaagattctcccatagacccgtgcaggagaagttcgtgtgcctgaactgcggcttcgagacacacgcagccgagcaagccgccctgaacatcgccagatcctggctgttcctgcggagccaggagtacaagaaataccagacaaacaagacaaccggcaacaccgataagagagccttcgtcgagacctggcagtccttttaccggaagaagcttaaggaggtgtggaaacctgccgtgcggtctggcggatctggcggaggctccaccagccccaagaaaaagagaaaagtctaagctgccttctgcggggcttgccttctggccatgcccttcttctctcccttgcacctgtacctcttggtctttgaataaagcctgagtaggaaggctagcaaaaaaaaaaaaaaaaaaaaaaaaaaaaaaaaaaaaaaaaaaaaaaaaaaaaaaaaaaaaaaaaaaaaaaaaaaaaaaaa

SEQ ID NO: 10319 - RNA, 8787 nt, synthetic construct
  source 1..8787: mol_type = other RNA
aggaaataagagagaaaagaagagtaagaagaaatataagagccaccatggcccctaagaagaagcgtaaagtgagccggatgaaccacgaccaggagttcgacccccctaaggtgtaccctcccgtccccgccgagaagagaaagcccatccgggtcctgagcctgttcgatggcatcgccaccggtctgctggtgctgaaggacctgggcatccaggtggataggtacattgcctccgaggtgtgcgaggactccatcaccgtgggaatggtgcgtcatcagggcaagatcatgtacgtgggcgacgtgcggagcgtgacacagaagcatatccaggagtggggccctttcgacctggtgatcggcggcagcccttgcaatgacctgagcatcgtgaacccagcccggaagggcctgtacgagggaaccggcagactgttcttcgagttttacagactgctgcacgacgcccggcctaaggaaggcgacgaccggcccttcttttggctgttcgagaatgtggtggccatgggagtcagcgacaagcgggatattagccggttcctggagagcaaccccgtgatgatcgatgccaaggaagtgagcgccgcccaccgggccagatacttctggggcaatctgcctggcatgaacagacccctggccagcaccgtgaacgacaagctggagctgcaggagtgcctggagcacggccggatcgccaagttcagcaaggtgagaaccatcaccacccgaagcaacagcatcaaacaaggcaaggaccagcactttcctgtgttcatgaacgagaaggaggacatcctgtggtgtaccgagatggagagagtgttcgggttcccagtccactacacagatgtcagcaacatgtctagactggccagacagagactgctgggaagaagctggtccgtccctgtgatcagacacctgttcgcccctctgaaggagtacttcgcctgcgtgagcagcggcaacagcaacgccaacagccggggccccagcttctctagcggcctggtgccactgtccctgagagggagccacatgggccccatggagatctacaaaaccgtgagcgcctggaagcggcagcctgtgcgcgtgctgagcctgtttcggaatatcgataaagtcctgaaaagcctgggattcctggagagcggctctggctccggcggtggcaccctgaagtacgtggaggatgtgacaaacgtggtcagacgggatgtggagaagtggggccccttcgatctggtgtacggcagcacccaacccctgggcagctcttgtgaccggtgccctggctggtacatgtttcagttccaccggatcctgcagtacgccctgccgagacaggagtcccagcggccattcttttggattttcatggacaacttgctgctgaccgaggatgaccaggaaactaccactcggttcctgcagaccgaagccgtgaccctgcaggacgtgagaggccgggactaccagaacgccatgcgggtgtggtccaacatccctggactgaaaagcaagcacgcacctctgacccctaaagaagaggagtacctgcaggcccaggtgcggagcagaagcaagctggacgcccctaaggtggatctgctggtgaagaattgcctcctgcccctgagagagtacttcaagtatttcagccagaatagtctgcccctgggaggcagcggcggcggcagccaggtgagcctgaccttcgaggacgtggccgtgctgttcaccagggacgagtggaagaagctggtgcccagccagaggagcctgtacagggaggtgatgctggagaactacagcaacctggccagcctggccggcttccccttcaccaagcccaaggtgatcagcctgctgcagcagggcgaggacccctggaaggtggaggaggagggccccggcggcttcagcctgggcctgaagtgcggcggcccaagcagcggcgcccctcctcccagcggcggcaggcggcccaagcagcggcgcccctcctcccagcggcggcagcccagccggctccccaacctctaccgaggagggcacctctgagtccgccacccccgagagcggccctggcacctccaccgagcccagcgagggcagcgcacccggcagccctgccggcagccccacctccacagaggagggaaccagcaccgagcccagcgaaggcagcgccccaggcaccagcaccgagcctagtgagcaggagattaaacggatcaacaagatcagaagaagacttgtgaaagacagcaacaccaagaaggccggcaagacaggccccatgaaaaccctgctggttagagtgatgacacccgatctgagagagcggctggaaaacctgagaaagaagcctgaaaatatcccccagcccatcagcaatacatctagagccaacctgaataagctgctgaccgattacaccgaaatgaagaaggcgatcctgcatgtgtactgggaagagttccagaaggaccctgtgggcctgatgagccgggtggcccagcctgccagcaagaagatcgatcagaacaagctgaaacctgagatggacgagaagggcaacctgaccaccgccggctttgcctgctctcagtgtggccagcccctgttcgtgtacaagctggagcaggtgtctgagaagggcaaggcttacaccaactacttcggacggtgcaatgtggccgagcacgaaaagctgatcctgctggcccagctgaagcccgagaaggatagcgacgaagccgtgacatatagcctgggaaagtttgggcagagggccctggatttctacagcattcatgtgaccaaggagtccacccaccccgtgaagcccctggcccagatcgccggaaacagatacgcctccggacctgtgggaaaggccctgagcgacgcatgtatgggcacaatcgcctccttcctgtctaagtaccaggacatcatcatcgaacaccagaaggtggtgaagggcaaccagaagagactggagagcctgcgggagctggccggcaaggaaaacctggaataccctagcgtgaccctgccacctcagcctcacaccaaggagggcgttgatgcctacaacgaagtgatcgcccgggtgcgaatgtgggtgaacctgaacctgtggcagaagctgaagctaagcagagatgatgccaagcctctgctgagactgaagggattcccttcctttcctctggtcgagagacaggccaacgaagtggactggtgggacatggtgtgtaacgtgaagaagctgatcaacgagaaaaaggaggatggcaaggtgttttggcagaatctggctggctacaagagacaggaagccctgagaccatacctgagcagcgaggaagatcggaagaagggaaagaaattcgctcggtaccagctgggcgacctgctgctgcacctggaaaagaagcacggcgaggactggggaaaggtgtacgacgaggcctgggagcggattgacaagaaagtggaaggcctgagcaagcacatcaagctggaagaggaacggagaagcgaggacgcccagagcaaggccgccctgaccgactggctgcgggctaaggccagcttcgtgatcgagggcctgaaggaggccgacaaggacgagttctgcagatgcgagctgaagctgcagaagtggtacggggacctgcggggaaagcccttcgccatcgaagccgagaacagcatcctggacatcagcggcttcagcaagcagtacaactgtgccttcatctggcagaaggacggcgtgaagaagctgaacctgtacctgatcatcaactacttcaagggcggcaagctgcggttcaagaagatcaaacctgaagccttcgaagccaacagattctacaccgtgatcaacaaaaagagcggcgagatcgtgcccatggaggtgaacttcaacttcgacgaccccaacctgatcatcctgcctctggcctttggcaagagacagggcagagaattcatctggaacgacctgctgtccctggaaaccggcagcctgaagctggccaacggaagagtgatcgagaagacactgtacaacagaagaacccggcaggatgagcctgccctgttcgtggccctgaccttcgagcggcgggaggtcctggactcctccaatatcaaaccaatgaacctgatcggcgtggcaagaggcgaaaacatccccgccgtgatcgccctgaccgaccccgagggctgcccactgagccggtttaaggatagcctgggaaacccaacccacatcctgagaatcggcgagagctataaggagaagcagcggaccatccaggccaagaaggaggtggagcagcggagagccggcggctacagccggaagtacgccagcaaagccaagaatctggcagacgatatggtgagaaacaccgctagagatctgctgtactacgccgtgacccaggatgccatgctgatcttcgccaacctgagccggggcttcggccggcagggcaagcggaccttcatggccgagagacagtacacacggatggaggactggctgaccgccaagctggcctacgagggcctgagcaagacctacctgtccaagacactggcccagtacacctccaagacatgcagcaactgtgggtttaccatcaccagcgccgactacgacagggtgctggagaagctgaagaagacagcaacaggctggatgaccacaattaacggcaaggagctgaaggtggagggccagattacctactacaacagatacaagagacagaacgtagtcaaggacctgtccgtcgagctggatagactgagcgaagaatctgtgaacaacgacatctcctcctggacaaagggcagaagcggagaagctctgagcctcctgaagaaaagattctcccatagacccgtgcaggagaagttcgtgtgcctgaactgcggcttcgagacacacgcagccgagcaagccgccctgaacatcgccagatcctggctgttcctgcggagccaggagtacaagaaataccagacaaacaagacaaccggcaacaccgataagagagccttcgtcgagacctggcagtccttttaccggaagaagcttaaggaggtgtggaaacctgccgtgcggtctggcggatctggcggaggctccaccagccccaagaaaaagagaaaagtctaagctgccttctgcggggcttgccttctggccatgcccttcttctctcccttgcacctgtacctcttggtctttgaataaagcctgagtaggaaggctagcaaaaaaaaaaaaaaaaaaaaaaaaaaaaaaaaaaaaaaaaaaaaaaaaaaaaaaaaaaaaaaaaaaaaaaaaaaaaaaaagcccagccggctccccaacctctaccgaggagggcacctctgagtccgccacccccgagagcggccctggcacctccaccgagcccagcgagggcagcgcacccggcagccctgccggcagccccacctccacagaggagggaaccagcaccgagcccagcgaaggcagcgccccaggcaccagcaccgagcctagtgagcaggagattaaacggatcaacaagatcagaagaagacttgtgaaagacagcaacaccaagaaggccggcaagacaggccccatgaaaaccctgctggttagagtgatgacacccgatctgagagagcggctggaaaacctgagaaagaagcctgaaaatatcccccagcccatcagcaatacatctagagccaacctgaataagctgctgaccgattacaccgaaatgaagaaggcgatcctgcatgtgtactgggaagagttccagaaggaccctgtgggcctgatgagccgggtggcccagcctgccagcaagaagatcgatcagaacaagctgaaacctgagatggacgagaagggcaacctgaccaccgccggctttgcctgctctcagtgtggccagcccctgttcgtgtacaagctggagcaggtgtctgagaagggcaaggcttacaccaactacttcggacggtgcaatgtggccgagcacgaaaagctgatcctgctggcccagctgaagcccgagaaggatagcgacgaagccgtgacatatagcctgggaaagtttgggcagagggccctggatttctacagcattcatgtgaccaaggagtccacccaccccgtgaagcccctggcccagatcgccggaaacagatacgcctccggacctgtgggaaaggccctgagcgacgcatgtatgggcacaatcgcctccttcctgtctaagtaccaggacatcatcatcgaacaccagaaggtggtgaagggcaaccagaagagactggagagcctgcgggagctggccggcaaggaaaacctggaataccctagcgtgaccctgccacctcagcctcacaccaaggagggcgttgatgcctacaacgaagtgatcgcccgggtgcgaatgtgggtgaacctgaacctgtggcagaagctgaagctaagcagagatgatgccaagcctctgctgagactgaagggattcccttcctttcctctggtcgagagacaggccaacgaagtggactggtgggacatggtgtgtaacgtgaagaagctgatcaacgagaaaaaggaggatggcaaggtgttttggcagaatctggctggctacaagagacaggaagccctgagaccatacctgagcagcgaggaagatcggaagaagggaaagaaattcgctcggtaccagctgggcgacctgctgctgcacctggaaaagaagcacggcgaggactggggaaaggtgtacgacgaggcctgggagcggattgacaagaaagtggaaggcctgagcaagcacatcaagctggaagaggaacggagaagcgaggacgcccagagcaaggccgccctgaccgactggctgcgggctaaggccagcttcgtgatcgagggcctgaaggaggccgacaaggacgagttctgcagatgcgagctgaagctgcagaagtggtacggggacctgcggggaaagcccttcgccatcgaagccgagaacagcatcctggacatcagcggcttcagcaagcagtacaactgtgccttcatctggcagaaggacggcgtgaagaagctgaacctgtacctgatcatcaactacttcaagggcggcaagctgcggttcaagaagatcaaacctgaagccttcgaagccaacagattctacaccgtgatcaacaaaaagagcggcgagatcgtgcccatggaggtgaacttcaacttcgacgaccccaacctgatcatcctgcctctggcctttggcaagagacagggcagagaattcatctggaacgacctgctgtccctggaaaccggcagcctgaagctggccaacggaagagtgatcgagaagacactgtacaacagaagaacccggcaggatgagcctgccctgttcgtggccctgaccttcgagcggcgggaggtcctggactcctccaatatcaaaccaatgaacctgatcggcgtggcaagaggcgaaaacatccccgccgtgatcgccctgaccgaccccgagggctgcccactgagccggtttaaggatagcctgggaaacccaacccacatcctgagaatcggcgagagctataaggagaagcagcggaccatccaggccaagaaggaggtggagcagcggagagccggcggctacagccggaagtacgccagcaaagccaagaatctggcagacgatatggtgagaaacaccgctagagatctgctgtactacgccgtgacccaggatgccatgctgatcttcgccaacctgagccggggcttcggccggcagggcaagcggaccttcatggccgagagacagtacacacggatggaggactggctgaccgccaagctggcctacgagggcctgagcaagacctacctgtccaagacactggcccagtacacctccaagacatgcagcaactgtgggtttaccatcaccagcgccgactacgacagggtgctggagaagctgaagaagacagcaacaggctggatgaccacaattaacggcaaggagctgaaggtggagggccagattacctactacaacagatacaagagacagaacgtagtcaaggacctgtccgtcgagctggatagactgagcgaagaatctgtgaacaacgacatctcctcctggacaaagggcagaagcggagaagctctgagcctcctgaagaaaagattctcccatagacccgtgcaggagaagttcgtgtgcctgaactgcggcttcgagacacacgcagccgagcaagccgccctgaacatcgccagatcctggctgttcctgcggagccaggagtacaagaaataccagacaaacaagacaaccggcaacaccgataagagagccttcgtcgagacctggcagtccttttaccggaagaagcttaaggaggtgtggaaacctgccgtgcggtctggcggatctggcggaggctccaccagccccaagaaaaagagaaaagtctaagctgccttctgcggggcttgccttctggccatgcccttcttctctcccttgcacctgtacctcttggtctttgaataaagcctgagtaggaaggctagcaaaaaaaaaaaaaaaaaaaaaaaaaaaaaaaaaaaaaaaaaaaaaaaaaaaaaaaaaaaaaaaaaaaaaaaaaaaaaaaa

SEQ ID NO: 10320 - RNA, 8787 nt, synthetic construct
  source 1..8787: mol_type = other RNA
aggaaataagagagaaaagaagagtaagaagaaatataagagccaccatggcccctaagaagaagcgtaaagtgagccggatgaaccacgaccaggagttcgacccccctaaggtgtaccctcccgtccccgccgagaagagaaagcccatccgggtcctgagcctgttcgatggcatcgccaccggtctgctggtgctgaaggacctgggcatccaggtggataggtacattgcctccgaggtgtgcgaggactccatcaccgtgggaatggtgcgtcatcagggcaagatcatgtacgtgggcgacgtgcggagcgtgacacagaagcatatccaggagtggggccctttcgacctggtgatcggcggcagcccttgcaatgacctgagcatcgtgaacccagcccggaagggcctgtacgagggaaccggcagactgttcttcgagttttacagactgctgcacgacgcccggcctaaggaaggcgacgaccggcccttcttttggctgttcgagaatgtggtggccatgggagtcagcgacaagcgggatattagccggttcctggagagcaaccccgtgatgatcgatgccaaggaagtgagcgccgcccaccgggccagatacttctggggcaatctgcctggcatgaacagacccctggccagcaccgtgaacgacaagctggagctgcaggagtgcctggagcacggccggatcgccaagttcagcaaggtgagaaccatcaccacccgaagcaacagcatcaaacaaggcaaggaccagcactttcctgtgttcatgaacgagaaggaggacatcctgtggtgtaccgagatggagagagtgttcgggttcccagtccactacacagatgtcagcaacatgtctagactggccagacagagactgctgggaagaagctggtccgtccctgtgatcagacacctgttcgcccctctgaaggagtacttcgcctgcgtgagcagcggcaacagcaacgccaacagccggggccccagcttctctagcggcctggtgccactgtccctgagagggagccacatgggccccatggagatctacaaaaccgtgagcgcctggaagcggcagcctgtgcgcgtgctgagcctgtttcggaatatcgataaagtcctgaaaagcctgggattcctggagagcggctctggctccggcggtggcaccctgaagtacgtggaggatgtgacaaacgtggtcagacgggatgtggagaagtggggccccttcgatctggtgtacggcagcacccaacccctgggcagctcttgtgaccggtgccctggctggtacatgtttcagttccaccggatcctgcagtacgccctgccgagacaggagtcccagcggccattcttttggattttcatggacaacttgctgctgaccgaggatgaccaggaaactaccactcggttcctgcagaccgaagccgtgaccctgcaggacgtgagaggccgggactaccagaacgccatgcgggtgtggtccaacatccctggactgaaaagcaagcacgcacctctgacccctaaagaagaggagtacctgcaggcccaggtgcggagcagaagcaagctggacgcccctaaggtggatctgctggtgaagaattgcctcctgcccctgagagagtacttcaagtatttcagccagaatagtctgcccctgggaggcagcggcggcggcccccaggagcccgtgaccttcgccgacgtggccgtgctgttcacccccgaggagtggctgttcctggacagcgcccagaagagcctgtacagggacgtgatgctggagaactacaggaacctggccagcgtgggcgaccagctgtgcaagaccaggatgagcagccacatggagcagagggaggagctgtgcgtgaccgagaggggcgtgttccccggcgcccagctgggcccccacctgcagggcggcccaagcagcggcgcccctcctcccagcggcggcaggcggcccaagcagcggcgcccctcctcccagcggcggcagcccagccggctccccaacctctaccgaggagggcacctctgagtccgccacccccgagagcggccctggcacctccaccgagcccagcgagggcagcgcacccggcagccctgccggcagccccacctccacagaggagggaaccagcaccgagcccagcgaaggcagcgccccaggcaccagcaccgagcctagtgagcaggagattaaacggatcaacaagatcagaagaagacttgtgaaagacagcaacaccaagaaggccggcaagacaggccccatgaaaaccctgctggttagagtgatgacacccgatctgagagagcggctggaaaacctgagaaagaagcctgaaaatatcccccagcccatcagcaatacatctagagccaacctgaataagctgctgaccgattacaccgaaatgaagaaggcgatcctgcatgtgtactgggaagagttccagaaggaccctgtgggcctgatgagccgggtggcccagcctgccagcaagaagatcgatcagaacaagctgaaacctgagatggacgagaagggcaacctgaccaccgccggctttgcctgctctcagtgtggccagcccctgttcgtgtacaagctggagcaggtgtctgagaagggcaaggcttacaccaactacttcggacggtgcaatgtggccgagcacgaaaagctgatcctgctggcccagctgaagcccgagaaggatagcgacgaagccgtgacatatagcctgggaaagtttgggcagagggccctggatttctacagcattcatgtgaccaaggagtccacccaccccgtgaagcccctggcccagatcgccggaaacagatacgcctccggacctgtgggaaaggccctgagcgacgcatgtatgggcacaatcgcctccttcctgtctaagtaccaggacatcatcatcgaacaccagaaggtggtgaagggcaaccagaagagactggagagcctgcgggagctggccggcaaggaaaacctggaataccctagcgtgaccctgccacctcagcctcacaccaaggagggcgttgatgcctacaacgaagtgatcgcccgggtgcgaatgtgggtgaacctgaacctgtggcagaagctgaagctaagcagagatgatgccaagcctctgctgagactgaagggattcccttcctttcctctggtcgagagacaggccaacgaagtggactggtgggacatggtgtgtaacgtgaagaagctgatcaacgagaaaaaggaggatggcaaggtgttttggcagaatctggctggctacaagagacaggaagccctgagaccatacctgagcagcgaggaagatcggaagaagggaaagaaattcgctcggtaccagctgggcgacctgctgctgcacctggaaaagaagcacggcgaggactggggaaaggtgtacgacgaggcctgggagcggattgacaagaaagtggaaggcctgagcaagcacatcaagctggaagaggaacggagaagcgaggacgcccagagcaaggccgccctgaccgactggctgcgggctaaggccagcttcgtgatcgagggcctgaaggaggccgacaaggacgagttctgcagatgcgagctgaagctgcagaagtggtacggggacctgcggggaaagcccttcgccatcgaagccgagaacagcatcctggacatcagcggcttcagcaagcagtacaactgtgccttcatctggcagaaggacggcgtgaagaagctgaacctgtacctgatcatcaactacttcaagggcggcaagctgcggttcaagaagatcaaacctgaagccttcgaagccaacagattctacaccgtgatcaacaaaaagagcggcgagatcgtgcccatggaggtgaacttcaacttcgacgaccccaacctgatcatcctgcctctggcctttggcaagagacagggcagagaattcatctggaacgacctgctgtccctggaaaccggcagcctgaagctggccaacggaagagtgatcgagaagacactgtacaacagaagaacccggcaggatgagcctgccctgttcgtggccctgaccttcgagcggcgggaggtcctggactcctccaatatcaaaccaatgaacctgatcggcgtggcaagaggcgaaaacatccccgccgtgatcgccctgaccgaccccgagggctgcccactgagccggtttaaggatagcctgggaaacccaacccacatcctgagaatcggcgagagctataaggagaagcagcggaccatccaggccaagaaggaggtggagcagcggagagccggcggctacagccggaagtacgccagcaaagccaagaatctggcagacgatatggtgagaaacaccgctagagatctgctgtactacgccgtgacccaggatgccatgctgatcttcgccaacctgagccggggcttcggccggcagggcaagcggaccttcatggccgagagacagtacacacggatggaggactggctgaccgccaagctggcctacgagggcctgagcaagacctacctgtccaagacactggcccagtacacctccaagacatgcagcaactgtgggtttaccatcaccagcgccgactacgacagggtgctggagaagctgaagaagacagcaacaggctggatgaccacaattaacggcaaggagctgaaggtggagggccagattacctactacaacagatacaagagacagaacgtagtcaaggacctgtccgtcgagctggatagactgagcgaagaatctgtgaacaacgacatctcctcctggacaaagggcagaagcggagaagctctgagcctcctgaagaaaagattctcccatagacccgtgcaggagaagttcgtgtgcctgaactgcggcttcgagacacacgcagccgagcaagccgccctgaacatcgccagatcctggctgttcctgcggagccaggagtacaagaaataccagacaaacaagacaaccggcaacaccgataagagagccttcgtcgagacctggcagtccttttaccggaagaagcttaaggaggtgtggaaacctgccgtgcggtctggcggatctggcggaggctccaccagccccaagaaaaagagaaaagtctaagctgccttctgcggggcttgccttctggccatgcccttcttctctcccttgcacctgtacctcttggtctttgaataaagcctgagtaggaaggctagcaaaaaaaaaaaaaaaaaaaaaaaaaaaaaaaaaaaaaaaaaaaaaaaaaaaaaaaaaaaaaaaaaaaaaaaaaaaaaaaagcccagccggctccccaacctctaccgaggagggcacctctgagtccgccacccccgagagcggccctggcacctccaccgagcccagcgagggcagcgcacccggcagccctgccggcagccccacctccacagaggagggaaccagcaccgagcccagcgaaggcagcgccccaggcaccagcaccgagcctagtgagcaggagattaaacggatcaacaagatcagaagaagacttgtgaaagacagcaacaccaagaaggccggcaagacaggccccatgaaaaccctgctggttagagtgatgacacccgatctgagagagcggctggaaaacctgagaaagaagcctgaaaatatcccccagcccatcagcaatacatctagagccaacctgaataagctgctgaccgattacaccgaaatgaagaaggcgatcctgcatgtgtactgggaagagttccagaaggaccctgtgggcctgatgagccgggtggcccagcctgccagcaagaagatcgatcagaacaagctgaaacctgagatggacgagaagggcaacctgaccaccgccggctttgcctgctctcagtgtggccagcccctgttcgtgtacaagctggagcaggtgtctgagaagggcaaggcttacaccaactacttcggacggtgcaatgtggccgagcacgaaaagctgatcctgctggcccagctgaagcccgagaaggatagcgacgaagccgtgacatatagcctgggaaagtttgggcagagggccctggatttctacagcattcatgtgaccaaggagtccacccaccccgtgaagcccctggcccagatcgccggaaacagatacgcctccggacctgtgggaaaggccctgagcgacgcatgtatgggcacaatcgcctccttcctgtctaagtaccaggacatcatcatcgaacaccagaaggtggtgaagggcaaccagaagagactggagagcctgcgggagctggccggcaaggaaaacctggaataccctagcgtgaccctgccacctcagcctcacaccaaggagggcgttgatgcctacaacgaagtgatcgcccgggtgcgaatgtgggtgaacctgaacctgtggcagaagctgaagctaagcagagatgatgccaagcctctgctgagactgaagggattcccttcctttcctctggtcgagagacaggccaacgaagtggactggtgggacatggtgtgtaacgtgaagaagctgatcaacgagaaaaaggaggatggcaaggtgttttggcagaatctggctggctacaagagacaggaagccctgagaccatacctgagcagcgaggaagatcggaagaagggaaagaaattcgctcggtaccagctgggcgacctgctgctgcacctggaaaagaagcacggcgaggactggggaaaggtgtacgacgaggcctgggagcggattgacaagaaagtggaaggcctgagcaagcacatcaagctggaagaggaacggagaagcgaggacgcccagagcaaggccgccctgaccgactggctgcgggctaaggccagcttcgtgatcgagggcctgaaggaggccgacaaggacgagttctgcagatgcgagctgaagctgcagaagtggtacggggacctgcggggaaagcccttcgccatcgaagccgagaacagcatcctggacatcagcggcttcagcaagcagtacaactgtgccttcatctggcagaaggacggcgtgaagaagctgaacctgtacctgatcatcaactacttcaagggcggcaagctgcggttcaagaagatcaaacctgaagccttcgaagccaacagattctacaccgtgatcaacaaaaagagcggcgagatcgtgcccatggaggtgaacttcaacttcgacgaccccaacctgatcatcctgcctctggcctttggcaagagacagggcagagaattcatctggaacgacctgctgtccctggaaaccggcagcctgaagctggccaacggaagagtgatcgagaagacactgtacaacagaagaacccggcaggatgagcctgccctgttcgtggccctgaccttcgagcggcgggaggtcctggactcctccaatatcaaaccaatgaacctgatcggcgtggcaagaggcgaaaacatccccgccgtgatcgccctgaccgaccccgagggctgcccactgagccggtttaaggatagcctgggaaacccaacccacatcctgagaatcggcgagagctataaggagaagcagcggaccatccaggccaagaaggaggtggagcagcggagagccggcggctacagccggaagtacgccagcaaagccaagaatctggcagacgatatggtgagaaacaccgctagagatctgctgtactacgccgtgacccaggatgccatgctgatcttcgccaacctgagccggggcttcggccggcagggcaagcggaccttcatggccgagagacagtacacacggatggaggactggctgaccgccaagctggcctacgagggcctgagcaagacctacctgtccaagacactggcccagtacacctccaagacatgcagcaactgtgggtttaccatcaccagcgccgactacgacagggtgctggagaagctgaagaagacagcaacaggctggatgaccacaattaacggcaaggagctgaaggtggagggccagattacctactacaacagatacaagagacagaacgtagtcaaggacctgtccgtcgagctggatagactgagcgaagaatctgtgaacaacgacatctcctcctggacaaagggcagaagcggagaagctctgagcctcctgaagaaaagattctcccatagacccgtgcaggagaagttcgtgtgcctgaactgcggcttcgagacacacgcagccgagcaagccgccctgaacatcgccagatcctggctgttcctgcggagccaggagtacaagaaataccagacaaacaagacaaccggcaacaccgataagagagccttcgtcgagacctggcagtccttttaccggaagaagcttaaggaggtgtggaaacctgccgtgcggtctggcggatctggcggaggctccaccagccccaagaaaaagagaaaagtctaagctgccttctgcggggcttgccttctggccatgcccttcttctctcccttgcacctgtacctcttggtctttgaataaagcctgagtaggaaggctagcaaaaaaaaaaaaaaaaaaaaaaaaaaaaaaaaaaaaaaaaaaaaaaaaaaaaaaaaaaaaaaaaaaaaaaaaaaaaaaaa

SEQ ID NO: 10321 - RNA, 8787 nt, synthetic construct
  source 1..8787: mol_type = other RNA
aggaaataagagagaaaagaagagtaagaagaaatataagagccaccatggcccctaagaagaagcgtaaagtgagccggatgaaccacgaccaggagttcgacccccctaaggtgtaccctcccgtccccgccgagaagagaaagcccatccgggtcctgagcctgttcgatggcatcgccaccggtctgctggtgctgaaggacctgggcatccaggtggataggtacattgcctccgaggtgtgcgaggactccatcaccgtgggaatggtgcgtcatcagggcaagatcatgtacgtgggcgacgtgcggagcgtgacacagaagcatatccaggagtggggccctttcgacctggtgatcggcggcagcccttgcaatgacctgagcatcgtgaacccagcccggaagggcctgtacgagggaaccggcagactgttcttcgagttttacagactgctgcacgacgcccggcctaaggaaggcgacgaccggcccttcttttggctgttcgagaatgtggtggccatgggagtcagcgacaagcgggatattagccggttcctggagagcaaccccgtgatgatcgatgccaaggaagtgagcgccgcccaccgggccagatacttctggggcaatctgcctggcatgaacagacccctggccagcaccgtgaacgacaagctggagctgcaggagtgcctggagcacggccggatcgccaagttcagcaaggtgagaaccatcaccacccgaagcaacagcatcaaacaaggcaaggaccagcactttcctgtgttcatgaacgagaaggaggacatcctgtggtgtaccgagatggagagagtgttcgggttcccagtccactacacagatgtcagcaacatgtctagactggccagacagagactgctgggaagaagctggtccgtccctgtgatcagacacctgttcgcccctctgaaggagtacttcgcctgcgtgagcagcggcaacagcaacgccaacagccggggccccagcttctctagcggcctggtgccactgtccctgagagggagccacatgggccccatggagatctacaaaaccgtgagcgcctggaagcggcagcctgtgcgcgtgctgagcctgtttcggaatatcgataaagtcctgaaaagcctgggattcctggagagcggctctggctccggcggtggcaccctgaagtacgtggaggatgtgacaaacgtggtcagacgggatgtggagaagtggggccccttcgatctggtgtacggcagcacccaacccctgggcagctcttgtgaccggtgccctggctggtacatgtttcagttccaccggatcctgcagtacgccctgccgagacaggagtcccagcggccattcttttggattttcatggacaacttgctgctgaccgaggatgaccaggaaactaccactcggttcctgcagaccgaagccgtgaccctgcaggacgtgagaggccgggactaccagaacgccatgcgggtgtggtccaacatccctggactgaaaagcaagcacgcacctctgacccctaaagaagaggagtacctgcaggcccaggtgcggagcagaagcaagctggacgcccctaaggtggatctgctggtgaagaattgcctcctgcccctgagagagtacttcaagtatttcagccagaatagtctgcccctgggaggcagcggcggcggccaggaccccagcgccgagaggctgatggaggaggtgcccgtggtgttcgaggagctgcccgtggtgttcgaggacgtggccgtgtacttcaccagggaggagtggggcatgctggacaagaggcagaaggagctgtacagggacgtgatgaggatgaactacgagctgctggccagcctgggccccgccgccgccaagcccgacctgatcagcaagctggagaggagggccgccccctggatcggcggcccaagcagcggcgcccctcctcccagcggcggcaggcggcccaagcagcggcgcccctcctcccagcggcggcagcccagccggctccccaacctctaccgaggagggcacctctgagtccgccacccccgagagcggccctggcacctccaccgagcccagcgagggcagcgcacccggcagccctgccggcagccccacctccacagaggagggaaccagcaccgagcccagcgaaggcagcgccccaggcaccagcaccgagcctagtgagcaggagattaaacggatcaacaagatcagaagaagacttgtgaaagacagcaacaccaagaaggccggcaagacaggccccatgaaaaccctgctggttagagtgatgacacccgatctgagagagcggctggaaaacctgagaaagaagcctgaaaatatcccccagcccatcagcaatacatctagagccaacctgaataagctgctgaccgattacaccgaaatgaagaaggcgatcctgcatgtgtactgggaagagttccagaaggaccctgtgggcctgatgagccgggtggcccagcctgccagcaagaagatcgatcagaacaagctgaaacctgagatggacgagaagggcaacctgaccaccgccggctttgcctgctctcagtgtggccagcccctgttcgtgtacaagctggagcaggtgtctgagaagggcaaggcttacaccaactacttcggacggtgcaatgtggccgagcacgaaaagctgatcctgctggcccagctgaagcccgagaaggatagcgacgaagccgtgacatatagcctgggaaagtttgggcagagggccctggatttctacagcattcatgtgaccaaggagtccacccaccccgtgaagcccctggcccagatcgccggaaacagatacgcctccggacctgtgggaaaggccctgagcgacgcatgtatgggcacaatcgcctccttcctgtctaagtaccaggacatcatcatcgaacaccagaaggtggtgaagggcaaccagaagagactggagagcctgcgggagctggccggcaaggaaaacctggaataccctagcgtgaccctgccacctcagcctcacaccaaggagggcgttgatgcctacaacgaagtgatcgcccgggtgcgaatgtgggtgaacctgaacctgtggcagaagctgaagctaagcagagatgatgccaagcctctgctgagactgaagggattcccttcctttcctctggtcgagagacaggccaacgaagtggactggtgggacatggtgtgtaacgtgaagaagctgatcaacgagaaaaaggaggatggcaaggtgttttggcagaatctggctggctacaagagacaggaagccctgagaccatacctgagcagcgaggaagatcggaagaagggaaagaaattcgctcggtaccagctgggcgacctgctgctgcacctggaaaagaagcacggcgaggactggggaaaggtgtacgacgaggcctgggagcggattgacaagaaagtggaaggcctgagcaagcacatcaagctggaagaggaacggagaagcgaggacgcccagagcaaggccgccctgaccgactggctgcgggctaaggccagcttcgtgatcgagggcctgaaggaggccgacaaggacgagttctgcagatgcgagctgaagctgcagaagtggtacggggacctgcggggaaagcccttcgccatcgaagccgagaacagcatcctggacatcagcggcttcagcaagcagtacaactgtgccttcatctggcagaaggacggcgtgaagaagctgaacctgtacctgatcatcaactacttcaagggcggcaagctgcggttcaagaagatcaaacctgaagccttcgaagccaacagattctacaccgtgatcaacaaaaagagcggcgagatcgtgcccatggaggtgaacttcaacttcgacgaccccaacctgatcatcctgcctctggcctttggcaagagacagggcagagaattcatctggaacgacctgctgtccctggaaaccggcagcctgaagctggccaacggaagagtgatcgagaagacactgtacaacagaagaacccggcaggatgagcctgccctgttcgtggccctgaccttcgagcggcgggaggtcctggactcctccaatatcaaaccaatgaacctgatcggcgtggcaagaggcgaaaacatccccgccgtgatcgccctgaccgaccccgagggctgcccactgagccggtttaaggatagcctgggaaacccaacccacatcctgagaatcggcgagagctataaggagaagcagcggaccatccaggccaagaaggaggtggagcagcggagagccggcggctacagccggaagtacgccagcaaagccaagaatctggcagacgatatggtgagaaacaccgctagagatctgctgtactacgccgtgacccaggatgccatgctgatcttcgccaacctgagccggggcttcggccggcagggcaagcggaccttcatggccgagagacagtacacacggatggaggactggctgaccgccaagctggcctacgagggcctgagcaagacctacctgtccaagacactggcccagtacacctccaagacatgcagcaactgtgggtttaccatcaccagcgccgactacgacagggtgctggagaagctgaagaagacagcaacaggctggatgaccacaattaacggcaaggagctgaaggtggagggccagattacctactacaacagatacaagagacagaacgtagtcaaggacctgtccgtcgagctggatagactgagcgaagaatctgtgaacaacgacatctcctcctggacaaagggcagaagcggagaagctctgagcctcctgaagaaaagattctcccatagacccgtgcaggagaagttcgtgtgcctgaactgcggcttcgagacacacgcagccgagcaagccgccctgaacatcgccagatcctggctgttcctgcggagccaggagtacaagaaataccagacaaacaagacaaccggcaacaccgataagagagccttcgtcgagacctggcagtccttttaccggaagaagcttaaggaggtgtggaaacctgccgtgcggtctggcggatctggcggaggctccaccagccccaagaaaaagagaaaagtctaagctgccttctgcggggcttgccttctggccatgcccttcttctctcccttgcacctgtacctcttggtctttgaataaagcctgagtaggaaggctagcaaaaaaaaaaaaaaaaaaaaaaaaaaaaaaaaaaaaaaaaaaaaaaaaaaaaaaaaaaaaaaaaaaaaaaaaaaaaaaaagcccagccggctccccaacctctaccgaggagggcacctctgagtccgccacccccgagagcggccctggcacctccaccgagcccagcgagggcagcgcacccggcagccctgccggcagccccacctccacagaggagggaaccagcaccgagcccagcgaaggcagcgccccaggcaccagcaccgagcctagtgagcaggagattaaacggatcaacaagatcagaagaagacttgtgaaagacagcaacaccaagaaggccggcaagacaggccccatgaaaaccctgctggttagagtgatgacacccgatctgagagagcggctggaaaacctgagaaagaagcctgaaaatatcccccagcccatcagcaatacatctagagccaacctgaataagctgctgaccgattacaccgaaatgaagaaggcgatcctgcatgtgtactgggaagagttccagaaggaccctgtgggcctgatgagccgggtggcccagcctgccagcaagaagatcgatcagaacaagctgaaacctgagatggacgagaagggcaacctgaccaccgccggctttgcctgctctcagtgtggccagcccctgttcgtgtacaagctggagcaggtgtctgagaagggcaaggcttacaccaactacttcggacggtgcaatgtggccgagcacgaaaagctgatcctgctggcccagctgaagcccgagaaggatagcgacgaagccgtgacatatagcctgggaaagtttgggcagagggccctggatttctacagcattcatgtgaccaaggagtccacccaccccgtgaagcccctggcccagatcgccggaaacagatacgcctccggacctgtgggaaaggccctgagcgacgcatgtatgggcacaatcgcctccttcctgtctaagtaccaggacatcatcatcgaacaccagaaggtggtgaagggcaaccagaagagactggagagcctgcgggagctggccggcaaggaaaacctggaataccctagcgtgaccctgccacctcagcctcacaccaaggagggcgttgatgcctacaacgaagtgatcgcccgggtgcgaatgtgggtgaacctgaacctgtggcagaagctgaagctaagcagagatgatgccaagcctctgctgagactgaagggattcccttcctttcctctggtcgagagacaggccaacgaagtggactggtgggacatggtgtgtaacgtgaagaagctgatcaacgagaaaaaggaggatggcaaggtgttttggcagaatctggctggctacaagagacaggaagccctgagaccatacctgagcagcgaggaagatcggaagaagggaaagaaattcgctcggtaccagctgggcgacctgctgctgcacctggaaaagaagcacggcgaggactggggaaaggtgtacgacgaggcctgggagcggattgacaagaaagtggaaggcctgagcaagcacatcaagctggaagaggaacggagaagcgaggacgcccagagcaaggccgccctgaccgactggctgcgggctaaggccagcttcgtgatcgagggcctgaaggaggccgacaaggacgagttctgcagatgcgagctgaagctgcagaagtggtacggggacctgcggggaaagcccttcgccatcgaagccgagaacagcatcctggacatcagcggcttcagcaagcagtacaactgtgccttcatctggcagaaggacggcgtgaagaagctgaacctgtacctgatcatcaactacttcaagggcggcaagctgcggttcaagaagatcaaacctgaagccttcgaagccaacagattctacaccgtgatcaacaaaaagagcggcgagatcgtgcccatggaggtgaacttcaacttcgacgaccccaacctgatcatcctgcctctggcctttggcaagagacagggcagagaattcatctggaacgacctgctgtccctggaaaccggcagcctgaagctggccaacggaagagtgatcgagaagacactgtacaacagaagaacccggcaggatgagcctgccctgttcgtggccctgaccttcgagcggcgggaggtcctggactcctccaatatcaaaccaatgaacctgatcggcgtggcaagaggcgaaaacatccccgccgtgatcgccctgaccgaccccgagggctgcccactgagccggtttaaggatagcctgggaaacccaacccacatcctgagaatcggcgagagctataaggagaagcagcggaccatccaggccaagaaggaggtggagcagcggagagccggcggctacagccggaagtacgccagcaaagccaagaatctggcagacgatatggtgagaaacaccgctagagatctgctgtactacgccgtgacccaggatgccatgctgatcttcgccaacctgagccggggcttcggccggcagggcaagcggaccttcatggccgagagacagtacacacggatggaggactggctgaccgccaagctggcctacgagggcctgagcaagacctacctgtccaagacactggcccagtacacctccaagacatgcagcaactgtgggtttaccatcaccagcgccgactacgacagggtgctggagaagctgaagaagacagcaacaggctggatgaccacaattaacggcaaggagctgaaggtggagggccagattacctactacaacagatacaagagacagaacgtagtcaaggacctgtccgtcgagctggatagactgagcgaagaatctgtgaacaacgacatctcctcctggacaaagggcagaagcggagaagctctgagcctcctgaagaaaagattctcccatagacccgtgcaggagaagttcgtgtgcctgaactgcggcttcgagacacacgcagccgagcaagccgccctgaacatcgccagatcctggctgttcctgcggagccaggagtacaagaaataccagacaaacaagacaaccggcaacaccgataagagagccttcgtcgagacctggcagtccttttaccggaagaagcttaaggaggtgtggaaacctgccgtgcggtctggcggatctggcggaggctccaccagccccaagaaaaagagaaaagtctaagctgccttctgcggggcttgccttctggccatgcccttcttctctcccttgcacctgtacctcttggtctttgaataaagcctgagtaggaaggctagcaaaaaaaaaaaaaaaaaaaaaaaaaaaaaaaaaaaaaaaaaaaaaaaaaaaaaaaaaaaaaaaaaaaaaaaaaaaaaaaa

SEQ ID NO: 10322 - RNA, 8787 nt, synthetic construct
  source 1..8787: mol_type = other RNA
aggaaataagagagaaaagaagagtaagaagaaatataagagccaccatggcccctaagaagaagcgtaaagtgagccggatgaaccacgaccaggagttcgacccccctaaggtgtaccctcccgtccccgccgagaagagaaagcccatccgggtcctgagcctgttcgatggcatcgccaccggtctgctggtgctgaaggacctgggcatccaggtggataggtacattgcctccgaggtgtgcgaggactccatcaccgtgggaatggtgcgtcatcagggcaagatcatgtacgtgggcgacgtgcggagcgtgacacagaagcatatccaggagtggggccctttcgacctggtgatcggcggcagcccttgcaatgacctgagcatcgtgaacccagcccggaagggcctgtacgagggaaccggcagactgttcttcgagttttacagactgctgcacgacgcccggcctaaggaaggcgacgaccggcccttcttttggctgttcgagaatgtggtggccatgggagtcagcgacaagcgggatattagccggttcctggagagcaaccccgtgatgatcgatgccaaggaagtgagcgccgcccaccgggccagatacttctggggcaatctgcctggcatgaacagacccctggccagcaccgtgaacgacaagctggagctgcaggagtgcctggagcacggccggatcgccaagttcagcaaggtgagaaccatcaccacccgaagcaacagcatcaaacaaggcaaggaccagcactttcctgtgttcatgaacgagaaggaggacatcctgtggtgtaccgagatggagagagtgttcgggttcccagtccactacacagatgtcagcaacatgtctagactggccagacagagactgctgggaagaagctggtccgtccctgtgatcagacacctgttcgcccctctgaaggagtacttcgcctgcgtgagcagcggcaacagcaacgccaacagccggggccccagcttctctagcggcctggtgccactgtccctgagagggagccacatgggccccatggagatctacaaaaccgtgagcgcctggaagcggcagcctgtgcgcgtgctgagcctgtttcggaatatcgataaagtcctgaaaagcctgggattcctggagagcggctctggctccggcggtggcaccctgaagtacgtggaggatgtgacaaacgtggtcagacgggatgtggagaagtggggccccttcgatctggtgtacggcagcacccaacccctgggcagctcttgtgaccggtgccctggctggtacatgtttcagttccaccggatcctgcagtacgccctgccgagacaggagtcccagcggccattcttttggattttcatggacaacttgctgctgaccgaggatgaccaggaaactaccactcggttcctgcagaccgaagccgtgaccctgcaggacgtgagaggccgggactaccagaacgccatgcgggtgtggtccaacatccctggactgaaaagcaagcacgcacctctgacccctaaagaagaggagtacctgcaggcccaggtgcggagcagaagcaagctggacgcccctaaggtggatctgctggtgaagaattgcctcctgcccctgagagagtacttcaagtatttcagccagaatagtctgcccctgggaggcagcggcggcggcgcccagatgcccgtgaagttcgaggacatcgccgtgagcttcagccaggaggagtgggagtacctgaacgaggagcagaaggagctgtacagggaggtgatggaggagaactaccagaccctgatcagcctgggcagcccccccgtgacccccgacatcatcagccacatcgagaggggcgaggagccctacatcagggaggagcccggcagcgaggagagggagcccggcaggagcagctgcggcggcccaagcagcggcgcccctcctcccagcggcggcaggcggcccaagcagcggcgcccctcctcccagcggcggcagcccagccggctccccaacctctaccgaggagggcacctctgagtccgccacccccgagagcggccctggcacctccaccgagcccagcgagggcagcgcacccggcagccctgccggcagccccacctccacagaggagggaaccagcaccgagcccagcgaaggcagcgccccaggcaccagcaccgagcctagtgagcaggagattaaacggatcaacaagatcagaagaagacttgtgaaagacagcaacaccaagaaggccggcaagacaggccccatgaaaaccctgctggttagagtgatgacacccgatctgagagagcggctggaaaacctgagaaagaagcctgaaaatatcccccagcccatcagcaatacatctagagccaacctgaataagctgctgaccgattacaccgaaatgaagaaggcgatcctgcatgtgtactgggaagagttccagaaggaccctgtgggcctgatgagccgggtggcccagcctgccagcaagaagatcgatcagaacaagctgaaacctgagatggacgagaagggcaacctgaccaccgccggctttgcctgctctcagtgtggccagcccctgttcgtgtacaagctggagcaggtgtctgagaagggcaaggcttacaccaactacttcggacggtgcaatgtggccgagcacgaaaagctgatcctgctggcccagctgaagcccgagaaggatagcgacgaagccgtgacatatagcctgggaaagtttgggcagagggccctggatttctacagcattcatgtgaccaaggagtccacccaccccgtgaagcccctggcccagatcgccggaaacagatacgcctccggacctgtgggaaaggccctgagcgacgcatgtatgggcacaatcgcctccttcctgtctaagtaccaggacatcatcatcgaacaccagaaggtggtgaagggcaaccagaagagactggagagcctgcgggagctggccggcaaggaaaacctggaataccctagcgtgaccctgccacctcagcctcacaccaaggagggcgttgatgcctacaacgaagtgatcgcccgggtgcgaatgtgggtgaacctgaacctgtggcagaagctgaagctaagcagagatgatgccaagcctctgctgagactgaagggattcccttcctttcctctggtcgagagacaggccaacgaagtggactggtgggacatggtgtgtaacgtgaagaagctgatcaacgagaaaaaggaggatggcaaggtgttttggcagaatctggctggctacaagagacaggaagccctgagaccatacctgagcagcgaggaagatcggaagaagggaaagaaattcgctcggtaccagctgggcgacctgctgctgcacctggaaaagaagcacggcgaggactggggaaaggtgtacgacgaggcctgggagcggattgacaagaaagtggaaggcctgagcaagcacatcaagctggaagaggaacggagaagcgaggacgcccagagcaaggccgccctgaccgactggctgcgggctaaggccagcttcgtgatcgagggcctgaaggaggccgacaaggacgagttctgcagatgcgagctgaagctgcagaagtggtacggggacctgcggggaaagcccttcgccatcgaagccgagaacagcatcctggacatcagcggcttcagcaagcagtacaactgtgccttcatctggcagaaggacggcgtgaagaagctgaacctgtacctgatcatcaactacttcaagggcggcaagctgcggttcaagaagatcaaacctgaagccttcgaagccaacagattctacaccgtgatcaacaaaaagagcggcgagatcgtgcccatggaggtgaacttcaacttcgacgaccccaacctgatcatcctgcctctggcctttggcaagagacagggcagagaattcatctggaacgacctgctgtccctggaaaccggcagcctgaagctggccaacggaagagtgatcgagaagacactgtacaacagaagaacccggcaggatgagcctgccctgttcgtggccctgaccttcgagcggcgggaggtcctggactcctccaatatcaaaccaatgaacctgatcggcgtggcaagaggcgaaaacatccccgccgtgatcgccctgaccgaccccgagggctgcccactgagccggtttaaggatagcctgggaaacccaacccacatcctgagaatcggcgagagctataaggagaagcagcggaccatccaggccaagaaggaggtggagcagcggagagccggcggctacagccggaagtacgccagcaaagccaagaatctggcagacgatatggtgagaaacaccgctagagatctgctgtactacgccgtgacccaggatgccatgctgatcttcgccaacctgagccggggcttcggccggcagggcaagcggaccttcatggccgagagacagtacacacggatggaggactggctgaccgccaagctggcctacgagggcctgagcaagacctacctgtccaagacactggcccagtacacctccaagacatgcagcaactgtgggtttaccatcaccagcgccgactacgacagggtgctggagaagctgaagaagacagcaacaggctggatgaccacaattaacggcaaggagctgaaggtggagggccagattacctactacaacagatacaagagacagaacgtagtcaaggacctgtccgtcgagctggatagactgagcgaagaatctgtgaacaacgacatctcctcctggacaaagggcagaagcggagaagctctgagcctcctgaagaaaagattctcccatagacccgtgcaggagaagttcgtgtgcctgaactgcggcttcgagacacacgcagccgagcaagccgccctgaacatcgccagatcctggctgttcctgcggagccaggagtacaagaaataccagacaaacaagacaaccggcaacaccgataagagagccttcgtcgagacctggcagtccttttaccggaagaagcttaaggaggtgtggaaacctgccgtgcggtctggcggatctggcggaggctccaccagccccaagaaaaagagaaaagtctaagctgccttctgcggggcttgccttctggccatgcccttcttctctcccttgcacctgtacctcttggtctttgaataaagcctgagtaggaaggctagcaaaaaaaaaaaaaaaaaaaaaaaaaaaaaaaaaaaaaaaaaaaaaaaaaaaaaaaaaaaaaaaaaaaaaaaaaaaaaaaagcccagccggctccccaacctctaccgaggagggcacctctgagtccgccacccccgagagcggccctggcacctccaccgagcccagcgagggcagcgcacccggcagccctgccggcagccccacctccacagaggagggaaccagcaccgagcccagcgaaggcagcgccccaggcaccagcaccgagcctagtgagcaggagattaaacggatcaacaagatcagaagaagacttgtgaaagacagcaacaccaagaaggccggcaagacaggccccatgaaaaccctgctggttagagtgatgacacccgatctgagagagcggctggaaaacctgagaaagaagcctgaaaatatcccccagcccatcagcaatacatctagagccaacctgaataagctgctgaccgattacaccgaaatgaagaaggcgatcctgcatgtgtactgggaagagttccagaaggaccctgtgggcctgatgagccgggtggcccagcctgccagcaagaagatcgatcagaacaagctgaaacctgagatggacgagaagggcaacctgaccaccgccggctttgcctgctctcagtgtggccagcccctgttcgtgtacaagctggagcaggtgtctgagaagggcaaggcttacaccaactacttcggacggtgcaatgtggccgagcacgaaaagctgatcctgctggcccagctgaagcccgagaaggatagcgacgaagccgtgacatatagcctgggaaagtttgggcagagggccctggatttctacagcattcatgtgaccaaggagtccacccaccccgtgaagcccctggcccagatcgccggaaacagatacgcctccggacctgtgggaaaggccctgagcgacgcatgtatgggcacaatcgcctccttcctgtctaagtaccaggacatcatcatcgaacaccagaaggtggtgaagggcaaccagaagagactggagagcctgcgggagctggccggcaaggaaaacctggaataccctagcgtgaccctgccacctcagcctcacaccaaggagggcgttgatgcctacaacgaagtgatcgcccgggtgcgaatgtgggtgaacctgaacctgtggcagaagctgaagctaagcagagatgatgccaagcctctgctgagactgaagggattcccttcctttcctctggtcgagagacaggccaacgaagtggactggtgggacatggtgtgtaacgtgaagaagctgatcaacgagaaaaaggaggatggcaaggtgttttggcagaatctggctggctacaagagacaggaagccctgagaccatacctgagcagcgaggaagatcggaagaagggaaagaaattcgctcggtaccagctgggcgacctgctgctgcacctggaaaagaagcacggcgaggactggggaaaggtgtacgacgaggcctgggagcggattgacaagaaagtggaaggcctgagcaagcacatcaagctggaagaggaacggagaagcgaggacgcccagagcaaggccgccctgaccgactggctgcgggctaaggccagcttcgtgatcgagggcctgaaggaggccgacaaggacgagttctgcagatgcgagctgaagctgcagaagtggtacggggacctgcggggaaagcccttcgccatcgaagccgagaacagcatcctggacatcagcggcttcagcaagcagtacaactgtgccttcatctggcagaaggacggcgtgaagaagctgaacctgtacctgatcatcaactacttcaagggcggcaagctgcggttcaagaagatcaaacctgaagccttcgaagccaacagattctacaccgtgatcaacaaaaagagcggcgagatcgtgcccatggaggtgaacttcaacttcgacgaccccaacctgatcatcctgcctctggcctttggcaagagacagggcagagaattcatctggaacgacctgctgtccctggaaaccggcagcctgaagctggccaacggaagagtgatcgagaagacactgtacaacagaagaacccggcaggatgagcctgccctgttcgtggccctgaccttcgagcggcgggaggtcctggactcctccaatatcaaaccaatgaacctgatcggcgtggcaagaggcgaaaacatccccgccgtgatcgccctgaccgaccccgagggctgcccactgagccggtttaaggatagcctgggaaacccaacccacatcctgagaatcggcgagagctataaggagaagcagcggaccatccaggccaagaaggaggtggagcagcggagagccggcggctacagccggaagtacgccagcaaagccaagaatctggcagacgatatggtgagaaacaccgctagagatctgctgtactacgccgtgacccaggatgccatgctgatcttcgccaacctgagccggggcttcggccggcagggcaagcggaccttcatggccgagagacagtacacacggatggaggactggctgaccgccaagctggcctacgagggcctgagcaagacctacctgtccaagacactggcccagtacacctccaagacatgcagcaactgtgggtttaccatcaccagcgccgactacgacagggtgctggagaagctgaagaagacagcaacaggctggatgaccacaattaacggcaaggagctgaaggtggagggccagattacctactacaacagatacaagagacagaacgtagtcaaggacctgtccgtcgagctggatagactgagcgaagaatctgtgaacaacgacatctcctcctggacaaagggcagaagcggagaagctctgagcctcctgaagaaaagattctcccatagacccgtgcaggagaagttcgtgtgcctgaactgcggcttcgagacacacgcagccgagcaagccgccctgaacatcgccagatcctggctgttcctgcggagccaggagtacaagaaataccagacaaacaagacaaccggcaacaccgataagagagccttcgtcgagacctggcagtccttttaccggaagaagcttaaggaggtgtggaaacctgccgtgcggtctggcggatctggcggaggctccaccagccccaagaaaaagagaaaagtctaagctgccttctgcggggcttgccttctggccatgcccttcttctctcccttgcacctgtacctcttggtctttgaataaagcctgagtaggaaggctagcaaaaaaaaaaaaaaaaaaaaaaaaaaaaaaaaaaaaaaaaaaaaaaaaaaaaaaaaaaaaaaaaaaaaaaaaaaaaaaaa

SEQ ID NO: 10323 - RNA, 8787 nt, synthetic construct
  source 1..8787: mol_type = other RNA
aggaaataagagagaaaagaagagtaagaagaaatataagagccaccatggcccctaagaagaagcgtaaagtgagccggatgaaccacgaccaggagttcgacccccctaaggtgtaccctcccgtccccgccgagaagagaaagcccatccgggtcctgagcctgttcgatggcatcgccaccggtctgctggtgctgaaggacctgggcatccaggtggataggtacattgcctccgaggtgtgcgaggactccatcaccgtgggaatggtgcgtcatcagggcaagatcatgtacgtgggcgacgtgcggagcgtgacacagaagcatatccaggagtggggccctttcgacctggtgatcggcggcagcccttgcaatgacctgagcatcgtgaacccagcccggaagggcctgtacgagggaaccggcagactgttcttcgagttttacagactgctgcacgacgcccggcctaaggaaggcgacgaccggcccttcttttggctgttcgagaatgtggtggccatgggagtcagcgacaagcgggatattagccggttcctggagagcaaccccgtgatgatcgatgccaaggaagtgagcgccgcccaccgggccagatacttctggggcaatctgcctggcatgaacagacccctggccagcaccgtgaacgacaagctggagctgcaggagtgcctggagcacggccggatcgccaagttcagcaaggtgagaaccatcaccacccgaagcaacagcatcaaacaaggcaaggaccagcactttcctgtgttcatgaacgagaaggaggacatcctgtggtgtaccgagatggagagagtgttcgggttcccagtccactacacagatgtcagcaacatgtctagactggccagacagagactgctgggaagaagctggtccgtccctgtgatcagacacctgttcgcccctctgaaggagtacttcgcctgcgtgagcagcggcaacagcaacgccaacagccggggccccagcttctctagcggcctggtgccactgtccctgagagggagccacatgggccccatggagatctacaaaaccgtgagcgcctggaagcggcagcctgtgcgcgtgctgagcctgtttcggaatatcgataaagtcctgaaaagcctgggattcctggagagcggctctggctccggcggtggcaccctgaagtacgtggaggatgtgacaaacgtggtcagacgggatgtggagaagtggggccccttcgatctggtgtacggcagcacccaacccctgggcagctcttgtgaccggtgccctggctggtacatgtttcagttccaccggatcctgcagtacgccctgccgagacaggagtcccagcggccattcttttggattttcatggacaacttgctgctgaccgaggatgaccaggaaactaccactcggttcctgcagaccgaagccgtgaccctgcaggacgtgagaggccgggactaccagaacgccatgcgggtgtggtccaacatccctggactgaaaagcaagcacgcacctctgacccctaaagaagaggagtacctgcaggcccaggtgcggagcagaagcaagctggacgcccctaaggtggatctgctggtgaagaattgcctcctgcccctgagagagtacttcaagtatttcagccagaatagtctgcccctgggaggcagcggcggcggcaaggaccagggcagcctgaccctggaggacgtggccgtggacttcacctgggaggagtggcagctgctggcccccgcccagaaggacctgtacagggacgtgatgctggagaactacagcaacctgctgagcatcggctaccaggccagcaagcccgacgccctgagcaggctggagaggggcgagccctggcccgtggaggacgagatccacagccagatctgccccgagatgaggaaggacggcggcccaagcagcggcgcccctcctcccagcggcggcaggcggcccaagcagcggcgcccctcctcccagcggcggcagcccagccggctccccaacctctaccgaggagggcacctctgagtccgccacccccgagagcggccctggcacctccaccgagcccagcgagggcagcgcacccggcagccctgccggcagccccacctccacagaggagggaaccagcaccgagcccagcgaaggcagcgccccaggcaccagcaccgagcctagtgagcaggagattaaacggatcaacaagatcagaagaagacttgtgaaagacagcaacaccaagaaggccggcaagacaggccccatgaaaaccctgctggttagagtgatgacacccgatctgagagagcggctggaaaacctgagaaagaagcctgaaaatatcccccagcccatcagcaatacatctagagccaacctgaataagctgctgaccgattacaccgaaatgaagaaggcgatcctgcatgtgtactgggaagagttccagaaggaccctgtgggcctgatgagccgggtggcccagcctgccagcaagaagatcgatcagaacaagctgaaacctgagatggacgagaagggcaacctgaccaccgccggctttgcctgctctcagtgtggccagcccctgttcgtgtacaagctggagcaggtgtctgagaagggcaaggcttacaccaactacttcggacggtgcaatgtggccgagcacgaaaagctgatcctgctggcccagctgaagcccgagaaggatagcgacgaagccgtgacatatagcctgggaaagtttgggcagagggccctggatttctacagcattcatgtgaccaaggagtccacccaccccgtgaagcccctggcccagatcgccggaaacagatacgcctccggacctgtgggaaaggccctgagcgacgcatgtatgggcacaatcgcctccttcctgtctaagtaccaggacatcatcatcgaacaccagaaggtggtgaagggcaaccagaagagactggagagcctgcgggagctggccggcaaggaaaacctggaataccctagcgtgaccctgccacctcagcctcacaccaaggagggcgttgatgcctacaacgaagtgatcgcccgggtgcgaatgtgggtgaacctgaacctgtggcagaagctgaagctaagcagagatgatgccaagcctctgctgagactgaagggattcccttcctttcctctggtcgagagacaggccaacgaagtggactggtgggacatggtgtgtaacgtgaagaagctgatcaacgagaaaaaggaggatggcaaggtgttttggcagaatctggctggctacaagagacaggaagccctgagaccatacctgagcagcgaggaagatcggaagaagggaaagaaattcgctcggtaccagctgggcgacctgctgctgcacctggaaaagaagcacggcgaggactggggaaaggtgtacgacgaggcctgggagcggattgacaagaaagtggaaggcctgagcaagcacatcaagctggaagaggaacggagaagcgaggacgcccagagcaaggccgccctgaccgactggctgcgggctaaggccagcttcgtgatcgagggcctgaaggaggccgacaaggacgagttctgcagatgcgagctgaagctgcagaagtggtacggggacctgcggggaaagcccttcgccatcgaagccgagaacagcatcctggacatcagcggcttcagcaagcagtacaactgtgccttcatctggcagaaggacggcgtgaagaagctgaacctgtacctgatcatcaactacttcaagggcggcaagctgcggttcaagaagatcaaacctgaagccttcgaagccaacagattctacaccgtgatcaacaaaaagagcggcgagatcgtgcccatggaggtgaacttcaacttcgacgaccccaacctgatcatcctgcctctggcctttggcaagagacagggcagagaattcatctggaacgacctgctgtccctggaaaccggcagcctgaagctggccaacggaagagtgatcgagaagacactgtacaacagaagaacccggcaggatgagcctgccctgttcgtggccctgaccttcgagcggcgggaggtcctggactcctccaatatcaaaccaatgaacctgatcggcgtggcaagaggcgaaaacatccccgccgtgatcgccctgaccgaccccgagggctgcccactgagccggtttaaggatagcctgggaaacccaacccacatcctgagaatcggcgagagctataaggagaagcagcggaccatccaggccaagaaggaggtggagcagcggagagccggcggctacagccggaagtacgccagcaaagccaagaatctggcagacgatatggtgagaaacaccgctagagatctgctgtactacgccgtgacccaggatgccatgctgatcttcgccaacctgagccggggcttcggccggcagggcaagcggaccttcatggccgagagacagtacacacggatggaggactggctgaccgccaagctggcctacgagggcctgagcaagacctacctgtccaagacactggcccagtacacctccaagacatgcagcaactgtgggtttaccatcaccagcgccgactacgacagggtgctggagaagctgaagaagacagcaacaggctggatgaccacaattaacggcaaggagctgaaggtggagggccagattacctactacaacagatacaagagacagaacgtagtcaaggacctgtccgtcgagctggatagactgagcgaagaatctgtgaacaacgacatctcctcctggacaaagggcagaagcggagaagctctgagcctcctgaagaaaagattctcccatagacccgtgcaggagaagttcgtgtgcctgaactgcggcttcgagacacacgcagccgagcaagccgccctgaacatcgccagatcctggctgttcctgcggagccaggagtacaagaaataccagacaaacaagacaaccggcaacaccgataagagagccttcgtcgagacctggcagtccttttaccggaagaagcttaaggaggtgtggaaacctgccgtgcggtctggcggatctggcggaggctccaccagccccaagaaaaagagaaaagtctaagctgccttctgcggggcttgccttctggccatgcccttcttctctcccttgcacctgtacctcttggtctttgaataaagcctgagtaggaaggctagcaaaaaaaaaaaaaaaaaaaaaaaaaaaaaaaaaaaaaaaaaaaaaaaaaaaaaaaaaaaaaaaaaaaaaaaaaaaaaaaagcccagccggctccccaacctctaccgaggagggcacctctgagtccgccacccccgagagcggccctggcacctccaccgagcccagcgagggcagcgcacccggcagccctgccggcagccccacctccacagaggagggaaccagcaccgagcccagcgaaggcagcgccccaggcaccagcaccgagcctagtgagcaggagattaaacggatcaacaagatcagaagaagacttgtgaaagacagcaacaccaagaaggccggcaagacaggccccatgaaaaccctgctggttagagtgatgacacccgatctgagagagcggctggaaaacctgagaaagaagcctgaaaatatcccccagcccatcagcaatacatctagagccaacctgaataagctgctgaccgattacaccgaaatgaagaaggcgatcctgcatgtgtactgggaagagttccagaaggaccctgtgggcctgatgagccgggtggcccagcctgccagcaagaagatcgatcagaacaagctgaaacctgagatggacgagaagggcaacctgaccaccgccggctttgcctgctctcagtgtggccagcccctgttcgtgtacaagctggagcaggtgtctgagaagggcaaggcttacaccaactacttcggacggtgcaatgtggccgagcacgaaaagctgatcctgctggcccagctgaagcccgagaaggatagcgacgaagccgtgacatatagcctgggaaagtttgggcagagggccctggatttctacagcattcatgtgaccaaggagtccacccaccccgtgaagcccctggcccagatcgccggaaacagatacgcctccggacctgtgggaaaggccctgagcgacgcatgtatgggcacaatcgcctccttcctgtctaagtaccaggacatcatcatcgaacaccagaaggtggtgaagggcaaccagaagagactggagagcctgcgggagctggccggcaaggaaaacctggaataccctagcgtgaccctgccacctcagcctcacaccaaggagggcgttgatgcctacaacgaagtgatcgcccgggtgcgaatgtgggtgaacctgaacctgtggcagaagctgaagctaagcagagatgatgccaagcctctgctgagactgaagggattcccttcctttcctctggtcgagagacaggccaacgaagtggactggtgggacatggtgtgtaacgtgaagaagctgatcaacgagaaaaaggaggatggcaaggtgttttggcagaatctggctggctacaagagacaggaagccctgagaccatacctgagcagcgaggaagatcggaagaagggaaagaaattcgctcggtaccagctgggcgacctgctgctgcacctggaaaagaagcacggcgaggactggggaaaggtgtacgacgaggcctgggagcggattgacaagaaagtggaaggcctgagcaagcacatcaagctggaagaggaacggagaagcgaggacgcccagagcaaggccgccctgaccgactggctgcgggctaaggccagcttcgtgatcgagggcctgaaggaggccgacaaggacgagttctgcagatgcgagctgaagctgcagaagtggtacggggacctgcggggaaagcccttcgccatcgaagccgagaacagcatcctggacatcagcggcttcagcaagcagtacaactgtgccttcatctggcagaaggacggcgtgaagaagctgaacctgtacctgatcatcaactacttcaagggcggcaagctgcggttcaagaagatcaaacctgaagccttcgaagccaacagattctacaccgtgatcaacaaaaagagcggcgagatcgtgcccatggaggtgaacttcaacttcgacgaccccaacctgatcatcctgcctctggcctttggcaagagacagggcagagaattcatctggaacgacctgctgtccctggaaaccggcagcctgaagctggccaacggaagagtgatcgagaagacactgtacaacagaagaacccggcaggatgagcctgccctgttcgtggccctgaccttcgagcggcgggaggtcctggactcctccaatatcaaaccaatgaacctgatcggcgtggcaagaggcgaaaacatccccgccgtgatcgccctgaccgaccccgagggctgcccactgagccggtttaaggatagcctgggaaacccaacccacatcctgagaatcggcgagagctataaggagaagcagcggaccatccaggccaagaaggaggtggagcagcggagagccggcggctacagccggaagtacgccagcaaagccaagaatctggcagacgatatggtgagaaacaccgctagagatctgctgtactacgccgtgacccaggatgccatgctgatcttcgccaacctgagccggggcttcggccggcagggcaagcggaccttcatggccgagagacagtacacacggatggaggactggctgaccgccaagctggcctacgagggcctgagcaagacctacctgtccaagacactggcccagtacacctccaagacatgcagcaactgtgggtttaccatcaccagcgccgactacgacagggtgctggagaagctgaagaagacagcaacaggctggatgaccacaattaacggcaaggagctgaaggtggagggccagattacctactacaacagatacaagagacagaacgtagtcaaggacctgtccgtcgagctggatagactgagcgaagaatctgtgaacaacgacatctcctcctggacaaagggcagaagcggagaagctctgagcctcctgaagaaaagattctcccatagacccgtgcaggagaagttcgtgtgcctgaactgcggcttcgagacacacgcagccgagcaagccgccctgaacatcgccagatcctggctgttcctgcggagccaggagtacaagaaataccagacaaacaagacaaccggcaacaccgataagagagccttcgtcgagacctggcagtccttttaccggaagaagcttaaggaggtgtggaaacctgccgtgcggtctggcggatctggcggaggctccaccagccccaagaaaaagagaaaagtctaagctgccttctgcggggcttgccttctggccatgcccttcttctctcccttgcacctgtacctcttggtctttgaataaagcctgagtaggaaggctagcaaaaaaaaaaaaaaaaaaaaaaaaaaaaaaaaaaaaaaaaaaaaaaaaaaaaaaaaaaaaaaaaaaaaaaaaaaaaaaaa

SEQ ID NO: 10324 - RNA, 8787 nt, synthetic construct
  source 1..8787: mol_type = other RNA
aggaaataagagagaaaagaagagtaagaagaaatataagagccaccatggcccctaagaagaagcgtaaagtgagccggatgaaccacgaccaggagttcgacccccctaaggtgtaccctcccgtccccgccgagaagagaaagcccatccgggtcctgagcctgttcgatggcatcgccaccggtctgctggtgctgaaggacctgggcatccaggtggataggtacattgcctccgaggtgtgcgaggactccatcaccgtgggaatggtgcgtcatcagggcaagatcatgtacgtgggcgacgtgcggagcgtgacacagaagcatatccaggagtggggccctttcgacctggtgatcggcggcagcccttgcaatgacctgagcatcgtgaacccagcccggaagggcctgtacgagggaaccggcagactgttcttcgagttttacagactgctgcacgacgcccggcctaaggaaggcgacgaccggcccttcttttggctgttcgagaatgtggtggccatgggagtcagcgacaagcgggatattagccggttcctggagagcaaccccgtgatgatcgatgccaaggaagtgagcgccgcccaccgggccagatacttctggggcaatctgcctggcatgaacagacccctggccagcaccgtgaacgacaagctggagctgcaggagtgcctggagcacggccggatcgccaagttcagcaaggtgagaaccatcaccacccgaagcaacagcatcaaacaaggcaaggaccagcactttcctgtgttcatgaacgagaaggaggacatcctgtggtgtaccgagatggagagagtgttcgggttcccagtccactacacagatgtcagcaacatgtctagactggccagacagagactgctgggaagaagctggtccgtccctgtgatcagacacctgttcgcccctctgaaggagtacttcgcctgcgtgagcagcggcaacagcaacgccaacagccggggccccagcttctctagcggcctggtgccactgtccctgagagggagccacatgggccccatggagatctacaaaaccgtgagcgcctggaagcggcagcctgtgcgcgtgctgagcctgtttcggaatatcgataaagtcctgaaaagcctgggattcctggagagcggctctggctccggcggtggcaccctgaagtacgtggaggatgtgacaaacgtggtcagacgggatgtggagaagtggggccccttcgatctggtgtacggcagcacccaacccctgggcagctcttgtgaccggtgccctggctggtacatgtttcagttccaccggatcctgcagtacgccctgccgagacaggagtcccagcggccattcttttggattttcatggacaacttgctgctgaccgaggatgaccaggaaactaccactcggttcctgcagaccgaagccgtgaccctgcaggacgtgagaggccgggactaccagaacgccatgcgggtgtggtccaacatccctggactgaaaagcaagcacgcacctctgacccctaaagaagaggagtacctgcaggcccaggtgcggagcagaagcaagctggacgcccctaaggtggatctgctggtgaagaattgcctcctgcccctgagagagtacttcaagtatttcagccagaatagtctgcccctgggaggcagcggcggcggccagatgaggctgaggttcgaggacatcagcgtgagcttcagccaggaggagtgggcctacctggacgaggagcagaaggagctgtacagggaggtgatgagggacaactaccagaccctgatcagcctgggcatcggcagcccccccgtgacccccgacatcatcagctgcatcgagcagggcgaggagccctacatcagggacgagcccggcagcgaggagaggaagaccggcaggagcagcggcggcccaagcagcggcgcccctcctcccagcggcggcaggcggcccaagcagcggcgcccctcctcccagcggcggcagcccagccggctccccaacctctaccgaggagggcacctctgagtccgccacccccgagagcggccctggcacctccaccgagcccagcgagggcagcgcacccggcagccctgccggcagccccacctccacagaggagggaaccagcaccgagcccagcgaaggcagcgccccaggcaccagcaccgagcctagtgagcaggagattaaacggatcaacaagatcagaagaagacttgtgaaagacagcaacaccaagaaggccggcaagacaggccccatgaaaaccctgctggttagagtgatgacacccgatctgagagagcggctggaaaacctgagaaagaagcctgaaaatatcccccagcccatcagcaatacatctagagccaacctgaataagctgctgaccgattacaccgaaatgaagaaggcgatcctgcatgtgtactgggaagagttccagaaggaccctgtgggcctgatgagccgggtggcccagcctgccagcaagaagatcgatcagaacaagctgaaacctgagatggacgagaagggcaacctgaccaccgccggctttgcctgctctcagtgtggccagcccctgttcgtgtacaagctggagcaggtgtctgagaagggcaaggcttacaccaactacttcggacggtgcaatgtggccgagcacgaaaagctgatcctgctggcccagctgaagcccgagaaggatagcgacgaagccgtgacatatagcctgggaaagtttgggcagagggccctggatttctacagcattcatgtgaccaaggagtccacccaccccgtgaagcccctggcccagatcgccggaaacagatacgcctccggacctgtgggaaaggccctgagcgacgcatgtatgggcacaatcgcctccttcctgtctaagtaccaggacatcatcatcgaacaccagaaggtggtgaagggcaaccagaagagactggagagcctgcgggagctggccggcaaggaaaacctggaataccctagcgtgaccctgccacctcagcctcacaccaaggagggcgttgatgcctacaacgaagtgatcgcccgggtgcgaatgtgggtgaacctgaacctgtggcagaagctgaagctaagcagagatgatgccaagcctctgctgagactgaagggattcccttcctttcctctggtcgagagacaggccaacgaagtggactggtgggacatggtgtgtaacgtgaagaagctgatcaacgagaaaaaggaggatggcaaggtgttttggcagaatctggctggctacaagagacaggaagccctgagaccatacctgagcagcgaggaagatcggaagaagggaaagaaattcgctcggtaccagctgggcgacctgctgctgcacctggaaaagaagcacggcgaggactggggaaaggtgtacgacgaggcctgggagcggattgacaagaaagtggaaggcctgagcaagcacatcaagctggaagaggaacggagaagcgaggacgcccagagcaaggccgccctgaccgactggctgcgggctaaggccagcttcgtgatcgagggcctgaaggaggccgacaaggacgagttctgcagatgcgagctgaagctgcagaagtggtacggggacctgcggggaaagcccttcgccatcgaagccgagaacagcatcctggacatcagcggcttcagcaagcagtacaactgtgccttcatctggcagaaggacggcgtgaagaagctgaacctgtacctgatcatcaactacttcaagggcggcaagctgcggttcaagaagatcaaacctgaagccttcgaagccaacagattctacaccgtgatcaacaaaaagagcggcgagatcgtgcccatggaggtgaacttcaacttcgacgaccccaacctgatcatcctgcctctggcctttggcaagagacagggcagagaattcatctggaacgacctgctgtccctggaaaccggcagcctgaagctggccaacggaagagtgatcgagaagacactgtacaacagaagaacccggcaggatgagcctgccctgttcgtggccctgaccttcgagcggcgggaggtcctggactcctccaatatcaaaccaatgaacctgatcggcgtggcaagaggcgaaaacatccccgccgtgatcgccctgaccgaccccgagggctgcccactgagccggtttaaggatagcctgggaaacccaacccacatcctgagaatcggcgagagctataaggagaagcagcggaccatccaggccaagaaggaggtggagcagcggagagccggcggctacagccggaagtacgccagcaaagccaagaatctggcagacgatatggtgagaaacaccgctagagatctgctgtactacgccgtgacccaggatgccatgctgatcttcgccaacctgagccggggcttcggccggcagggcaagcggaccttcatggccgagagacagtacacacggatggaggactggctgaccgccaagctggcctacgagggcctgagcaagacctacctgtccaagacactggcccagtacacctccaagacatgcagcaactgtgggtttaccatcaccagcgccgactacgacagggtgctggagaagctgaagaagacagcaacaggctggatgaccacaattaacggcaaggagctgaaggtggagggccagattacctactacaacagatacaagagacagaacgtagtcaaggacctgtccgtcgagctggatagactgagcgaagaatctgtgaacaacgacatctcctcctggacaaagggcagaagcggagaagctctgagcctcctgaagaaaagattctcccatagacccgtgcaggagaagttcgtgtgcctgaactgcggcttcgagacacacgcagccgagcaagccgccctgaacatcgccagatcctggctgttcctgcggagccaggagtacaagaaataccagacaaacaagacaaccggcaacaccgataagagagccttcgtcgagacctggcagtccttttaccggaagaagcttaaggaggtgtggaaacctgccgtgcggtctggcggatctggcggaggctccaccagccccaagaaaaagagaaaagtctaagctgccttctgcggggcttgccttctggccatgcccttcttctctcccttgcacctgtacctcttggtctttgaataaagcctgagtaggaaggctagcaaaaaaaaaaaaaaaaaaaaaaaaaaaaaaaaaaaaaaaaaaaaaaaaaaaaaaaaaaaaaaaaaaaaaaaaaaaaaaaagcccagccggctccccaacctctaccgaggagggcacctctgagtccgccacccccgagagcggccctggcacctccaccgagcccagcgagggcagcgcacccggcagccctgccggcagccccacctccacagaggagggaaccagcaccgagcccagcgaaggcagcgccccaggcaccagcaccgagcctagtgagcaggagattaaacggatcaacaagatcagaagaagacttgtgaaagacagcaacaccaagaaggccggcaagacaggccccatgaaaaccctgctggttagagtgatgacacccgatctgagagagcggctggaaaacctgagaaagaagcctgaaaatatcccccagcccatcagcaatacatctagagccaacctgaataagctgctgaccgattacaccgaaatgaagaaggcgatcctgcatgtgtactgggaagagttccagaaggaccctgtgggcctgatgagccgggtggcccagcctgccagcaagaagatcgatcagaacaagctgaaacctgagatggacgagaagggcaacctgaccaccgccggctttgcctgctctcagtgtggccagcccctgttcgtgtacaagctggagcaggtgtctgagaagggcaaggcttacaccaactacttcggacggtgcaatgtggccgagcacgaaaagctgatcctgctggcccagctgaagcccgagaaggatagcgacgaagccgtgacatatagcctgggaaagtttgggcagagggccctggatttctacagcattcatgtgaccaaggagtccacccaccccgtgaagcccctggcccagatcgccggaaacagatacgcctccggacctgtgggaaaggccctgagcgacgcatgtatgggcacaatcgcctccttcctgtctaagtaccaggacatcatcatcgaacaccagaaggtggtgaagggcaaccagaagagactggagagcctgcgggagctggccggcaaggaaaacctggaataccctagcgtgaccctgccacctcagcctcacaccaaggagggcgttgatgcctacaacgaagtgatcgcccgggtgcgaatgtgggtgaacctgaacctgtggcagaagctgaagctaagcagagatgatgccaagcctctgctgagactgaagggattcccttcctttcctctggtcgagagacaggccaacgaagtggactggtgggacatggtgtgtaacgtgaagaagctgatcaacgagaaaaaggaggatggcaaggtgttttggcagaatctggctggctacaagagacaggaagccctgagaccatacctgagcagcgaggaagatcggaagaagggaaagaaattcgctcggtaccagctgggcgacctgctgctgcacctggaaaagaagcacggcgaggactggggaaaggtgtacgacgaggcctgggagcggattgacaagaaagtggaaggcctgagcaagcacatcaagctggaagaggaacggagaagcgaggacgcccagagcaaggccgccctgaccgactggctgcgggctaaggccagcttcgtgatcgagggcctgaaggaggccgacaaggacgagttctgcagatgcgagctgaagctgcagaagtggtacggggacctgcggggaaagcccttcgccatcgaagccgagaacagcatcctggacatcagcggcttcagcaagcagtacaactgtgccttcatctggcagaaggacggcgtgaagaagctgaacctgtacctgatcatcaactacttcaagggcggcaagctgcggttcaagaagatcaaacctgaagccttcgaagccaacagattctacaccgtgatcaacaaaaagagcggcgagatcgtgcccatggaggtgaacttcaacttcgacgaccccaacctgatcatcctgcctctggcctttggcaagagacagggcagagaattcatctggaacgacctgctgtccctggaaaccggcagcctgaagctggccaacggaagagtgatcgagaagacactgtacaacagaagaacccggcaggatgagcctgccctgttcgtggccctgaccttcgagcggcgggaggtcctggactcctccaatatcaaaccaatgaacctgatcggcgtggcaagaggcgaaaacatccccgccgtgatcgccctgaccgaccccgagggctgcccactgagccggtttaaggatagcctgggaaacccaacccacatcctgagaatcggcgagagctataaggagaagcagcggaccatccaggccaagaaggaggtggagcagcggagagccggcggctacagccggaagtacgccagcaaagccaagaatctggcagacgatatggtgagaaacaccgctagagatctgctgtactacgccgtgacccaggatgccatgctgatcttcgccaacctgagccggggcttcggccggcagggcaagcggaccttcatggccgagagacagtacacacggatggaggactggctgaccgccaagctggcctacgagggcctgagcaagacctacctgtccaagacactggcccagtacacctccaagacatgcagcaactgtgggtttaccatcaccagcgccgactacgacagggtgctggagaagctgaagaagacagcaacaggctggatgaccacaattaacggcaaggagctgaaggtggagggccagattacctactacaacagatacaagagacagaacgtagtcaaggacctgtccgtcgagctggatagactgagcgaagaatctgtgaacaacgacatctcctcctggacaaagggcagaagcggagaagctctgagcctcctgaagaaaagattctcccatagacccgtgcaggagaagttcgtgtgcctgaactgcggcttcgagacacacgcagccgagcaagccgccctgaacatcgccagatcctggctgttcctgcggagccaggagtacaagaaataccagacaaacaagacaaccggcaacaccgataagagagccttcgtcgagacctggcagtccttttaccggaagaagcttaaggaggtgtggaaacctgccgtgcggtctggcggatctggcggaggctccaccagccccaagaaaaagagaaaagtctaagctgccttctgcggggcttgccttctggccatgcccttcttctctcccttgcacctgtacctcttggtctttgaataaagcctgagtaggaaggctagcaaaaaaaaaaaaaaaaaaaaaaaaaaaaaaaaaaaaaaaaaaaaaaaaaaaaaaaaaaaaaaaaaaaaaaaaaaaaaaaa

SEQ ID NO: 10325 - RNA, 8784 nt, synthetic construct
  source 1..8784: mol_type = other RNA
aggaaataagagagaaaagaagagtaagaagaaatataagagccaccatggcccctaagaagaagcgtaaagtgagccggatgaaccacgaccaggagttcgacccccctaaggtgtaccctcccgtccccgccgagaagagaaagcccatccgggtcctgagcctgttcgatggcatcgccaccggtctgctggtgctgaaggacctgggcatccaggtggataggtacattgcctccgaggtgtgcgaggactccatcaccgtgggaatggtgcgtcatcagggcaagatcatgtacgtgggcgacgtgcggagcgtgacacagaagcatatccaggagtggggccctttcgacctggtgatcggcggcagcccttgcaatgacctgagcatcgtgaacccagcccggaagggcctgtacgagggaaccggcagactgttcttcgagttttacagactgctgcacgacgcccggcctaaggaaggcgacgaccggcccttcttttggctgttcgagaatgtggtggccatgggagtcagcgacaagcgggatattagccggttcctggagagcaaccccgtgatgatcgatgccaaggaagtgagcgccgcccaccgggccagatacttctggggcaatctgcctggcatgaacagacccctggccagcaccgtgaacgacaagctggagctgcaggagtgcctggagcacggccggatcgccaagttcagcaaggtgagaaccatcaccacccgaagcaacagcatcaaacaaggcaaggaccagcactttcctgtgttcatgaacgagaaggaggacatcctgtggtgtaccgagatggagagagtgttcgggttcccagtccactacacagatgtcagcaacatgtctagactggccagacagagactgctgggaagaagctggtccgtccctgtgatcagacacctgttcgcccctctgaaggagtacttcgcctgcgtgagcagcggcaacagcaacgccaacagccggggccccagcttctctagcggcctggtgccactgtccctgagagggagccacatgggccccatggagatctacaaaaccgtgagcgcctggaagcggcagcctgtgcgcgtgctgagcctgtttcggaatatcgataaagtcctgaaaagcctgggattcctggagagcggctctggctccggcggtggcaccctgaagtacgtggaggatgtgacaaacgtggtcagacgggatgtggagaagtggggccccttcgatctggtgtacggcagcacccaacccctgggcagctcttgtgaccggtgccctggctggtacatgtttcagttccaccggatcctgcagtacgccctgccgagacaggagtcccagcggccattcttttggattttcatggacaacttgctgctgaccgaggatgaccaggaaactaccactcggttcctgcagaccgaagccgtgaccctgcaggacgtgagaggccgggactaccagaacgccatgcgggtgtggtccaacatccctggactgaaaagcaagcacgcacctctgacccctaaagaagaggagtacctgcaggcccaggtgcggagcagaagcaagctggacgcccctaaggtggatctgctggtgaagaattgcctcctgcccctgagagagtacttcaagtatttcagccagaatagtctgcccctgggaggcagcggcggcggcggcccccagggcgccagaagacaggccttcctggccttcggcgacgtgaccgtggacttcacccagaaggagtggagactgctgagccccgcccagagagccctgtacagagaggtgaccctggagaactacagccacctggtgagcctgggcatcctgcacagcaagcccgagctgatcagaagactggagcagggcgaggtgccctggggcgaggagagaagaagaagacccggccccggcggcccaagcagcggcgcccctcctcccagcggcggcaggcggcccaagcagcggcgcccctcctcccagcggcggcagcccagccggctccccaacctctaccgaggagggcacctctgagtccgccacccccgagagcggccctggcacctccaccgagcccagcgagggcagcgcacccggcagccctgccggcagccccacctccacagaggagggaaccagcaccgagcccagcgaaggcagcgccccaggcaccagcaccgagcctagtgagcaggagattaaacggatcaacaagatcagaagaagacttgtgaaagacagcaacaccaagaaggccggcaagacaggccccatgaaaaccctgctggttagagtgatgacacccgatctgagagagcggctggaaaacctgagaaagaagcctgaaaatatcccccagcccatcagcaatacatctagagccaacctgaataagctgctgaccgattacaccgaaatgaagaaggcgatcctgcatgtgtactgggaagagttccagaaggaccctgtgggcctgatgagccgggtggcccagcctgccagcaagaagatcgatcagaacaagctgaaacctgagatggacgagaagggcaacctgaccaccgccggctttgcctgctctcagtgtggccagcccctgttcgtgtacaagctggagcaggtgtctgagaagggcaaggcttacaccaactacttcggacggtgcaatgtggccgagcacgaaaagctgatcctgctggcccagctgaagcccgagaaggatagcgacgaagccgtgacatatagcctgggaaagtttgggcagagggccctggatttctacagcattcatgtgaccaaggagtccacccaccccgtgaagcccctggcccagatcgccggaaacagatacgcctccggacctgtgggaaaggccctgagcgacgcatgtatgggcacaatcgcctccttcctgtctaagtaccaggacatcatcatcgaacaccagaaggtggtgaagggcaaccagaagagactggagagcctgcgggagctggccggcaaggaaaacctggaataccctagcgtgaccctgccacctcagcctcacaccaaggagggcgttgatgcctacaacgaagtgatcgcccgggtgcgaatgtgggtgaacctgaacctgtggcagaagctgaagctaagcagagatgatgccaagcctctgctgagactgaagggattcccttcctttcctctggtcgagagacaggccaacgaagtggactggtgggacatggtgtgtaacgtgaagaagctgatcaacgagaaaaaggaggatggcaaggtgttttggcagaatctggctggctacaagagacaggaagccctgagaccatacctgagcagcgaggaagatcggaagaagggaaagaaattcgctcggtaccagctgggcgacctgctgctgcacctggaaaagaagcacggcgaggactggggaaaggtgtacgacgaggcctgggagcggattgacaagaaagtggaaggcctgagcaagcacatcaagctggaagaggaacggagaagcgaggacgcccagagcaaggccgccctgaccgactggctgcgggctaaggccagcttcgtgatcgagggcctgaaggaggccgacaaggacgagttctgcagatgcgagctgaagctgcagaagtggtacggggacctgcggggaaagcccttcgccatcgaagccgagaacagcatcctggacatcagcggcttcagcaagcagtacaactgtgccttcatctggcagaaggacggcgtgaagaagctgaacctgtacctgatcatcaactacttcaagggcggcaagctgcggttcaagaagatcaaacctgaagccttcgaagccaacagattctacaccgtgatcaacaaaaagagcggcgagatcgtgcccatggaggtgaacttcaacttcgacgaccccaacctgatcatcctgcctctggcctttggcaagagacagggcagagaattcatctggaacgacctgctgtccctggaaaccggcagcctgaagctggccaacggaagagtgatcgagaagacactgtacaacagaagaacccggcaggatgagcctgccctgttcgtggccctgaccttcgagcggcgggaggtcctggactcctccaatatcaaaccaatgaacctgatcggcgtggcaagaggcgaaaacatccccgccgtgatcgccctgaccgaccccgagggctgcccactgagccggtttaaggatagcctgggaaacccaacccacatcctgagaatcggcgagagctataaggagaagcagcggaccatccaggccaagaaggaggtggagcagcggagagccggcggctacagccggaagtacgccagcaaagccaagaatctggcagacgatatggtgagaaacaccgctagagatctgctgtactacgccgtgacccaggatgccatgctgatcttcgccaacctgagccggggcttcggccggcagggcaagcggaccttcatggccgagagacagtacacacggatggaggactggctgaccgccaagctggcctacgagggcctgagcaagacctacctgtccaagacactggcccagtacacctccaagacatgcagcaactgtgggtttaccatcaccagcgccgactacgacagggtgctggagaagctgaagaagacagcaacaggctggatgaccacaattaacggcaaggagctgaaggtggagggccagattacctactacaacagatacaagagacagaacgtagtcaaggacctgtccgtcgagctggatagactgagcgaagaatctgtgaacaacgacatctcctcctggacaaagggcagaagcggagaagctctgagcctcctgaagaaaagattctcccatagacccgtgcaggagaagttcgtgtgcctgaactgcggcttcgagacacacgcagccgagcaagccgccctgaacatcgccagatcctggctgttcctgcggagccaggagtacaagaaataccagacaaacaagacaaccggcaacaccgataagagagccttcgtcgagacctggcagtccttttaccggaagaagcttaaggaggtgtggaaacctgccgtgcggtctggcggatctggcggaggctccaccagccccaagaaaaagagaaaagtctaagctgccttctgcggggcttgccttctggccatgcccttcttctctcccttgcacctgtacctcttggtctttgaataaagcctgagtaggaaggctagcaaaaaaaaaaaaaaaaaaaaaaaaaaaaaaaaaaaaaaaaaaaaaaaaaaaaaaaaaaaaaaaaaaaaaaaaaaaaaaaagcccagccggctccccaacctctaccgaggagggcacctctgagtccgccacccccgagagcggccctggcacctccaccgagcccagcgagggcagcgcacccggcagccctgccggcagccccacctccacagaggagggaaccagcaccgagcccagcgaaggcagcgccccaggcaccagcaccgagcctagtgagcaggagattaaacggatcaacaagatcagaagaagacttgtgaaagacagcaacaccaagaaggccggcaagacaggccccatgaaaaccctgctggttagagtgatgacacccgatctgagagagcggctggaaaacctgagaaagaagcctgaaaatatcccccagcccatcagcaatacatctagagccaacctgaataagctgctgaccgattacaccgaaatgaagaaggcgatcctgcatgtgtactgggaagagttccagaaggaccctgtgggcctgatgagccgggtggcccagcctgccagcaagaagatcgatcagaacaagctgaaacctgagatggacgagaagggcaacctgaccaccgccggctttgcctgctctcagtgtggccagcccctgttcgtgtacaagctggagcaggtgtctgagaagggcaaggcttacaccaactacttcggacggtgcaatgtggccgagcacgaaaagctgatcctgctggcccagctgaagcccgagaaggatagcgacgaagccgtgacatatagcctgggaaagtttgggcagagggccctggatttctacagcattcatgtgaccaaggagtccacccaccccgtgaagcccctggcccagatcgccggaaacagatacgcctccggacctgtgggaaaggccctgagcgacgcatgtatgggcacaatcgcctccttcctgtctaagtaccaggacatcatcatcgaacaccagaaggtggtgaagggcaaccagaagagactggagagcctgcgggagctggccggcaaggaaaacctggaataccctagcgtgaccctgccacctcagcctcacaccaaggagggcgttgatgcctacaacgaagtgatcgcccgggtgcgaatgtgggtgaacctgaacctgtggcagaagctgaagctaagcagagatgatgccaagcctctgctgagactgaagggattcccttcctttcctctggtcgagagacaggccaacgaagtggactggtgggacatggtgtgtaacgtgaagaagctgatcaacgagaaaaaggaggatggcaaggtgttttggcagaatctggctggctacaagagacaggaagccctgagaccatacctgagcagcgaggaagatcggaagaagggaaagaaattcgctcggtaccagctgggcgacctgctgctgcacctggaaaagaagcacggcgaggactggggaaaggtgtacgacgaggcctgggagcggattgacaagaaagtggaaggcctgagcaagcacatcaagctggaagaggaacggagaagcgaggacgcccagagcaaggccgccctgaccgactggctgcgggctaaggccagcttcgtgatcgagggcctgaaggaggccgacaaggacgagttctgcagatgcgagctgaagctgcagaagtggtacggggacctgcggggaaagcccttcgccatcgaagccgagaacagcatcctggacatcagcggcttcagcaagcagtacaactgtgccttcatctggcagaaggacggcgtgaagaagctgaacctgtacctgatcatcaactacttcaagggcggcaagctgcggttcaagaagatcaaacctgaagccttcgaagccaacagattctacaccgtgatcaacaaaaagagcggcgagatcgtgcccatggaggtgaacttcaacttcgacgaccccaacctgatcatcctgcctctggcctttggcaagagacagggcagagaattcatctggaacgacctgctgtccctggaaaccggcagcctgaagctggccaacggaagagtgatcgagaagacactgtacaacagaagaacccggcaggatgagcctgccctgttcgtggccctgaccttcgagcggcgggaggtcctggactcctccaatatcaaaccaatgaacctgatcggcgtggcaagaggcgaaaacatccccgccgtgatcgccctgaccgaccccgagggctgcccactgagccggtttaaggatagcctgggaaacccaacccacatcctgagaatcggcgagagctataaggagaagcagcggaccatccaggccaagaaggaggtggagcagcggagagccggcggctacagccggaagtacgccagcaaagccaagaatctggcagacgatatggtgagaaacaccgctagagatctgctgtactacgccgtgacccaggatgccatgctgatcttcgccaacctgagccggggcttcggccggcagggcaagcggaccttcatggccgagagacagtacacacggatggaggactggctgaccgccaagctggcctacgagggcctgagcaagacctacctgtccaagacactggcccagtacacctccaagacatgcagcaactgtgggtttaccatcaccagcgccgactacgacagggtgctggagaagctgaagaagacagcaacaggctggatgaccacaattaacggcaaggagctgaaggtggagggccagattacctactacaacagatacaagagacagaacgtagtcaaggacctgtccgtcgagctggatagactgagcgaagaatctgtgaacaacgacatctcctcctggacaaagggcagaagcggagaagctctgagcctcctgaagaaaagattctcccatagacccgtgcaggagaagttcgtgtgcctgaactgcggcttcgagacacacgcagccgagcaagccgccctgaacatcgccagatcctggctgttcctgcggagccaggagtacaagaaataccagacaaacaagacaaccggcaacaccgataagagagccttcgtcgagacctggcagtccttttaccggaagaagcttaaggaggtgtggaaacctgccgtgcggtctggcggatctggcggaggctccaccagccccaagaaaaagagaaaagtctaagctgccttctgcggggcttgccttctggccatgcccttcttctctcccttgcacctgtacctcttggtctttgaataaagcctgagtaggaaggctagcaaaaaaaaaaaaaaaaaaaaaaaaaaaaaaaaaaaaaaaaaaaaaaaaaaaaaaaaaaaaaaaaaaaaaaaaaaaaaaaa

SEQ ID NO: 10326 - RNA, 8787 nt, synthetic construct
  source 1..8787: mol_type = other RNA
aggaaataagagagaaaagaagagtaagaagaaatataagagccaccatggcccctaagaagaagcgtaaagtgagccggatgaaccacgaccaggagttcgacccccctaaggtgtaccctcccgtccccgccgagaagagaaagcccatccgggtcctgagcctgttcgatggcatcgccaccggtctgctggtgctgaaggacctgggcatccaggtggataggtacattgcctccgaggtgtgcgaggactccatcaccgtgggaatggtgcgtcatcagggcaagatcatgtacgtgggcgacgtgcggagcgtgacacagaagcatatccaggagtggggccctttcgacctggtgatcggcggcagcccttgcaatgacctgagcatcgtgaacccagcccggaagggcctgtacgagggaaccggcagactgttcttcgagttttacagactgctgcacgacgcccggcctaaggaaggcgacgaccggcccttcttttggctgttcgagaatgtggtggccatgggagtcagcgacaagcgggatattagccggttcctggagagcaaccccgtgatgatcgatgccaaggaagtgagcgccgcccaccgggccagatacttctggggcaatctgcctggcatgaacagacccctggccagcaccgtgaacgacaagctggagctgcaggagtgcctggagcacggccggatcgccaagttcagcaaggtgagaaccatcaccacccgaagcaacagcatcaaacaaggcaaggaccagcactttcctgtgttcatgaacgagaaggaggacatcctgtggtgtaccgagatggagagagtgttcgggttcccagtccactacacagatgtcagcaacatgtctagactggccagacagagactgctgggaagaagctggtccgtccctgtgatcagacacctgttcgcccctctgaaggagtacttcgcctgcgtgagcagcggcaacagcaacgccaacagccggggccccagcttctctagcggcctggtgccactgtccctgagagggagccacatgggccccatggagatctacaaaaccgtgagcgcctggaagcggcagcctgtgcgcgtgctgagcctgtttcggaatatcgataaagtcctgaaaagcctgggattcctggagagcggctctggctccggcggtggcaccctgaagtacgtggaggatgtgacaaacgtggtcagacgggatgtggagaagtggggccccttcgatctggtgtacggcagcacccaacccctgggcagctcttgtgaccggtgccctggctggtacatgtttcagttccaccggatcctgcagtacgccctgccgagacaggagtcccagcggccattcttttggattttcatggacaacttgctgctgaccgaggatgaccaggaaactaccactcggttcctgcagaccgaagccgtgaccctgcaggacgtgagaggccgggactaccagaacgccatgcgggtgtggtccaacatccctggactgaaaagcaagcacgcacctctgacccctaaagaagaggagtacctgcaggcccaggtgcggagcagaagcaagctggacgcccctaaggtggatctgctggtgaagaattgcctcctgcccctgagagagtacttcaagtatttcagccagaatagtctgcccctgggaggcagcggcggcggctgctaccaggacagcgtgaccttcgacgacgtggccgtggacttcacccaggaggagtggaccctgctggaccccacccagaggagcctgtacagcgacgtgatgctggagaactacaagaacctggccaccgtgggcggccagatcatcaagcccagcctgatcagctggctggagcaggaggagagcaggaccgtgaggggcggcgtgctgcagggcaggaagacccagtggaggggcaccggcggcccaagcagcggcgcccctcctcccagcggcggcaggcggcccaagcagcggcgcccctcctcccagcggcggcagcccagccggctccccaacctctaccgaggagggcacctctgagtccgccacccccgagagcggccctggcacctccaccgagcccagcgagggcagcgcacccggcagccctgccggcagccccacctccacagaggagggaaccagcaccgagcccagcgaaggcagcgccccaggcaccagcaccgagcctagtgagcaggagattaaacggatcaacaagatcagaagaagacttgtgaaagacagcaacaccaagaaggccggcaagacaggccccatgaaaaccctgctggttagagtgatgacacccgatctgagagagcggctggaaaacctgagaaagaagcctgaaaatatcccccagcccatcagcaatacatctagagccaacctgaataagctgctgaccgattacaccgaaatgaagaaggcgatcctgcatgtgtactgggaagagttccagaaggaccctgtgggcctgatgagccgggtggcccagcctgccagcaagaagatcgatcagaacaagctgaaacctgagatggacgagaagggcaacctgaccaccgccggctttgcctgctctcagtgtggccagcccctgttcgtgtacaagctggagcaggtgtctgagaagggcaaggcttacaccaactacttcggacggtgcaatgtggccgagcacgaaaagctgatcctgctggcccagctgaagcccgagaaggatagcgacgaagccgtgacatatagcctgggaaagtttgggcagagggccctggatttctacagcattcatgtgaccaaggagtccacccaccccgtgaagcccctggcccagatcgccggaaacagatacgcctccggacctgtgggaaaggccctgagcgacgcatgtatgggcacaatcgcctccttcctgtctaagtaccaggacatcatcatcgaacaccagaaggtggtgaagggcaaccagaagagactggagagcctgcgggagctggccggcaaggaaaacctggaataccctagcgtgaccctgccacctcagcctcacaccaaggagggcgttgatgcctacaacgaagtgatcgcccgggtgcgaatgtgggtgaacctgaacctgtggcagaagctgaagctaagcagagatgatgccaagcctctgctgagactgaagggattcccttcctttcctctggtcgagagacaggccaacgaagtggactggtgggacatggtgtgtaacgtgaagaagctgatcaacgagaaaaaggaggatggcaaggtgttttggcagaatctggctggctacaagagacaggaagccctgagaccatacctgagcagcgaggaagatcggaagaagggaaagaaattcgctcggtaccagctgggcgacctgctgctgcacctggaaaagaagcacggcgaggactggggaaaggtgtacgacgaggcctgggagcggattgacaagaaagtggaaggcctgagcaagcacatcaagctggaagaggaacggagaagcgaggacgcccagagcaaggccgccctgaccgactggctgcgggctaaggccagcttcgtgatcgagggcctgaaggaggccgacaaggacgagttctgcagatgcgagctgaagctgcagaagtggtacggggacctgcggggaaagcccttcgccatcgaagccgagaacagcatcctggacatcagcggcttcagcaagcagtacaactgtgccttcatctggcagaaggacggcgtgaagaagctgaacctgtacctgatcatcaactacttcaagggcggcaagctgcggttcaagaagatcaaacctgaagccttcgaagccaacagattctacaccgtgatcaacaaaaagagcggcgagatcgtgcccatggaggtgaacttcaacttcgacgaccccaacctgatcatcctgcctctggcctttggcaagagacagggcagagaattcatctggaacgacctgctgtccctggaaaccggcagcctgaagctggccaacggaagagtgatcgagaagacactgtacaacagaagaacccggcaggatgagcctgccctgttcgtggccctgaccttcgagcggcgggaggtcctggactcctccaatatcaaaccaatgaacctgatcggcgtggcaagaggcgaaaacatccccgccgtgatcgccctgaccgaccccgagggctgcccactgagccggtttaaggatagcctgggaaacccaacccacatcctgagaatcggcgagagctataaggagaagcagcggaccatccaggccaagaaggaggtggagcagcggagagccggcggctacagccggaagtacgccagcaaagccaagaatctggcagacgatatggtgagaaacaccgctagagatctgctgtactacgccgtgacccaggatgccatgctgatcttcgccaacctgagccggggcttcggccggcagggcaagcggaccttcatggccgagagacagtacacacggatggaggactggctgaccgccaagctggcctacgagggcctgagcaagacctacctgtccaagacactggcccagtacacctccaagacatgcagcaactgtgggtttaccatcaccagcgccgactacgacagggtgctggagaagctgaagaagacagcaacaggctggatgaccacaattaacggcaaggagctgaaggtggagggccagattacctactacaacagatacaagagacagaacgtagtcaaggacctgtccgtcgagctggatagactgagcgaagaatctgtgaacaacgacatctcctcctggacaaagggcagaagcggagaagctctgagcctcctgaagaaaagattctcccatagacccgtgcaggagaagttcgtgtgcctgaactgcggcttcgagacacacgcagccgagcaagccgccctgaacatcgccagatcctggctgttcctgcggagccaggagtacaagaaataccagacaaacaagacaaccggcaacaccgataagagagccttcgtcgagacctggcagtccttttaccggaagaagcttaaggaggtgtggaaacctgccgtgcggtctggcggatctggcggaggctccaccagccccaagaaaaagagaaaagtctaagctgccttctgcggggcttgccttctggccatgcccttcttctctcccttgcacctgtacctcttggtctttgaataaagcctgagtaggaaggctagcaaaaaaaaaaaaaaaaaaaaaaaaaaaaaaaaaaaaaaaaaaaaaaaaaaaaaaaaaaaaaaaaaaaaaaaaaaaaaaaagcccagccggctccccaacctctaccgaggagggcacctctgagtccgccacccccgagagcggccctggcacctccaccgagcccagcgagggcagcgcacccggcagccctgccggcagccccacctccacagaggagggaaccagcaccgagcccagcgaaggcagcgccccaggcaccagcaccgagcctagtgagcaggagattaaacggatcaacaagatcagaagaagacttgtgaaagacagcaacaccaagaaggccggcaagacaggccccatgaaaaccctgctggttagagtgatgacacccgatctgagagagcggctggaaaacctgagaaagaagcctgaaaatatcccccagcccatcagcaatacatctagagccaacctgaataagctgctgaccgattacaccgaaatgaagaaggcgatcctgcatgtgtactgggaagagttccagaaggaccctgtgggcctgatgagccgggtggcccagcctgccagcaagaagatcgatcagaacaagctgaaacctgagatggacgagaagggcaacctgaccaccgccggctttgcctgctctcagtgtggccagcccctgttcgtgtacaagctggagcaggtgtctgagaagggcaaggcttacaccaactacttcggacggtgcaatgtggccgagcacgaaaagctgatcctgctggcccagctgaagcccgagaaggatagcgacgaagccgtgacatatagcctgggaaagtttgggcagagggccctggatttctacagcattcatgtgaccaaggagtccacccaccccgtgaagcccctggcccagatcgccggaaacagatacgcctccggacctgtgggaaaggccctgagcgacgcatgtatgggcacaatcgcctccttcctgtctaagtaccaggacatcatcatcgaacaccagaaggtggtgaagggcaaccagaagagactggagagcctgcgggagctggccggcaaggaaaacctggaataccctagcgtgaccctgccacctcagcctcacaccaaggagggcgttgatgcctacaacgaagtgatcgcccgggtgcgaatgtgggtgaacctgaacctgtggcagaagctgaagctaagcagagatgatgccaagcctctgctgagactgaagggattcccttcctttcctctggtcgagagacaggccaacgaagtggactggtgggacatggtgtgtaacgtgaagaagctgatcaacgagaaaaaggaggatggcaaggtgttttggcagaatctggctggctacaagagacaggaagccctgagaccatacctgagcagcgaggaagatcggaagaagggaaagaaattcgctcggtaccagctgggcgacctgctgctgcacctggaaaagaagcacggcgaggactggggaaaggtgtacgacgaggcctgggagcggattgacaagaaagtggaaggcctgagcaagcacatcaagctggaagaggaacggagaagcgaggacgcccagagcaaggccgccctgaccgactggctgcgggctaaggccagcttcgtgatcgagggcctgaaggaggccgacaaggacgagttctgcagatgcgagctgaagctgcagaagtggtacggggacctgcggggaaagcccttcgccatcgaagccgagaacagcatcctggacatcagcggcttcagcaagcagtacaactgtgccttcatctggcagaaggacggcgtgaagaagctgaacctgtacctgatcatcaactacttcaagggcggcaagctgcggttcaagaagatcaaacctgaagccttcgaagccaacagattctacaccgtgatcaacaaaaagagcggcgagatcgtgcccatggaggtgaacttcaacttcgacgaccccaacctgatcatcctgcctctggcctttggcaagagacagggcagagaattcatctggaacgacctgctgtccctggaaaccggcagcctgaagctggccaacggaagagtgatcgagaagacactgtacaacagaagaacccggcaggatgagcctgccctgttcgtggccctgaccttcgagcggcgggaggtcctggactcctccaatatcaaaccaatgaacctgatcggcgtggcaagaggcgaaaacatccccgccgtgatcgccctgaccgaccccgagggctgcccactgagccggtttaaggatagcctgggaaacccaacccacatcctgagaatcggcgagagctataaggagaagcagcggaccatccaggccaagaaggaggtggagcagcggagagccggcggctacagccggaagtacgccagcaaagccaagaatctggcagacgatatggtgagaaacaccgctagagatctgctgtactacgccgtgacccaggatgccatgctgatcttcgccaacctgagccggggcttcggccggcagggcaagcggaccttcatggccgagagacagtacacacggatggaggactggctgaccgccaagctggcctacgagggcctgagcaagacctacctgtccaagacactggcccagtacacctccaagacatgcagcaactgtgggtttaccatcaccagcgccgactacgacagggtgctggagaagctgaagaagacagcaacaggctggatgaccacaattaacggcaaggagctgaaggtggagggccagattacctactacaacagatacaagagacagaacgtagtcaaggacctgtccgtcgagctggatagactgagcgaagaatctgtgaacaacgacatctcctcctggacaaagggcagaagcggagaagctctgagcctcctgaagaaaagattctcccatagacccgtgcaggagaagttcgtgtgcctgaactgcggcttcgagacacacgcagccgagcaagccgccctgaacatcgccagatcctggctgttcctgcggagccaggagtacaagaaataccagacaaacaagacaaccggcaacaccgataagagagccttcgtcgagacctggcagtccttttaccggaagaagcttaaggaggtgtggaaacctgccgtgcggtctggcggatctggcggaggctccaccagccccaagaaaaagagaaaagtctaagctgccttctgcggggcttgccttctggccatgcccttcttctctcccttgcacctgtacctcttggtctttgaataaagcctgagtaggaaggctagcaaaaaaaaaaaaaaaaaaaaaaaaaaaaaaaaaaaaaaaaaaaaaaaaaaaaaaaaaaaaaaaaaaaaaaaaaaaaaaaa

SEQ ID NO: 10327 - RNA, 8787 nt, synthetic construct
  source 1..8787: mol_type = other RNA
aggaaataagagagaaaagaagagtaagaagaaatataagagccaccatggcccctaagaagaagcgtaaagtgagccggatgaaccacgaccaggagttcgacccccctaaggtgtaccctcccgtccccgccgagaagagaaagcccatccgggtcctgagcctgttcgatggcatcgccaccggtctgctggtgctgaaggacctgggcatccaggtggataggtacattgcctccgaggtgtgcgaggactccatcaccgtgggaatggtgcgtcatcagggcaagatcatgtacgtgggcgacgtgcggagcgtgacacagaagcatatccaggagtggggccctttcgacctggtgatcggcggcagcccttgcaatgacctgagcatcgtgaacccagcccggaagggcctgtacgagggaaccggcagactgttcttcgagttttacagactgctgcacgacgcccggcctaaggaaggcgacgaccggcccttcttttggctgttcgagaatgtggtggccatgggagtcagcgacaagcgggatattagccggttcctggagagcaaccccgtgatgatcgatgccaaggaagtgagcgccgcccaccgggccagatacttctggggcaatctgcctggcatgaacagacccctggccagcaccgtgaacgacaagctggagctgcaggagtgcctggagcacggccggatcgccaagttcagcaaggtgagaaccatcaccacccgaagcaacagcatcaaacaaggcaaggaccagcactttcctgtgttcatgaacgagaaggaggacatcctgtggtgtaccgagatggagagagtgttcgggttcccagtccactacacagatgtcagcaacatgtctagactggccagacagagactgctgggaagaagctggtccgtccctgtgatcagacacctgttcgcccctctgaaggagtacttcgcctgcgtgagcagcggcaacagcaacgccaacagccggggccccagcttctctagcggcctggtgccactgtccctgagagggagccacatgggccccatggagatctacaaaaccgtgagcgcctggaagcggcagcctgtgcgcgtgctgagcctgtttcggaatatcgataaagtcctgaaaagcctgggattcctggagagcggctctggctccggcggtggcaccctgaagtacgtggaggatgtgacaaacgtggtcagacgggatgtggagaagtggggccccttcgatctggtgtacggcagcacccaacccctgggcagctcttgtgaccggtgccctggctggtacatgtttcagttccaccggatcctgcagtacgccctgccgagacaggagtcccagcggccattcttttggattttcatggacaacttgctgctgaccgaggatgaccaggaaactaccactcggttcctgcagaccgaagccgtgaccctgcaggacgtgagaggccgggactaccagaacgccatgcgggtgtggtccaacatccctggactgaaaagcaagcacgcacctctgacccctaaagaagaggagtacctgcaggcccaggtgcggagcagaagcaagctggacgcccctaaggtggatctgctggtgaagaattgcctcctgcccctgagagagtacttcaagtatttcagccagaatagtctgcccctgggaggcagcggcggcggcttccaggccagcgtgaccttcaaggacgtggccgtggacttcacctgggaggagtggaggctgctggaccccccccagaaggagctgttctgggaggtgatgctggagaactacaggaacctggtgtgcctgggcctggccgacagcaacaaggacgtgatgatcagcgagctggagagcggcgagccccactggatccccaccggcggcgtgctgaggagctgctggcccggctgggagagcggcggcccaagcagcggcgcccctcctcccagcggcggcaggcggcccaagcagcggcgcccctcctcccagcggcggcagcccagccggctccccaacctctaccgaggagggcacctctgagtccgccacccccgagagcggccctggcacctccaccgagcccagcgagggcagcgcacccggcagccctgccggcagccccacctccacagaggagggaaccagcaccgagcccagcgaaggcagcgccccaggcaccagcaccgagcctagtgagcaggagattaaacggatcaacaagatcagaagaagacttgtgaaagacagcaacaccaagaaggccggcaagacaggccccatgaaaaccctgctggttagagtgatgacacccgatctgagagagcggctggaaaacctgagaaagaagcctgaaaatatcccccagcccatcagcaatacatctagagccaacctgaataagctgctgaccgattacaccgaaatgaagaaggcgatcctgcatgtgtactgggaagagttccagaaggaccctgtgggcctgatgagccgggtggcccagcctgccagcaagaagatcgatcagaacaagctgaaacctgagatggacgagaagggcaacctgaccaccgccggctttgcctgctctcagtgtggccagcccctgttcgtgtacaagctggagcaggtgtctgagaagggcaaggcttacaccaactacttcggacggtgcaatgtggccgagcacgaaaagctgatcctgctggcccagctgaagcccgagaaggatagcgacgaagccgtgacatatagcctgggaaagtttgggcagagggccctggatttctacagcattcatgtgaccaaggagtccacccaccccgtgaagcccctggcccagatcgccggaaacagatacgcctccggacctgtgggaaaggccctgagcgacgcatgtatgggcacaatcgcctccttcctgtctaagtaccaggacatcatcatcgaacaccagaaggtggtgaagggcaaccagaagagactggagagcctgcgggagctggccggcaaggaaaacctggaataccctagcgtgaccctgccacctcagcctcacaccaaggagggcgttgatgcctacaacgaagtgatcgcccgggtgcgaatgtgggtgaacctgaacctgtggcagaagctgaagctaagcagagatgatgccaagcctctgctgagactgaagggattcccttcctttcctctggtcgagagacaggccaacgaagtggactggtgggacatggtgtgtaacgtgaagaagctgatcaacgagaaaaaggaggatggcaaggtgttttggcagaatctggctggctacaagagacaggaagccctgagaccatacctgagcagcgaggaagatcggaagaagggaaagaaattcgctcggtaccagctgggcgacctgctgctgcacctggaaaagaagcacggcgaggactggggaaaggtgtacgacgaggcctgggagcggattgacaagaaagtggaaggcctgagcaagcacatcaagctggaagaggaacggagaagcgaggacgcccagagcaaggccgccctgaccgactggctgcgggctaaggccagcttcgtgatcgagggcctgaaggaggccgacaaggacgagttctgcagatgcgagctgaagctgcagaagtggtacggggacctgcggggaaagcccttcgccatcgaagccgagaacagcatcctggacatcagcggcttcagcaagcagtacaactgtgccttcatctggcagaaggacggcgtgaagaagctgaacctgtacctgatcatcaactacttcaagggcggcaagctgcggttcaagaagatcaaacctgaagccttcgaagccaacagattctacaccgtgatcaacaaaaagagcggcgagatcgtgcccatggaggtgaacttcaacttcgacgaccccaacctgatcatcctgcctctggcctttggcaagagacagggcagagaattcatctggaacgacctgctgtccctggaaaccggcagcctgaagctggccaacggaagagtgatcgagaagacactgtacaacagaagaacccggcaggatgagcctgccctgttcgtggccctgaccttcgagcggcgggaggtcctggactcctccaatatcaaaccaatgaacctgatcggcgtggcaagaggcgaaaacatccccgccgtgatcgccctgaccgaccccgagggctgcccactgagccggtttaaggatagcctgggaaacccaacccacatcctgagaatcggcgagagctataaggagaagcagcggaccatccaggccaagaaggaggtggagcagcggagagccggcggctacagccggaagtacgccagcaaagccaagaatctggcagacgatatggtgagaaacaccgctagagatctgctgtactacgccgtgacccaggatgccatgctgatcttcgccaacctgagccggggcttcggccggcagggcaagcggaccttcatggccgagagacagtacacacggatggaggactggctgaccgccaagctggcctacgagggcctgagcaagacctacctgtccaagacactggcccagtacacctccaagacatgcagcaactgtgggtttaccatcaccagcgccgactacgacagggtgctggagaagctgaagaagacagcaacaggctggatgaccacaattaacggcaaggagctgaaggtggagggccagattacctactacaacagatacaagagacagaacgtagtcaaggacctgtccgtcgagctggatagactgagcgaagaatctgtgaacaacgacatctcctcctggacaaagggcagaagcggagaagctctgagcctcctgaagaaaagattctcccatagacccgtgcaggagaagttcgtgtgcctgaactgcggcttcgagacacacgcagccgagcaagccgccctgaacatcgccagatcctggctgttcctgcggagccaggagtacaagaaataccagacaaacaagacaaccggcaacaccgataagagagccttcgtcgagacctggcagtccttttaccggaagaagcttaaggaggtgtggaaacctgccgtgcggtctggcggatctggcggaggctccaccagccccaagaaaaagagaaaagtctaagctgccttctgcggggcttgccttctggccatgcccttcttctctcccttgcacctgtacctcttggtctttgaataaagcctgagtaggaaggctagcaaaaaaaaaaaaaaaaaaaaaaaaaaaaaaaaaaaaaaaaaaaaaaaaaaaaaaaaaaaaaaaaaaaaaaaaaaaaaaaagcccagccggctccccaacctctaccgaggagggcacctctgagtccgccacccccgagagcggccctggcacctccaccgagcccagcgagggcagcgcacccggcagccctgccggcagccccacctccacagaggagggaaccagcaccgagcccagcgaaggcagcgccccaggcaccagcaccgagcctagtgagcaggagattaaacggatcaacaagatcagaagaagacttgtgaaagacagcaacaccaagaaggccggcaagacaggccccatgaaaaccctgctggttagagtgatgacacccgatctgagagagcggctggaaaacctgagaaagaagcctgaaaatatcccccagcccatcagcaatacatctagagccaacctgaataagctgctgaccgattacaccgaaatgaagaaggcgatcctgcatgtgtactgggaagagttccagaaggaccctgtgggcctgatgagccgggtggcccagcctgccagcaagaagatcgatcagaacaagctgaaacctgagatggacgagaagggcaacctgaccaccgccggctttgcctgctctcagtgtggccagcccctgttcgtgtacaagctggagcaggtgtctgagaagggcaaggcttacaccaactacttcggacggtgcaatgtggccgagcacgaaaagctgatcctgctggcccagctgaagcccgagaaggatagcgacgaagccgtgacatatagcctgggaaagtttgggcagagggccctggatttctacagcattcatgtgaccaaggagtccacccaccccgtgaagcccctggcccagatcgccggaaacagatacgcctccggacctgtgggaaaggccctgagcgacgcatgtatgggcacaatcgcctccttcctgtctaagtaccaggacatcatcatcgaacaccagaaggtggtgaagggcaaccagaagagactggagagcctgcgggagctggccggcaaggaaaacctggaataccctagcgtgaccctgccacctcagcctcacaccaaggagggcgttgatgcctacaacgaagtgatcgcccgggtgcgaatgtgggtgaacctgaacctgtggcagaagctgaagctaagcagagatgatgccaagcctctgctgagactgaagggattcccttcctttcctctggtcgagagacaggccaacgaagtggactggtgggacatggtgtgtaacgtgaagaagctgatcaacgagaaaaaggaggatggcaaggtgttttggcagaatctggctggctacaagagacaggaagccctgagaccatacctgagcagcgaggaagatcggaagaagggaaagaaattcgctcggtaccagctgggcgacctgctgctgcacctggaaaagaagcacggcgaggactggggaaaggtgtacgacgaggcctgggagcggattgacaagaaagtggaaggcctgagcaagcacatcaagctggaagaggaacggagaagcgaggacgcccagagcaaggccgccctgaccgactggctgcgggctaaggccagcttcgtgatcgagggcctgaaggaggccgacaaggacgagttctgcagatgcgagctgaagctgcagaagtggtacggggacctgcggggaaagcccttcgccatcgaagccgagaacagcatcctggacatcagcggcttcagcaagcagtacaactgtgccttcatctggcagaaggacggcgtgaagaagctgaacctgtacctgatcatcaactacttcaagggcggcaagctgcggttcaagaagatcaaacctgaagccttcgaagccaacagattctacaccgtgatcaacaaaaagagcggcgagatcgtgcccatggaggtgaacttcaacttcgacgaccccaacctgatcatcctgcctctggcctttggcaagagacagggcagagaattcatctggaacgacctgctgtccctggaaaccggcagcctgaagctggccaacggaagagtgatcgagaagacactgtacaacagaagaacccggcaggatgagcctgccctgttcgtggccctgaccttcgagcggcgggaggtcctggactcctccaatatcaaaccaatgaacctgatcggcgtggcaagaggcgaaaacatccccgccgtgatcgccctgaccgaccccgagggctgcccactgagccggtttaaggatagcctgggaaacccaacccacatcctgagaatcggcgagagctataaggagaagcagcggaccatccaggccaagaaggaggtggagcagcggagagccggcggctacagccggaagtacgccagcaaagccaagaatctggcagacgatatggtgagaaacaccgctagagatctgctgtactacgccgtgacccaggatgccatgctgatcttcgccaacctgagccggggcttcggccggcagggcaagcggaccttcatggccgagagacagtacacacggatggaggactggctgaccgccaagctggcctacgagggcctgagcaagacctacctgtccaagacactggcccagtacacctccaagacatgcagcaactgtgggtttaccatcaccagcgccgactacgacagggtgctggagaagctgaagaagacagcaacaggctggatgaccacaattaacggcaaggagctgaaggtggagggccagattacctactacaacagatacaagagacagaacgtagtcaaggacctgtccgtcgagctggatagactgagcgaagaatctgtgaacaacgacatctcctcctggacaaagggcagaagcggagaagctctgagcctcctgaagaaaagattctcccatagacccgtgcaggagaagttcgtgtgcctgaactgcggcttcgagacacacgcagccgagcaagccgccctgaacatcgccagatcctggctgttcctgcggagccaggagtacaagaaataccagacaaacaagacaaccggcaacaccgataagagagccttcgtcgagacctggcagtccttttaccggaagaagcttaaggaggtgtggaaacctgccgtgcggtctggcggatctggcggaggctccaccagccccaagaaaaagagaaaagtctaagctgccttctgcggggcttgccttctggccatgcccttcttctctcccttgcacctgtacctcttggtctttgaataaagcctgagtaggaaggctagcaaaaaaaaaaaaaaaaaaaaaaaaaaaaaaaaaaaaaaaaaaaaaaaaaaaaaaaaaaaaaaaaaaaaaaaaaaaaaaaa

SEQ ID NO: 10328 - RNA, 8787 nt, synthetic construct
  source 1..8787: mol_type = other RNA
aggaaataagagagaaaagaagagtaagaagaaatataagagccaccatggcccctaagaagaagcgtaaagtgagccggatgaaccacgaccaggagttcgacccccctaaggtgtaccctcccgtccccgccgagaagagaaagcccatccgggtcctgagcctgttcgatggcatcgccaccggtctgctggtgctgaaggacctgggcatccaggtggataggtacattgcctccgaggtgtgcgaggactccatcaccgtgggaatggtgcgtcatcagggcaagatcatgtacgtgggcgacgtgcggagcgtgacacagaagcatatccaggagtggggccctttcgacctggtgatcggcggcagcccttgcaatgacctgagcatcgtgaacccagcccggaagggcctgtacgagggaaccggcagactgttcttcgagttttacagactgctgcacgacgcccggcctaaggaaggcgacgaccggcccttcttttggctgttcgagaatgtggtggccatgggagtcagcgacaagcgggatattagccggttcctggagagcaaccccgtgatgatcgatgccaaggaagtgagcgccgcccaccgggccagatacttctggggcaatctgcctggcatgaacagacccctggccagcaccgtgaacgacaagctggagctgcaggagtgcctggagcacggccggatcgccaagttcagcaaggtgagaaccatcaccacccgaagcaacagcatcaaacaaggcaaggaccagcactttcctgtgttcatgaacgagaaggaggacatcctgtggtgtaccgagatggagagagtgttcgggttcccagtccactacacagatgtcagcaacatgtctagactggccagacagagactgctgggaagaagctggtccgtccctgtgatcagacacctgttcgcccctctgaaggagtacttcgcctgcgtgagcagcggcaacagcaacgccaacagccggggccccagcttctctagcggcctggtgccactgtccctgagagggagccacatgggccccatggagatctacaaaaccgtgagcgcctggaagcggcagcctgtgcgcgtgctgagcctgtttcggaatatcgataaagtcctgaaaagcctgggattcctggagagcggctctggctccggcggtggcaccctgaagtacgtggaggatgtgacaaacgtggtcagacgggatgtggagaagtggggccccttcgatctggtgtacggcagcacccaacccctgggcagctcttgtgaccggtgccctggctggtacatgtttcagttccaccggatcctgcagtacgccctgccgagacaggagtcccagcggccattcttttggattttcatggacaacttgctgctgaccgaggatgaccaggaaactaccactcggttcctgcagaccgaagccgtgaccctgcaggacgtgagaggccgggactaccagaacgccatgcgggtgtggtccaacatccctggactgaaaagcaagcacgcacctctgacccctaaagaagaggagtacctgcaggcccaggtgcggagcagaagcaagctggacgcccctaaggtggatctgctggtgaagaattgcctcctgcccctgagagagtacttcaagtatttcagccagaatagtctgcccctgggaggcagcggcggcggcatgatcaactaccagacccccgtgagcttcaaggacgtggtggtgggcttcacccaggaggagtggcacaggctgaaccccacccagagggccctgtacagggacgtgatgctggagacctacagcaacctggtgagcgtgggctacgagggcaccaagcccgacgtgatcctgaggctggagcaggaggaggccccctggatcggcgaggccgcctgcctgggctgccactgctgggaggacggcggcccaagcagcggcgcccctcctcccagcggcggcaggcggcccaagcagcggcgcccctcctcccagcggcggcagcccagccggctccccaacctctaccgaggagggcacctctgagtccgccacccccgagagcggccctggcacctccaccgagcccagcgagggcagcgcacccggcagccctgccggcagccccacctccacagaggagggaaccagcaccgagcccagcgaaggcagcgccccaggcaccagcaccgagcctagtgagcaggagattaaacggatcaacaagatcagaagaagacttgtgaaagacagcaacaccaagaaggccggcaagacaggccccatgaaaaccctgctggttagagtgatgacacccgatctgagagagcggctggaaaacctgagaaagaagcctgaaaatatcccccagcccatcagcaatacatctagagccaacctgaataagctgctgaccgattacaccgaaatgaagaaggcgatcctgcatgtgtactgggaagagttccagaaggaccctgtgggcctgatgagccgggtggcccagcctgccagcaagaagatcgatcagaacaagctgaaacctgagatggacgagaagggcaacctgaccaccgccggctttgcctgctctcagtgtggccagcccctgttcgtgtacaagctggagcaggtgtctgagaagggcaaggcttacaccaactacttcggacggtgcaatgtggccgagcacgaaaagctgatcctgctggcccagctgaagcccgagaaggatagcgacgaagccgtgacatatagcctgggaaagtttgggcagagggccctggatttctacagcattcatgtgaccaaggagtccacccaccccgtgaagcccctggcccagatcgccggaaacagatacgcctccggacctgtgggaaaggccctgagcgacgcatgtatgggcacaatcgcctccttcctgtctaagtaccaggacatcatcatcgaacaccagaaggtggtgaagggcaaccagaagagactggagagcctgcgggagctggccggcaaggaaaacctggaataccctagcgtgaccctgccacctcagcctcacaccaaggagggcgttgatgcctacaacgaagtgatcgcccgggtgcgaatgtgggtgaacctgaacctgtggcagaagctgaagctaagcagagatgatgccaagcctctgctgagactgaagggattcccttcctttcctctggtcgagagacaggccaacgaagtggactggtgggacatggtgtgtaacgtgaagaagctgatcaacgagaaaaaggaggatggcaaggtgttttggcagaatctggctggctacaagagacaggaagccctgagaccatacctgagcagcgaggaagatcggaagaagggaaagaaattcgctcggtaccagctgggcgacctgctgctgcacctggaaaagaagcacggcgaggactggggaaaggtgtacgacgaggcctgggagcggattgacaagaaagtggaaggcctgagcaagcacatcaagctggaagaggaacggagaagcgaggacgcccagagcaaggccgccctgaccgactggctgcgggctaaggccagcttcgtgatcgagggcctgaaggaggccgacaaggacgagttctgcagatgcgagctgaagctgcagaagtggtacggggacctgcggggaaagcccttcgccatcgaagccgagaacagcatcctggacatcagcggcttcagcaagcagtacaactgtgccttcatctggcagaaggacggcgtgaagaagctgaacctgtacctgatcatcaactacttcaagggcggcaagctgcggttcaagaagatcaaacctgaagccttcgaagccaacagattctacaccgtgatcaacaaaaagagcggcgagatcgtgcccatggaggtgaacttcaacttcgacgaccccaacctgatcatcctgcctctggcctttggcaagagacagggcagagaattcatctggaacgacctgctgtccctggaaaccggcagcctgaagctggccaacggaagagtgatcgagaagacactgtacaacagaagaacccggcaggatgagcctgccctgttcgtggccctgaccttcgagcggcgggaggtcctggactcctccaatatcaaaccaatgaacctgatcggcgtggcaagaggcgaaaacatccccgccgtgatcgccctgaccgaccccgagggctgcccactgagccggtttaaggatagcctgggaaacccaacccacatcctgagaatcggcgagagctataaggagaagcagcggaccatccaggccaagaaggaggtggagcagcggagagccggcggctacagccggaagtacgccagcaaagccaagaatctggcagacgatatggtgagaaacaccgctagagatctgctgtactacgccgtgacccaggatgccatgctgatcttcgccaacctgagccggggcttcggccggcagggcaagcggaccttcatggccgagagacagtacacacggatggaggactggctgaccgccaagctggcctacgagggcctgagcaagacctacctgtccaagacactggcccagtacacctccaagacatgcagcaactgtgggtttaccatcaccagcgccgactacgacagggtgctggagaagctgaagaagacagcaacaggctggatgaccacaattaacggcaaggagctgaaggtggagggccagattacctactacaacagatacaagagacagaacgtagtcaaggacctgtccgtcgagctggatagactgagcgaagaatctgtgaacaacgacatctcctcctggacaaagggcagaagcggagaagctctgagcctcctgaagaaaagattctcccatagacccgtgcaggagaagttcgtgtgcctgaactgcggcttcgagacacacgcagccgagcaagccgccctgaacatcgccagatcctggctgttcctgcggagccaggagtacaagaaataccagacaaacaagacaaccggcaacaccgataagagagccttcgtcgagacctggcagtccttttaccggaagaagcttaaggaggtgtggaaacctgccgtgcggtctggcggatctggcggaggctccaccagccccaagaaaaagagaaaagtctaagctgccttctgcggggcttgccttctggccatgcccttcttctctcccttgcacctgtacctcttggtctttgaataaagcctgagtaggaaggctagcaaaaaaaaaaaaaaaaaaaaaaaaaaaaaaaaaaaaaaaaaaaaaaaaaaaaaaaaaaaaaaaaaaaaaaaaaaaaaaaagcccagccggctccccaacctctaccgaggagggcacctctgagtccgccacccccgagagcggccctggcacctccaccgagcccagcgagggcagcgcacccggcagccctgccggcagccccacctccacagaggagggaaccagcaccgagcccagcgaaggcagcgccccaggcaccagcaccgagcctagtgagcaggagattaaacggatcaacaagatcagaagaagacttgtgaaagacagcaacaccaagaaggccggcaagacaggccccatgaaaaccctgctggttagagtgatgacacccgatctgagagagcggctggaaaacctgagaaagaagcctgaaaatatcccccagcccatcagcaatacatctagagccaacctgaataagctgctgaccgattacaccgaaatgaagaaggcgatcctgcatgtgtactgggaagagttccagaaggaccctgtgggcctgatgagccgggtggcccagcctgccagcaagaagatcgatcagaacaagctgaaacctgagatggacgagaagggcaacctgaccaccgccggctttgcctgctctcagtgtggccagcccctgttcgtgtacaagctggagcaggtgtctgagaagggcaaggcttacaccaactacttcggacggtgcaatgtggccgagcacgaaaagctgatcctgctggcccagctgaagcccgagaaggatagcgacgaagccgtgacatatagcctgggaaagtttgggcagagggccctggatttctacagcattcatgtgaccaaggagtccacccaccccgtgaagcccctggcccagatcgccggaaacagatacgcctccggacctgtgggaaaggccctgagcgacgcatgtatgggcacaatcgcctccttcctgtctaagtaccaggacatcatcatcgaacaccagaaggtggtgaagggcaaccagaagagactggagagcctgcgggagctggccggcaaggaaaacctggaataccctagcgtgaccctgccacctcagcctcacaccaaggagggcgttgatgcctacaacgaagtgatcgcccgggtgcgaatgtgggtgaacctgaacctgtggcagaagctgaagctaagcagagatgatgccaagcctctgctgagactgaagggattcccttcctttcctctggtcgagagacaggccaacgaagtggactggtgggacatggtgtgtaacgtgaagaagctgatcaacgagaaaaaggaggatggcaaggtgttttggcagaatctggctggctacaagagacaggaagccctgagaccatacctgagcagcgaggaagatcggaagaagggaaagaaattcgctcggtaccagctgggcgacctgctgctgcacctggaaaagaagcacggcgaggactggggaaaggtgtacgacgaggcctgggagcggattgacaagaaagtggaaggcctgagcaagcacatcaagctggaagaggaacggagaagcgaggacgcccagagcaaggccgccctgaccgactggctgcgggctaaggccagcttcgtgatcgagggcctgaaggaggccgacaaggacgagttctgcagatgcgagctgaagctgcagaagtggtacggggacctgcggggaaagcccttcgccatcgaagccgagaacagcatcctggacatcagcggcttcagcaagcagtacaactgtgccttcatctggcagaaggacggcgtgaagaagctgaacctgtacctgatcatcaactacttcaagggcggcaagctgcggttcaagaagatcaaacctgaagccttcgaagccaacagattctacaccgtgatcaacaaaaagagcggcgagatcgtgcccatggaggtgaacttcaacttcgacgaccccaacctgatcatcctgcctctggcctttggcaagagacagggcagagaattcatctggaacgacctgctgtccctggaaaccggcagcctgaagctggccaacggaagagtgatcgagaagacactgtacaacagaagaacccggcaggatgagcctgccctgttcgtggccctgaccttcgagcggcgggaggtcctggactcctccaatatcaaaccaatgaacctgatcggcgtggcaagaggcgaaaacatccccgccgtgatcgccctgaccgaccccgagggctgcccactgagccggtttaaggatagcctgggaaacccaacccacatcctgagaatcggcgagagctataaggagaagcagcggaccatccaggccaagaaggaggtggagcagcggagagccggcggctacagccggaagtacgccagcaaagccaagaatctggcagacgatatggtgagaaacaccgctagagatctgctgtactacgccgtgacccaggatgccatgctgatcttcgccaacctgagccggggcttcggccggcagggcaagcggaccttcatggccgagagacagtacacacggatggaggactggctgaccgccaagctggcctacgagggcctgagcaagacctacctgtccaagacactggcccagtacacctccaagacatgcagcaactgtgggtttaccatcaccagcgccgactacgacagggtgctggagaagctgaagaagacagcaacaggctggatgaccacaattaacggcaaggagctgaaggtggagggccagattacctactacaacagatacaagagacagaacgtagtcaaggacctgtccgtcgagctggatagactgagcgaagaatctgtgaacaacgacatctcctcctggacaaagggcagaagcggagaagctctgagcctcctgaagaaaagattctcccatagacccgtgcaggagaagttcgtgtgcctgaactgcggcttcgagacacacgcagccgagcaagccgccctgaacatcgccagatcctggctgttcctgcggagccaggagtacaagaaataccagacaaacaagacaaccggcaacaccgataagagagccttcgtcgagacctggcagtccttttaccggaagaagcttaaggaggtgtggaaacctgccgtgcggtctggcggatctggcggaggctccaccagccccaagaaaaagagaaaagtctaagctgccttctgcggggcttgccttctggccatgcccttcttctctcccttgcacctgtacctcttggtctttgaataaagcctgagtaggaaggctagcaaaaaaaaaaaaaaaaaaaaaaaaaaaaaaaaaaaaaaaaaaaaaaaaaaaaaaaaaaaaaaaaaaaaaaaaaaaaaaaa

SEQ ID NO: 10329 - RNA, 8787 nt, synthetic construct
  source 1..8787: mol_type = other RNA
aggaaataagagagaaaagaagagtaagaagaaatataagagccaccatggcccctaagaagaagcgtaaagtgagccggatgaaccacgaccaggagttcgacccccctaaggtgtaccctcccgtccccgccgagaagagaaagcccatccgggtcctgagcctgttcgatggcatcgccaccggtctgctggtgctgaaggacctgggcatccaggtggataggtacattgcctccgaggtgtgcgaggactccatcaccgtgggaatggtgcgtcatcagggcaagatcatgtacgtgggcgacgtgcggagcgtgacacagaagcatatccaggagtggggccctttcgacctggtgatcggcggcagcccttgcaatgacctgagcatcgtgaacccagcccggaagggcctgtacgagggaaccggcagactgttcttcgagttttacagactgctgcacgacgcccggcctaaggaaggcgacgaccggcccttcttttggctgttcgagaatgtggtggccatgggagtcagcgacaagcgggatattagccggttcctggagagcaaccccgtgatgatcgatgccaaggaagtgagcgccgcccaccgggccagatacttctggggcaatctgcctggcatgaacagacccctggccagcaccgtgaacgacaagctggagctgcaggagtgcctggagcacggccggatcgccaagttcagcaaggtgagaaccatcaccacccgaagcaacagcatcaaacaaggcaaggaccagcactttcctgtgttcatgaacgagaaggaggacatcctgtggtgtaccgagatggagagagtgttcgggttcccagtccactacacagatgtcagcaacatgtctagactggccagacagagactgctgggaagaagctggtccgtccctgtgatcagacacctgttcgcccctctgaaggagtacttcgcctgcgtgagcagcggcaacagcaacgccaacagccggggccccagcttctctagcggcctggtgccactgtccctgagagggagccacatgggccccatggagatctacaaaaccgtgagcgcctggaagcggcagcctgtgcgcgtgctgagcctgtttcggaatatcgataaagtcctgaaaagcctgggattcctggagagcggctctggctccggcggtggcaccctgaagtacgtggaggatgtgacaaacgtggtcagacgggatgtggagaagtggggccccttcgatctggtgtacggcagcacccaacccctgggcagctcttgtgaccggtgccctggctggtacatgtttcagttccaccggatcctgcagtacgccctgccgagacaggagtcccagcggccattcttttggattttcatggacaacttgctgctgaccgaggatgaccaggaaactaccactcggttcctgcagaccgaagccgtgaccctgcaggacgtgagaggccgggactaccagaacgccatgcgggtgtggtccaacatccctggactgaaaagcaagcacgcacctctgacccctaaagaagaggagtacctgcaggcccaggtgcggagcagaagcaagctggacgcccctaaggtggatctgctggtgaagaattgcctcctgcccctgagagagtacttcaagtatttcagccagaatagtctgcccctgggaggcagcggcggcggcaccgagggcctggtgatgttcgaggacgtggccgtgtacttcagcagggaggagtggggcctgctgaacgtgacccagaagggcctgtaccaggacgtgatgctggagaacttcgccctggtgagcagcctgggcctggcccccctgaggagccccgtgttcagccagctggagaacgacgagcagctgtgggtgcccagctgggtggacgagacccccgtgagcagggccgaggccaggaggggcggcccaagcagcggcgcccctcctcccagcggcggcaggcggcccaagcagcggcgcccctcctcccagcggcggcagcccagccggctccccaacctctaccgaggagggcacctctgagtccgccacccccgagagcggccctggcacctccaccgagcccagcgagggcagcgcacccggcagccctgccggcagccccacctccacagaggagggaaccagcaccgagcccagcgaaggcagcgccccaggcaccagcaccgagcctagtgagcaggagattaaacggatcaacaagatcagaagaagacttgtgaaagacagcaacaccaagaaggccggcaagacaggccccatgaaaaccctgctggttagagtgatgacacccgatctgagagagcggctggaaaacctgagaaagaagcctgaaaatatcccccagcccatcagcaatacatctagagccaacctgaataagctgctgaccgattacaccgaaatgaagaaggcgatcctgcatgtgtactgggaagagttccagaaggaccctgtgggcctgatgagccgggtggcccagcctgccagcaagaagatcgatcagaacaagctgaaacctgagatggacgagaagggcaacctgaccaccgccggctttgcctgctctcagtgtggccagcccctgttcgtgtacaagctggagcaggtgtctgagaagggcaaggcttacaccaactacttcggacggtgcaatgtggccgagcacgaaaagctgatcctgctggcccagctgaagcccgagaaggatagcgacgaagccgtgacatatagcctgggaaagtttgggcagagggccctggatttctacagcattcatgtgaccaaggagtccacccaccccgtgaagcccctggcccagatcgccggaaacagatacgcctccggacctgtgggaaaggccctgagcgacgcatgtatgggcacaatcgcctccttcctgtctaagtaccaggacatcatcatcgaacaccagaaggtggtgaagggcaaccagaagagactggagagcctgcgggagctggccggcaaggaaaacctggaataccctagcgtgaccctgccacctcagcctcacaccaaggagggcgttgatgcctacaacgaagtgatcgcccgggtgcgaatgtgggtgaacctgaacctgtggcagaagctgaagctaagcagagatgatgccaagcctctgctgagactgaagggattcccttcctttcctctggtcgagagacaggccaacgaagtggactggtgggacatggtgtgtaacgtgaagaagctgatcaacgagaaaaaggaggatggcaaggtgttttggcagaatctggctggctacaagagacaggaagccctgagaccatacctgagcagcgaggaagatcggaagaagggaaagaaattcgctcggtaccagctgggcgacctgctgctgcacctggaaaagaagcacggcgaggactggggaaaggtgtacgacgaggcctgggagcggattgacaagaaagtggaaggcctgagcaagcacatcaagctggaagaggaacggagaagcgaggacgcccagagcaaggccgccctgaccgactggctgcgggctaaggccagcttcgtgatcgagggcctgaaggaggccgacaaggacgagttctgcagatgcgagctgaagctgcagaagtggtacggggacctgcggggaaagcccttcgccatcgaagccgagaacagcatcctggacatcagcggcttcagcaagcagtacaactgtgccttcatctggcagaaggacggcgtgaagaagctgaacctgtacctgatcatcaactacttcaagggcggcaagctgcggttcaagaagatcaaacctgaagccttcgaagccaacagattctacaccgtgatcaacaaaaagagcggcgagatcgtgcccatggaggtgaacttcaacttcgacgaccccaacctgatcatcctgcctctggcctttggcaagagacagggcagagaattcatctggaacgacctgctgtccctggaaaccggcagcctgaagctggccaacggaagagtgatcgagaagacactgtacaacagaagaacccggcaggatgagcctgccctgttcgtggccctgaccttcgagcggcgggaggtcctggactcctccaatatcaaaccaatgaacctgatcggcgtggcaagaggcgaaaacatccccgccgtgatcgccctgaccgaccccgagggctgcccactgagccggtttaaggatagcctgggaaacccaacccacatcctgagaatcggcgagagctataaggagaagcagcggaccatccaggccaagaaggaggtggagcagcggagagccggcggctacagccggaagtacgccagcaaagccaagaatctggcagacgatatggtgagaaacaccgctagagatctgctgtactacgccgtgacccaggatgccatgctgatcttcgccaacctgagccggggcttcggccggcagggcaagcggaccttcatggccgagagacagtacacacggatggaggactggctgaccgccaagctggcctacgagggcctgagcaagacctacctgtccaagacactggcccagtacacctccaagacatgcagcaactgtgggtttaccatcaccagcgccgactacgacagggtgctggagaagctgaagaagacagcaacaggctggatgaccacaattaacggcaaggagctgaaggtggagggccagattacctactacaacagatacaagagacagaacgtagtcaaggacctgtccgtcgagctggatagactgagcgaagaatctgtgaacaacgacatctcctcctggacaaagggcagaagcggagaagctctgagcctcctgaagaaaagattctcccatagacccgtgcaggagaagttcgtgtgcctgaactgcggcttcgagacacacgcagccgagcaagccgccctgaacatcgccagatcctggctgttcctgcggagccaggagtacaagaaataccagacaaacaagacaaccggcaacaccgataagagagccttcgtcgagacctggcagtccttttaccggaagaagcttaaggaggtgtggaaacctgccgtgcggtctggcggatctggcggaggctccaccagccccaagaaaaagagaaaagtctaagctgccttctgcggggcttgccttctggccatgcccttcttctctcccttgcacctgtacctcttggtctttgaataaagcctgagtaggaaggctagcaaaaaaaaaaaaaaaaaaaaaaaaaaaaaaaaaaaaaaaaaaaaaaaaaaaaaaaaaaaaaaaaaaaaaaaaaaaaaaaagcccagccggctccccaacctctaccgaggagggcacctctgagtccgccacccccgagagcggccctggcacctccaccgagcccagcgagggcagcgcacccggcagccctgccggcagccccacctccacagaggagggaaccagcaccgagcccagcgaaggcagcgccccaggcaccagcaccgagcctagtgagcaggagattaaacggatcaacaagatcagaagaagacttgtgaaagacagcaacaccaagaaggccggcaagacaggccccatgaaaaccctgctggttagagtgatgacacccgatctgagagagcggctggaaaacctgagaaagaagcctgaaaatatcccccagcccatcagcaatacatctagagccaacctgaataagctgctgaccgattacaccgaaatgaagaaggcgatcctgcatgtgtactgggaagagttccagaaggaccctgtgggcctgatgagccgggtggcccagcctgccagcaagaagatcgatcagaacaagctgaaacctgagatggacgagaagggcaacctgaccaccgccggctttgcctgctctcagtgtggccagcccctgttcgtgtacaagctggagcaggtgtctgagaagggcaaggcttacaccaactacttcggacggtgcaatgtggccgagcacgaaaagctgatcctgctggcccagctgaagcccgagaaggatagcgacgaagccgtgacatatagcctgggaaagtttgggcagagggccctggatttctacagcattcatgtgaccaaggagtccacccaccccgtgaagcccctggcccagatcgccggaaacagatacgcctccggacctgtgggaaaggccctgagcgacgcatgtatgggcacaatcgcctccttcctgtctaagtaccaggacatcatcatcgaacaccagaaggtggtgaagggcaaccagaagagactggagagcctgcgggagctggccggcaaggaaaacctggaataccctagcgtgaccctgccacctcagcctcacaccaaggagggcgttgatgcctacaacgaagtgatcgcccgggtgcgaatgtgggtgaacctgaacctgtggcagaagctgaagctaagcagagatgatgccaagcctctgctgagactgaagggattcccttcctttcctctggtcgagagacaggccaacgaagtggactggtgggacatggtgtgtaacgtgaagaagctgatcaacgagaaaaaggaggatggcaaggtgttttggcagaatctggctggctacaagagacaggaagccctgagaccatacctgagcagcgaggaagatcggaagaagggaaagaaattcgctcggtaccagctgggcgacctgctgctgcacctggaaaagaagcacggcgaggactggggaaaggtgtacgacgaggcctgggagcggattgacaagaaagtggaaggcctgagcaagcacatcaagctggaagaggaacggagaagcgaggacgcccagagcaaggccgccctgaccgactggctgcgggctaaggccagcttcgtgatcgagggcctgaaggaggccgacaaggacgagttctgcagatgcgagctgaagctgcagaagtggtacggggacctgcggggaaagcccttcgccatcgaagccgagaacagcatcctggacatcagcggcttcagcaagcagtacaactgtgccttcatctggcagaaggacggcgtgaagaagctgaacctgtacctgatcatcaactacttcaagggcggcaagctgcggttcaagaagatcaaacctgaagccttcgaagccaacagattctacaccgtgatcaacaaaaagagcggcgagatcgtgcccatggaggtgaacttcaacttcgacgaccccaacctgatcatcctgcctctggcctttggcaagagacagggcagagaattcatctggaacgacctgctgtccctggaaaccggcagcctgaagctggccaacggaagagtgatcgagaagacactgtacaacagaagaacccggcaggatgagcctgccctgttcgtggccctgaccttcgagcggcgggaggtcctggactcctccaatatcaaaccaatgaacctgatcggcgtggcaagaggcgaaaacatccccgccgtgatcgccctgaccgaccccgagggctgcccactgagccggtttaaggatagcctgggaaacccaacccacatcctgagaatcggcgagagctataaggagaagcagcggaccatccaggccaagaaggaggtggagcagcggagagccggcggctacagccggaagtacgccagcaaagccaagaatctggcagacgatatggtgagaaacaccgctagagatctgctgtactacgccgtgacccaggatgccatgctgatcttcgccaacctgagccggggcttcggccggcagggcaagcggaccttcatggccgagagacagtacacacggatggaggactggctgaccgccaagctggcctacgagggcctgagcaagacctacctgtccaagacactggcccagtacacctccaagacatgcagcaactgtgggtttaccatcaccagcgccgactacgacagggtgctggagaagctgaagaagacagcaacaggctggatgaccacaattaacggcaaggagctgaaggtggagggccagattacctactacaacagatacaagagacagaacgtagtcaaggacctgtccgtcgagctggatagactgagcgaagaatctgtgaacaacgacatctcctcctggacaaagggcagaagcggagaagctctgagcctcctgaagaaaagattctcccatagacccgtgcaggagaagttcgtgtgcctgaactgcggcttcgagacacacgcagccgagcaagccgccctgaacatcgccagatcctggctgttcctgcggagccaggagtacaagaaataccagacaaacaagacaaccggcaacaccgataagagagccttcgtcgagacctggcagtccttttaccggaagaagcttaaggaggtgtggaaacctgccgtgcggtctggcggatctggcggaggctccaccagccccaagaaaaagagaaaagtctaagctgccttctgcggggcttgccttctggccatgcccttcttctctcccttgcacctgtacctcttggtctttgaataaagcctgagtaggaaggctagcaaaaaaaaaaaaaaaaaaaaaaaaaaaaaaaaaaaaaaaaaaaaaaaaaaaaaaaaaaaaaaaaaaaaaaaaaaaaaaaa

SEQ ID NO: 10330 - RNA, 8787 nt, synthetic construct
  source 1..8787: mol_type = other RNA
aggaaataagagagaaaagaagagtaagaagaaatataagagccaccatggcccctaagaagaagcgtaaagtgagccggatgaaccacgaccaggagttcgacccccctaaggtgtaccctcccgtccccgccgagaagagaaagcccatccgggtcctgagcctgttcgatggcatcgccaccggtctgctggtgctgaaggacctgggcatccaggtggataggtacattgcctccgaggtgtgcgaggactccatcaccgtgggaatggtgcgtcatcagggcaagatcatgtacgtgggcgacgtgcggagcgtgacacagaagcatatccaggagtggggccctttcgacctggtgatcggcggcagcccttgcaatgacctgagcatcgtgaacccagcccggaagggcctgtacgagggaaccggcagactgttcttcgagttttacagactgctgcacgacgcccggcctaaggaaggcgacgaccggcccttcttttggctgttcgagaatgtggtggccatgggagtcagcgacaagcgggatattagccggttcctggagagcaaccccgtgatgatcgatgccaaggaagtgagcgccgcccaccgggccagatacttctggggcaatctgcctggcatgaacagacccctggccagcaccgtgaacgacaagctggagctgcaggagtgcctggagcacggccggatcgccaagttcagcaaggtgagaaccatcaccacccgaagcaacagcatcaaacaaggcaaggaccagcactttcctgtgttcatgaacgagaaggaggacatcctgtggtgtaccgagatggagagagtgttcgggttcccagtccactacacagatgtcagcaacatgtctagactggccagacagagactgctgggaagaagctggtccgtccctgtgatcagacacctgttcgcccctctgaaggagtacttcgcctgcgtgagcagcggcaacagcaacgccaacagccggggccccagcttctctagcggcctggtgccactgtccctgagagggagccacatgggccccatggagatctacaaaaccgtgagcgcctggaagcggcagcctgtgcgcgtgctgagcctgtttcggaatatcgataaagtcctgaaaagcctgggattcctggagagcggctctggctccggcggtggcaccctgaagtacgtggaggatgtgacaaacgtggtcagacgggatgtggagaagtggggccccttcgatctggtgtacggcagcacccaacccctgggcagctcttgtgaccggtgccctggctggtacatgtttcagttccaccggatcctgcagtacgccctgccgagacaggagtcccagcggccattcttttggattttcatggacaacttgctgctgaccgaggatgaccaggaaactaccactcggttcctgcagaccgaagccgtgaccctgcaggacgtgagaggccgggactaccagaacgccatgcgggtgtggtccaacatccctggactgaaaagcaagcacgcacctctgacccctaaagaagaggagtacctgcaggcccaggtgcggagcagaagcaagctggacgcccctaaggtggatctgctggtgaagaattgcctcctgcccctgagagagtacttcaagtatttcagccagaatagtctgcccctgggaggcagcggcggcggcttccaggagagcgtgaccttcaaggacgtgagcgtggacttcacccagggcgagtggggccagctggaccccgcccagaagaacctgtacagggacgtgatgctggagaactacaggaccctggtgagcctgggcctgcaggtgttcaagcccgaggtgatctacaggctggagaggggcgaggccccctggatcctggagagggagatcagcaggggcccctgccccgactggcccgagaccggcggcccaagcagcggcgcccctcctcccagcggcggcaggcggcccaagcagcggcgcccctcctcccagcggcggcagcccagccggctccccaacctctaccgaggagggcacctctgagtccgccacccccgagagcggccctggcacctccaccgagcccagcgagggcagcgcacccggcagccctgccggcagccccacctccacagaggagggaaccagcaccgagcccagcgaaggcagcgccccaggcaccagcaccgagcctagtgagcaggagattaaacggatcaacaagatcagaagaagacttgtgaaagacagcaacaccaagaaggccggcaagacaggccccatgaaaaccctgctggttagagtgatgacacccgatctgagagagcggctggaaaacctgagaaagaagcctgaaaatatcccccagcccatcagcaatacatctagagccaacctgaataagctgctgaccgattacaccgaaatgaagaaggcgatcctgcatgtgtactgggaagagttccagaaggaccctgtgggcctgatgagccgggtggcccagcctgccagcaagaagatcgatcagaacaagctgaaacctgagatggacgagaagggcaacctgaccaccgccggctttgcctgctctcagtgtggccagcccctgttcgtgtacaagctggagcaggtgtctgagaagggcaaggcttacaccaactacttcggacggtgcaatgtggccgagcacgaaaagctgatcctgctggcccagctgaagcccgagaaggatagcgacgaagccgtgacatatagcctgggaaagtttgggcagagggccctggatttctacagcattcatgtgaccaaggagtccacccaccccgtgaagcccctggcccagatcgccggaaacagatacgcctccggacctgtgggaaaggccctgagcgacgcatgtatgggcacaatcgcctccttcctgtctaagtaccaggacatcatcatcgaacaccagaaggtggtgaagggcaaccagaagagactggagagcctgcgggagctggccggcaaggaaaacctggaataccctagcgtgaccctgccacctcagcctcacaccaaggagggcgttgatgcctacaacgaagtgatcgcccgggtgcgaatgtgggtgaacctgaacctgtggcagaagctgaagctaagcagagatgatgccaagcctctgctgagactgaagggattcccttcctttcctctggtcgagagacaggccaacgaagtggactggtgggacatggtgtgtaacgtgaagaagctgatcaacgagaaaaaggaggatggcaaggtgttttggcagaatctggctggctacaagagacaggaagccctgagaccatacctgagcagcgaggaagatcggaagaagggaaagaaattcgctcggtaccagctgggcgacctgctgctgcacctggaaaagaagcacggcgaggactggggaaaggtgtacgacgaggcctgggagcggattgacaagaaagtggaaggcctgagcaagcacatcaagctggaagaggaacggagaagcgaggacgcccagagcaaggccgccctgaccgactggctgcgggctaaggccagcttcgtgatcgagggcctgaaggaggccgacaaggacgagttctgcagatgcgagctgaagctgcagaagtggtacggggacctgcggggaaagcccttcgccatcgaagccgagaacagcatcctggacatcagcggcttcagcaagcagtacaactgtgccttcatctggcagaaggacggcgtgaagaagctgaacctgtacctgatcatcaactacttcaagggcggcaagctgcggttcaagaagatcaaacctgaagccttcgaagccaacagattctacaccgtgatcaacaaaaagagcggcgagatcgtgcccatggaggtgaacttcaacttcgacgaccccaacctgatcatcctgcctctggcctttggcaagagacagggcagagaattcatctggaacgacctgctgtccctggaaaccggcagcctgaagctggccaacggaagagtgatcgagaagacactgtacaacagaagaacccggcaggatgagcctgccctgttcgtggccctgaccttcgagcggcgggaggtcctggactcctccaatatcaaaccaatgaacctgatcggcgtggcaagaggcgaaaacatccccgccgtgatcgccctgaccgaccccgagggctgcccactgagccggtttaaggatagcctgggaaacccaacccacatcctgagaatcggcgagagctataaggagaagcagcggaccatccaggccaagaaggaggtggagcagcggagagccggcggctacagccggaagtacgccagcaaagccaagaatctggcagacgatatggtgagaaacaccgctagagatctgctgtactacgccgtgacccaggatgccatgctgatcttcgccaacctgagccggggcttcggccggcagggcaagcggaccttcatggccgagagacagtacacacggatggaggactggctgaccgccaagctggcctacgagggcctgagcaagacctacctgtccaagacactggcccagtacacctccaagacatgcagcaactgtgggtttaccatcaccagcgccgactacgacagggtgctggagaagctgaagaagacagcaacaggctggatgaccacaattaacggcaaggagctgaaggtggagggccagattacctactacaacagatacaagagacagaacgtagtcaaggacctgtccgtcgagctggatagactgagcgaagaatctgtgaacaacgacatctcctcctggacaaagggcagaagcggagaagctctgagcctcctgaagaaaagattctcccatagacccgtgcaggagaagttcgtgtgcctgaactgcggcttcgagacacacgcagccgagcaagccgccctgaacatcgccagatcctggctgttcctgcggagccaggagtacaagaaataccagacaaacaagacaaccggcaacaccgataagagagccttcgtcgagacctggcagtccttttaccggaagaagcttaaggaggtgtggaaacctgccgtgcggtctggcggatctggcggaggctccaccagccccaagaaaaagagaaaagtctaagctgccttctgcggggcttgccttctggccatgcccttcttctctcccttgcacctgtacctcttggtctttgaataaagcctgagtaggaaggctagcaaaaaaaaaaaaaaaaaaaaaaaaaaaaaaaaaaaaaaaaaaaaaaaaaaaaaaaaaaaaaaaaaaaaaaaaaaaaaaaagcccagccggctccccaacctctaccgaggagggcacctctgagtccgccacccccgagagcggccctggcacctccaccgagcccagcgagggcagcgcacccggcagccctgccggcagccccacctccacagaggagggaaccagcaccgagcccagcgaaggcagcgccccaggcaccagcaccgagcctagtgagcaggagattaaacggatcaacaagatcagaagaagacttgtgaaagacagcaacaccaagaaggccggcaagacaggccccatgaaaaccctgctggttagagtgatgacacccgatctgagagagcggctggaaaacctgagaaagaagcctgaaaatatcccccagcccatcagcaatacatctagagccaacctgaataagctgctgaccgattacaccgaaatgaagaaggcgatcctgcatgtgtactgggaagagttccagaaggaccctgtgggcctgatgagccgggtggcccagcctgccagcaagaagatcgatcagaacaagctgaaacctgagatggacgagaagggcaacctgaccaccgccggctttgcctgctctcagtgtggccagcccctgttcgtgtacaagctggagcaggtgtctgagaagggcaaggcttacaccaactacttcggacggtgcaatgtggccgagcacgaaaagctgatcctgctggcccagctgaagcccgagaaggatagcgacgaagccgtgacatatagcctgggaaagtttgggcagagggccctggatttctacagcattcatgtgaccaaggagtccacccaccccgtgaagcccctggcccagatcgccggaaacagatacgcctccggacctgtgggaaaggccctgagcgacgcatgtatgggcacaatcgcctccttcctgtctaagtaccaggacatcatcatcgaacaccagaaggtggtgaagggcaaccagaagagactggagagcctgcgggagctggccggcaaggaaaacctggaataccctagcgtgaccctgccacctcagcctcacaccaaggagggcgttgatgcctacaacgaagtgatcgcccgggtgcgaatgtgggtgaacctgaacctgtggcagaagctgaagctaagcagagatgatgccaagcctctgctgagactgaagggattcccttcctttcctctggtcgagagacaggccaacgaagtggactggtgggacatggtgtgtaacgtgaagaagctgatcaacgagaaaaaggaggatggcaaggtgttttggcagaatctggctggctacaagagacaggaagccctgagaccatacctgagcagcgaggaagatcggaagaagggaaagaaattcgctcggtaccagctgggcgacctgctgctgcacctggaaaagaagcacggcgaggactggggaaaggtgtacgacgaggcctgggagcggattgacaagaaagtggaaggcctgagcaagcacatcaagctggaagaggaacggagaagcgaggacgcccagagcaaggccgccctgaccgactggctgcgggctaaggccagcttcgtgatcgagggcctgaaggaggccgacaaggacgagttctgcagatgcgagctgaagctgcagaagtggtacggggacctgcggggaaagcccttcgccatcgaagccgagaacagcatcctggacatcagcggcttcagcaagcagtacaactgtgccttcatctggcagaaggacggcgtgaagaagctgaacctgtacctgatcatcaactacttcaagggcggcaagctgcggttcaagaagatcaaacctgaagccttcgaagccaacagattctacaccgtgatcaacaaaaagagcggcgagatcgtgcccatggaggtgaacttcaacttcgacgaccccaacctgatcatcctgcctctggcctttggcaagagacagggcagagaattcatctggaacgacctgctgtccctggaaaccggcagcctgaagctggccaacggaagagtgatcgagaagacactgtacaacagaagaacccggcaggatgagcctgccctgttcgtggccctgaccttcgagcggcgggaggtcctggactcctccaatatcaaaccaatgaacctgatcggcgtggcaagaggcgaaaacatccccgccgtgatcgccctgaccgaccccgagggctgcccactgagccggtttaaggatagcctgggaaacccaacccacatcctgagaatcggcgagagctataaggagaagcagcggaccatccaggccaagaaggaggtggagcagcggagagccggcggctacagccggaagtacgccagcaaagccaagaatctggcagacgatatggtgagaaacaccgctagagatctgctgtactacgccgtgacccaggatgccatgctgatcttcgccaacctgagccggggcttcggccggcagggcaagcggaccttcatggccgagagacagtacacacggatggaggactggctgaccgccaagctggcctacgagggcctgagcaagacctacctgtccaagacactggcccagtacacctccaagacatgcagcaactgtgggtttaccatcaccagcgccgactacgacagggtgctggagaagctgaagaagacagcaacaggctggatgaccacaattaacggcaaggagctgaaggtggagggccagattacctactacaacagatacaagagacagaacgtagtcaaggacctgtccgtcgagctggatagactgagcgaagaatctgtgaacaacgacatctcctcctggacaaagggcagaagcggagaagctctgagcctcctgaagaaaagattctcccatagacccgtgcaggagaagttcgtgtgcctgaactgcggcttcgagacacacgcagccgagcaagccgccctgaacatcgccagatcctggctgttcctgcggagccaggagtacaagaaataccagacaaacaagacaaccggcaacaccgataagagagccttcgtcgagacctggcagtccttttaccggaagaagcttaaggaggtgtggaaacctgccgtgcggtctggcggatctggcggaggctccaccagccccaagaaaaagagaaaagtctaagctgccttctgcggggcttgccttctggccatgcccttcttctctcccttgcacctgtacctcttggtctttgaataaagcctgagtaggaaggctagcaaaaaaaaaaaaaaaaaaaaaaaaaaaaaaaaaaaaaaaaaaaaaaaaaaaaaaaaaaaaaaaaaaaaaaaaaaaaaaaa

SEQ ID NO: 10331 - RNA, 8787 nt, synthetic construct
  source 1..8787: mol_type = other RNA
aggaaataagagagaaaagaagagtaagaagaaatataagagccaccatggcccctaagaagaagcgtaaagtgagccggatgaaccacgaccaggagttcgacccccctaaggtgtaccctcccgtccccgccgagaagagaaagcccatccgggtcctgagcctgttcgatggcatcgccaccggtctgctggtgctgaaggacctgggcatccaggtggataggtacattgcctccgaggtgtgcgaggactccatcaccgtgggaatggtgcgtcatcagggcaagatcatgtacgtgggcgacgtgcggagcgtgacacagaagcatatccaggagtggggccctttcgacctggtgatcggcggcagcccttgcaatgacctgagcatcgtgaacccagcccggaagggcctgtacgagggaaccggcagactgttcttcgagttttacagactgctgcacgacgcccggcctaaggaaggcgacgaccggcccttcttttggctgttcgagaatgtggtggccatgggagtcagcgacaagcgggatattagccggttcctggagagcaaccccgtgatgatcgatgccaaggaagtgagcgccgcccaccgggccagatacttctggggcaatctgcctggcatgaacagacccctggccagcaccgtgaacgacaagctggagctgcaggagtgcctggagcacggccggatcgccaagttcagcaaggtgagaaccatcaccacccgaagcaacagcatcaaacaaggcaaggaccagcactttcctgtgttcatgaacgagaaggaggacatcctgtggtgtaccgagatggagagagtgttcgggttcccagtccactacacagatgtcagcaacatgtctagactggccagacagagactgctgggaagaagctggtccgtccctgtgatcagacacctgttcgcccctctgaaggagtacttcgcctgcgtgagcagcggcaacagcaacgccaacagccggggccccagcttctctagcggcctggtgccactgtccctgagagggagccacatgggccccatggagatctacaaaaccgtgagcgcctggaagcggcagcctgtgcgcgtgctgagcctgtttcggaatatcgataaagtcctgaaaagcctgggattcctggagagcggctctggctccggcggtggcaccctgaagtacgtggaggatgtgacaaacgtggtcagacgggatgtggagaagtggggccccttcgatctggtgtacggcagcacccaacccctgggcagctcttgtgaccggtgccctggctggtacatgtttcagttccaccggatcctgcagtacgccctgccgagacaggagtcccagcggccattcttttggattttcatggacaacttgctgctgaccgaggatgaccaggaaactaccactcggttcctgcagaccgaagccgtgaccctgcaggacgtgagaggccgggactaccagaacgccatgcgggtgtggtccaacatccctggactgaaaagcaagcacgcacctctgacccctaaagaagaggagtacctgcaggcccaggtgcggagcagaagcaagctggacgcccctaaggtggatctgctggtgaagaattgcctcctgcccctgagagagtacttcaagtatttcagccagaatagtctgcccctgggaggcagcggcggcggcatctgggacctggtgatgttcagggacgtggccgtggacttcagccaggaggagtgggagtgcctgaacagctaccagaggaacctgtacagggacgtgatcctggagaactacagcaacctggtgagcctgggctgcagcatcagcaagcccgacgtgatcaccctgctggagcagggcaaggagccctggatggtgatgagggacgagaagaggaggtggaccctggacctggagagcaggggcggcccaagcagcggcgcccctcctcccagcggcggcaggcggcccaagcagcggcgcccctcctcccagcggcggcagcccagccggctccccaacctctaccgaggagggcacctctgagtccgccacccccgagagcggccctggcacctccaccgagcccagcgagggcagcgcacccggcagccctgccggcagccccacctccacagaggagggaaccagcaccgagcccagcgaaggcagcgccccaggcaccagcaccgagcctagtgagcaggagattaaacggatcaacaagatcagaagaagacttgtgaaagacagcaacaccaagaaggccggcaagacaggccccatgaaaaccctgctggttagagtgatgacacccgatctgagagagcggctggaaaacctgagaaagaagcctgaaaatatcccccagcccatcagcaatacatctagagccaacctgaataagctgctgaccgattacaccgaaatgaagaaggcgatcctgcatgtgtactgggaagagttccagaaggaccctgtgggcctgatgagccgggtggcccagcctgccagcaagaagatcgatcagaacaagctgaaacctgagatggacgagaagggcaacctgaccaccgccggctttgcctgctctcagtgtggccagcccctgttcgtgtacaagctggagcaggtgtctgagaagggcaaggcttacaccaactacttcggacggtgcaatgtggccgagcacgaaaagctgatcctgctggcccagctgaagcccgagaaggatagcgacgaagccgtgacatatagcctgggaaagtttgggcagagggccctggatttctacagcattcatgtgaccaaggagtccacccaccccgtgaagcccctggcccagatcgccggaaacagatacgcctccggacctgtgggaaaggccctgagcgacgcatgtatgggcacaatcgcctccttcctgtctaagtaccaggacatcatcatcgaacaccagaaggtggtgaagggcaaccagaagagactggagagcctgcgggagctggccggcaaggaaaacctggaataccctagcgtgaccctgccacctcagcctcacaccaaggagggcgttgatgcctacaacgaagtgatcgcccgggtgcgaatgtgggtgaacctgaacctgtggcagaagctgaagctaagcagagatgatgccaagcctctgctgagactgaagggattcccttcctttcctctggtcgagagacaggccaacgaagtggactggtgggacatggtgtgtaacgtgaagaagctgatcaacgagaaaaaggaggatggcaaggtgttttggcagaatctggctggctacaagagacaggaagccctgagaccatacctgagcagcgaggaagatcggaagaagggaaagaaattcgctcggtaccagctgggcgacctgctgctgcacctggaaaagaagcacggcgaggactggggaaaggtgtacgacgaggcctgggagcggattgacaagaaagtggaaggcctgagcaagcacatcaagctggaagaggaacggagaagcgaggacgcccagagcaaggccgccctgaccgactggctgcgggctaaggccagcttcgtgatcgagggcctgaaggaggccgacaaggacgagttctgcagatgcgagctgaagctgcagaagtggtacggggacctgcggggaaagcccttcgccatcgaagccgagaacagcatcctggacatcagcggcttcagcaagcagtacaactgtgccttcatctggcagaaggacggcgtgaagaagctgaacctgtacctgatcatcaactacttcaagggcggcaagctgcggttcaagaagatcaaacctgaagccttcgaagccaacagattctacaccgtgatcaacaaaaagagcggcgagatcgtgcccatggaggtgaacttcaacttcgacgaccccaacctgatcatcctgcctctggcctttggcaagagacagggcagagaattcatctggaacgacctgctgtccctggaaaccggcagcctgaagctggccaacggaagagtgatcgagaagacactgtacaacagaagaacccggcaggatgagcctgccctgttcgtggccctgaccttcgagcggcgggaggtcctggactcctccaatatcaaaccaatgaacctgatcggcgtggcaagaggcgaaaacatccccgccgtgatcgccctgaccgaccccgagggctgcccactgagccggtttaaggatagcctgggaaacccaacccacatcctgagaatcggcgagagctataaggagaagcagcggaccatccaggccaagaaggaggtggagcagcggagagccggcggctacagccggaagtacgccagcaaagccaagaatctggcagacgatatggtgagaaacaccgctagagatctgctgtactacgccgtgacccaggatgccatgctgatcttcgccaacctgagccggggcttcggccggcagggcaagcggaccttcatggccgagagacagtacacacggatggaggactggctgaccgccaagctggcctacgagggcctgagcaagacctacctgtccaagacactggcccagtacacctccaagacatgcagcaactgtgggtttaccatcaccagcgccgactacgacagggtgctggagaagctgaagaagacagcaacaggctggatgaccacaattaacggcaaggagctgaaggtggagggccagattacctactacaacagatacaagagacagaacgtagtcaaggacctgtccgtcgagctggatagactgagcgaagaatctgtgaacaacgacatctcctcctggacaaagggcagaagcggagaagctctgagcctcctgaagaaaagattctcccatagacccgtgcaggagaagttcgtgtgcctgaactgcggcttcgagacacacgcagccgagcaagccgccctgaacatcgccagatcctggctgttcctgcggagccaggagtacaagaaataccagacaaacaagacaaccggcaacaccgataagagagccttcgtcgagacctggcagtccttttaccggaagaagcttaaggaggtgtggaaacctgccgtgcggtctggcggatctggcggaggctccaccagccccaagaaaaagagaaaagtctaagctgccttctgcggggcttgccttctggccatgcccttcttctctcccttgcacctgtacctcttggtctttgaataaagcctgagtaggaaggctagcaaaaaaaaaaaaaaaaaaaaaaaaaaaaaaaaaaaaaaaaaaaaaaaaaaaaaaaaaaaaaaaaaaaaaaaaaaaaaaaagcccagccggctccccaacctctaccgaggagggcacctctgagtccgccacccccgagagcggccctggcacctccaccgagcccagcgagggcagcgcacccggcagccctgccggcagccccacctccacagaggagggaaccagcaccgagcccagcgaaggcagcgccccaggcaccagcaccgagcctagtgagcaggagattaaacggatcaacaagatcagaagaagacttgtgaaagacagcaacaccaagaaggccggcaagacaggccccatgaaaaccctgctggttagagtgatgacacccgatctgagagagcggctggaaaacctgagaaagaagcctgaaaatatcccccagcccatcagcaatacatctagagccaacctgaataagctgctgaccgattacaccgaaatgaagaaggcgatcctgcatgtgtactgggaagagttccagaaggaccctgtgggcctgatgagccgggtggcccagcctgccagcaagaagatcgatcagaacaagctgaaacctgagatggacgagaagggcaacctgaccaccgccggctttgcctgctctcagtgtggccagcccctgttcgtgtacaagctggagcaggtgtctgagaagggcaaggcttacaccaactacttcggacggtgcaatgtggccgagcacgaaaagctgatcctgctggcccagctgaagcccgagaaggatagcgacgaagccgtgacatatagcctgggaaagtttgggcagagggccctggatttctacagcattcatgtgaccaaggagtccacccaccccgtgaagcccctggcccagatcgccggaaacagatacgcctccggacctgtgggaaaggccctgagcgacgcatgtatgggcacaatcgcctccttcctgtctaagtaccaggacatcatcatcgaacaccagaaggtggtgaagggcaaccagaagagactggagagcctgcgggagctggccggcaaggaaaacctggaataccctagcgtgaccctgccacctcagcctcacaccaaggagggcgttgatgcctacaacgaagtgatcgcccgggtgcgaatgtgggtgaacctgaacctgtggcagaagctgaagctaagcagagatgatgccaagcctctgctgagactgaagggattcccttcctttcctctggtcgagagacaggccaacgaagtggactggtgggacatggtgtgtaacgtgaagaagctgatcaacgagaaaaaggaggatggcaaggtgttttggcagaatctggctggctacaagagacaggaagccctgagaccatacctgagcagcgaggaagatcggaagaagggaaagaaattcgctcggtaccagctgggcgacctgctgctgcacctggaaaagaagcacggcgaggactggggaaaggtgtacgacgaggcctgggagcggattgacaagaaagtggaaggcctgagcaagcacatcaagctggaagaggaacggagaagcgaggacgcccagagcaaggccgccctgaccgactggctgcgggctaaggccagcttcgtgatcgagggcctgaaggaggccgacaaggacgagttctgcagatgcgagctgaagctgcagaagtggtacggggacctgcggggaaagcccttcgccatcgaagccgagaacagcatcctggacatcagcggcttcagcaagcagtacaactgtgccttcatctggcagaaggacggcgtgaagaagctgaacctgtacctgatcatcaactacttcaagggcggcaagctgcggttcaagaagatcaaacctgaagccttcgaagccaacagattctacaccgtgatcaacaaaaagagcggcgagatcgtgcccatggaggtgaacttcaacttcgacgaccccaacctgatcatcctgcctctggcctttggcaagagacagggcagagaattcatctggaacgacctgctgtccctggaaaccggcagcctgaagctggccaacggaagagtgatcgagaagacactgtacaacagaagaacccggcaggatgagcctgccctgttcgtggccctgaccttcgagcggcgggaggtcctggactcctccaatatcaaaccaatgaacctgatcggcgtggcaagaggcgaaaacatccccgccgtgatcgccctgaccgaccccgagggctgcccactgagccggtttaaggatagcctgggaaacccaacccacatcctgagaatcggcgagagctataaggagaagcagcggaccatccaggccaagaaggaggtggagcagcggagagccggcggctacagccggaagtacgccagcaaagccaagaatctggcagacgatatggtgagaaacaccgctagagatctgctgtactacgccgtgacccaggatgccatgctgatcttcgccaacctgagccggggcttcggccggcagggcaagcggaccttcatggccgagagacagtacacacggatggaggactggctgaccgccaagctggcctacgagggcctgagcaagacctacctgtccaagacactggcccagtacacctccaagacatgcagcaactgtgggtttaccatcaccagcgccgactacgacagggtgctggagaagctgaagaagacagcaacaggctggatgaccacaattaacggcaaggagctgaaggtggagggccagattacctactacaacagatacaagagacagaacgtagtcaaggacctgtccgtcgagctggatagactgagcgaagaatctgtgaacaacgacatctcctcctggacaaagggcagaagcggagaagctctgagcctcctgaagaaaagattctcccatagacccgtgcaggagaagttcgtgtgcctgaactgcggcttcgagacacacgcagccgagcaagccgccctgaacatcgccagatcctggctgttcctgcggagccaggagtacaagaaataccagacaaacaagacaaccggcaacaccgataagagagccttcgtcgagacctggcagtccttttaccggaagaagcttaaggaggtgtggaaacctgccgtgcggtctggcggatctggcggaggctccaccagccccaagaaaaagagaaaagtctaagctgccttctgcggggcttgccttctggccatgcccttcttctctcccttgcacctgtacctcttggtctttgaataaagcctgagtaggaaggctagcaaaaaaaaaaaaaaaaaaaaaaaaaaaaaaaaaaaaaaaaaaaaaaaaaaaaaaaaaaaaaaaaaaaaaaaaaaaaaaaa

SEQ ID NO: 10332 - RNA, 8787 nt, synthetic construct
  source 1..8787: mol_type = other RNA
aggaaataagagagaaaagaagagtaagaagaaatataagagccaccatggcccctaagaagaagcgtaaagtgagccggatgaaccacgaccaggagttcgacccccctaaggtgtaccctcccgtccccgccgagaagagaaagcccatccgggtcctgagcctgttcgatggcatcgccaccggtctgctggtgctgaaggacctgggcatccaggtggataggtacattgcctccgaggtgtgcgaggactccatcaccgtgggaatggtgcgtcatcagggcaagatcatgtacgtgggcgacgtgcggagcgtgacacagaagcatatccaggagtggggccctttcgacctggtgatcggcggcagcccttgcaatgacctgagcatcgtgaacccagcccggaagggcctgtacgagggaaccggcagactgttcttcgagttttacagactgctgcacgacgcccggcctaaggaaggcgacgaccggcccttcttttggctgttcgagaatgtggtggccatgggagtcagcgacaagcgggatattagccggttcctggagagcaaccccgtgatgatcgatgccaaggaagtgagcgccgcccaccgggccagatacttctggggcaatctgcctggcatgaacagacccctggccagcaccgtgaacgacaagctggagctgcaggagtgcctggagcacggccggatcgccaagttcagcaaggtgagaaccatcaccacccgaagcaacagcatcaaacaaggcaaggaccagcactttcctgtgttcatgaacgagaaggaggacatcctgtggtgtaccgagatggagagagtgttcgggttcccagtccactacacagatgtcagcaacatgtctagactggccagacagagactgctgggaagaagctggtccgtccctgtgatcagacacctgttcgcccctctgaaggagtacttcgcctgcgtgagcagcggcaacagcaacgccaacagccggggccccagcttctctagcggcctggtgccactgtccctgagagggagccacatgggccccatggagatctacaaaaccgtgagcgcctggaagcggcagcctgtgcgcgtgctgagcctgtttcggaatatcgataaagtcctgaaaagcctgggattcctggagagcggctctggctccggcggtggcaccctgaagtacgtggaggatgtgacaaacgtggtcagacgggatgtggagaagtggggccccttcgatctggtgtacggcagcacccaacccctgggcagctcttgtgaccggtgccctggctggtacatgtttcagttccaccggatcctgcagtacgccctgccgagacaggagtcccagcggccattcttttggattttcatggacaacttgctgctgaccgaggatgaccaggaaactaccactcggttcctgcagaccgaagccgtgaccctgcaggacgtgagaggccgggactaccagaacgccatgcgggtgtggtccaacatccctggactgaaaagcaagcacgcacctctgacccctaaagaagaggagtacctgcaggcccaggtgcggagcagaagcaagctggacgcccctaaggtggatctgctggtgaagaattgcctcctgcccctgagagagtacttcaagtatttcagccagaatagtctgcccctgggaggcagcggcggcggcaggcccagggccgtgaagttcggcgacgtggccctgtacttcagcagggaggagtggggctgcctgaggcccgcccagagggccctgtacagggacgtgatgcaggagacctacggccacctgggcgccctgggctgcgccggccccaagcccgccctgatcagctggctggagaggaacaccgacgactgggagcccgccgccctggacccccagcagtgccccaagggcgtggccgtgcagggcggcccaagcagcggcgcccctcctcccagcggcggcaggcggcccaagcagcggcgcccctcctcccagcggcggcagcccagccggctccccaacctctaccgaggagggcacctctgagtccgccacccccgagagcggccctggcacctccaccgagcccagcgagggcagcgcacccggcagccctgccggcagccccacctccacagaggagggaaccagcaccgagcccagcgaaggcagcgccccaggcaccagcaccgagcctagtgagcaggagattaaacggatcaacaagatcagaagaagacttgtgaaagacagcaacaccaagaaggccggcaagacaggccccatgaaaaccctgctggttagagtgatgacacccgatctgagagagcggctggaaaacctgagaaagaagcctgaaaatatcccccagcccatcagcaatacatctagagccaacctgaataagctgctgaccgattacaccgaaatgaagaaggcgatcctgcatgtgtactgggaagagttccagaaggaccctgtgggcctgatgagccgggtggcccagcctgccagcaagaagatcgatcagaacaagctgaaacctgagatggacgagaagggcaacctgaccaccgccggctttgcctgctctcagtgtggccagcccctgttcgtgtacaagctggagcaggtgtctgagaagggcaaggcttacaccaactacttcggacggtgcaatgtggccgagcacgaaaagctgatcctgctggcccagctgaagcccgagaaggatagcgacgaagccgtgacatatagcctgggaaagtttgggcagagggccctggatttctacagcattcatgtgaccaaggagtccacccaccccgtgaagcccctggcccagatcgccggaaacagatacgcctccggacctgtgggaaaggccctgagcgacgcatgtatgggcacaatcgcctccttcctgtctaagtaccaggacatcatcatcgaacaccagaaggtggtgaagggcaaccagaagagactggagagcctgcgggagctggccggcaaggaaaacctggaataccctagcgtgaccctgccacctcagcctcacaccaaggagggcgttgatgcctacaacgaagtgatcgcccgggtgcgaatgtgggtgaacctgaacctgtggcagaagctgaagctaagcagagatgatgccaagcctctgctgagactgaagggattcccttcctttcctctggtcgagagacaggccaacgaagtggactggtgggacatggtgtgtaacgtgaagaagctgatcaacgagaaaaaggaggatggcaaggtgttttggcagaatctggctggctacaagagacaggaagccctgagaccatacctgagcagcgaggaagatcggaagaagggaaagaaattcgctcggtaccagctgggcgacctgctgctgcacctggaaaagaagcacggcgaggactggggaaaggtgtacgacgaggcctgggagcggattgacaagaaagtggaaggcctgagcaagcacatcaagctggaagaggaacggagaagcgaggacgcccagagcaaggccgccctgaccgactggctgcgggctaaggccagcttcgtgatcgagggcctgaaggaggccgacaaggacgagttctgcagatgcgagctgaagctgcagaagtggtacggggacctgcggggaaagcccttcgccatcgaagccgagaacagcatcctggacatcagcggcttcagcaagcagtacaactgtgccttcatctggcagaaggacggcgtgaagaagctgaacctgtacctgatcatcaactacttcaagggcggcaagctgcggttcaagaagatcaaacctgaagccttcgaagccaacagattctacaccgtgatcaacaaaaagagcggcgagatcgtgcccatggaggtgaacttcaacttcgacgaccccaacctgatcatcctgcctctggcctttggcaagagacagggcagagaattcatctggaacgacctgctgtccctggaaaccggcagcctgaagctggccaacggaagagtgatcgagaagacactgtacaacagaagaacccggcaggatgagcctgccctgttcgtggccctgaccttcgagcggcgggaggtcctggactcctccaatatcaaaccaatgaacctgatcggcgtggcaagaggcgaaaacatccccgccgtgatcgccctgaccgaccccgagggctgcccactgagccggtttaaggatagcctgggaaacccaacccacatcctgagaatcggcgagagctataaggagaagcagcggaccatccaggccaagaaggaggtggagcagcggagagccggcggctacagccggaagtacgccagcaaagccaagaatctggcagacgatatggtgagaaacaccgctagagatctgctgtactacgccgtgacccaggatgccatgctgatcttcgccaacctgagccggggcttcggccggcagggcaagcggaccttcatggccgagagacagtacacacggatggaggactggctgaccgccaagctggcctacgagggcctgagcaagacctacctgtccaagacactggcccagtacacctccaagacatgcagcaactgtgggtttaccatcaccagcgccgactacgacagggtgctggagaagctgaagaagacagcaacaggctggatgaccacaattaacggcaaggagctgaaggtggagggccagattacctactacaacagatacaagagacagaacgtagtcaaggacctgtccgtcgagctggatagactgagcgaagaatctgtgaacaacgacatctcctcctggacaaagggcagaagcggagaagctctgagcctcctgaagaaaagattctcccatagacccgtgcaggagaagttcgtgtgcctgaactgcggcttcgagacacacgcagccgagcaagccgccctgaacatcgccagatcctggctgttcctgcggagccaggagtacaagaaataccagacaaacaagacaaccggcaacaccgataagagagccttcgtcgagacctggcagtccttttaccggaagaagcttaaggaggtgtggaaacctgccgtgcggtctggcggatctggcggaggctccaccagccccaagaaaaagagaaaagtctaagctgccttctgcggggcttgccttctggccatgcccttcttctctcccttgcacctgtacctcttggtctttgaataaagcctgagtaggaaggctagcaaaaaaaaaaaaaaaaaaaaaaaaaaaaaaaaaaaaaaaaaaaaaaaaaaaaaaaaaaaaaaaaaaaaaaaaaaaaaaaagcccagccggctccccaacctctaccgaggagggcacctctgagtccgccacccccgagagcggccctggcacctccaccgagcccagcgagggcagcgcacccggcagccctgccggcagccccacctccacagaggagggaaccagcaccgagcccagcgaaggcagcgccccaggcaccagcaccgagcctagtgagcaggagattaaacggatcaacaagatcagaagaagacttgtgaaagacagcaacaccaagaaggccggcaagacaggccccatgaaaaccctgctggttagagtgatgacacccgatctgagagagcggctggaaaacctgagaaagaagcctgaaaatatcccccagcccatcagcaatacatctagagccaacctgaataagctgctgaccgattacaccgaaatgaagaaggcgatcctgcatgtgtactgggaagagttccagaaggaccctgtgggcctgatgagccgggtggcccagcctgccagcaagaagatcgatcagaacaagctgaaacctgagatggacgagaagggcaacctgaccaccgccggctttgcctgctctcagtgtggccagcccctgttcgtgtacaagctggagcaggtgtctgagaagggcaaggcttacaccaactacttcggacggtgcaatgtggccgagcacgaaaagctgatcctgctggcccagctgaagcccgagaaggatagcgacgaagccgtgacatatagcctgggaaagtttgggcagagggccctggatttctacagcattcatgtgaccaaggagtccacccaccccgtgaagcccctggcccagatcgccggaaacagatacgcctccggacctgtgggaaaggccctgagcgacgcatgtatgggcacaatcgcctccttcctgtctaagtaccaggacatcatcatcgaacaccagaaggtggtgaagggcaaccagaagagactggagagcctgcgggagctggccggcaaggaaaacctggaataccctagcgtgaccctgccacctcagcctcacaccaaggagggcgttgatgcctacaacgaagtgatcgcccgggtgcgaatgtgggtgaacctgaacctgtggcagaagctgaagctaagcagagatgatgccaagcctctgctgagactgaagggattcccttcctttcctctggtcgagagacaggccaacgaagtggactggtgggacatggtgtgtaacgtgaagaagctgatcaacgagaaaaaggaggatggcaaggtgttttggcagaatctggctggctacaagagacaggaagccctgagaccatacctgagcagcgaggaagatcggaagaagggaaagaaattcgctcggtaccagctgggcgacctgctgctgcacctggaaaagaagcacggcgaggactggggaaaggtgtacgacgaggcctgggagcggattgacaagaaagtggaaggcctgagcaagcacatcaagctggaagaggaacggagaagcgaggacgcccagagcaaggccgccctgaccgactggctgcgggctaaggccagcttcgtgatcgagggcctgaaggaggccgacaaggacgagttctgcagatgcgagctgaagctgcagaagtggtacggggacctgcggggaaagcccttcgccatcgaagccgagaacagcatcctggacatcagcggcttcagcaagcagtacaactgtgccttcatctggcagaaggacggcgtgaagaagctgaacctgtacctgatcatcaactacttcaagggcggcaagctgcggttcaagaagatcaaacctgaagccttcgaagccaacagattctacaccgtgatcaacaaaaagagcggcgagatcgtgcccatggaggtgaacttcaacttcgacgaccccaacctgatcatcctgcctctggcctttggcaagagacagggcagagaattcatctggaacgacctgctgtccctggaaaccggcagcctgaagctggccaacggaagagtgatcgagaagacactgtacaacagaagaacccggcaggatgagcctgccctgttcgtggccctgaccttcgagcggcgggaggtcctggactcctccaatatcaaaccaatgaacctgatcggcgtggcaagaggcgaaaacatccccgccgtgatcgccctgaccgaccccgagggctgcccactgagccggtttaaggatagcctgggaaacccaacccacatcctgagaatcggcgagagctataaggagaagcagcggaccatccaggccaagaaggaggtggagcagcggagagccggcggctacagccggaagtacgccagcaaagccaagaatctggcagacgatatggtgagaaacaccgctagagatctgctgtactacgccgtgacccaggatgccatgctgatcttcgccaacctgagccggggcttcggccggcagggcaagcggaccttcatggccgagagacagtacacacggatggaggactggctgaccgccaagctggcctacgagggcctgagcaagacctacctgtccaagacactggcccagtacacctccaagacatgcagcaactgtgggtttaccatcaccagcgccgactacgacagggtgctggagaagctgaagaagacagcaacaggctggatgaccacaattaacggcaaggagctgaaggtggagggccagattacctactacaacagatacaagagacagaacgtagtcaaggacctgtccgtcgagctggatagactgagcgaagaatctgtgaacaacgacatctcctcctggacaaagggcagaagcggagaagctctgagcctcctgaagaaaagattctcccatagacccgtgcaggagaagttcgtgtgcctgaactgcggcttcgagacacacgcagccgagcaagccgccctgaacatcgccagatcctggctgttcctgcggagccaggagtacaagaaataccagacaaacaagacaaccggcaacaccgataagagagccttcgtcgagacctggcagtccttttaccggaagaagcttaaggaggtgtggaaacctgccgtgcggtctggcggatctggcggaggctccaccagccccaagaaaaagagaaaagtctaagctgccttctgcggggcttgccttctggccatgcccttcttctctcccttgcacctgtacctcttggtctttgaataaagcctgagtaggaaggctagcaaaaaaaaaaaaaaaaaaaaaaaaaaaaaaaaaaaaaaaaaaaaaaaaaaaaaaaaaaaaaaaaaaaaaaaaaaaaaaaa

SEQ ID NO: 10333 - RNA, 8787 nt, synthetic construct
  source 1..8787: mol_type = other RNA
aggaaataagagagaaaagaagagtaagaagaaatataagagccaccatggcccctaagaagaagcgtaaagtgagccggatgaaccacgaccaggagttcgacccccctaaggtgtaccctcccgtccccgccgagaagagaaagcccatccgggtcctgagcctgttcgatggcatcgccaccggtctgctggtgctgaaggacctgggcatccaggtggataggtacattgcctccgaggtgtgcgaggactccatcaccgtgggaatggtgcgtcatcagggcaagatcatgtacgtgggcgacgtgcggagcgtgacacagaagcatatccaggagtggggccctttcgacctggtgatcggcggcagcccttgcaatgacctgagcatcgtgaacccagcccggaagggcctgtacgagggaaccggcagactgttcttcgagttttacagactgctgcacgacgcccggcctaaggaaggcgacgaccggcccttcttttggctgttcgagaatgtggtggccatgggagtcagcgacaagcgggatattagccggttcctggagagcaaccccgtgatgatcgatgccaaggaagtgagcgccgcccaccgggccagatacttctggggcaatctgcctggcatgaacagacccctggccagcaccgtgaacgacaagctggagctgcaggagtgcctggagcacggccggatcgccaagttcagcaaggtgagaaccatcaccacccgaagcaacagcatcaaacaaggcaaggaccagcactttcctgtgttcatgaacgagaaggaggacatcctgtggtgtaccgagatggagagagtgttcgggttcccagtccactacacagatgtcagcaacatgtctagactggccagacagagactgctgggaagaagctggtccgtccctgtgatcagacacctgttcgcccctctgaaggagtacttcgcctgcgtgagcagcggcaacagcaacgccaacagccggggccccagcttctctagcggcctggtgccactgtccctgagagggagccacatgggccccatggagatctacaaaaccgtgagcgcctggaagcggcagcctgtgcgcgtgctgagcctgtttcggaatatcgataaagtcctgaaaagcctgggattcctggagagcggctctggctccggcggtggcaccctgaagtacgtggaggatgtgacaaacgtggtcagacgggatgtggagaagtggggccccttcgatctggtgtacggcagcacccaacccctgggcagctcttgtgaccggtgccctggctggtacatgtttcagttccaccggatcctgcagtacgccctgccgagacaggagtcccagcggccattcttttggattttcatggacaacttgctgctgaccgaggatgaccaggaaactaccactcggttcctgcagaccgaagccgtgaccctgcaggacgtgagaggccgggactaccagaacgccatgcgggtgtggtccaacatccctggactgaaaagcaagcacgcacctctgacccctaaagaagaggagtacctgcaggcccaggtgcggagcagaagcaagctggacgcccctaaggtggatctgctggtgaagaattgcctcctgcccctgagagagtacttcaagtatttcagccagaatagtctgcccctgggaggcagcggcggcggcgtgcacggcagcgtgaccttcagggacgtggccatcgacttcagccaggaggagtgggagtgcctgcagcccgcccagaagaccctgtacagggacgtgatgctggagaactacagccacctgatcagcctgggcagcagcatcagcaagcccgacgtgatcaccctgctggagcaggagaaggagccctggatggtgaggaggaaggagaccaacaggtggtaccccgacctggagagcaagggcggcccaagcagcggcgcccctcctcccagcggcggcaggcggcccaagcagcggcgcccctcctcccagcggcggcagcccagccggctccccaacctctaccgaggagggcacctctgagtccgccacccccgagagcggccctggcacctccaccgagcccagcgagggcagcgcacccggcagccctgccggcagccccacctccacagaggagggaaccagcaccgagcccagcgaaggcagcgccccaggcaccagcaccgagcctagtgagcaggagattaaacggatcaacaagatcagaagaagacttgtgaaagacagcaacaccaagaaggccggcaagacaggccccatgaaaaccctgctggttagagtgatgacacccgatctgagagagcggctggaaaacctgagaaagaagcctgaaaatatcccccagcccatcagcaatacatctagagccaacctgaataagctgctgaccgattacaccgaaatgaagaaggcgatcctgcatgtgtactgggaagagttccagaaggaccctgtgggcctgatgagccgggtggcccagcctgccagcaagaagatcgatcagaacaagctgaaacctgagatggacgagaagggcaacctgaccaccgccggctttgcctgctctcagtgtggccagcccctgttcgtgtacaagctggagcaggtgtctgagaagggcaaggcttacaccaactacttcggacggtgcaatgtggccgagcacgaaaagctgatcctgctggcccagctgaagcccgagaaggatagcgacgaagccgtgacatatagcctgggaaagtttgggcagagggccctggatttctacagcattcatgtgaccaaggagtccacccaccccgtgaagcccctggcccagatcgccggaaacagatacgcctccggacctgtgggaaaggccctgagcgacgcatgtatgggcacaatcgcctccttcctgtctaagtaccaggacatcatcatcgaacaccagaaggtggtgaagggcaaccagaagagactggagagcctgcgggagctggccggcaaggaaaacctggaataccctagcgtgaccctgccacctcagcctcacaccaaggagggcgttgatgcctacaacgaagtgatcgcccgggtgcgaatgtgggtgaacctgaacctgtggcagaagctgaagctaagcagagatgatgccaagcctctgctgagactgaagggattcccttcctttcctctggtcgagagacaggccaacgaagtggactggtgggacatggtgtgtaacgtgaagaagctgatcaacgagaaaaaggaggatggcaaggtgttttggcagaatctggctggctacaagagacaggaagccctgagaccatacctgagcagcgaggaagatcggaagaagggaaagaaattcgctcggtaccagctgggcgacctgctgctgcacctggaaaagaagcacggcgaggactggggaaaggtgtacgacgaggcctgggagcggattgacaagaaagtggaaggcctgagcaagcacatcaagctggaagaggaacggagaagcgaggacgcccagagcaaggccgccctgaccgactggctgcgggctaaggccagcttcgtgatcgagggcctgaaggaggccgacaaggacgagttctgcagatgcgagctgaagctgcagaagtggtacggggacctgcggggaaagcccttcgccatcgaagccgagaacagcatcctggacatcagcggcttcagcaagcagtacaactgtgccttcatctggcagaaggacggcgtgaagaagctgaacctgtacctgatcatcaactacttcaagggcggcaagctgcggttcaagaagatcaaacctgaagccttcgaagccaacagattctacaccgtgatcaacaaaaagagcggcgagatcgtgcccatggaggtgaacttcaacttcgacgaccccaacctgatcatcctgcctctggcctttggcaagagacagggcagagaattcatctggaacgacctgctgtccctggaaaccggcagcctgaagctggccaacggaagagtgatcgagaagacactgtacaacagaagaacccggcaggatgagcctgccctgttcgtggccctgaccttcgagcggcgggaggtcctggactcctccaatatcaaaccaatgaacctgatcggcgtggcaagaggcgaaaacatccccgccgtgatcgccctgaccgaccccgagggctgcccactgagccggtttaaggatagcctgggaaacccaacccacatcctgagaatcggcgagagctataaggagaagcagcggaccatccaggccaagaaggaggtggagcagcggagagccggcggctacagccggaagtacgccagcaaagccaagaatctggcagacgatatggtgagaaacaccgctagagatctgctgtactacgccgtgacccaggatgccatgctgatcttcgccaacctgagccggggcttcggccggcagggcaagcggaccttcatggccgagagacagtacacacggatggaggactggctgaccgccaagctggcctacgagggcctgagcaagacctacctgtccaagacactggcccagtacacctccaagacatgcagcaactgtgggtttaccatcaccagcgccgactacgacagggtgctggagaagctgaagaagacagcaacaggctggatgaccacaattaacggcaaggagctgaaggtggagggccagattacctactacaacagatacaagagacagaacgtagtcaaggacctgtccgtcgagctggatagactgagcgaagaatctgtgaacaacgacatctcctcctggacaaagggcagaagcggagaagctctgagcctcctgaagaaaagattctcccatagacccgtgcaggagaagttcgtgtgcctgaactgcggcttcgagacacacgcagccgagcaagccgccctgaacatcgccagatcctggctgttcctgcggagccaggagtacaagaaataccagacaaacaagacaaccggcaacaccgataagagagccttcgtcgagacctggcagtccttttaccggaagaagcttaaggaggtgtggaaacctgccgtgcggtctggcggatctggcggaggctccaccagccccaagaaaaagagaaaagtctaagctgccttctgcggggcttgccttctggccatgcccttcttctctcccttgcacctgtacctcttggtctttgaataaagcctgagtaggaaggctagcaaaaaaaaaaaaaaaaaaaaaaaaaaaaaaaaaaaaaaaaaaaaaaaaaaaaaaaaaaaaaaaaaaaaaaaaaaaaaaaagcccagccggctccccaacctctaccgaggagggcacctctgagtccgccacccccgagagcggccctggcacctccaccgagcccagcgagggcagcgcacccggcagccctgccggcagccccacctccacagaggagggaaccagcaccgagcccagcgaaggcagcgccccaggcaccagcaccgagcctagtgagcaggagattaaacggatcaacaagatcagaagaagacttgtgaaagacagcaacaccaagaaggccggcaagacaggccccatgaaaaccctgctggttagagtgatgacacccgatctgagagagcggctggaaaacctgagaaagaagcctgaaaatatcccccagcccatcagcaatacatctagagccaacctgaataagctgctgaccgattacaccgaaatgaagaaggcgatcctgcatgtgtactgggaagagttccagaaggaccctgtgggcctgatgagccgggtggcccagcctgccagcaagaagatcgatcagaacaagctgaaacctgagatggacgagaagggcaacctgaccaccgccggctttgcctgctctcagtgtggccagcccctgttcgtgtacaagctggagcaggtgtctgagaagggcaaggcttacaccaactacttcggacggtgcaatgtggccgagcacgaaaagctgatcctgctggcccagctgaagcccgagaaggatagcgacgaagccgtgacatatagcctgggaaagtttgggcagagggccctggatttctacagcattcatgtgaccaaggagtccacccaccccgtgaagcccctggcccagatcgccggaaacagatacgcctccggacctgtgggaaaggccctgagcgacgcatgtatgggcacaatcgcctccttcctgtctaagtaccaggacatcatcatcgaacaccagaaggtggtgaagggcaaccagaagagactggagagcctgcgggagctggccggcaaggaaaacctggaataccctagcgtgaccctgccacctcagcctcacaccaaggagggcgttgatgcctacaacgaagtgatcgcccgggtgcgaatgtgggtgaacctgaacctgtggcagaagctgaagctaagcagagatgatgccaagcctctgctgagactgaagggattcccttcctttcctctggtcgagagacaggccaacgaagtggactggtgggacatggtgtgtaacgtgaagaagctgatcaacgagaaaaaggaggatggcaaggtgttttggcagaatctggctggctacaagagacaggaagccctgagaccatacctgagcagcgaggaagatcggaagaagggaaagaaattcgctcggtaccagctgggcgacctgctgctgcacctggaaaagaagcacggcgaggactggggaaaggtgtacgacgaggcctgggagcggattgacaagaaagtggaaggcctgagcaagcacatcaagctggaagaggaacggagaagcgaggacgcccagagcaaggccgccctgaccgactggctgcgggctaaggccagcttcgtgatcgagggcctgaaggaggccgacaaggacgagttctgcagatgcgagctgaagctgcagaagtggtacggggacctgcggggaaagcccttcgccatcgaagccgagaacagcatcctggacatcagcggcttcagcaagcagtacaactgtgccttcatctggcagaaggacggcgtgaagaagctgaacctgtacctgatcatcaactacttcaagggcggcaagctgcggttcaagaagatcaaacctgaagccttcgaagccaacagattctacaccgtgatcaacaaaaagagcggcgagatcgtgcccatggaggtgaacttcaacttcgacgaccccaacctgatcatcctgcctctggcctttggcaagagacagggcagagaattcatctggaacgacctgctgtccctggaaaccggcagcctgaagctggccaacggaagagtgatcgagaagacactgtacaacagaagaacccggcaggatgagcctgccctgttcgtggccctgaccttcgagcggcgggaggtcctggactcctccaatatcaaaccaatgaacctgatcggcgtggcaagaggcgaaaacatccccgccgtgatcgccctgaccgaccccgagggctgcccactgagccggtttaaggatagcctgggaaacccaacccacatcctgagaatcggcgagagctataaggagaagcagcggaccatccaggccaagaaggaggtggagcagcggagagccggcggctacagccggaagtacgccagcaaagccaagaatctggcagacgatatggtgagaaacaccgctagagatctgctgtactacgccgtgacccaggatgccatgctgatcttcgccaacctgagccggggcttcggccggcagggcaagcggaccttcatggccgagagacagtacacacggatggaggactggctgaccgccaagctggcctacgagggcctgagcaagacctacctgtccaagacactggcccagtacacctccaagacatgcagcaactgtgggtttaccatcaccagcgccgactacgacagggtgctggagaagctgaagaagacagcaacaggctggatgaccacaattaacggcaaggagctgaaggtggagggccagattacctactacaacagatacaagagacagaacgtagtcaaggacctgtccgtcgagctggatagactgagcgaagaatctgtgaacaacgacatctcctcctggacaaagggcagaagcggagaagctctgagcctcctgaagaaaagattctcccatagacccgtgcaggagaagttcgtgtgcctgaactgcggcttcgagacacacgcagccgagcaagccgccctgaacatcgccagatcctggctgttcctgcggagccaggagtacaagaaataccagacaaacaagacaaccggcaacaccgataagagagccttcgtcgagacctggcagtccttttaccggaagaagcttaaggaggtgtggaaacctgccgtgcggtctggcggatctggcggaggctccaccagccccaagaaaaagagaaaagtctaagctgccttctgcggggcttgccttctggccatgcccttcttctctcccttgcacctgtacctcttggtctttgaataaagcctgagtaggaaggctagcaaaaaaaaaaaaaaaaaaaaaaaaaaaaaaaaaaaaaaaaaaaaaaaaaaaaaaaaaaaaaaaaaaaaaaaaaaaaaaaa

SEQ ID NO: 10334 - RNA, 8784 nt, synthetic construct
  source 1..8784: mol_type = other RNA
aggaaataagagagaaaagaagagtaagaagaaatataagagccaccatggcccctaagaagaagcgtaaagtgagccggatgaaccacgaccaggagttcgacccccctaaggtgtaccctcccgtccccgccgagaagagaaagcccatccgggtcctgagcctgttcgatggcatcgccaccggtctgctggtgctgaaggacctgggcatccaggtggataggtacattgcctccgaggtgtgcgaggactccatcaccgtgggaatggtgcgtcatcagggcaagatcatgtacgtgggcgacgtgcggagcgtgacacagaagcatatccaggagtggggccctttcgacctggtgatcggcggcagcccttgcaatgacctgagcatcgtgaacccagcccggaagggcctgtacgagggaaccggcagactgttcttcgagttttacagactgctgcacgacgcccggcctaaggaaggcgacgaccggcccttcttttggctgttcgagaatgtggtggccatgggagtcagcgacaagcgggatattagccggttcctggagagcaaccccgtgatgatcgatgccaaggaagtgagcgccgcccaccgggccagatacttctggggcaatctgcctggcatgaacagacccctggccagcaccgtgaacgacaagctggagctgcaggagtgcctggagcacggccggatcgccaagttcagcaaggtgagaaccatcaccacccgaagcaacagcatcaaacaaggcaaggaccagcactttcctgtgttcatgaacgagaaggaggacatcctgtggtgtaccgagatggagagagtgttcgggttcccagtccactacacagatgtcagcaacatgtctagactggccagacagagactgctgggaagaagctggtccgtccctgtgatcagacacctgttcgcccctctgaaggagtacttcgcctgcgtgagcagcggcaacagcaacgccaacagccggggccccagcttctctagcggcctggtgccactgtccctgagagggagccacatgggccccatggagatctacaaaaccgtgagcgcctggaagcggcagcctgtgcgcgtgctgagcctgtttcggaatatcgataaagtcctgaaaagcctgggattcctggagagcggctctggctccggcggtggcaccctgaagtacgtggaggatgtgacaaacgtggtcagacgggatgtggagaagtggggccccttcgatctggtgtacggcagcacccaacccctgggcagctcttgtgaccggtgccctggctggtacatgtttcagttccaccggatcctgcagtacgccctgccgagacaggagtcccagcggccattcttttggattttcatggacaacttgctgctgaccgaggatgaccaggaaactaccactcggttcctgcagaccgaagccgtgaccctgcaggacgtgagaggccgggactaccagaacgccatgcgggtgtggtccaacatccctggactgaaaagcaagcacgcacctctgacccctaaagaagaggagtacctgcaggcccaggtgcggagcagaagcaagctggacgcccctaaggtggatctgctggtgaagaattgcctcctgcccctgagagagtacttcaagtatttcagccagaatagtctgcccctgggaggcagcggcggcggcatggtgctggtgagcttcgaggacgtggccgtggacttcacctgggaggagtggcaggccctggacgccgcccagaggaccctgtacagggacgtgatgctggagacctacagcagcctggtgagcctgggccactgcatggccaagcccgagctgatcttcaacctggagcagggcctgggccccaggagcaccgccggcgccagcgtgtggaacctgagcggcaggaccgaggacagcggcggcccaagcagcggcgcccctcctcccagcggcggcaggcggcccaagcagcggcgcccctcctcccagcggcggcagcccagccggctccccaacctctaccgaggagggcacctctgagtccgccacccccgagagcggccctggcacctccaccgagcccagcgagggcagcgcacccggcagccctgccggcagccccacctccacagaggagggaaccagcaccgagcccagcgaaggcagcgccccaggcaccagcaccgagcctagtgagcaggagattaaacggatcaacaagatcagaagaagacttgtgaaagacagcaacaccaagaaggccggcaagacaggccccatgaaaaccctgctggttagagtgatgacacccgatctgagagagcggctggaaaacctgagaaagaagcctgaaaatatcccccagcccatcagcaatacatctagagccaacctgaataagctgctgaccgattacaccgaaatgaagaaggcgatcctgcatgtgtactgggaagagttccagaaggaccctgtgggcctgatgagccgggtggcccagcctgccagcaagaagatcgatcagaacaagctgaaacctgagatggacgagaagggcaacctgaccaccgccggctttgcctgctctcagtgtggccagcccctgttcgtgtacaagctggagcaggtgtctgagaagggcaaggcttacaccaactacttcggacggtgcaatgtggccgagcacgaaaagctgatcctgctggcccagctgaagcccgagaaggatagcgacgaagccgtgacatatagcctgggaaagtttgggcagagggccctggatttctacagcattcatgtgaccaaggagtccacccaccccgtgaagcccctggcccagatcgccggaaacagatacgcctccggacctgtgggaaaggccctgagcgacgcatgtatgggcacaatcgcctccttcctgtctaagtaccaggacatcatcatcgaacaccagaaggtggtgaagggcaaccagaagagactggagagcctgcgggagctggccggcaaggaaaacctggaataccctagcgtgaccctgccacctcagcctcacaccaaggagggcgttgatgcctacaacgaagtgatcgcccgggtgcgaatgtgggtgaacctgaacctgtggcagaagctgaagctaagcagagatgatgccaagcctctgctgagactgaagggattcccttcctttcctctggtcgagagacaggccaacgaagtggactggtgggacatggtgtgtaacgtgaagaagctgatcaacgagaaaaaggaggatggcaaggtgttttggcagaatctggctggctacaagagacaggaagccctgagaccatacctgagcagcgaggaagatcggaagaagggaaagaaattcgctcggtaccagctgggcgacctgctgctgcacctggaaaagaagcacggcgaggactggggaaaggtgtacgacgaggcctgggagcggattgacaagaaagtggaaggcctgagcaagcacatcaagctggaagaggaacggagaagcgaggacgcccagagcaaggccgccctgaccgactggctgcgggctaaggccagcttcgtgatcgagggcctgaaggaggccgacaaggacgagttctgcagatgcgagctgaagctgcagaagtggtacggggacctgcggggaaagcccttcgccatcgaagccgagaacagcatcctggacatcagcggcttcagcaagcagtacaactgtgccttcatctggcagaaggacggcgtgaagaagctgaacctgtacctgatcatcaactacttcaagggcggcaagctgcggttcaagaagatcaaacctgaagccttcgaagccaacagattctacaccgtgatcaacaaaaagagcggcgagatcgtgcccatggaggtgaacttcaacttcgacgaccccaacctgatcatcctgcctctggcctttggcaagagacagggcagagaattcatctggaacgacctgctgtccctggaaaccggcagcctgaagctggccaacggaagagtgatcgagaagacactgtacaacagaagaacccggcaggatgagcctgccctgttcgtggccctgaccttcgagcggcgggaggtcctggactcctccaatatcaaaccaatgaacctgatcggcgtggcaagaggcgaaaacatccccgccgtgatcgccctgaccgaccccgagggctgcccactgagccggtttaaggatagcctgggaaacccaacccacatcctgagaatcggcgagagctataaggagaagcagcggaccatccaggccaagaaggaggtggagcagcggagagccggcggctacagccggaagtacgccagcaaagccaagaatctggcagacgatatggtgagaaacaccgctagagatctgctgtactacgccgtgacccaggatgccatgctgatcttcgccaacctgagccggggcttcggccggcagggcaagcggaccttcatggccgagagacagtacacacggatggaggactggctgaccgccaagctggcctacgagggcctgagcaagacctacctgtccaagacactggcccagtacacctccaagacatgcagcaactgtgggtttaccatcaccagcgccgactacgacagggtgctggagaagctgaagaagacagcaacaggctggatgaccacaattaacggcaaggagctgaaggtggagggccagattacctactacaacagatacaagagacagaacgtagtcaaggacctgtccgtcgagctggatagactgagcgaagaatctgtgaacaacgacatctcctcctggacaaagggcagaagcggagaagctctgagcctcctgaagaaaagattctcccatagacccgtgcaggagaagttcgtgtgcctgaactgcggcttcgagacacacgcagccgagcaagccgccctgaacatcgccagatcctggctgttcctgcggagccaggagtacaagaaataccagacaaacaagacaaccggcaacaccgataagagagccttcgtcgagacctggcagtccttttaccggaagaagcttaaggaggtgtggaaacctgccgtgcggtctggcggatctggcggaggctccaccagccccaagaaaaagagaaaagtctaagctgccttctgcggggcttgccttctggccatgcccttcttctctcccttgcacctgtacctcttggtctttgaataaagcctgagtaggaaggctagcaaaaaaaaaaaaaaaaaaaaaaaaaaaaaaaaaaaaaaaaaaaaaaaaaaaaaaaaaaaaaaaaaaaaaaaaaaaaaaaagcccagccggctccccaacctctaccgaggagggcacctctgagtccgccacccccgagagcggccctggcacctccaccgagcccagcgagggcagcgcacccggcagccctgccggcagccccacctccacagaggagggaaccagcaccgagcccagcgaaggcagcgccccaggcaccagcaccgagcctagtgagcaggagattaaacggatcaacaagatcagaagaagacttgtgaaagacagcaacaccaagaaggccggcaagacaggccccatgaaaaccctgctggttagagtgatgacacccgatctgagagagcggctggaaaacctgagaaagaagcctgaaaatatcccccagcccatcagcaatacatctagagccaacctgaataagctgctgaccgattacaccgaaatgaagaaggcgatcctgcatgtgtactgggaagagttccagaaggaccctgtgggcctgatgagccgggtggcccagcctgccagcaagaagatcgatcagaacaagctgaaacctgagatggacgagaagggcaacctgaccaccgccggctttgcctgctctcagtgtggccagcccctgttcgtgtacaagctggagcaggtgtctgagaagggcaaggcttacaccaactacttcggacggtgcaatgtggccgagcacgaaaagctgatcctgctggcccagctgaagcccgagaaggatagcgacgaagccgtgacatatagcctgggaaagtttgggcagagggccctggatttctacagcattcatgtgaccaaggagtccacccaccccgtgaagcccctggcccagatcgccggaaacagatacgcctccggacctgtgggaaaggccctgagcgacgcatgtatgggcacaatcgcctccttcctgtctaagtaccaggacatcatcatcgaacaccagaaggtggtgaagggcaaccagaagagactggagagcctgcgggagctggccggcaaggaaaacctggaataccctagcgtgaccctgccacctcagcctcacaccaaggagggcgttgatgcctacaacgaagtgatcgcccgggtgcgaatgtgggtgaacctgaacctgtggcagaagctgaagctaagcagagatgatgccaagcctctgctgagactgaagggattcccttcctttcctctggtcgagagacaggccaacgaagtggactggtgggacatggtgtgtaacgtgaagaagctgatcaacgagaaaaaggaggatggcaaggtgttttggcagaatctggctggctacaagagacaggaagccctgagaccatacctgagcagcgaggaagatcggaagaagggaaagaaattcgctcggtaccagctgggcgacctgctgctgcacctggaaaagaagcacggcgaggactggggaaaggtgtacgacgaggcctgggagcggattgacaagaaagtggaaggcctgagcaagcacatcaagctggaagaggaacggagaagcgaggacgcccagagcaaggccgccctgaccgactggctgcgggctaaggccagcttcgtgatcgagggcctgaaggaggccgacaaggacgagttctgcagatgcgagctgaagctgcagaagtggtacggggacctgcggggaaagcccttcgccatcgaagccgagaacagcatcctggacatcagcggcttcagcaagcagtacaactgtgccttcatctggcagaaggacggcgtgaagaagctgaacctgtacctgatcatcaactacttcaagggcggcaagctgcggttcaagaagatcaaacctgaagccttcgaagccaacagattctacaccgtgatcaacaaaaagagcggcgagatcgtgcccatggaggtgaacttcaacttcgacgaccccaacctgatcatcctgcctctggcctttggcaagagacagggcagagaattcatctggaacgacctgctgtccctggaaaccggcagcctgaagctggccaacggaagagtgatcgagaagacactgtacaacagaagaacccggcaggatgagcctgccctgttcgtggccctgaccttcgagcggcgggaggtcctggactcctccaatatcaaaccaatgaacctgatcggcgtggcaagaggcgaaaacatccccgccgtgatcgccctgaccgaccccgagggctgcccactgagccggtttaaggatagcctgggaaacccaacccacatcctgagaatcggcgagagctataaggagaagcagcggaccatccaggccaagaaggaggtggagcagcggagagccggcggctacagccggaagtacgccagcaaagccaagaatctggcagacgatatggtgagaaacaccgctagagatctgctgtactacgccgtgacccaggatgccatgctgatcttcgccaacctgagccggggcttcggccggcagggcaagcggaccttcatggccgagagacagtacacacggatggaggactggctgaccgccaagctggcctacgagggcctgagcaagacctacctgtccaagacactggcccagtacacctccaagacatgcagcaactgtgggtttaccatcaccagcgccgactacgacagggtgctggagaagctgaagaagacagcaacaggctggatgaccacaattaacggcaaggagctgaaggtggagggccagattacctactacaacagatacaagagacagaacgtagtcaaggacctgtccgtcgagctggatagactgagcgaagaatctgtgaacaacgacatctcctcctggacaaagggcagaagcggagaagctctgagcctcctgaagaaaagattctcccatagacccgtgcaggagaagttcgtgtgcctgaactgcggcttcgagacacacgcagccgagcaagccgccctgaacatcgccagatcctggctgttcctgcggagccaggagtacaagaaataccagacaaacaagacaaccggcaacaccgataagagagccttcgtcgagacctggcagtccttttaccggaagaagcttaaggaggtgtggaaacctgccgtgcggtctggcggatctggcggaggctccaccagccccaagaaaaagagaaaagtctaagctgccttctgcggggcttgccttctggccatgcccttcttctctcccttgcacctgtacctcttggtctttgaataaagcctgagtaggaaggctagcaaaaaaaaaaaaaaaaaaaaaaaaaaaaaaaaaaaaaaaaaaaaaaaaaaaaaaaaaaaaaaaaaaaaaaaaaaaaaaaa

SEQ ID NO: 10335 - RNA, 8787 nt, synthetic construct
  source 1..8787: mol_type = other RNA
aggaaataagagagaaaagaagagtaagaagaaatataagagccaccatggcccctaagaagaagcgtaaagtgagccggatgaaccacgaccaggagttcgacccccctaaggtgtaccctcccgtccccgccgagaagagaaagcccatccgggtcctgagcctgttcgatggcatcgccaccggtctgctggtgctgaaggacctgggcatccaggtggataggtacattgcctccgaggtgtgcgaggactccatcaccgtgggaatggtgcgtcatcagggcaagatcatgtacgtgggcgacgtgcggagcgtgacacagaagcatatccaggagtggggccctttcgacctggtgatcggcggcagcccttgcaatgacctgagcatcgtgaacccagcccggaagggcctgtacgagggaaccggcagactgttcttcgagttttacagactgctgcacgacgcccggcctaaggaaggcgacgaccggcccttcttttggctgttcgagaatgtggtggccatgggagtcagcgacaagcgggatattagccggttcctggagagcaaccccgtgatgatcgatgccaaggaagtgagcgccgcccaccgggccagatacttctggggcaatctgcctggcatgaacagacccctggccagcaccgtgaacgacaagctggagctgcaggagtgcctggagcacggccggatcgccaagttcagcaaggtgagaaccatcaccacccgaagcaacagcatcaaacaaggcaaggaccagcactttcctgtgttcatgaacgagaaggaggacatcctgtggtgtaccgagatggagagagtgttcgggttcccagtccactacacagatgtcagcaacatgtctagactggccagacagagactgctgggaagaagctggtccgtccctgtgatcagacacctgttcgcccctctgaaggagtacttcgcctgcgtgagcagcggcaacagcaacgccaacagccggggccccagcttctctagcggcctggtgccactgtccctgagagggagccacatgggccccatggagatctacaaaaccgtgagcgcctggaagcggcagcctgtgcgcgtgctgagcctgtttcggaatatcgataaagtcctgaaaagcctgggattcctggagagcggctctggctccggcggtggcaccctgaagtacgtggaggatgtgacaaacgtggtcagacgggatgtggagaagtggggccccttcgatctggtgtacggcagcacccaacccctgggcagctcttgtgaccggtgccctggctggtacatgtttcagttccaccggatcctgcagtacgccctgccgagacaggagtcccagcggccattcttttggattttcatggacaacttgctgctgaccgaggatgaccaggaaactaccactcggttcctgcagaccgaagccgtgaccctgcaggacgtgagaggccgggactaccagaacgccatgcgggtgtggtccaacatccctggactgaaaagcaagcacgcacctctgacccctaaagaagaggagtacctgcaggcccaggtgcggagcagaagcaagctggacgcccctaaggtggatctgctggtgaagaattgcctcctgcccctgagagagtacttcaagtatttcagccagaatagtctgcccctgggaggcagcggcggcggcatggacaccgtggccctggaggacgtggccgtgaacttcacccaggaggagtgggccctgctgggccccagccagaagaagctgtacagggacgtgatgcaggagaccatcaggaacctggactgcatcaagatgatcagcgaggaccagaacatcgaggaccagtacaagaaccccaagaagaacctgaggtgcaggatggccgagaggctgagcgagagcaaggacaacagccagtgcggcggcggcccaagcagcggcgcccctcctcccagcggcggcaggcggcccaagcagcggcgcccctcctcccagcggcggcagcccagccggctccccaacctctaccgaggagggcacctctgagtccgccacccccgagagcggccctggcacctccaccgagcccagcgagggcagcgcacccggcagccctgccggcagccccacctccacagaggagggaaccagcaccgagcccagcgaaggcagcgccccaggcaccagcaccgagcctagtgagcaggagattaaacggatcaacaagatcagaagaagacttgtgaaagacagcaacaccaagaaggccggcaagacaggccccatgaaaaccctgctggttagagtgatgacacccgatctgagagagcggctggaaaacctgagaaagaagcctgaaaatatcccccagcccatcagcaatacatctagagccaacctgaataagctgctgaccgattacaccgaaatgaagaaggcgatcctgcatgtgtactgggaagagttccagaaggaccctgtgggcctgatgagccgggtggcccagcctgccagcaagaagatcgatcagaacaagctgaaacctgagatggacgagaagggcaacctgaccaccgccggctttgcctgctctcagtgtggccagcccctgttcgtgtacaagctggagcaggtgtctgagaagggcaaggcttacaccaactacttcggacggtgcaatgtggccgagcacgaaaagctgatcctgctggcccagctgaagcccgagaaggatagcgacgaagccgtgacatatagcctgggaaagtttgggcagagggccctggatttctacagcattcatgtgaccaaggagtccacccaccccgtgaagcccctggcccagatcgccggaaacagatacgcctccggacctgtgggaaaggccctgagcgacgcatgtatgggcacaatcgcctccttcctgtctaagtaccaggacatcatcatcgaacaccagaaggtggtgaagggcaaccagaagagactggagagcctgcgggagctggccggcaaggaaaacctggaataccctagcgtgaccctgccacctcagcctcacaccaaggagggcgttgatgcctacaacgaagtgatcgcccgggtgcgaatgtgggtgaacctgaacctgtggcagaagctgaagctaagcagagatgatgccaagcctctgctgagactgaagggattcccttcctttcctctggtcgagagacaggccaacgaagtggactggtgggacatggtgtgtaacgtgaagaagctgatcaacgagaaaaaggaggatggcaaggtgttttggcagaatctggctggctacaagagacaggaagccctgagaccatacctgagcagcgaggaagatcggaagaagggaaagaaattcgctcggtaccagctgggcgacctgctgctgcacctggaaaagaagcacggcgaggactggggaaaggtgtacgacgaggcctgggagcggattgacaagaaagtggaaggcctgagcaagcacatcaagctggaagaggaacggagaagcgaggacgcccagagcaaggccgccctgaccgactggctgcgggctaaggccagcttcgtgatcgagggcctgaaggaggccgacaaggacgagttctgcagatgcgagctgaagctgcagaagtggtacggggacctgcggggaaagcccttcgccatcgaagccgagaacagcatcctggacatcagcggcttcagcaagcagtacaactgtgccttcatctggcagaaggacggcgtgaagaagctgaacctgtacctgatcatcaactacttcaagggcggcaagctgcggttcaagaagatcaaacctgaagccttcgaagccaacagattctacaccgtgatcaacaaaaagagcggcgagatcgtgcccatggaggtgaacttcaacttcgacgaccccaacctgatcatcctgcctctggcctttggcaagagacagggcagagaattcatctggaacgacctgctgtccctggaaaccggcagcctgaagctggccaacggaagagtgatcgagaagacactgtacaacagaagaacccggcaggatgagcctgccctgttcgtggccctgaccttcgagcggcgggaggtcctggactcctccaatatcaaaccaatgaacctgatcggcgtggcaagaggcgaaaacatccccgccgtgatcgccctgaccgaccccgagggctgcccactgagccggtttaaggatagcctgggaaacccaacccacatcctgagaatcggcgagagctataaggagaagcagcggaccatccaggccaagaaggaggtggagcagcggagagccggcggctacagccggaagtacgccagcaaagccaagaatctggcagacgatatggtgagaaacaccgctagagatctgctgtactacgccgtgacccaggatgccatgctgatcttcgccaacctgagccggggcttcggccggcagggcaagcggaccttcatggccgagagacagtacacacggatggaggactggctgaccgccaagctggcctacgagggcctgagcaagacctacctgtccaagacactggcccagtacacctccaagacatgcagcaactgtgggtttaccatcaccagcgccgactacgacagggtgctggagaagctgaagaagacagcaacaggctggatgaccacaattaacggcaaggagctgaaggtggagggccagattacctactacaacagatacaagagacagaacgtagtcaaggacctgtccgtcgagctggatagactgagcgaagaatctgtgaacaacgacatctcctcctggacaaagggcagaagcggagaagctctgagcctcctgaagaaaagattctcccatagacccgtgcaggagaagttcgtgtgcctgaactgcggcttcgagacacacgcagccgagcaagccgccctgaacatcgccagatcctggctgttcctgcggagccaggagtacaagaaataccagacaaacaagacaaccggcaacaccgataagagagccttcgtcgagacctggcagtccttttaccggaagaagcttaaggaggtgtggaaacctgccgtgcggtctggcggatctggcggaggctccaccagccccaagaaaaagagaaaagtctaagctgccttctgcggggcttgccttctggccatgcccttcttctctcccttgcacctgtacctcttggtctttgaataaagcctgagtaggaaggctagcaaaaaaaaaaaaaaaaaaaaaaaaaaaaaaaaaaaaaaaaaaaaaaaaaaaaaaaaaaaaaaaaaaaaaaaaaaaaaaaagcccagccggctccccaacctctaccgaggagggcacctctgagtccgccacccccgagagcggccctggcacctccaccgagcccagcgagggcagcgcacccggcagccctgccggcagccccacctccacagaggagggaaccagcaccgagcccagcgaaggcagcgccccaggcaccagcaccgagcctagtgagcaggagattaaacggatcaacaagatcagaagaagacttgtgaaagacagcaacaccaagaaggccggcaagacaggccccatgaaaaccctgctggttagagtgatgacacccgatctgagagagcggctggaaaacctgagaaagaagcctgaaaatatcccccagcccatcagcaatacatctagagccaacctgaataagctgctgaccgattacaccgaaatgaagaaggcgatcctgcatgtgtactgggaagagttccagaaggaccctgtgggcctgatgagccgggtggcccagcctgccagcaagaagatcgatcagaacaagctgaaacctgagatggacgagaagggcaacctgaccaccgccggctttgcctgctctcagtgtggccagcccctgttcgtgtacaagctggagcaggtgtctgagaagggcaaggcttacaccaactacttcggacggtgcaatgtggccgagcacgaaaagctgatcctgctggcccagctgaagcccgagaaggatagcgacgaagccgtgacatatagcctgggaaagtttgggcagagggccctggatttctacagcattcatgtgaccaaggagtccacccaccccgtgaagcccctggcccagatcgccggaaacagatacgcctccggacctgtgggaaaggccctgagcgacgcatgtatgggcacaatcgcctccttcctgtctaagtaccaggacatcatcatcgaacaccagaaggtggtgaagggcaaccagaagagactggagagcctgcgggagctggccggcaaggaaaacctggaataccctagcgtgaccctgccacctcagcctcacaccaaggagggcgttgatgcctacaacgaagtgatcgcccgggtgcgaatgtgggtgaacctgaacctgtggcagaagctgaagctaagcagagatgatgccaagcctctgctgagactgaagggattcccttcctttcctctggtcgagagacaggccaacgaagtggactggtgggacatggtgtgtaacgtgaagaagctgatcaacgagaaaaaggaggatggcaaggtgttttggcagaatctggctggctacaagagacaggaagccctgagaccatacctgagcagcgaggaagatcggaagaagggaaagaaattcgctcggtaccagctgggcgacctgctgctgcacctggaaaagaagcacggcgaggactggggaaaggtgtacgacgaggcctgggagcggattgacaagaaagtggaaggcctgagcaagcacatcaagctggaagaggaacggagaagcgaggacgcccagagcaaggccgccctgaccgactggctgcgggctaaggccagcttcgtgatcgagggcctgaaggaggccgacaaggacgagttctgcagatgcgagctgaagctgcagaagtggtacggggacctgcggggaaagcccttcgccatcgaagccgagaacagcatcctggacatcagcggcttcagcaagcagtacaactgtgccttcatctggcagaaggacggcgtgaagaagctgaacctgtacctgatcatcaactacttcaagggcggcaagctgcggttcaagaagatcaaacctgaagccttcgaagccaacagattctacaccgtgatcaacaaaaagagcggcgagatcgtgcccatggaggtgaacttcaacttcgacgaccccaacctgatcatcctgcctctggcctttggcaagagacagggcagagaattcatctggaacgacctgctgtccctggaaaccggcagcctgaagctggccaacggaagagtgatcgagaagacactgtacaacagaagaacccggcaggatgagcctgccctgttcgtggccctgaccttcgagcggcgggaggtcctggactcctccaatatcaaaccaatgaacctgatcggcgtggcaagaggcgaaaacatccccgccgtgatcgccctgaccgaccccgagggctgcccactgagccggtttaaggatagcctgggaaacccaacccacatcctgagaatcggcgagagctataaggagaagcagcggaccatccaggccaagaaggaggtggagcagcggagagccggcggctacagccggaagtacgccagcaaagccaagaatctggcagacgatatggtgagaaacaccgctagagatctgctgtactacgccgtgacccaggatgccatgctgatcttcgccaacctgagccggggcttcggccggcagggcaagcggaccttcatggccgagagacagtacacacggatggaggactggctgaccgccaagctggcctacgagggcctgagcaagacctacctgtccaagacactggcccagtacacctccaagacatgcagcaactgtgggtttaccatcaccagcgccgactacgacagggtgctggagaagctgaagaagacagcaacaggctggatgaccacaattaacggcaaggagctgaaggtggagggccagattacctactacaacagatacaagagacagaacgtagtcaaggacctgtccgtcgagctggatagactgagcgaagaatctgtgaacaacgacatctcctcctggacaaagggcagaagcggagaagctctgagcctcctgaagaaaagattctcccatagacccgtgcaggagaagttcgtgtgcctgaactgcggcttcgagacacacgcagccgagcaagccgccctgaacatcgccagatcctggctgttcctgcggagccaggagtacaagaaataccagacaaacaagacaaccggcaacaccgataagagagccttcgtcgagacctggcagtccttttaccggaagaagcttaaggaggtgtggaaacctgccgtgcggtctggcggatctggcggaggctccaccagccccaagaaaaagagaaaagtctaagctgccttctgcggggcttgccttctggccatgcccttcttctctcccttgcacctgtacctcttggtctttgaataaagcctgagtaggaaggctagcaaaaaaaaaaaaaaaaaaaaaaaaaaaaaaaaaaaaaaaaaaaaaaaaaaaaaaaaaaaaaaaaaaaaaaaaaaaaaaaa

SEQ ID NO: 10336 - RNA, 8787 nt, synthetic construct
  source 1..8787: mol_type = other RNA
aggaaataagagagaaaagaagagtaagaagaaatataagagccaccatggcccctaagaagaagcgtaaagtgagccggatgaaccacgaccaggagttcgacccccctaaggtgtaccctcccgtccccgccgagaagagaaagcccatccgggtcctgagcctgttcgatggcatcgccaccggtctgctggtgctgaaggacctgggcatccaggtggataggtacattgcctccgaggtgtgcgaggactccatcaccgtgggaatggtgcgtcatcagggcaagatcatgtacgtgggcgacgtgcggagcgtgacacagaagcatatccaggagtggggccctttcgacctggtgatcggcggcagcccttgcaatgacctgagcatcgtgaacccagcccggaagggcctgtacgagggaaccggcagactgttcttcgagttttacagactgctgcacgacgcccggcctaaggaaggcgacgaccggcccttcttttggctgttcgagaatgtggtggccatgggagtcagcgacaagcgggatattagccggttcctggagagcaaccccgtgatgatcgatgccaaggaagtgagcgccgcccaccgggccagatacttctggggcaatctgcctggcatgaacagacccctggccagcaccgtgaacgacaagctggagctgcaggagtgcctggagcacggccggatcgccaagttcagcaaggtgagaaccatcaccacccgaagcaacagcatcaaacaaggcaaggaccagcactttcctgtgttcatgaacgagaaggaggacatcctgtggtgtaccgagatggagagagtgttcgggttcccagtccactacacagatgtcagcaacatgtctagactggccagacagagactgctgggaagaagctggtccgtccctgtgatcagacacctgttcgcccctctgaaggagtacttcgcctgcgtgagcagcggcaacagcaacgccaacagccggggccccagcttctctagcggcctggtgccactgtccctgagagggagccacatgggccccatggagatctacaaaaccgtgagcgcctggaagcggcagcctgtgcgcgtgctgagcctgtttcggaatatcgataaagtcctgaaaagcctgggattcctggagagcggctctggctccggcggtggcaccctgaagtacgtggaggatgtgacaaacgtggtcagacgggatgtggagaagtggggccccttcgatctggtgtacggcagcacccaacccctgggcagctcttgtgaccggtgccctggctggtacatgtttcagttccaccggatcctgcagtacgccctgccgagacaggagtcccagcggccattcttttggattttcatggacaacttgctgctgaccgaggatgaccaggaaactaccactcggttcctgcagaccgaagccgtgaccctgcaggacgtgagaggccgggactaccagaacgccatgcgggtgtggtccaacatccctggactgaaaagcaagcacgcacctctgacccctaaagaagaggagtacctgcaggcccaggtgcggagcagaagcaagctggacgcccctaaggtggatctgctggtgaagaattgcctcctgcccctgagagagtacttcaagtatttcagccagaatagtctgcccctgggaggcagcggcggcggcgcccaggtgtgcgtgaccttcgacgacgtggccgtgaccttcacccaggaggagtggggccacctggaccccgcccagaggaccctgtaccaggaggtgatgctggagacctgcggcctgctgatgagcctgggctgccccgtgcccaggcccgagctgatctaccagctggagcacggccaggagctgtggaccgtgaagagggacctgagcggcagcacctgccccgtggacaagggcaagggcggcccaagcagcggcgcccctcctcccagcggcggcaggcggcccaagcagcggcgcccctcctcccagcggcggcagcccagccggctccccaacctctaccgaggagggcacctctgagtccgccacccccgagagcggccctggcacctccaccgagcccagcgagggcagcgcacccggcagccctgccggcagccccacctccacagaggagggaaccagcaccgagcccagcgaaggcagcgccccaggcaccagcaccgagcctagtgagcaggagattaaacggatcaacaagatcagaagaagacttgtgaaagacagcaacaccaagaaggccggcaagacaggccccatgaaaaccctgctggttagagtgatgacacccgatctgagagagcggctggaaaacctgagaaagaagcctgaaaatatcccccagcccatcagcaatacatctagagccaacctgaataagctgctgaccgattacaccgaaatgaagaaggcgatcctgcatgtgtactgggaagagttccagaaggaccctgtgggcctgatgagccgggtggcccagcctgccagcaagaagatcgatcagaacaagctgaaacctgagatggacgagaagggcaacctgaccaccgccggctttgcctgctctcagtgtggccagcccctgttcgtgtacaagctggagcaggtgtctgagaagggcaaggcttacaccaactacttcggacggtgcaatgtggccgagcacgaaaagctgatcctgctggcccagctgaagcccgagaaggatagcgacgaagccgtgacatatagcctgggaaagtttgggcagagggccctggatttctacagcattcatgtgaccaaggagtccacccaccccgtgaagcccctggcccagatcgccggaaacagatacgcctccggacctgtgggaaaggccctgagcgacgcatgtatgggcacaatcgcctccttcctgtctaagtaccaggacatcatcatcgaacaccagaaggtggtgaagggcaaccagaagagactggagagcctgcgggagctggccggcaaggaaaacctggaataccctagcgtgaccctgccacctcagcctcacaccaaggagggcgttgatgcctacaacgaagtgatcgcccgggtgcgaatgtgggtgaacctgaacctgtggcagaagctgaagctaagcagagatgatgccaagcctctgctgagactgaagggattcccttcctttcctctggtcgagagacaggccaacgaagtggactggtgggacatggtgtgtaacgtgaagaagctgatcaacgagaaaaaggaggatggcaaggtgttttggcagaatctggctggctacaagagacaggaagccctgagaccatacctgagcagcgaggaagatcggaagaagggaaagaaattcgctcggtaccagctgggcgacctgctgctgcacctggaaaagaagcacggcgaggactggggaaaggtgtacgacgaggcctgggagcggattgacaagaaagtggaaggcctgagcaagcacatcaagctggaagaggaacggagaagcgaggacgcccagagcaaggccgccctgaccgactggctgcgggctaaggccagcttcgtgatcgagggcctgaaggaggccgacaaggacgagttctgcagatgcgagctgaagctgcagaagtggtacggggacctgcggggaaagcccttcgccatcgaagccgagaacagcatcctggacatcagcggcttcagcaagcagtacaactgtgccttcatctggcagaaggacggcgtgaagaagctgaacctgtacctgatcatcaactacttcaagggcggcaagctgcggttcaagaagatcaaacctgaagccttcgaagccaacagattctacaccgtgatcaacaaaaagagcggcgagatcgtgcccatggaggtgaacttcaacttcgacgaccccaacctgatcatcctgcctctggcctttggcaagagacagggcagagaattcatctggaacgacctgctgtccctggaaaccggcagcctgaagctggccaacggaagagtgatcgagaagacactgtacaacagaagaacccggcaggatgagcctgccctgttcgtggccctgaccttcgagcggcgggaggtcctggactcctccaatatcaaaccaatgaacctgatcggcgtggcaagaggcgaaaacatccccgccgtgatcgccctgaccgaccccgagggctgcccactgagccggtttaaggatagcctgggaaacccaacccacatcctgagaatcggcgagagctataaggagaagcagcggaccatccaggccaagaaggaggtggagcagcggagagccggcggctacagccggaagtacgccagcaaagccaagaatctggcagacgatatggtgagaaacaccgctagagatctgctgtactacgccgtgacccaggatgccatgctgatcttcgccaacctgagccggggcttcggccggcagggcaagcggaccttcatggccgagagacagtacacacggatggaggactggctgaccgccaagctggcctacgagggcctgagcaagacctacctgtccaagacactggcccagtacacctccaagacatgcagcaactgtgggtttaccatcaccagcgccgactacgacagggtgctggagaagctgaagaagacagcaacaggctggatgaccacaattaacggcaaggagctgaaggtggagggccagattacctactacaacagatacaagagacagaacgtagtcaaggacctgtccgtcgagctggatagactgagcgaagaatctgtgaacaacgacatctcctcctggacaaagggcagaagcggagaagctctgagcctcctgaagaaaagattctcccatagacccgtgcaggagaagttcgtgtgcctgaactgcggcttcgagacacacgcagccgagcaagccgccctgaacatcgccagatcctggctgttcctgcggagccaggagtacaagaaataccagacaaacaagacaaccggcaacaccgataagagagccttcgtcgagacctggcagtccttttaccggaagaagcttaaggaggtgtggaaacctgccgtgcggtctggcggatctggcggaggctccaccagccccaagaaaaagagaaaagtctaagctgccttctgcggggcttgccttctggccatgcccttcttctctcccttgcacctgtacctcttggtctttgaataaagcctgagtaggaaggctagcaaaaaaaaaaaaaaaaaaaaaaaaaaaaaaaaaaaaaaaaaaaaaaaaaaaaaaaaaaaaaaaaaaaaaaaaaaaaaaaagcccagccggctccccaacctctaccgaggagggcacctctgagtccgccacccccgagagcggccctggcacctccaccgagcccagcgagggcagcgcacccggcagccctgccggcagccccacctccacagaggagggaaccagcaccgagcccagcgaaggcagcgccccaggcaccagcaccgagcctagtgagcaggagattaaacggatcaacaagatcagaagaagacttgtgaaagacagcaacaccaagaaggccggcaagacaggccccatgaaaaccctgctggttagagtgatgacacccgatctgagagagcggctggaaaacctgagaaagaagcctgaaaatatcccccagcccatcagcaatacatctagagccaacctgaataagctgctgaccgattacaccgaaatgaagaaggcgatcctgcatgtgtactgggaagagttccagaaggaccctgtgggcctgatgagccgggtggcccagcctgccagcaagaagatcgatcagaacaagctgaaacctgagatggacgagaagggcaacctgaccaccgccggctttgcctgctctcagtgtggccagcccctgttcgtgtacaagctggagcaggtgtctgagaagggcaaggcttacaccaactacttcggacggtgcaatgtggccgagcacgaaaagctgatcctgctggcccagctgaagcccgagaaggatagcgacgaagccgtgacatatagcctgggaaagtttgggcagagggccctggatttctacagcattcatgtgaccaaggagtccacccaccccgtgaagcccctggcccagatcgccggaaacagatacgcctccggacctgtgggaaaggccctgagcgacgcatgtatgggcacaatcgcctccttcctgtctaagtaccaggacatcatcatcgaacaccagaaggtggtgaagggcaaccagaagagactggagagcctgcgggagctggccggcaaggaaaacctggaataccctagcgtgaccctgccacctcagcctcacaccaaggagggcgttgatgcctacaacgaagtgatcgcccgggtgcgaatgtgggtgaacctgaacctgtggcagaagctgaagctaagcagagatgatgccaagcctctgctgagactgaagggattcccttcctttcctctggtcgagagacaggccaacgaagtggactggtgggacatggtgtgtaacgtgaagaagctgatcaacgagaaaaaggaggatggcaaggtgttttggcagaatctggctggctacaagagacaggaagccctgagaccatacctgagcagcgaggaagatcggaagaagggaaagaaattcgctcggtaccagctgggcgacctgctgctgcacctggaaaagaagcacggcgaggactggggaaaggtgtacgacgaggcctgggagcggattgacaagaaagtggaaggcctgagcaagcacatcaagctggaagaggaacggagaagcgaggacgcccagagcaaggccgccctgaccgactggctgcgggctaaggccagcttcgtgatcgagggcctgaaggaggccgacaaggacgagttctgcagatgcgagctgaagctgcagaagtggtacggggacctgcggggaaagcccttcgccatcgaagccgagaacagcatcctggacatcagcggcttcagcaagcagtacaactgtgccttcatctggcagaaggacggcgtgaagaagctgaacctgtacctgatcatcaactacttcaagggcggcaagctgcggttcaagaagatcaaacctgaagccttcgaagccaacagattctacaccgtgatcaacaaaaagagcggcgagatcgtgcccatggaggtgaacttcaacttcgacgaccccaacctgatcatcctgcctctggcctttggcaagagacagggcagagaattcatctggaacgacctgctgtccctggaaaccggcagcctgaagctggccaacggaagagtgatcgagaagacactgtacaacagaagaacccggcaggatgagcctgccctgttcgtggccctgaccttcgagcggcgggaggtcctggactcctccaatatcaaaccaatgaacctgatcggcgtggcaagaggcgaaaacatccccgccgtgatcgccctgaccgaccccgagggctgcccactgagccggtttaaggatagcctgggaaacccaacccacatcctgagaatcggcgagagctataaggagaagcagcggaccatccaggccaagaaggaggtggagcagcggagagccggcggctacagccggaagtacgccagcaaagccaagaatctggcagacgatatggtgagaaacaccgctagagatctgctgtactacgccgtgacccaggatgccatgctgatcttcgccaacctgagccggggcttcggccggcagggcaagcggaccttcatggccgagagacagtacacacggatggaggactggctgaccgccaagctggcctacgagggcctgagcaagacctacctgtccaagacactggcccagtacacctccaagacatgcagcaactgtgggtttaccatcaccagcgccgactacgacagggtgctggagaagctgaagaagacagcaacaggctggatgaccacaattaacggcaaggagctgaaggtggagggccagattacctactacaacagatacaagagacagaacgtagtcaaggacctgtccgtcgagctggatagactgagcgaagaatctgtgaacaacgacatctcctcctggacaaagggcagaagcggagaagctctgagcctcctgaagaaaagattctcccatagacccgtgcaggagaagttcgtgtgcctgaactgcggcttcgagacacacgcagccgagcaagccgccctgaacatcgccagatcctggctgttcctgcggagccaggagtacaagaaataccagacaaacaagacaaccggcaacaccgataagagagccttcgtcgagacctggcagtccttttaccggaagaagcttaaggaggtgtggaaacctgccgtgcggtctggcggatctggcggaggctccaccagccccaagaaaaagagaaaagtctaagctgccttctgcggggcttgccttctggccatgcccttcttctctcccttgcacctgtacctcttggtctttgaataaagcctgagtaggaaggctagcaaaaaaaaaaaaaaaaaaaaaaaaaaaaaaaaaaaaaaaaaaaaaaaaaaaaaaaaaaaaaaaaaaaaaaaaaaaaaaaa

SEQ ID NO: 10337 - RNA, 8796 nt, synthetic construct
  source 1..8796: mol_type = other RNA
aggaaataagagagaaaagaagagtaagaagaaatataagagccaccatggcccctaagaagaagcgtaaagtgagccggatgaaccacgaccaggagttcgacccccctaaggtgtaccctcccgtccccgccgagaagagaaagcccatccgggtcctgagcctgttcgatggcatcgccaccggtctgctggtgctgaaggacctgggcatccaggtggataggtacattgcctccgaggtgtgcgaggactccatcaccgtgggaatggtgcgtcatcagggcaagatcatgtacgtgggcgacgtgcggagcgtgacacagaagcatatccaggagtggggccctttcgacctggtgatcggcggcagcccttgcaatgacctgagcatcgtgaacccagcccggaagggcctgtacgagggaaccggcagactgttcttcgagttttacagactgctgcacgacgcccggcctaaggaaggcgacgaccggcccttcttttggctgttcgagaatgtggtggccatgggagtcagcgacaagcgggatattagccggttcctggagagcaaccccgtgatgatcgatgccaaggaagtgagcgccgcccaccgggccagatacttctggggcaatctgcctggcatgaacagacccctggccagcaccgtgaacgacaagctggagctgcaggagtgcctggagcacggccggatcgccaagttcagcaaggtgagaaccatcaccacccgaagcaacagcatcaaacaaggcaaggaccagcactttcctgtgttcatgaacgagaaggaggacatcctgtggtgtaccgagatggagagagtgttcgggttcccagtccactacacagatgtcagcaacatgtctagactggccagacagagactgctgggaagaagctggtccgtccctgtgatcagacacctgttcgcccctctgaaggagtacttcgcctgcgtgagcagcggcaacagcaacgccaacagccggggccccagcttctctagcggcctggtgccactgtccctgagagggagccacatgggccccatggagatctacaaaaccgtgagcgcctggaagcggcagcctgtgcgcgtgctgagcctgtttcggaatatcgataaagtcctgaaaagcctgggattcctggagagcggctctggctccggcggtggcaccctgaagtacgtggaggatgtgacaaacgtggtcagacgggatgtggagaagtggggccccttcgatctggtgtacggcagcacccaacccctgggcagctcttgtgaccggtgccctggctggtacatgtttcagttccaccggatcctgcagtacgccctgccgagacaggagtcccagcggccattcttttggattttcatggacaacttgctgctgaccgaggatgaccaggaaactaccactcggttcctgcagaccgaagccgtgaccctgcaggacgtgagaggccgggactaccagaacgccatgcgggtgtggtccaacatccctggactgaaaagcaagcacgcacctctgacccctaaagaagaggagtacctgcaggcccaggtgcggagcagaagcaagctggacgcccctaaggtggatctgctggtgaagaattgcctcctgcccctgagagagtacttcaagtatttcagccagaatagtctgcccctgggaggcagcggcggcggcgtgagcttcgaggacgtggccgtgcacttcacccaggaggagtgggccctgctggaccccagccagaagagcctgtacagggacgtgatgctggagacctgcaggaacctggccgccatcggctacatctgggaggagcagaccatcgaggacgactgcaagaacttcggcaggtaccagaggcacaccatcagccacagcgagtacaccccctacgagcacgaggagtgcggcaacatgccctgcgaccccggcggcccaagcagcggcgcccctcctcccagcggcggcaggcggcccaagcagcggcgcccctcctcccagcggcggcagcccagccggctccccaacctctaccgaggagggcacctctgagtccgccacccccgagagcggccctggcacctccaccgagcccagcgagggcagcgcacccggcagccctgccggcagccccacctccacagaggagggaaccagcaccgagcccagcgaaggcagcgccccaggcaccagcaccgagcctagtgagcaggagattaaacggatcaacaagatcagaagaagacttgtgaaagacagcaacaccaagaaggccggcaagacaggccccatgaaaaccctgctggttagagtgatgacacccgatctgagagagcggctggaaaacctgagaaagaagcctgaaaatatcccccagcccatcagcaatacatctagagccaacctgaataagctgctgaccgattacaccgaaatgaagaaggcgatcctgcatgtgtactgggaagagttccagaaggaccctgtgggcctgatgagccgggtggcccagcctgccagcaagaagatcgatcagaacaagctgaaacctgagatggacgagaagggcaacctgaccaccgccggctttgcctgctctcagtgtggccagcccctgttcgtgtacaagctggagcaggtgtctgagaagggcaaggcttacaccaactacttcggacggtgcaatgtggccgagcacgaaaagctgatcctgctggcccagctgaagcccgagaaggatagcgacgaagccgtgacatatagcctgggaaagtttgggcagagggccctggatttctacagcattcatgtgaccaaggagtccacccaccccgtgaagcccctggcccagatcgccggaaacagatacgcctccggacctgtgggaaaggccctgagcgacgcatgtatgggcacaatcgcctccttcctgtctaagtaccaggacatcatcatcgaacaccagaaggtggtgaagggcaaccagaagagactggagagcctgcgggagctggccggcaaggaaaacctggaataccctagcgtgaccctgccacctcagcctcacaccaaggagggcgttgatgcctacaacgaagtgatcgcccgggtgcgaatgtgggtgaacctgaacctgtggcagaagctgaagctaagcagagatgatgccaagcctctgctgagactgaagggattcccttcctttcctctggtcgagagacaggccaacgaagtggactggtgggacatggtgtgtaacgtgaagaagctgatcaacgagaaaaaggaggatggcaaggtgttttggcagaatctggctggctacaagagacaggaagccctgagaccatacctgagcagcgaggaagatcggaagaagggaaagaaattcgctcggtaccagctgggcgacctgctgctgcacctggaaaagaagcacggcgaggactggggaaaggtgtacgacgaggcctgggagcggattgacaagaaagtggaaggcctgagcaagcacatcaagctggaagaggaacggagaagcgaggacgcccagagcaaggccgccctgaccgactggctgcgggctaaggccagcttcgtgatcgagggcctgaaggaggccgacaaggacgagttctgcagatgcgagctgaagctgcagaagtggtacggggacctgcggggaaagcccttcgccatcgaagccgagaacagcatcctggacatcagcggcttcagcaagcagtacaactgtgccttcatctggcagaaggacggcgtgaagaagctgaacctgtacctgatcatcaactacttcaagggcggcaagctgcggttcaagaagatcaaacctgaagccttcgaagccaacagattctacaccgtgatcaacaaaaagagcggcgagatcgtgcccatggaggtgaacttcaacttcgacgaccccaacctgatcatcctgcctctggcctttggcaagagacagggcagagaattcatctggaacgacctgctgtccctggaaaccggcagcctgaagctggccaacggaagagtgatcgagaagacactgtacaacagaagaacccggcaggatgagcctgccctgttcgtggccctgaccttcgagcggcgggaggtcctggactcctccaatatcaaaccaatgaacctgatcggcgtggcaagaggcgaaaacatccccgccgtgatcgccctgaccgaccccgagggctgcccactgagccggtttaaggatagcctgggaaacccaacccacatcctgagaatcggcgagagctataaggagaagcagcggaccatccaggccaagaaggaggtggagcagcggagagccggcggctacagccggaagtacgccagcaaagccaagaatctggcagacgatatggtgagaaacaccgctagagatctgctgtactacgccgtgacccaggatgccatgctgatcttcgccaacctgagccggggcttcggccggcagggcaagcggaccttcatggccgagagacagtacacacggatggaggactggctgaccgccaagctggcctacgagggcctgagcaagacctacctgtccaagacactggcccagtacacctccaagacatgcagcaactgtgggtttaccatcaccagcgccgactacgacagggtgctggagaagctgaagaagacagcaacaggctggatgaccacaattaacggcaaggagctgaaggtggagggccagattacctactacaacagatacaagagacagaacgtagtcaaggacctgtccgtcgagctggatagactgagcgaagaatctgtgaacaacgacatctcctcctggacaaagggcagaagcggagaagctctgagcctcctgaagaaaagattctcccatagacccgtgcaggagaagttcgtgtgcctgaactgcggcttcgagacacacgcagccgagcaagccgccctgaacatcgccagatcctggctgttcctgcggagccaggagtacaagaaataccagacaaacaagacaaccggcaacaccgataagagagccttcgtcgagacctggcagtccttttaccggaagaagcttaaggaggtgtggaaacctgccgtgcggtctggcggatctggcggaggctccaccagccccaagaaaaagagaaaagtctaagctgccttctgcggggcttgccttctggccatgcccttcttctctcccttgcacctgtacctcttggtctttgaataaagcctgagtaggaaggctagcaaaaaaaaaaaaaaaaaaaaaaaaaaaaaaaaaaaaaaaaaaaaaaaaaaaaaaaaaaaaaaaaaaaaaaaaaaaaaaaagcccagccggctccccaacctctaccgaggagggcacctctgagtccgccacccccgagagcggccctggcacctccaccgagcccagcgagggcagcgcacccggcagccctgccggcagccccacctccacagaggagggaaccagcaccgagcccagcgaaggcagcgccccaggcaccagcaccgagcctagtgagcaggagattaaacggatcaacaagatcagaagaagacttgtgaaagacagcaacaccaagaaggccggcaagacaggccccatgaaaaccctgctggttagagtgatgacacccgatctgagagagcggctggaaaacctgagaaagaagcctgaaaatatcccccagcccatcagcaatacatctagagccaacctgaataagctgctgaccgattacaccgaaatgaagaaggcgatcctgcatgtgtactgggaagagttccagaaggaccctgtgggcctgatgagccgggtggcccagcctgccagcaagaagatcgatcagaacaagctgaaacctgagatggacgagaagggcaacctgaccaccgccggctttgcctgctctcagtgtggccagcccctgttcgtgtacaagctggagcaggtgtctgagaagggcaaggcttacaccaactacttcggacggtgcaatgtggccgagcacgaaaagctgatcctgctggcccagctgaagcccgagaaggatagcgacgaagccgtgacatatagcctgggaaagtttgggcagagggccctggatttctacagcattcatgtgaccaaggagtccacccaccccgtgaagcccctggcccagatcgccggaaacagatacgcctccggacctgtgggaaaggccctgagcgacgcatgtatgggcacaatcgcctccttcctgtctaagtaccaggacatcatcatcgaacaccagaaggtggtgaagggcaaccagaagagactggagagcctgcgggagctggccggcaaggaaaacctggaataccctagcgtgaccctgccacctcagcctcacaccaaggagggcgttgatgcctacaacgaagtgatcgcccgggtgcgaatgtgggtgaacctgaacctgtggcagaagctgaagctaagcagagatgatgccaagcctctgctgagactgaagggattcccttcctttcctctggtcgagagacaggccaacgaagtggactggtgggacatggtgtgtaacgtgaagaagctgatcaacgagaaaaaggaggatggcaaggtgttttggcagaatctggctggctacaagagacaggaagccctgagaccatacctgagcagcgaggaagatcggaagaagggaaagaaattcgctcggtaccagctgggcgacctgctgctgcacctggaaaagaagcacggcgaggactggggaaaggtgtacgacgaggcctgggagcggattgacaagaaagtggaaggcctgagcaagcacatcaagctggaagaggaacggagaagcgaggacgcccagagcaaggccgccctgaccgactggctgcgggctaaggccagcttcgtgatcgagggcctgaaggaggccgacaaggacgagttctgcagatgcgagctgaagctgcagaagtggtacggggacctgcggggaaagcccttcgccatcgaagccgagaacagcatcctggacatcagcggcttcagcaagcagtacaactgtgccttcatctggcagaaggacggcgtgaagaagctgaacctgtacctgatcatcaactacttcaagggcggcaagctgcggttcaagaagatcaaacctgaagccttcgaagccaacagattctacaccgtgatcaacaaaaagagcggcgagatcgtgcccatggaggtgaacttcaacttcgacgaccccaacctgatcatcctgcctctggcctttggcaagagacagggcagagaattcatctggaacgacctgctgtccctggaaaccggcagcctgaagctggccaacggaagagtgatcgagaagacactgtacaacagaagaacccggcaggatgagcctgccctgttcgtggccctgaccttcgagcggcgggaggtcctggactcctccaatatcaaaccaatgaacctgatcggcgtggcaagaggcgaaaacatccccgccgtgatcgccctgaccgaccccgagggctgcccactgagccggtttaaggatagcctgggaaacccaacccacatcctgagaatcggcgagagctataaggagaagcagcggaccatccaggccaagaaggaggtggagcagcggagagccggcggctacagccggaagtacgccagcaaagccaagaatctggcagacgatatggtgagaaacaccgctagagatctgctgtactacgccgtgacccaggatgccatgctgatcttcgccaacctgagccggggcttcggccggcagggcaagcggaccttcatggccgagagacagtacacacggatggaggactggctgaccgccaagctggcctacgagggcctgagcaagacctacctgtccaagacactggcccagtacacctccaagacatgcagcaactgtgggtttaccatcaccagcgccgactacgacagggtgctggagaagctgaagaagacagcaacaggctggatgaccacaattaacggcaaggagctgaaggtggagggccagattacctactacaacagatacaagagacagaacgtagtcaaggacctgtccgtcgagctggatagactgagcgaagaatctgtgaacaacgacatctcctcctggacaaagggcagaagcggagaagctctgagcctcctgaagaaaagattctcccatagacccgtgcaggagaagttcgtgtgcctgaactgcggcttcgagacacacgcagccgagcaagccgccctgaacatcgccagatcctggctgttcctgcggagccaggagtacaagaaataccagacaaacaagacaaccggcaacaccgataagagagccttcgtcgagacctggcagtccttttaccggaagaagcttaaggaggtgtggaaacctgccgtgcggtctggcggatctggcggaggctccaccagccccaagaaaaagagaaaagtctaagctgccttctgcggggcttgccttctggccatgcccttcttctctcccttgcacctgtacctcttggtctttgaataaagcctgagtaggaaggctagcaaaaaaaaaaaaaaaaaaaaaaaaaaaaaaaaaaaaaaaaaaaaaaaaaaaaaaaaaaaaaaaaaaaaaaaaaaaaaaaa

SEQ ID NO: 10338 - RNA, 8787 nt, synthetic construct
  source 1..8787: mol_type = other RNA
aggaaataagagagaaaagaagagtaagaagaaatataagagccaccatggcccctaagaagaagcgtaaagtgagccggatgaaccacgaccaggagttcgacccccctaaggtgtaccctcccgtccccgccgagaagagaaagcccatccgggtcctgagcctgttcgatggcatcgccaccggtctgctggtgctgaaggacctgggcatccaggtggataggtacattgcctccgaggtgtgcgaggactccatcaccgtgggaatggtgcgtcatcagggcaagatcatgtacgtgggcgacgtgcggagcgtgacacagaagcatatccaggagtggggccctttcgacctggtgatcggcggcagcccttgcaatgacctgagcatcgtgaacccagcccggaagggcctgtacgagggaaccggcagactgttcttcgagttttacagactgctgcacgacgcccggcctaaggaaggcgacgaccggcccttcttttggctgttcgagaatgtggtggccatgggagtcagcgacaagcgggatattagccggttcctggagagcaaccccgtgatgatcgatgccaaggaagtgagcgccgcccaccgggccagatacttctggggcaatctgcctggcatgaacagacccctggccagcaccgtgaacgacaagctggagctgcaggagtgcctggagcacggccggatcgccaagttcagcaaggtgagaaccatcaccacccgaagcaacagcatcaaacaaggcaaggaccagcactttcctgtgttcatgaacgagaaggaggacatcctgtggtgtaccgagatggagagagtgttcgggttcccagtccactacacagatgtcagcaacatgtctagactggccagacagagactgctgggaagaagctggtccgtccctgtgatcagacacctgttcgcccctctgaaggagtacttcgcctgcgtgagcagcggcaacagcaacgccaacagccggggccccagcttctctagcggcctggtgccactgtccctgagagggagccacatgggccccatggagatctacaaaaccgtgagcgcctggaagcggcagcctgtgcgcgtgctgagcctgtttcggaatatcgataaagtcctgaaaagcctgggattcctggagagcggctctggctccggcggtggcaccctgaagtacgtggaggatgtgacaaacgtggtcagacgggatgtggagaagtggggccccttcgatctggtgtacggcagcacccaacccctgggcagctcttgtgaccggtgccctggctggtacatgtttcagttccaccggatcctgcagtacgccctgccgagacaggagtcccagcggccattcttttggattttcatggacaacttgctgctgaccgaggatgaccaggaaactaccactcggttcctgcagaccgaagccgtgaccctgcaggacgtgagaggccgggactaccagaacgccatgcgggtgtggtccaacatccctggactgaaaagcaagcacgcacctctgacccctaaagaagaggagtacctgcaggcccaggtgcggagcagaagcaagctggacgcccctaaggtggatctgctggtgaagaattgcctcctgcccctgagagagtacttcaagtatttcagccagaatagtctgcccctgggaggcagcggcggcggcgccgaggagctggtgaccttcgaggacgtggccgtgcacttcagccccgaggagctgccctacctgagcgccagccagaggaacctgtacagggaggtgatgctggagaactacaggaacctggtgagcctgggctaccagttccccaagcccgacatcatcagccagctggaggaggaggagagccacgccagggaggaggacggcagcaccgtgacctgccaggactgggaggagcagagcggcggcccaagcagcggcgcccctcctcccagcggcggcaggcggcccaagcagcggcgcccctcctcccagcggcggcagcccagccggctccccaacctctaccgaggagggcacctctgagtccgccacccccgagagcggccctggcacctccaccgagcccagcgagggcagcgcacccggcagccctgccggcagccccacctccacagaggagggaaccagcaccgagcccagcgaaggcagcgccccaggcaccagcaccgagcctagtgagcaggagattaaacggatcaacaagatcagaagaagacttgtgaaagacagcaacaccaagaaggccggcaagacaggccccatgaaaaccctgctggttagagtgatgacacccgatctgagagagcggctggaaaacctgagaaagaagcctgaaaatatcccccagcccatcagcaatacatctagagccaacctgaataagctgctgaccgattacaccgaaatgaagaaggcgatcctgcatgtgtactgggaagagttccagaaggaccctgtgggcctgatgagccgggtggcccagcctgccagcaagaagatcgatcagaacaagctgaaacctgagatggacgagaagggcaacctgaccaccgccggctttgcctgctctcagtgtggccagcccctgttcgtgtacaagctggagcaggtgtctgagaagggcaaggcttacaccaactacttcggacggtgcaatgtggccgagcacgaaaagctgatcctgctggcccagctgaagcccgagaaggatagcgacgaagccgtgacatatagcctgggaaagtttgggcagagggccctggatttctacagcattcatgtgaccaaggagtccacccaccccgtgaagcccctggcccagatcgccggaaacagatacgcctccggacctgtgggaaaggccctgagcgacgcatgtatgggcacaatcgcctccttcctgtctaagtaccaggacatcatcatcgaacaccagaaggtggtgaagggcaaccagaagagactggagagcctgcgggagctggccggcaaggaaaacctggaataccctagcgtgaccctgccacctcagcctcacaccaaggagggcgttgatgcctacaacgaagtgatcgcccgggtgcgaatgtgggtgaacctgaacctgtggcagaagctgaagctaagcagagatgatgccaagcctctgctgagactgaagggattcccttcctttcctctggtcgagagacaggccaacgaagtggactggtgggacatggtgtgtaacgtgaagaagctgatcaacgagaaaaaggaggatggcaaggtgttttggcagaatctggctggctacaagagacaggaagccctgagaccatacctgagcagcgaggaagatcggaagaagggaaagaaattcgctcggtaccagctgggcgacctgctgctgcacctggaaaagaagcacggcgaggactggggaaaggtgtacgacgaggcctgggagcggattgacaagaaagtggaaggcctgagcaagcacatcaagctggaagaggaacggagaagcgaggacgcccagagcaaggccgccctgaccgactggctgcgggctaaggccagcttcgtgatcgagggcctgaaggaggccgacaaggacgagttctgcagatgcgagctgaagctgcagaagtggtacggggacctgcggggaaagcccttcgccatcgaagccgagaacagcatcctggacatcagcggcttcagcaagcagtacaactgtgccttcatctggcagaaggacggcgtgaagaagctgaacctgtacctgatcatcaactacttcaagggcggcaagctgcggttcaagaagatcaaacctgaagccttcgaagccaacagattctacaccgtgatcaacaaaaagagcggcgagatcgtgcccatggaggtgaacttcaacttcgacgaccccaacctgatcatcctgcctctggcctttggcaagagacagggcagagaattcatctggaacgacctgctgtccctggaaaccggcagcctgaagctggccaacggaagagtgatcgagaagacactgtacaacagaagaacccggcaggatgagcctgccctgttcgtggccctgaccttcgagcggcgggaggtcctggactcctccaatatcaaaccaatgaacctgatcggcgtggcaagaggcgaaaacatccccgccgtgatcgccctgaccgaccccgagggctgcccactgagccggtttaaggatagcctgggaaacccaacccacatcctgagaatcggcgagagctataaggagaagcagcggaccatccaggccaagaaggaggtggagcagcggagagccggcggctacagccggaagtacgccagcaaagccaagaatctggcagacgatatggtgagaaacaccgctagagatctgctgtactacgccgtgacccaggatgccatgctgatcttcgccaacctgagccggggcttcggccggcagggcaagcggaccttcatggccgagagacagtacacacggatggaggactggctgaccgccaagctggcctacgagggcctgagcaagacctacctgtccaagacactggcccagtacacctccaagacatgcagcaactgtgggtttaccatcaccagcgccgactacgacagggtgctggagaagctgaagaagacagcaacaggctggatgaccacaattaacggcaaggagctgaaggtggagggccagattacctactacaacagatacaagagacagaacgtagtcaaggacctgtccgtcgagctggatagactgagcgaagaatctgtgaacaacgacatctcctcctggacaaagggcagaagcggagaagctctgagcctcctgaagaaaagattctcccatagacccgtgcaggagaagttcgtgtgcctgaactgcggcttcgagacacacgcagccgagcaagccgccctgaacatcgccagatcctggctgttcctgcggagccaggagtacaagaaataccagacaaacaagacaaccggcaacaccgataagagagccttcgtcgagacctggcagtccttttaccggaagaagcttaaggaggtgtggaaacctgccgtgcggtctggcggatctggcggaggctccaccagccccaagaaaaagagaaaagtctaagctgccttctgcggggcttgccttctggccatgcccttcttctctcccttgcacctgtacctcttggtctttgaataaagcctgagtaggaaggctagcaaaaaaaaaaaaaaaaaaaaaaaaaaaaaaaaaaaaaaaaaaaaaaaaaaaaaaaaaaaaaaaaaaaaaaaaaaaaaaaagcccagccggctccccaacctctaccgaggagggcacctctgagtccgccacccccgagagcggccctggcacctccaccgagcccagcgagggcagcgcacccggcagccctgccggcagccccacctccacagaggagggaaccagcaccgagcccagcgaaggcagcgccccaggcaccagcaccgagcctagtgagcaggagattaaacggatcaacaagatcagaagaagacttgtgaaagacagcaacaccaagaaggccggcaagacaggccccatgaaaaccctgctggttagagtgatgacacccgatctgagagagcggctggaaaacctgagaaagaagcctgaaaatatcccccagcccatcagcaatacatctagagccaacctgaataagctgctgaccgattacaccgaaatgaagaaggcgatcctgcatgtgtactgggaagagttccagaaggaccctgtgggcctgatgagccgggtggcccagcctgccagcaagaagatcgatcagaacaagctgaaacctgagatggacgagaagggcaacctgaccaccgccggctttgcctgctctcagtgtggccagcccctgttcgtgtacaagctggagcaggtgtctgagaagggcaaggcttacaccaactacttcggacggtgcaatgtggccgagcacgaaaagctgatcctgctggcccagctgaagcccgagaaggatagcgacgaagccgtgacatatagcctgggaaagtttgggcagagggccctggatttctacagcattcatgtgaccaaggagtccacccaccccgtgaagcccctggcccagatcgccggaaacagatacgcctccggacctgtgggaaaggccctgagcgacgcatgtatgggcacaatcgcctccttcctgtctaagtaccaggacatcatcatcgaacaccagaaggtggtgaagggcaaccagaagagactggagagcctgcgggagctggccggcaaggaaaacctggaataccctagcgtgaccctgccacctcagcctcacaccaaggagggcgttgatgcctacaacgaagtgatcgcccgggtgcgaatgtgggtgaacctgaacctgtggcagaagctgaagctaagcagagatgatgccaagcctctgctgagactgaagggattcccttcctttcctctggtcgagagacaggccaacgaagtggactggtgggacatggtgtgtaacgtgaagaagctgatcaacgagaaaaaggaggatggcaaggtgttttggcagaatctggctggctacaagagacaggaagccctgagaccatacctgagcagcgaggaagatcggaagaagggaaagaaattcgctcggtaccagctgggcgacctgctgctgcacctggaaaagaagcacggcgaggactggggaaaggtgtacgacgaggcctgggagcggattgacaagaaagtggaaggcctgagcaagcacatcaagctggaagaggaacggagaagcgaggacgcccagagcaaggccgccctgaccgactggctgcgggctaaggccagcttcgtgatcgagggcctgaaggaggccgacaaggacgagttctgcagatgcgagctgaagctgcagaagtggtacggggacctgcggggaaagcccttcgccatcgaagccgagaacagcatcctggacatcagcggcttcagcaagcagtacaactgtgccttcatctggcagaaggacggcgtgaagaagctgaacctgtacctgatcatcaactacttcaagggcggcaagctgcggttcaagaagatcaaacctgaagccttcgaagccaacagattctacaccgtgatcaacaaaaagagcggcgagatcgtgcccatggaggtgaacttcaacttcgacgaccccaacctgatcatcctgcctctggcctttggcaagagacagggcagagaattcatctggaacgacctgctgtccctggaaaccggcagcctgaagctggccaacggaagagtgatcgagaagacactgtacaacagaagaacccggcaggatgagcctgccctgttcgtggccctgaccttcgagcggcgggaggtcctggactcctccaatatcaaaccaatgaacctgatcggcgtggcaagaggcgaaaacatccccgccgtgatcgccctgaccgaccccgagggctgcccactgagccggtttaaggatagcctgggaaacccaacccacatcctgagaatcggcgagagctataaggagaagcagcggaccatccaggccaagaaggaggtggagcagcggagagccggcggctacagccggaagtacgccagcaaagccaagaatctggcagacgatatggtgagaaacaccgctagagatctgctgtactacgccgtgacccaggatgccatgctgatcttcgccaacctgagccggggcttcggccggcagggcaagcggaccttcatggccgagagacagtacacacggatggaggactggctgaccgccaagctggcctacgagggcctgagcaagacctacctgtccaagacactggcccagtacacctccaagacatgcagcaactgtgggtttaccatcaccagcgccgactacgacagggtgctggagaagctgaagaagacagcaacaggctggatgaccacaattaacggcaaggagctgaaggtggagggccagattacctactacaacagatacaagagacagaacgtagtcaaggacctgtccgtcgagctggatagactgagcgaagaatctgtgaacaacgacatctcctcctggacaaagggcagaagcggagaagctctgagcctcctgaagaaaagattctcccatagacccgtgcaggagaagttcgtgtgcctgaactgcggcttcgagacacacgcagccgagcaagccgccctgaacatcgccagatcctggctgttcctgcggagccaggagtacaagaaataccagacaaacaagacaaccggcaacaccgataagagagccttcgtcgagacctggcagtccttttaccggaagaagcttaaggaggtgtggaaacctgccgtgcggtctggcggatctggcggaggctccaccagccccaagaaaaagagaaaagtctaagctgccttctgcggggcttgccttctggccatgcccttcttctctcccttgcacctgtacctcttggtctttgaataaagcctgagtaggaaggctagcaaaaaaaaaaaaaaaaaaaaaaaaaaaaaaaaaaaaaaaaaaaaaaaaaaaaaaaaaaaaaaaaaaaaaaaaaaaaaaaa

SEQ ID NO: 10339 - RNA, 8784 nt, synthetic construct
  source 1..8784: mol_type = other RNA
aggaaataagagagaaaagaagagtaagaagaaatataagagccaccatggcccctaagaagaagcgtaaagtgagccggatgaaccacgaccaggagttcgacccccctaaggtgtaccctcccgtccccgccgagaagagaaagcccatccgggtcctgagcctgttcgatggcatcgccaccggtctgctggtgctgaaggacctgggcatccaggtggataggtacattgcctccgaggtgtgcgaggactccatcaccgtgggaatggtgcgtcatcagggcaagatcatgtacgtgggcgacgtgcggagcgtgacacagaagcatatccaggagtggggccctttcgacctggtgatcggcggcagcccttgcaatgacctgagcatcgtgaacccagcccggaagggcctgtacgagggaaccggcagactgttcttcgagttttacagactgctgcacgacgcccggcctaaggaaggcgacgaccggcccttcttttggctgttcgagaatgtggtggccatgggagtcagcgacaagcgggatattagccggttcctggagagcaaccccgtgatgatcgatgccaaggaagtgagcgccgcccaccgggccagatacttctggggcaatctgcctggcatgaacagacccctggccagcaccgtgaacgacaagctggagctgcaggagtgcctggagcacggccggatcgccaagttcagcaaggtgagaaccatcaccacccgaagcaacagcatcaaacaaggcaaggaccagcactttcctgtgttcatgaacgagaaggaggacatcctgtggtgtaccgagatggagagagtgttcgggttcccagtccactacacagatgtcagcaacatgtctagactggccagacagagactgctgggaagaagctggtccgtccctgtgatcagacacctgttcgcccctctgaaggagtacttcgcctgcgtgagcagcggcaacagcaacgccaacagccggggccccagcttctctagcggcctggtgccactgtccctgagagggagccacatgggccccatggagatctacaaaaccgtgagcgcctggaagcggcagcctgtgcgcgtgctgagcctgtttcggaatatcgataaagtcctgaaaagcctgggattcctggagagcggctctggctccggcggtggcaccctgaagtacgtggaggatgtgacaaacgtggtcagacgggatgtggagaagtggggccccttcgatctggtgtacggcagcacccaacccctgggcagctcttgtgaccggtgccctggctggtacatgtttcagttccaccggatcctgcagtacgccctgccgagacaggagtcccagcggccattcttttggattttcatggacaacttgctgctgaccgaggatgaccaggaaactaccactcggttcctgcagaccgaagccgtgaccctgcaggacgtgagaggccgggactaccagaacgccatgcgggtgtggtccaacatccctggactgaaaagcaagcacgcacctctgacccctaaagaagaggagtacctgcaggcccaggtgcggagcagaagcaagctggacgcccctaaggtggatctgctggtgaagaattgcctcctgcccctgagagagtacttcaagtatttcagccagaatagtctgcccctgggaggcagcggcggcggcgacaccgtggtgttcgaggacgtggtggtggacttcaccctggaggagtgggccctgctgaaccccgcccagagaaagctgtacagagacgtgatgctggagaccttcaagcacctggccagcgtggacaacgaggcccagctgaaggccagcggcagcatcagccagcaggacaccagcggcgagaagctgagcctgaagcagaagatcgagaagttcaccagaaagaacatctgggccggcggcccaagcagcggcgcccctcctcccagcggcggcaggcggcccaagcagcggcgcccctcctcccagcggcggcagcccagccggctccccaacctctaccgaggagggcacctctgagtccgccacccccgagagcggccctggcacctccaccgagcccagcgagggcagcgcacccggcagccctgccggcagccccacctccacagaggagggaaccagcaccgagcccagcgaaggcagcgccccaggcaccagcaccgagcctagtgagcaggagattaaacggatcaacaagatcagaagaagacttgtgaaagacagcaacaccaagaaggccggcaagacaggccccatgaaaaccctgctggttagagtgatgacacccgatctgagagagcggctggaaaacctgagaaagaagcctgaaaatatcccccagcccatcagcaatacatctagagccaacctgaataagctgctgaccgattacaccgaaatgaagaaggcgatcctgcatgtgtactgggaagagttccagaaggaccctgtgggcctgatgagccgggtggcccagcctgccagcaagaagatcgatcagaacaagctgaaacctgagatggacgagaagggcaacctgaccaccgccggctttgcctgctctcagtgtggccagcccctgttcgtgtacaagctggagcaggtgtctgagaagggcaaggcttacaccaactacttcggacggtgcaatgtggccgagcacgaaaagctgatcctgctggcccagctgaagcccgagaaggatagcgacgaagccgtgacatatagcctgggaaagtttgggcagagggccctggatttctacagcattcatgtgaccaaggagtccacccaccccgtgaagcccctggcccagatcgccggaaacagatacgcctccggacctgtgggaaaggccctgagcgacgcatgtatgggcacaatcgcctccttcctgtctaagtaccaggacatcatcatcgaacaccagaaggtggtgaagggcaaccagaagagactggagagcctgcgggagctggccggcaaggaaaacctggaataccctagcgtgaccctgccacctcagcctcacaccaaggagggcgttgatgcctacaacgaagtgatcgcccgggtgcgaatgtgggtgaacctgaacctgtggcagaagctgaagctaagcagagatgatgccaagcctctgctgagactgaagggattcccttcctttcctctggtcgagagacaggccaacgaagtggactggtgggacatggtgtgtaacgtgaagaagctgatcaacgagaaaaaggaggatggcaaggtgttttggcagaatctggctggctacaagagacaggaagccctgagaccatacctgagcagcgaggaagatcggaagaagggaaagaaattcgctcggtaccagctgggcgacctgctgctgcacctggaaaagaagcacggcgaggactggggaaaggtgtacgacgaggcctgggagcggattgacaagaaagtggaaggcctgagcaagcacatcaagctggaagaggaacggagaagcgaggacgcccagagcaaggccgccctgaccgactggctgcgggctaaggccagcttcgtgatcgagggcctgaaggaggccgacaaggacgagttctgcagatgcgagctgaagctgcagaagtggtacggggacctgcggggaaagcccttcgccatcgaagccgagaacagcatcctggacatcagcggcttcagcaagcagtacaactgtgccttcatctggcagaaggacggcgtgaagaagctgaacctgtacctgatcatcaactacttcaagggcggcaagctgcggttcaagaagatcaaacctgaagccttcgaagccaacagattctacaccgtgatcaacaaaaagagcggcgagatcgtgcccatggaggtgaacttcaacttcgacgaccccaacctgatcatcctgcctctggcctttggcaagagacagggcagagaattcatctggaacgacctgctgtccctggaaaccggcagcctgaagctggccaacggaagagtgatcgagaagacactgtacaacagaagaacccggcaggatgagcctgccctgttcgtggccctgaccttcgagcggcgggaggtcctggactcctccaatatcaaaccaatgaacctgatcggcgtggcaagaggcgaaaacatccccgccgtgatcgccctgaccgaccccgagggctgcccactgagccggtttaaggatagcctgggaaacccaacccacatcctgagaatcggcgagagctataaggagaagcagcggaccatccaggccaagaaggaggtggagcagcggagagccggcggctacagccggaagtacgccagcaaagccaagaatctggcagacgatatggtgagaaacaccgctagagatctgctgtactacgccgtgacccaggatgccatgctgatcttcgccaacctgagccggggcttcggccggcagggcaagcggaccttcatggccgagagacagtacacacggatggaggactggctgaccgccaagctggcctacgagggcctgagcaagacctacctgtccaagacactggcccagtacacctccaagacatgcagcaactgtgggtttaccatcaccagcgccgactacgacagggtgctggagaagctgaagaagacagcaacaggctggatgaccacaattaacggcaaggagctgaaggtggagggccagattacctactacaacagatacaagagacagaacgtagtcaaggacctgtccgtcgagctggatagactgagcgaagaatctgtgaacaacgacatctcctcctggacaaagggcagaagcggagaagctctgagcctcctgaagaaaagattctcccatagacccgtgcaggagaagttcgtgtgcctgaactgcggcttcgagacacacgcagccgagcaagccgccctgaacatcgccagatcctggctgttcctgcggagccaggagtacaagaaataccagacaaacaagacaaccggcaacaccgataagagagccttcgtcgagacctggcagtccttttaccggaagaagcttaaggaggtgtggaaacctgccgtgcggtctggcggatctggcggaggctccaccagccccaagaaaaagagaaaagtctaagctgccttctgcggggcttgccttctggccatgcccttcttctctcccttgcacctgtacctcttggtctttgaataaagcctgagtaggaaggctagcaaaaaaaaaaaaaaaaaaaaaaaaaaaaaaaaaaaaaaaaaaaaaaaaaaaaaaaaaaaaaaaaaaaaaaaaaaaaaaaagcccagccggctccccaacctctaccgaggagggcacctctgagtccgccacccccgagagcggccctggcacctccaccgagcccagcgagggcagcgcacccggcagccctgccggcagccccacctccacagaggagggaaccagcaccgagcccagcgaaggcagcgccccaggcaccagcaccgagcctagtgagcaggagattaaacggatcaacaagatcagaagaagacttgtgaaagacagcaacaccaagaaggccggcaagacaggccccatgaaaaccctgctggttagagtgatgacacccgatctgagagagcggctggaaaacctgagaaagaagcctgaaaatatcccccagcccatcagcaatacatctagagccaacctgaataagctgctgaccgattacaccgaaatgaagaaggcgatcctgcatgtgtactgggaagagttccagaaggaccctgtgggcctgatgagccgggtggcccagcctgccagcaagaagatcgatcagaacaagctgaaacctgagatggacgagaagggcaacctgaccaccgccggctttgcctgctctcagtgtggccagcccctgttcgtgtacaagctggagcaggtgtctgagaagggcaaggcttacaccaactacttcggacggtgcaatgtggccgagcacgaaaagctgatcctgctggcccagctgaagcccgagaaggatagcgacgaagccgtgacatatagcctgggaaagtttgggcagagggccctggatttctacagcattcatgtgaccaaggagtccacccaccccgtgaagcccctggcccagatcgccggaaacagatacgcctccggacctgtgggaaaggccctgagcgacgcatgtatgggcacaatcgcctccttcctgtctaagtaccaggacatcatcatcgaacaccagaaggtggtgaagggcaaccagaagagactggagagcctgcgggagctggccggcaaggaaaacctggaataccctagcgtgaccctgccacctcagcctcacaccaaggagggcgttgatgcctacaacgaagtgatcgcccgggtgcgaatgtgggtgaacctgaacctgtggcagaagctgaagctaagcagagatgatgccaagcctctgctgagactgaagggattcccttcctttcctctggtcgagagacaggccaacgaagtggactggtgggacatggtgtgtaacgtgaagaagctgatcaacgagaaaaaggaggatggcaaggtgttttggcagaatctggctggctacaagagacaggaagccctgagaccatacctgagcagcgaggaagatcggaagaagggaaagaaattcgctcggtaccagctgggcgacctgctgctgcacctggaaaagaagcacggcgaggactggggaaaggtgtacgacgaggcctgggagcggattgacaagaaagtggaaggcctgagcaagcacatcaagctggaagaggaacggagaagcgaggacgcccagagcaaggccgccctgaccgactggctgcgggctaaggccagcttcgtgatcgagggcctgaaggaggccgacaaggacgagttctgcagatgcgagctgaagctgcagaagtggtacggggacctgcggggaaagcccttcgccatcgaagccgagaacagcatcctggacatcagcggcttcagcaagcagtacaactgtgccttcatctggcagaaggacggcgtgaagaagctgaacctgtacctgatcatcaactacttcaagggcggcaagctgcggttcaagaagatcaaacctgaagccttcgaagccaacagattctacaccgtgatcaacaaaaagagcggcgagatcgtgcccatggaggtgaacttcaacttcgacgaccccaacctgatcatcctgcctctggcctttggcaagagacagggcagagaattcatctggaacgacctgctgtccctggaaaccggcagcctgaagctggccaacggaagagtgatcgagaagacactgtacaacagaagaacccggcaggatgagcctgccctgttcgtggccctgaccttcgagcggcgggaggtcctggactcctccaatatcaaaccaatgaacctgatcggcgtggcaagaggcgaaaacatccccgccgtgatcgccctgaccgaccccgagggctgcccactgagccggtttaaggatagcctgggaaacccaacccacatcctgagaatcggcgagagctataaggagaagcagcggaccatccaggccaagaaggaggtggagcagcggagagccggcggctacagccggaagtacgccagcaaagccaagaatctggcagacgatatggtgagaaacaccgctagagatctgctgtactacgccgtgacccaggatgccatgctgatcttcgccaacctgagccggggcttcggccggcagggcaagcggaccttcatggccgagagacagtacacacggatggaggactggctgaccgccaagctggcctacgagggcctgagcaagacctacctgtccaagacactggcccagtacacctccaagacatgcagcaactgtgggtttaccatcaccagcgccgactacgacagggtgctggagaagctgaagaagacagcaacaggctggatgaccacaattaacggcaaggagctgaaggtggagggccagattacctactacaacagatacaagagacagaacgtagtcaaggacctgtccgtcgagctggatagactgagcgaagaatctgtgaacaacgacatctcctcctggacaaagggcagaagcggagaagctctgagcctcctgaagaaaagattctcccatagacccgtgcaggagaagttcgtgtgcctgaactgcggcttcgagacacacgcagccgagcaagccgccctgaacatcgccagatcctggctgttcctgcggagccaggagtacaagaaataccagacaaacaagacaaccggcaacaccgataagagagccttcgtcgagacctggcagtccttttaccggaagaagcttaaggaggtgtggaaacctgccgtgcggtctggcggatctggcggaggctccaccagccccaagaaaaagagaaaagtctaagctgccttctgcggggcttgccttctggccatgcccttcttctctcccttgcacctgtacctcttggtctttgaataaagcctgagtaggaaggctagcaaaaaaaaaaaaaaaaaaaaaaaaaaaaaaaaaaaaaaaaaaaaaaaaaaaaaaaaaaaaaaaaaaaaaaaaaaaaaaaa

SEQ ID NO: 10340 - RNA, 8787 nt, synthetic construct
  source 1..8787: mol_type = other RNA
aggaaataagagagaaaagaagagtaagaagaaatataagagccaccatggcccctaagaagaagcgtaaagtgagccggatgaaccacgaccaggagttcgacccccctaaggtgtaccctcccgtccccgccgagaagagaaagcccatccgggtcctgagcctgttcgatggcatcgccaccggtctgctggtgctgaaggacctgggcatccaggtggataggtacattgcctccgaggtgtgcgaggactccatcaccgtgggaatggtgcgtcatcagggcaagatcatgtacgtgggcgacgtgcggagcgtgacacagaagcatatccaggagtggggccctttcgacctggtgatcggcggcagcccttgcaatgacctgagcatcgtgaacccagcccggaagggcctgtacgagggaaccggcagactgttcttcgagttttacagactgctgcacgacgcccggcctaaggaaggcgacgaccggcccttcttttggctgttcgagaatgtggtggccatgggagtcagcgacaagcgggatattagccggttcctggagagcaaccccgtgatgatcgatgccaaggaagtgagcgccgcccaccgggccagatacttctggggcaatctgcctggcatgaacagacccctggccagcaccgtgaacgacaagctggagctgcaggagtgcctggagcacggccggatcgccaagttcagcaaggtgagaaccatcaccacccgaagcaacagcatcaaacaaggcaaggaccagcactttcctgtgttcatgaacgagaaggaggacatcctgtggtgtaccgagatggagagagtgttcgggttcccagtccactacacagatgtcagcaacatgtctagactggccagacagagactgctgggaagaagctggtccgtccctgtgatcagacacctgttcgcccctctgaaggagtacttcgcctgcgtgagcagcggcaacagcaacgccaacagccggggccccagcttctctagcggcctggtgccactgtccctgagagggagccacatgggccccatggagatctacaaaaccgtgagcgcctggaagcggcagcctgtgcgcgtgctgagcctgtttcggaatatcgataaagtcctgaaaagcctgggattcctggagagcggctctggctccggcggtggcaccctgaagtacgtggaggatgtgacaaacgtggtcagacgggatgtggagaagtggggccccttcgatctggtgtacggcagcacccaacccctgggcagctcttgtgaccggtgccctggctggtacatgtttcagttccaccggatcctgcagtacgccctgccgagacaggagtcccagcggccattcttttggattttcatggacaacttgctgctgaccgaggatgaccaggaaactaccactcggttcctgcagaccgaagccgtgaccctgcaggacgtgagaggccgggactaccagaacgccatgcgggtgtggtccaacatccctggactgaaaagcaagcacgcacctctgacccctaaagaagaggagtacctgcaggcccaggtgcggagcagaagcaagctggacgcccctaaggtggatctgctggtgaagaattgcctcctgcccctgagagagtacttcaagtatttcagccagaatagtctgcccctgggaggcagcggcggcggccagcagaggcccgtgagcttcaaggacgtggtggtgggcttcacccaggaggagtggcacaggctgaaccccgcccagagggccctgtacagggacgtgatgctggagacctacagcaacctggtgagcgtgggctacgagggcaccaagccctacgtgatcctgaagctggagcaggaggaggccccctggatctgcgaggccgcctgcagcggctgccactgccaggagaacatctgccagggcggcccaagcagcggcgcccctcctcccagcggcggcaggcggcccaagcagcggcgcccctcctcccagcggcggcagcccagccggctccccaacctctaccgaggagggcacctctgagtccgccacccccgagagcggccctggcacctccaccgagcccagcgagggcagcgcacccggcagccctgccggcagccccacctccacagaggagggaaccagcaccgagcccagcgaaggcagcgccccaggcaccagcaccgagcctagtgagcaggagattaaacggatcaacaagatcagaagaagacttgtgaaagacagcaacaccaagaaggccggcaagacaggccccatgaaaaccctgctggttagagtgatgacacccgatctgagagagcggctggaaaacctgagaaagaagcctgaaaatatcccccagcccatcagcaatacatctagagccaacctgaataagctgctgaccgattacaccgaaatgaagaaggcgatcctgcatgtgtactgggaagagttccagaaggaccctgtgggcctgatgagccgggtggcccagcctgccagcaagaagatcgatcagaacaagctgaaacctgagatggacgagaagggcaacctgaccaccgccggctttgcctgctctcagtgtggccagcccctgttcgtgtacaagctggagcaggtgtctgagaagggcaaggcttacaccaactacttcggacggtgcaatgtggccgagcacgaaaagctgatcctgctggcccagctgaagcccgagaaggatagcgacgaagccgtgacatatagcctgggaaagtttgggcagagggccctggatttctacagcattcatgtgaccaaggagtccacccaccccgtgaagcccctggcccagatcgccggaaacagatacgcctccggacctgtgggaaaggccctgagcgacgcatgtatgggcacaatcgcctccttcctgtctaagtaccaggacatcatcatcgaacaccagaaggtggtgaagggcaaccagaagagactggagagcctgcgggagctggccggcaaggaaaacctggaataccctagcgtgaccctgccacctcagcctcacaccaaggagggcgttgatgcctacaacgaagtgatcgcccgggtgcgaatgtgggtgaacctgaacctgtggcagaagctgaagctaagcagagatgatgccaagcctctgctgagactgaagggattcccttcctttcctctggtcgagagacaggccaacgaagtggactggtgggacatggtgtgtaacgtgaagaagctgatcaacgagaaaaaggaggatggcaaggtgttttggcagaatctggctggctacaagagacaggaagccctgagaccatacctgagcagcgaggaagatcggaagaagggaaagaaattcgctcggtaccagctgggcgacctgctgctgcacctggaaaagaagcacggcgaggactggggaaaggtgtacgacgaggcctgggagcggattgacaagaaagtggaaggcctgagcaagcacatcaagctggaagaggaacggagaagcgaggacgcccagagcaaggccgccctgaccgactggctgcgggctaaggccagcttcgtgatcgagggcctgaaggaggccgacaaggacgagttctgcagatgcgagctgaagctgcagaagtggtacggggacctgcggggaaagcccttcgccatcgaagccgagaacagcatcctggacatcagcggcttcagcaagcagtacaactgtgccttcatctggcagaaggacggcgtgaagaagctgaacctgtacctgatcatcaactacttcaagggcggcaagctgcggttcaagaagatcaaacctgaagccttcgaagccaacagattctacaccgtgatcaacaaaaagagcggcgagatcgtgcccatggaggtgaacttcaacttcgacgaccccaacctgatcatcctgcctctggcctttggcaagagacagggcagagaattcatctggaacgacctgctgtccctggaaaccggcagcctgaagctggccaacggaagagtgatcgagaagacactgtacaacagaagaacccggcaggatgagcctgccctgttcgtggccctgaccttcgagcggcgggaggtcctggactcctccaatatcaaaccaatgaacctgatcggcgtggcaagaggcgaaaacatccccgccgtgatcgccctgaccgaccccgagggctgcccactgagccggtttaaggatagcctgggaaacccaacccacatcctgagaatcggcgagagctataaggagaagcagcggaccatccaggccaagaaggaggtggagcagcggagagccggcggctacagccggaagtacgccagcaaagccaagaatctggcagacgatatggtgagaaacaccgctagagatctgctgtactacgccgtgacccaggatgccatgctgatcttcgccaacctgagccggggcttcggccggcagggcaagcggaccttcatggccgagagacagtacacacggatggaggactggctgaccgccaagctggcctacgagggcctgagcaagacctacctgtccaagacactggcccagtacacctccaagacatgcagcaactgtgggtttaccatcaccagcgccgactacgacagggtgctggagaagctgaagaagacagcaacaggctggatgaccacaattaacggcaaggagctgaaggtggagggccagattacctactacaacagatacaagagacagaacgtagtcaaggacctgtccgtcgagctggatagactgagcgaagaatctgtgaacaacgacatctcctcctggacaaagggcagaagcggagaagctctgagcctcctgaagaaaagattctcccatagacccgtgcaggagaagttcgtgtgcctgaactgcggcttcgagacacacgcagccgagcaagccgccctgaacatcgccagatcctggctgttcctgcggagccaggagtacaagaaataccagacaaacaagacaaccggcaacaccgataagagagccttcgtcgagacctggcagtccttttaccggaagaagcttaaggaggtgtggaaacctgccgtgcggtctggcggatctggcggaggctccaccagccccaagaaaaagagaaaagtctaagctgccttctgcggggcttgccttctggccatgcccttcttctctcccttgcacctgtacctcttggtctttgaataaagcctgagtaggaaggctagcaaaaaaaaaaaaaaaaaaaaaaaaaaaaaaaaaaaaaaaaaaaaaaaaaaaaaaaaaaaaaaaaaaaaaaaaaaaaaaaagcccagccggctccccaacctctaccgaggagggcacctctgagtccgccacccccgagagcggccctggcacctccaccgagcccagcgagggcagcgcacccggcagccctgccggcagccccacctccacagaggagggaaccagcaccgagcccagcgaaggcagcgccccaggcaccagcaccgagcctagtgagcaggagattaaacggatcaacaagatcagaagaagacttgtgaaagacagcaacaccaagaaggccggcaagacaggccccatgaaaaccctgctggttagagtgatgacacccgatctgagagagcggctggaaaacctgagaaagaagcctgaaaatatcccccagcccatcagcaatacatctagagccaacctgaataagctgctgaccgattacaccgaaatgaagaaggcgatcctgcatgtgtactgggaagagttccagaaggaccctgtgggcctgatgagccgggtggcccagcctgccagcaagaagatcgatcagaacaagctgaaacctgagatggacgagaagggcaacctgaccaccgccggctttgcctgctctcagtgtggccagcccctgttcgtgtacaagctggagcaggtgtctgagaagggcaaggcttacaccaactacttcggacggtgcaatgtggccgagcacgaaaagctgatcctgctggcccagctgaagcccgagaaggatagcgacgaagccgtgacatatagcctgggaaagtttgggcagagggccctggatttctacagcattcatgtgaccaaggagtccacccaccccgtgaagcccctggcccagatcgccggaaacagatacgcctccggacctgtgggaaaggccctgagcgacgcatgtatgggcacaatcgcctccttcctgtctaagtaccaggacatcatcatcgaacaccagaaggtggtgaagggcaaccagaagagactggagagcctgcgggagctggccggcaaggaaaacctggaataccctagcgtgaccctgccacctcagcctcacaccaaggagggcgttgatgcctacaacgaagtgatcgcccgggtgcgaatgtgggtgaacctgaacctgtggcagaagctgaagctaagcagagatgatgccaagcctctgctgagactgaagggattcccttcctttcctctggtcgagagacaggccaacgaagtggactggtgggacatggtgtgtaacgtgaagaagctgatcaacgagaaaaaggaggatggcaaggtgttttggcagaatctggctggctacaagagacaggaagccctgagaccatacctgagcagcgaggaagatcggaagaagggaaagaaattcgctcggtaccagctgggcgacctgctgctgcacctggaaaagaagcacggcgaggactggggaaaggtgtacgacgaggcctgggagcggattgacaagaaagtggaaggcctgagcaagcacatcaagctggaagaggaacggagaagcgaggacgcccagagcaaggccgccctgaccgactggctgcgggctaaggccagcttcgtgatcgagggcctgaaggaggccgacaaggacgagttctgcagatgcgagctgaagctgcagaagtggtacggggacctgcggggaaagcccttcgccatcgaagccgagaacagcatcctggacatcagcggcttcagcaagcagtacaactgtgccttcatctggcagaaggacggcgtgaagaagctgaacctgtacctgatcatcaactacttcaagggcggcaagctgcggttcaagaagatcaaacctgaagccttcgaagccaacagattctacaccgtgatcaacaaaaagagcggcgagatcgtgcccatggaggtgaacttcaacttcgacgaccccaacctgatcatcctgcctctggcctttggcaagagacagggcagagaattcatctggaacgacctgctgtccctggaaaccggcagcctgaagctggccaacggaagagtgatcgagaagacactgtacaacagaagaacccggcaggatgagcctgccctgttcgtggccctgaccttcgagcggcgggaggtcctggactcctccaatatcaaaccaatgaacctgatcggcgtggcaagaggcgaaaacatccccgccgtgatcgccctgaccgaccccgagggctgcccactgagccggtttaaggatagcctgggaaacccaacccacatcctgagaatcggcgagagctataaggagaagcagcggaccatccaggccaagaaggaggtggagcagcggagagccggcggctacagccggaagtacgccagcaaagccaagaatctggcagacgatatggtgagaaacaccgctagagatctgctgtactacgccgtgacccaggatgccatgctgatcttcgccaacctgagccggggcttcggccggcagggcaagcggaccttcatggccgagagacagtacacacggatggaggactggctgaccgccaagctggcctacgagggcctgagcaagacctacctgtccaagacactggcccagtacacctccaagacatgcagcaactgtgggtttaccatcaccagcgccgactacgacagggtgctggagaagctgaagaagacagcaacaggctggatgaccacaattaacggcaaggagctgaaggtggagggccagattacctactacaacagatacaagagacagaacgtagtcaaggacctgtccgtcgagctggatagactgagcgaagaatctgtgaacaacgacatctcctcctggacaaagggcagaagcggagaagctctgagcctcctgaagaaaagattctcccatagacccgtgcaggagaagttcgtgtgcctgaactgcggcttcgagacacacgcagccgagcaagccgccctgaacatcgccagatcctggctgttcctgcggagccaggagtacaagaaataccagacaaacaagacaaccggcaacaccgataagagagccttcgtcgagacctggcagtccttttaccggaagaagcttaaggaggtgtggaaacctgccgtgcggtctggcggatctggcggaggctccaccagccccaagaaaaagagaaaagtctaagctgccttctgcggggcttgccttctggccatgcccttcttctctcccttgcacctgtacctcttggtctttgaataaagcctgagtaggaaggctagcaaaaaaaaaaaaaaaaaaaaaaaaaaaaaaaaaaaaaaaaaaaaaaaaaaaaaaaaaaaaaaaaaaaaaaaaaaaaaaaa

SEQ ID NO: 10341 - RNA, 8787 nt, synthetic construct
  source 1..8787: mol_type = other RNA
aggaaataagagagaaaagaagagtaagaagaaatataagagccaccatggcccctaagaagaagcgtaaagtgagccggatgaaccacgaccaggagttcgacccccctaaggtgtaccctcccgtccccgccgagaagagaaagcccatccgggtcctgagcctgttcgatggcatcgccaccggtctgctggtgctgaaggacctgggcatccaggtggataggtacattgcctccgaggtgtgcgaggactccatcaccgtgggaatggtgcgtcatcagggcaagatcatgtacgtgggcgacgtgcggagcgtgacacagaagcatatccaggagtggggccctttcgacctggtgatcggcggcagcccttgcaatgacctgagcatcgtgaacccagcccggaagggcctgtacgagggaaccggcagactgttcttcgagttttacagactgctgcacgacgcccggcctaaggaaggcgacgaccggcccttcttttggctgttcgagaatgtggtggccatgggagtcagcgacaagcgggatattagccggttcctggagagcaaccccgtgatgatcgatgccaaggaagtgagcgccgcccaccgggccagatacttctggggcaatctgcctggcatgaacagacccctggccagcaccgtgaacgacaagctggagctgcaggagtgcctggagcacggccggatcgccaagttcagcaaggtgagaaccatcaccacccgaagcaacagcatcaaacaaggcaaggaccagcactttcctgtgttcatgaacgagaaggaggacatcctgtggtgtaccgagatggagagagtgttcgggttcccagtccactacacagatgtcagcaacatgtctagactggccagacagagactgctgggaagaagctggtccgtccctgtgatcagacacctgttcgcccctctgaaggagtacttcgcctgcgtgagcagcggcaacagcaacgccaacagccggggccccagcttctctagcggcctggtgccactgtccctgagagggagccacatgggccccatggagatctacaaaaccgtgagcgcctggaagcggcagcctgtgcgcgtgctgagcctgtttcggaatatcgataaagtcctgaaaagcctgggattcctggagagcggctctggctccggcggtggcaccctgaagtacgtggaggatgtgacaaacgtggtcagacgggatgtggagaagtggggccccttcgatctggtgtacggcagcacccaacccctgggcagctcttgtgaccggtgccctggctggtacatgtttcagttccaccggatcctgcagtacgccctgccgagacaggagtcccagcggccattcttttggattttcatggacaacttgctgctgaccgaggatgaccaggaaactaccactcggttcctgcagaccgaagccgtgaccctgcaggacgtgagaggccgggactaccagaacgccatgcgggtgtggtccaacatccctggactgaaaagcaagcacgcacctctgacccctaaagaagaggagtacctgcaggcccaggtgcggagcagaagcaagctggacgcccctaaggtggatctgctggtgaagaattgcctcctgcccctgagagagtacttcaagtatttcagccagaatagtctgcccctgggaggcagcggcggcggcctgcaggaggccgtgaccttcgaggacgtggccgtgaacttcagcaacgaggagtggcagtgcctgacccacgcccagaggcacctgtacaaggacgtgatgctggagaactacggcaacgtggtgagcctgggcttccccttccccaagccccccctgatcagccacctggagcaggaggccgagctgtgcgcccaggacaggcaggacagggagttcctgagctgcagctaccccgtgagcggcggcccaagcagcggcgcccctcctcccagcggcggcaggcggcccaagcagcggcgcccctcctcccagcggcggcagcccagccggctccccaacctctaccgaggagggcacctctgagtccgccacccccgagagcggccctggcacctccaccgagcccagcgagggcagcgcacccggcagccctgccggcagccccacctccacagaggagggaaccagcaccgagcccagcgaaggcagcgccccaggcaccagcaccgagcctagtgagcaggagattaaacggatcaacaagatcagaagaagacttgtgaaagacagcaacaccaagaaggccggcaagacaggccccatgaaaaccctgctggttagagtgatgacacccgatctgagagagcggctggaaaacctgagaaagaagcctgaaaatatcccccagcccatcagcaatacatctagagccaacctgaataagctgctgaccgattacaccgaaatgaagaaggcgatcctgcatgtgtactgggaagagttccagaaggaccctgtgggcctgatgagccgggtggcccagcctgccagcaagaagatcgatcagaacaagctgaaacctgagatggacgagaagggcaacctgaccaccgccggctttgcctgctctcagtgtggccagcccctgttcgtgtacaagctggagcaggtgtctgagaagggcaaggcttacaccaactacttcggacggtgcaatgtggccgagcacgaaaagctgatcctgctggcccagctgaagcccgagaaggatagcgacgaagccgtgacatatagcctgggaaagtttgggcagagggccctggatttctacagcattcatgtgaccaaggagtccacccaccccgtgaagcccctggcccagatcgccggaaacagatacgcctccggacctgtgggaaaggccctgagcgacgcatgtatgggcacaatcgcctccttcctgtctaagtaccaggacatcatcatcgaacaccagaaggtggtgaagggcaaccagaagagactggagagcctgcgggagctggccggcaaggaaaacctggaataccctagcgtgaccctgccacctcagcctcacaccaaggagggcgttgatgcctacaacgaagtgatcgcccgggtgcgaatgtgggtgaacctgaacctgtggcagaagctgaagctaagcagagatgatgccaagcctctgctgagactgaagggattcccttcctttcctctggtcgagagacaggccaacgaagtggactggtgggacatggtgtgtaacgtgaagaagctgatcaacgagaaaaaggaggatggcaaggtgttttggcagaatctggctggctacaagagacaggaagccctgagaccatacctgagcagcgaggaagatcggaagaagggaaagaaattcgctcggtaccagctgggcgacctgctgctgcacctggaaaagaagcacggcgaggactggggaaaggtgtacgacgaggcctgggagcggattgacaagaaagtggaaggcctgagcaagcacatcaagctggaagaggaacggagaagcgaggacgcccagagcaaggccgccctgaccgactggctgcgggctaaggccagcttcgtgatcgagggcctgaaggaggccgacaaggacgagttctgcagatgcgagctgaagctgcagaagtggtacggggacctgcggggaaagcccttcgccatcgaagccgagaacagcatcctggacatcagcggcttcagcaagcagtacaactgtgccttcatctggcagaaggacggcgtgaagaagctgaacctgtacctgatcatcaactacttcaagggcggcaagctgcggttcaagaagatcaaacctgaagccttcgaagccaacagattctacaccgtgatcaacaaaaagagcggcgagatcgtgcccatggaggtgaacttcaacttcgacgaccccaacctgatcatcctgcctctggcctttggcaagagacagggcagagaattcatctggaacgacctgctgtccctggaaaccggcagcctgaagctggccaacggaagagtgatcgagaagacactgtacaacagaagaacccggcaggatgagcctgccctgttcgtggccctgaccttcgagcggcgggaggtcctggactcctccaatatcaaaccaatgaacctgatcggcgtggcaagaggcgaaaacatccccgccgtgatcgccctgaccgaccccgagggctgcccactgagccggtttaaggatagcctgggaaacccaacccacatcctgagaatcggcgagagctataaggagaagcagcggaccatccaggccaagaaggaggtggagcagcggagagccggcggctacagccggaagtacgccagcaaagccaagaatctggcagacgatatggtgagaaacaccgctagagatctgctgtactacgccgtgacccaggatgccatgctgatcttcgccaacctgagccggggcttcggccggcagggcaagcggaccttcatggccgagagacagtacacacggatggaggactggctgaccgccaagctggcctacgagggcctgagcaagacctacctgtccaagacactggcccagtacacctccaagacatgcagcaactgtgggtttaccatcaccagcgccgactacgacagggtgctggagaagctgaagaagacagcaacaggctggatgaccacaattaacggcaaggagctgaaggtggagggccagattacctactacaacagatacaagagacagaacgtagtcaaggacctgtccgtcgagctggatagactgagcgaagaatctgtgaacaacgacatctcctcctggacaaagggcagaagcggagaagctctgagcctcctgaagaaaagattctcccatagacccgtgcaggagaagttcgtgtgcctgaactgcggcttcgagacacacgcagccgagcaagccgccctgaacatcgccagatcctggctgttcctgcggagccaggagtacaagaaataccagacaaacaagacaaccggcaacaccgataagagagccttcgtcgagacctggcagtccttttaccggaagaagcttaaggaggtgtggaaacctgccgtgcggtctggcggatctggcggaggctccaccagccccaagaaaaagagaaaagtctaagctgccttctgcggggcttgccttctggccatgcccttcttctctcccttgcacctgtacctcttggtctttgaataaagcctgagtaggaaggctagcaaaaaaaaaaaaaaaaaaaaaaaaaaaaaaaaaaaaaaaaaaaaaaaaaaaaaaaaaaaaaaaaaaaaaaaaaaaaaaaagcccagccggctccccaacctctaccgaggagggcacctctgagtccgccacccccgagagcggccctggcacctccaccgagcccagcgagggcagcgcacccggcagccctgccggcagccccacctccacagaggagggaaccagcaccgagcccagcgaaggcagcgccccaggcaccagcaccgagcctagtgagcaggagattaaacggatcaacaagatcagaagaagacttgtgaaagacagcaacaccaagaaggccggcaagacaggccccatgaaaaccctgctggttagagtgatgacacccgatctgagagagcggctggaaaacctgagaaagaagcctgaaaatatcccccagcccatcagcaatacatctagagccaacctgaataagctgctgaccgattacaccgaaatgaagaaggcgatcctgcatgtgtactgggaagagttccagaaggaccctgtgggcctgatgagccgggtggcccagcctgccagcaagaagatcgatcagaacaagctgaaacctgagatggacgagaagggcaacctgaccaccgccggctttgcctgctctcagtgtggccagcccctgttcgtgtacaagctggagcaggtgtctgagaagggcaaggcttacaccaactacttcggacggtgcaatgtggccgagcacgaaaagctgatcctgctggcccagctgaagcccgagaaggatagcgacgaagccgtgacatatagcctgggaaagtttgggcagagggccctggatttctacagcattcatgtgaccaaggagtccacccaccccgtgaagcccctggcccagatcgccggaaacagatacgcctccggacctgtgggaaaggccctgagcgacgcatgtatgggcacaatcgcctccttcctgtctaagtaccaggacatcatcatcgaacaccagaaggtggtgaagggcaaccagaagagactggagagcctgcgggagctggccggcaaggaaaacctggaataccctagcgtgaccctgccacctcagcctcacaccaaggagggcgttgatgcctacaacgaagtgatcgcccgggtgcgaatgtgggtgaacctgaacctgtggcagaagctgaagctaagcagagatgatgccaagcctctgctgagactgaagggattcccttcctttcctctggtcgagagacaggccaacgaagtggactggtgggacatggtgtgtaacgtgaagaagctgatcaacgagaaaaaggaggatggcaaggtgttttggcagaatctggctggctacaagagacaggaagccctgagaccatacctgagcagcgaggaagatcggaagaagggaaagaaattcgctcggtaccagctgggcgacctgctgctgcacctggaaaagaagcacggcgaggactggggaaaggtgtacgacgaggcctgggagcggattgacaagaaagtggaaggcctgagcaagcacatcaagctggaagaggaacggagaagcgaggacgcccagagcaaggccgccctgaccgactggctgcgggctaaggccagcttcgtgatcgagggcctgaaggaggccgacaaggacgagttctgcagatgcgagctgaagctgcagaagtggtacggggacctgcggggaaagcccttcgccatcgaagccgagaacagcatcctggacatcagcggcttcagcaagcagtacaactgtgccttcatctggcagaaggacggcgtgaagaagctgaacctgtacctgatcatcaactacttcaagggcggcaagctgcggttcaagaagatcaaacctgaagccttcgaagccaacagattctacaccgtgatcaacaaaaagagcggcgagatcgtgcccatggaggtgaacttcaacttcgacgaccccaacctgatcatcctgcctctggcctttggcaagagacagggcagagaattcatctggaacgacctgctgtccctggaaaccggcagcctgaagctggccaacggaagagtgatcgagaagacactgtacaacagaagaacccggcaggatgagcctgccctgttcgtggccctgaccttcgagcggcgggaggtcctggactcctccaatatcaaaccaatgaacctgatcggcgtggcaagaggcgaaaacatccccgccgtgatcgccctgaccgaccccgagggctgcccactgagccggtttaaggatagcctgggaaacccaacccacatcctgagaatcggcgagagctataaggagaagcagcggaccatccaggccaagaaggaggtggagcagcggagagccggcggctacagccggaagtacgccagcaaagccaagaatctggcagacgatatggtgagaaacaccgctagagatctgctgtactacgccgtgacccaggatgccatgctgatcttcgccaacctgagccggggcttcggccggcagggcaagcggaccttcatggccgagagacagtacacacggatggaggactggctgaccgccaagctggcctacgagggcctgagcaagacctacctgtccaagacactggcccagtacacctccaagacatgcagcaactgtgggtttaccatcaccagcgccgactacgacagggtgctggagaagctgaagaagacagcaacaggctggatgaccacaattaacggcaaggagctgaaggtggagggccagattacctactacaacagatacaagagacagaacgtagtcaaggacctgtccgtcgagctggatagactgagcgaagaatctgtgaacaacgacatctcctcctggacaaagggcagaagcggagaagctctgagcctcctgaagaaaagattctcccatagacccgtgcaggagaagttcgtgtgcctgaactgcggcttcgagacacacgcagccgagcaagccgccctgaacatcgccagatcctggctgttcctgcggagccaggagtacaagaaataccagacaaacaagacaaccggcaacaccgataagagagccttcgtcgagacctggcagtccttttaccggaagaagcttaaggaggtgtggaaacctgccgtgcggtctggcggatctggcggaggctccaccagccccaagaaaaagagaaaagtctaagctgccttctgcggggcttgccttctggccatgcccttcttctctcccttgcacctgtacctcttggtctttgaataaagcctgagtaggaaggctagcaaaaaaaaaaaaaaaaaaaaaaaaaaaaaaaaaaaaaaaaaaaaaaaaaaaaaaaaaaaaaaaaaaaaaaaaaaaaaaaa

SEQ ID NO: 10342 - RNA, 8787 nt, synthetic construct
  source 1..8787: mol_type = other RNA
aggaaataagagagaaaagaagagtaagaagaaatataagagccaccatggcccctaagaagaagcgtaaagtgagccggatgaaccacgaccaggagttcgacccccctaaggtgtaccctcccgtccccgccgagaagagaaagcccatccgggtcctgagcctgttcgatggcatcgccaccggtctgctggtgctgaaggacctgggcatccaggtggataggtacattgcctccgaggtgtgcgaggactccatcaccgtgggaatggtgcgtcatcagggcaagatcatgtacgtgggcgacgtgcggagcgtgacacagaagcatatccaggagtggggccctttcgacctggtgatcggcggcagcccttgcaatgacctgagcatcgtgaacccagcccggaagggcctgtacgagggaaccggcagactgttcttcgagttttacagactgctgcacgacgcccggcctaaggaaggcgacgaccggcccttcttttggctgttcgagaatgtggtggccatgggagtcagcgacaagcgggatattagccggttcctggagagcaaccccgtgatgatcgatgccaaggaagtgagcgccgcccaccgggccagatacttctggggcaatctgcctggcatgaacagacccctggccagcaccgtgaacgacaagctggagctgcaggagtgcctggagcacggccggatcgccaagttcagcaaggtgagaaccatcaccacccgaagcaacagcatcaaacaaggcaaggaccagcactttcctgtgttcatgaacgagaaggaggacatcctgtggtgtaccgagatggagagagtgttcgggttcccagtccactacacagatgtcagcaacatgtctagactggccagacagagactgctgggaagaagctggtccgtccctgtgatcagacacctgttcgcccctctgaaggagtacttcgcctgcgtgagcagcggcaacagcaacgccaacagccggggccccagcttctctagcggcctggtgccactgtccctgagagggagccacatgggccccatggagatctacaaaaccgtgagcgcctggaagcggcagcctgtgcgcgtgctgagcctgtttcggaatatcgataaagtcctgaaaagcctgggattcctggagagcggctctggctccggcggtggcaccctgaagtacgtggaggatgtgacaaacgtggtcagacgggatgtggagaagtggggccccttcgatctggtgtacggcagcacccaacccctgggcagctcttgtgaccggtgccctggctggtacatgtttcagttccaccggatcctgcagtacgccctgccgagacaggagtcccagcggccattcttttggattttcatggacaacttgctgctgaccgaggatgaccaggaaactaccactcggttcctgcagaccgaagccgtgaccctgcaggacgtgagaggccgggactaccagaacgccatgcgggtgtggtccaacatccctggactgaaaagcaagcacgcacctctgacccctaaagaagaggagtacctgcaggcccaggtgcggagcagaagcaagctggacgcccctaaggtggatctgctggtgaagaattgcctcctgcccctgagagagtacttcaagtatttcagccagaatagtctgcccctgggaggcagcggcggcggctgctaccaggacagcgtgaccttcgacgacgtggccgtggacttcacccaggaggagtggaccctgctggacagcacccagaggagcctgtacagcgacgtgatgctggagaactacaagaacctggccaccgtgggcggccagatcatcaagcccagcctgatcagctggctggagcaggaggagagcaagaccgtgcagggcggcgtgctgcagggcaggaagacccagtggaggggcaccggcggcccaagcagcggcgcccctcctcccagcggcggcaggcggcccaagcagcggcgcccctcctcccagcggcggcagcccagccggctccccaacctctaccgaggagggcacctctgagtccgccacccccgagagcggccctggcacctccaccgagcccagcgagggcagcgcacccggcagccctgccggcagccccacctccacagaggagggaaccagcaccgagcccagcgaaggcagcgccccaggcaccagcaccgagcctagtgagcaggagattaaacggatcaacaagatcagaagaagacttgtgaaagacagcaacaccaagaaggccggcaagacaggccccatgaaaaccctgctggttagagtgatgacacccgatctgagagagcggctggaaaacctgagaaagaagcctgaaaatatcccccagcccatcagcaatacatctagagccaacctgaataagctgctgaccgattacaccgaaatgaagaaggcgatcctgcatgtgtactgggaagagttccagaaggaccctgtgggcctgatgagccgggtggcccagcctgccagcaagaagatcgatcagaacaagctgaaacctgagatggacgagaagggcaacctgaccaccgccggctttgcctgctctcagtgtggccagcccctgttcgtgtacaagctggagcaggtgtctgagaagggcaaggcttacaccaactacttcggacggtgcaatgtggccgagcacgaaaagctgatcctgctggcccagctgaagcccgagaaggatagcgacgaagccgtgacatatagcctgggaaagtttgggcagagggccctggatttctacagcattcatgtgaccaaggagtccacccaccccgtgaagcccctggcccagatcgccggaaacagatacgcctccggacctgtgggaaaggccctgagcgacgcatgtatgggcacaatcgcctccttcctgtctaagtaccaggacatcatcatcgaacaccagaaggtggtgaagggcaaccagaagagactggagagcctgcgggagctggccggcaaggaaaacctggaataccctagcgtgaccctgccacctcagcctcacaccaaggagggcgttgatgcctacaacgaagtgatcgcccgggtgcgaatgtgggtgaacctgaacctgtggcagaagctgaagctaagcagagatgatgccaagcctctgctgagactgaagggattcccttcctttcctctggtcgagagacaggccaacgaagtggactggtgggacatggtgtgtaacgtgaagaagctgatcaacgagaaaaaggaggatggcaaggtgttttggcagaatctggctggctacaagagacaggaagccctgagaccatacctgagcagcgaggaagatcggaagaagggaaagaaattcgctcggtaccagctgggcgacctgctgctgcacctggaaaagaagcacggcgaggactggggaaaggtgtacgacgaggcctgggagcggattgacaagaaagtggaaggcctgagcaagcacatcaagctggaagaggaacggagaagcgaggacgcccagagcaaggccgccctgaccgactggctgcgggctaaggccagcttcgtgatcgagggcctgaaggaggccgacaaggacgagttctgcagatgcgagctgaagctgcagaagtggtacggggacctgcggggaaagcccttcgccatcgaagccgagaacagcatcctggacatcagcggcttcagcaagcagtacaactgtgccttcatctggcagaaggacggcgtgaagaagctgaacctgtacctgatcatcaactacttcaagggcggcaagctgcggttcaagaagatcaaacctgaagccttcgaagccaacagattctacaccgtgatcaacaaaaagagcggcgagatcgtgcccatggaggtgaacttcaacttcgacgaccccaacctgatcatcctgcctctggcctttggcaagagacagggcagagaattcatctggaacgacctgctgtccctggaaaccggcagcctgaagctggccaacggaagagtgatcgagaagacactgtacaacagaagaacccggcaggatgagcctgccctgttcgtggccctgaccttcgagcggcgggaggtcctggactcctccaatatcaaaccaatgaacctgatcggcgtggcaagaggcgaaaacatccccgccgtgatcgccctgaccgaccccgagggctgcccactgagccggtttaaggatagcctgggaaacccaacccacatcctgagaatcggcgagagctataaggagaagcagcggaccatccaggccaagaaggaggtggagcagcggagagccggcggctacagccggaagtacgccagcaaagccaagaatctggcagacgatatggtgagaaacaccgctagagatctgctgtactacgccgtgacccaggatgccatgctgatcttcgccaacctgagccggggcttcggccggcagggcaagcggaccttcatggccgagagacagtacacacggatggaggactggctgaccgccaagctggcctacgagggcctgagcaagacctacctgtccaagacactggcccagtacacctccaagacatgcagcaactgtgggtttaccatcaccagcgccgactacgacagggtgctggagaagctgaagaagacagcaacaggctggatgaccacaattaacggcaaggagctgaaggtggagggccagattacctactacaacagatacaagagacagaacgtagtcaaggacctgtccgtcgagctggatagactgagcgaagaatctgtgaacaacgacatctcctcctggacaaagggcagaagcggagaagctctgagcctcctgaagaaaagattctcccatagacccgtgcaggagaagttcgtgtgcctgaactgcggcttcgagacacacgcagccgagcaagccgccctgaacatcgccagatcctggctgttcctgcggagccaggagtacaagaaataccagacaaacaagacaaccggcaacaccgataagagagccttcgtcgagacctggcagtccttttaccggaagaagcttaaggaggtgtggaaacctgccgtgcggtctggcggatctggcggaggctccaccagccccaagaaaaagagaaaagtctaagctgccttctgcggggcttgccttctggccatgcccttcttctctcccttgcacctgtacctcttggtctttgaataaagcctgagtaggaaggctagcaaaaaaaaaaaaaaaaaaaaaaaaaaaaaaaaaaaaaaaaaaaaaaaaaaaaaaaaaaaaaaaaaaaaaaaaaaaaaaaagcccagccggctccccaacctctaccgaggagggcacctctgagtccgccacccccgagagcggccctggcacctccaccgagcccagcgagggcagcgcacccggcagccctgccggcagccccacctccacagaggagggaaccagcaccgagcccagcgaaggcagcgccccaggcaccagcaccgagcctagtgagcaggagattaaacggatcaacaagatcagaagaagacttgtgaaagacagcaacaccaagaaggccggcaagacaggccccatgaaaaccctgctggttagagtgatgacacccgatctgagagagcggctggaaaacctgagaaagaagcctgaaaatatcccccagcccatcagcaatacatctagagccaacctgaataagctgctgaccgattacaccgaaatgaagaaggcgatcctgcatgtgtactgggaagagttccagaaggaccctgtgggcctgatgagccgggtggcccagcctgccagcaagaagatcgatcagaacaagctgaaacctgagatggacgagaagggcaacctgaccaccgccggctttgcctgctctcagtgtggccagcccctgttcgtgtacaagctggagcaggtgtctgagaagggcaaggcttacaccaactacttcggacggtgcaatgtggccgagcacgaaaagctgatcctgctggcccagctgaagcccgagaaggatagcgacgaagccgtgacatatagcctgggaaagtttgggcagagggccctggatttctacagcattcatgtgaccaaggagtccacccaccccgtgaagcccctggcccagatcgccggaaacagatacgcctccggacctgtgggaaaggccctgagcgacgcatgtatgggcacaatcgcctccttcctgtctaagtaccaggacatcatcatcgaacaccagaaggtggtgaagggcaaccagaagagactggagagcctgcgggagctggccggcaaggaaaacctggaataccctagcgtgaccctgccacctcagcctcacaccaaggagggcgttgatgcctacaacgaagtgatcgcccgggtgcgaatgtgggtgaacctgaacctgtggcagaagctgaagctaagcagagatgatgccaagcctctgctgagactgaagggattcccttcctttcctctggtcgagagacaggccaacgaagtggactggtgggacatggtgtgtaacgtgaagaagctgatcaacgagaaaaaggaggatggcaaggtgttttggcagaatctggctggctacaagagacaggaagccctgagaccatacctgagcagcgaggaagatcggaagaagggaaagaaattcgctcggtaccagctgggcgacctgctgctgcacctggaaaagaagcacggcgaggactggggaaaggtgtacgacgaggcctgggagcggattgacaagaaagtggaaggcctgagcaagcacatcaagctggaagaggaacggagaagcgaggacgcccagagcaaggccgccctgaccgactggctgcgggctaaggccagcttcgtgatcgagggcctgaaggaggccgacaaggacgagttctgcagatgcgagctgaagctgcagaagtggtacggggacctgcggggaaagcccttcgccatcgaagccgagaacagcatcctggacatcagcggcttcagcaagcagtacaactgtgccttcatctggcagaaggacggcgtgaagaagctgaacctgtacctgatcatcaactacttcaagggcggcaagctgcggttcaagaagatcaaacctgaagccttcgaagccaacagattctacaccgtgatcaacaaaaagagcggcgagatcgtgcccatggaggtgaacttcaacttcgacgaccccaacctgatcatcctgcctctggcctttggcaagagacagggcagagaattcatctggaacgacctgctgtccctggaaaccggcagcctgaagctggccaacggaagagtgatcgagaagacactgtacaacagaagaacccggcaggatgagcctgccctgttcgtggccctgaccttcgagcggcgggaggtcctggactcctccaatatcaaaccaatgaacctgatcggcgtggcaagaggcgaaaacatccccgccgtgatcgccctgaccgaccccgagggctgcccactgagccggtttaaggatagcctgggaaacccaacccacatcctgagaatcggcgagagctataaggagaagcagcggaccatccaggccaagaaggaggtggagcagcggagagccggcggctacagccggaagtacgccagcaaagccaagaatctggcagacgatatggtgagaaacaccgctagagatctgctgtactacgccgtgacccaggatgccatgctgatcttcgccaacctgagccggggcttcggccggcagggcaagcggaccttcatggccgagagacagtacacacggatggaggactggctgaccgccaagctggcctacgagggcctgagcaagacctacctgtccaagacactggcccagtacacctccaagacatgcagcaactgtgggtttaccatcaccagcgccgactacgacagggtgctggagaagctgaagaagacagcaacaggctggatgaccacaattaacggcaaggagctgaaggtggagggccagattacctactacaacagatacaagagacagaacgtagtcaaggacctgtccgtcgagctggatagactgagcgaagaatctgtgaacaacgacatctcctcctggacaaagggcagaagcggagaagctctgagcctcctgaagaaaagattctcccatagacccgtgcaggagaagttcgtgtgcctgaactgcggcttcgagacacacgcagccgagcaagccgccctgaacatcgccagatcctggctgttcctgcggagccaggagtacaagaaataccagacaaacaagacaaccggcaacaccgataagagagccttcgtcgagacctggcagtccttttaccggaagaagcttaaggaggtgtggaaacctgccgtgcggtctggcggatctggcggaggctccaccagccccaagaaaaagagaaaagtctaagctgccttctgcggggcttgccttctggccatgcccttcttctctcccttgcacctgtacctcttggtctttgaataaagcctgagtaggaaggctagcaaaaaaaaaaaaaaaaaaaaaaaaaaaaaaaaaaaaaaaaaaaaaaaaaaaaaaaaaaaaaaaaaaaaaaaaaaaaaaaa

SEQ ID NO: 10343 - RNA, 8787 nt, synthetic construct
  source 1..8787: mol_type = other RNA
aggaaataagagagaaaagaagagtaagaagaaatataagagccaccatggcccctaagaagaagcgtaaagtgagccggatgaaccacgaccaggagttcgacccccctaaggtgtaccctcccgtccccgccgagaagagaaagcccatccgggtcctgagcctgttcgatggcatcgccaccggtctgctggtgctgaaggacctgggcatccaggtggataggtacattgcctccgaggtgtgcgaggactccatcaccgtgggaatggtgcgtcatcagggcaagatcatgtacgtgggcgacgtgcggagcgtgacacagaagcatatccaggagtggggccctttcgacctggtgatcggcggcagcccttgcaatgacctgagcatcgtgaacccagcccggaagggcctgtacgagggaaccggcagactgttcttcgagttttacagactgctgcacgacgcccggcctaaggaaggcgacgaccggcccttcttttggctgttcgagaatgtggtggccatgggagtcagcgacaagcgggatattagccggttcctggagagcaaccccgtgatgatcgatgccaaggaagtgagcgccgcccaccgggccagatacttctggggcaatctgcctggcatgaacagacccctggccagcaccgtgaacgacaagctggagctgcaggagtgcctggagcacggccggatcgccaagttcagcaaggtgagaaccatcaccacccgaagcaacagcatcaaacaaggcaaggaccagcactttcctgtgttcatgaacgagaaggaggacatcctgtggtgtaccgagatggagagagtgttcgggttcccagtccactacacagatgtcagcaacatgtctagactggccagacagagactgctgggaagaagctggtccgtccctgtgatcagacacctgttcgcccctctgaaggagtacttcgcctgcgtgagcagcggcaacagcaacgccaacagccggggccccagcttctctagcggcctggtgccactgtccctgagagggagccacatgggccccatggagatctacaaaaccgtgagcgcctggaagcggcagcctgtgcgcgtgctgagcctgtttcggaatatcgataaagtcctgaaaagcctgggattcctggagagcggctctggctccggcggtggcaccctgaagtacgtggaggatgtgacaaacgtggtcagacgggatgtggagaagtggggccccttcgatctggtgtacggcagcacccaacccctgggcagctcttgtgaccggtgccctggctggtacatgtttcagttccaccggatcctgcagtacgccctgccgagacaggagtcccagcggccattcttttggattttcatggacaacttgctgctgaccgaggatgaccaggaaactaccactcggttcctgcagaccgaagccgtgaccctgcaggacgtgagaggccgggactaccagaacgccatgcgggtgtggtccaacatccctggactgaaaagcaagcacgcacctctgacccctaaagaagaggagtacctgcaggcccaggtgcggagcagaagcaagctggacgcccctaaggtggatctgctggtgaagaattgcctcctgcccctgagagagtacttcaagtatttcagccagaatagtctgcccctgggaggcagcggcggcggcagccaggagctggtgaccttcgaggacgtggccatctacttcaccgaggaggagtggggcctgctggaccccgcccagaggaagctgtacagggacgtgatgctggagaacttcggcaacgtgctgctgctgggcttccccgtgagcaagcccgacatcatcagcaagctggagaggggcgagatcccctgcgtgcccttcctgcccaggaagaagatcctggtgatcaggctgggcggcggcggcggcccaagcagcggcgcccctcctcccagcggcggcaggcggcccaagcagcggcgcccctcctcccagcggcggcagcccagccggctccccaacctctaccgaggagggcacctctgagtccgccacccccgagagcggccctggcacctccaccgagcccagcgagggcagcgcacccggcagccctgccggcagccccacctccacagaggagggaaccagcaccgagcccagcgaaggcagcgccccaggcaccagcaccgagcctagtgagcaggagattaaacggatcaacaagatcagaagaagacttgtgaaagacagcaacaccaagaaggccggcaagacaggccccatgaaaaccctgctggttagagtgatgacacccgatctgagagagcggctggaaaacctgagaaagaagcctgaaaatatcccccagcccatcagcaatacatctagagccaacctgaataagctgctgaccgattacaccgaaatgaagaaggcgatcctgcatgtgtactgggaagagttccagaaggaccctgtgggcctgatgagccgggtggcccagcctgccagcaagaagatcgatcagaacaagctgaaacctgagatggacgagaagggcaacctgaccaccgccggctttgcctgctctcagtgtggccagcccctgttcgtgtacaagctggagcaggtgtctgagaagggcaaggcttacaccaactacttcggacggtgcaatgtggccgagcacgaaaagctgatcctgctggcccagctgaagcccgagaaggatagcgacgaagccgtgacatatagcctgggaaagtttgggcagagggccctggatttctacagcattcatgtgaccaaggagtccacccaccccgtgaagcccctggcccagatcgccggaaacagatacgcctccggacctgtgggaaaggccctgagcgacgcatgtatgggcacaatcgcctccttcctgtctaagtaccaggacatcatcatcgaacaccagaaggtggtgaagggcaaccagaagagactggagagcctgcgggagctggccggcaaggaaaacctggaataccctagcgtgaccctgccacctcagcctcacaccaaggagggcgttgatgcctacaacgaagtgatcgcccgggtgcgaatgtgggtgaacctgaacctgtggcagaagctgaagctaagcagagatgatgccaagcctctgctgagactgaagggattcccttcctttcctctggtcgagagacaggccaacgaagtggactggtgggacatggtgtgtaacgtgaagaagctgatcaacgagaaaaaggaggatggcaaggtgttttggcagaatctggctggctacaagagacaggaagccctgagaccatacctgagcagcgaggaagatcggaagaagggaaagaaattcgctcggtaccagctgggcgacctgctgctgcacctggaaaagaagcacggcgaggactggggaaaggtgtacgacgaggcctgggagcggattgacaagaaagtggaaggcctgagcaagcacatcaagctggaagaggaacggagaagcgaggacgcccagagcaaggccgccctgaccgactggctgcgggctaaggccagcttcgtgatcgagggcctgaaggaggccgacaaggacgagttctgcagatgcgagctgaagctgcagaagtggtacggggacctgcggggaaagcccttcgccatcgaagccgagaacagcatcctggacatcagcggcttcagcaagcagtacaactgtgccttcatctggcagaaggacggcgtgaagaagctgaacctgtacctgatcatcaactacttcaagggcggcaagctgcggttcaagaagatcaaacctgaagccttcgaagccaacagattctacaccgtgatcaacaaaaagagcggcgagatcgtgcccatggaggtgaacttcaacttcgacgaccccaacctgatcatcctgcctctggcctttggcaagagacagggcagagaattcatctggaacgacctgctgtccctggaaaccggcagcctgaagctggccaacggaagagtgatcgagaagacactgtacaacagaagaacccggcaggatgagcctgccctgttcgtggccctgaccttcgagcggcgggaggtcctggactcctccaatatcaaaccaatgaacctgatcggcgtggcaagaggcgaaaacatccccgccgtgatcgccctgaccgaccccgagggctgcccactgagccggtttaaggatagcctgggaaacccaacccacatcctgagaatcggcgagagctataaggagaagcagcggaccatccaggccaagaaggaggtggagcagcggagagccggcggctacagccggaagtacgccagcaaagccaagaatctggcagacgatatggtgagaaacaccgctagagatctgctgtactacgccgtgacccaggatgccatgctgatcttcgccaacctgagccggggcttcggccggcagggcaagcggaccttcatggccgagagacagtacacacggatggaggactggctgaccgccaagctggcctacgagggcctgagcaagacctacctgtccaagacactggcccagtacacctccaagacatgcagcaactgtgggtttaccatcaccagcgccgactacgacagggtgctggagaagctgaagaagacagcaacaggctggatgaccacaattaacggcaaggagctgaaggtggagggccagattacctactacaacagatacaagagacagaacgtagtcaaggacctgtccgtcgagctggatagactgagcgaagaatctgtgaacaacgacatctcctcctggacaaagggcagaagcggagaagctctgagcctcctgaagaaaagattctcccatagacccgtgcaggagaagttcgtgtgcctgaactgcggcttcgagacacacgcagccgagcaagccgccctgaacatcgccagatcctggctgttcctgcggagccaggagtacaagaaataccagacaaacaagacaaccggcaacaccgataagagagccttcgtcgagacctggcagtccttttaccggaagaagcttaaggaggtgtggaaacctgccgtgcggtctggcggatctggcggaggctccaccagccccaagaaaaagagaaaagtctaagctgccttctgcggggcttgccttctggccatgcccttcttctctcccttgcacctgtacctcttggtctttgaataaagcctgagtaggaaggctagcaaaaaaaaaaaaaaaaaaaaaaaaaaaaaaaaaaaaaaaaaaaaaaaaaaaaaaaaaaaaaaaaaaaaaaaaaaaaaaaagcccagccggctccccaacctctaccgaggagggcacctctgagtccgccacccccgagagcggccctggcacctccaccgagcccagcgagggcagcgcacccggcagccctgccggcagccccacctccacagaggagggaaccagcaccgagcccagcgaaggcagcgccccaggcaccagcaccgagcctagtgagcaggagattaaacggatcaacaagatcagaagaagacttgtgaaagacagcaacaccaagaaggccggcaagacaggccccatgaaaaccctgctggttagagtgatgacacccgatctgagagagcggctggaaaacctgagaaagaagcctgaaaatatcccccagcccatcagcaatacatctagagccaacctgaataagctgctgaccgattacaccgaaatgaagaaggcgatcctgcatgtgtactgggaagagttccagaaggaccctgtgggcctgatgagccgggtggcccagcctgccagcaagaagatcgatcagaacaagctgaaacctgagatggacgagaagggcaacctgaccaccgccggctttgcctgctctcagtgtggccagcccctgttcgtgtacaagctggagcaggtgtctgagaagggcaaggcttacaccaactacttcggacggtgcaatgtggccgagcacgaaaagctgatcctgctggcccagctgaagcccgagaaggatagcgacgaagccgtgacatatagcctgggaaagtttgggcagagggccctggatttctacagcattcatgtgaccaaggagtccacccaccccgtgaagcccctggcccagatcgccggaaacagatacgcctccggacctgtgggaaaggccctgagcgacgcatgtatgggcacaatcgcctccttcctgtctaagtaccaggacatcatcatcgaacaccagaaggtggtgaagggcaaccagaagagactggagagcctgcgggagctggccggcaaggaaaacctggaataccctagcgtgaccctgccacctcagcctcacaccaaggagggcgttgatgcctacaacgaagtgatcgcccgggtgcgaatgtgggtgaacctgaacctgtggcagaagctgaagctaagcagagatgatgccaagcctctgctgagactgaagggattcccttcctttcctctggtcgagagacaggccaacgaagtggactggtgggacatggtgtgtaacgtgaagaagctgatcaacgagaaaaaggaggatggcaaggtgttttggcagaatctggctggctacaagagacaggaagccctgagaccatacctgagcagcgaggaagatcggaagaagggaaagaaattcgctcggtaccagctgggcgacctgctgctgcacctggaaaagaagcacggcgaggactggggaaaggtgtacgacgaggcctgggagcggattgacaagaaagtggaaggcctgagcaagcacatcaagctggaagaggaacggagaagcgaggacgcccagagcaaggccgccctgaccgactggctgcgggctaaggccagcttcgtgatcgagggcctgaaggaggccgacaaggacgagttctgcagatgcgagctgaagctgcagaagtggtacggggacctgcggggaaagcccttcgccatcgaagccgagaacagcatcctggacatcagcggcttcagcaagcagtacaactgtgccttcatctggcagaaggacggcgtgaagaagctgaacctgtacctgatcatcaactacttcaagggcggcaagctgcggttcaagaagatcaaacctgaagccttcgaagccaacagattctacaccgtgatcaacaaaaagagcggcgagatcgtgcccatggaggtgaacttcaacttcgacgaccccaacctgatcatcctgcctctggcctttggcaagagacagggcagagaattcatctggaacgacctgctgtccctggaaaccggcagcctgaagctggccaacggaagagtgatcgagaagacactgtacaacagaagaacccggcaggatgagcctgccctgttcgtggccctgaccttcgagcggcgggaggtcctggactcctccaatatcaaaccaatgaacctgatcggcgtggcaagaggcgaaaacatccccgccgtgatcgccctgaccgaccccgagggctgcccactgagccggtttaaggatagcctgggaaacccaacccacatcctgagaatcggcgagagctataaggagaagcagcggaccatccaggccaagaaggaggtggagcagcggagagccggcggctacagccggaagtacgccagcaaagccaagaatctggcagacgatatggtgagaaacaccgctagagatctgctgtactacgccgtgacccaggatgccatgctgatcttcgccaacctgagccggggcttcggccggcagggcaagcggaccttcatggccgagagacagtacacacggatggaggactggctgaccgccaagctggcctacgagggcctgagcaagacctacctgtccaagacactggcccagtacacctccaagacatgcagcaactgtgggtttaccatcaccagcgccgactacgacagggtgctggagaagctgaagaagacagcaacaggctggatgaccacaattaacggcaaggagctgaaggtggagggccagattacctactacaacagatacaagagacagaacgtagtcaaggacctgtccgtcgagctggatagactgagcgaagaatctgtgaacaacgacatctcctcctggacaaagggcagaagcggagaagctctgagcctcctgaagaaaagattctcccatagacccgtgcaggagaagttcgtgtgcctgaactgcggcttcgagacacacgcagccgagcaagccgccctgaacatcgccagatcctggctgttcctgcggagccaggagtacaagaaataccagacaaacaagacaaccggcaacaccgataagagagccttcgtcgagacctggcagtccttttaccggaagaagcttaaggaggtgtggaaacctgccgtgcggtctggcggatctggcggaggctccaccagccccaagaaaaagagaaaagtctaagctgccttctgcggggcttgccttctggccatgcccttcttctctcccttgcacctgtacctcttggtctttgaataaagcctgagtaggaaggctagcaaaaaaaaaaaaaaaaaaaaaaaaaaaaaaaaaaaaaaaaaaaaaaaaaaaaaaaaaaaaaaaaaaaaaaaaaaaaaaaa

SEQ ID NO: 10344 - RNA, 8787 nt, synthetic construct
  source 1..8787: mol_type = other RNA
aggaaataagagagaaaagaagagtaagaagaaatataagagccaccatggcccctaagaagaagcgtaaagtgagccggatgaaccacgaccaggagttcgacccccctaaggtgtaccctcccgtccccgccgagaagagaaagcccatccgggtcctgagcctgttcgatggcatcgccaccggtctgctggtgctgaaggacctgggcatccaggtggataggtacattgcctccgaggtgtgcgaggactccatcaccgtgggaatggtgcgtcatcagggcaagatcatgtacgtgggcgacgtgcggagcgtgacacagaagcatatccaggagtggggccctttcgacctggtgatcggcggcagcccttgcaatgacctgagcatcgtgaacccagcccggaagggcctgtacgagggaaccggcagactgttcttcgagttttacagactgctgcacgacgcccggcctaaggaaggcgacgaccggcccttcttttggctgttcgagaatgtggtggccatgggagtcagcgacaagcgggatattagccggttcctggagagcaaccccgtgatgatcgatgccaaggaagtgagcgccgcccaccgggccagatacttctggggcaatctgcctggcatgaacagacccctggccagcaccgtgaacgacaagctggagctgcaggagtgcctggagcacggccggatcgccaagttcagcaaggtgagaaccatcaccacccgaagcaacagcatcaaacaaggcaaggaccagcactttcctgtgttcatgaacgagaaggaggacatcctgtggtgtaccgagatggagagagtgttcgggttcccagtccactacacagatgtcagcaacatgtctagactggccagacagagactgctgggaagaagctggtccgtccctgtgatcagacacctgttcgcccctctgaaggagtacttcgcctgcgtgagcagcggcaacagcaacgccaacagccggggccccagcttctctagcggcctggtgccactgtccctgagagggagccacatgggccccatggagatctacaaaaccgtgagcgcctggaagcggcagcctgtgcgcgtgctgagcctgtttcggaatatcgataaagtcctgaaaagcctgggattcctggagagcggctctggctccggcggtggcaccctgaagtacgtggaggatgtgacaaacgtggtcagacgggatgtggagaagtggggccccttcgatctggtgtacggcagcacccaacccctgggcagctcttgtgaccggtgccctggctggtacatgtttcagttccaccggatcctgcagtacgccctgccgagacaggagtcccagcggccattcttttggattttcatggacaacttgctgctgaccgaggatgaccaggaaactaccactcggttcctgcagaccgaagccgtgaccctgcaggacgtgagaggccgggactaccagaacgccatgcgggtgtggtccaacatccctggactgaaaagcaagcacgcacctctgacccctaaagaagaggagtacctgcaggcccaggtgcggagcagaagcaagctggacgcccctaaggtggatctgctggtgaagaattgcctcctgcccctgagagagtacttcaagtatttcagccagaatagtctgcccctgggaggcagcggcggcggcctgttcgagagcgtgagcttcaaggacgtgaccatcgacttcagctgggaggagtggcagcagctggacttcgcccagaagagcctgtacagggacgtgatgctggagaactacttcaacctgatcagcgtgggctgccaggtgcccaagcccgaggtgatcttcaacctggagcaggtggagaacccctgcatgctgcacaggaagatcagcaggcagagctgcctggacggcgacatcggcggcggcccaagcagcggcgcccctcctcccagcggcggcaggcggcccaagcagcggcgcccctcctcccagcggcggcagcccagccggctccccaacctctaccgaggagggcacctctgagtccgccacccccgagagcggccctggcacctccaccgagcccagcgagggcagcgcacccggcagccctgccggcagccccacctccacagaggagggaaccagcaccgagcccagcgaaggcagcgccccaggcaccagcaccgagcctagtgagcaggagattaaacggatcaacaagatcagaagaagacttgtgaaagacagcaacaccaagaaggccggcaagacaggccccatgaaaaccctgctggttagagtgatgacacccgatctgagagagcggctggaaaacctgagaaagaagcctgaaaatatcccccagcccatcagcaatacatctagagccaacctgaataagctgctgaccgattacaccgaaatgaagaaggcgatcctgcatgtgtactgggaagagttccagaaggaccctgtgggcctgatgagccgggtggcccagcctgccagcaagaagatcgatcagaacaagctgaaacctgagatggacgagaagggcaacctgaccaccgccggctttgcctgctctcagtgtggccagcccctgttcgtgtacaagctggagcaggtgtctgagaagggcaaggcttacaccaactacttcggacggtgcaatgtggccgagcacgaaaagctgatcctgctggcccagctgaagcccgagaaggatagcgacgaagccgtgacatatagcctgggaaagtttgggcagagggccctggatttctacagcattcatgtgaccaaggagtccacccaccccgtgaagcccctggcccagatcgccggaaacagatacgcctccggacctgtgggaaaggccctgagcgacgcatgtatgggcacaatcgcctccttcctgtctaagtaccaggacatcatcatcgaacaccagaaggtggtgaagggcaaccagaagagactggagagcctgcgggagctggccggcaaggaaaacctggaataccctagcgtgaccctgccacctcagcctcacaccaaggagggcgttgatgcctacaacgaagtgatcgcccgggtgcgaatgtgggtgaacctgaacctgtggcagaagctgaagctaagcagagatgatgccaagcctctgctgagactgaagggattcccttcctttcctctggtcgagagacaggccaacgaagtggactggtgggacatggtgtgtaacgtgaagaagctgatcaacgagaaaaaggaggatggcaaggtgttttggcagaatctggctggctacaagagacaggaagccctgagaccatacctgagcagcgaggaagatcggaagaagggaaagaaattcgctcggtaccagctgggcgacctgctgctgcacctggaaaagaagcacggcgaggactggggaaaggtgtacgacgaggcctgggagcggattgacaagaaagtggaaggcctgagcaagcacatcaagctggaagaggaacggagaagcgaggacgcccagagcaaggccgccctgaccgactggctgcgggctaaggccagcttcgtgatcgagggcctgaaggaggccgacaaggacgagttctgcagatgcgagctgaagctgcagaagtggtacggggacctgcggggaaagcccttcgccatcgaagccgagaacagcatcctggacatcagcggcttcagcaagcagtacaactgtgccttcatctggcagaaggacggcgtgaagaagctgaacctgtacctgatcatcaactacttcaagggcggcaagctgcggttcaagaagatcaaacctgaagccttcgaagccaacagattctacaccgtgatcaacaaaaagagcggcgagatcgtgcccatggaggtgaacttcaacttcgacgaccccaacctgatcatcctgcctctggcctttggcaagagacagggcagagaattcatctggaacgacctgctgtccctggaaaccggcagcctgaagctggccaacggaagagtgatcgagaagacactgtacaacagaagaacccggcaggatgagcctgccctgttcgtggccctgaccttcgagcggcgggaggtcctggactcctccaatatcaaaccaatgaacctgatcggcgtggcaagaggcgaaaacatccccgccgtgatcgccctgaccgaccccgagggctgcccactgagccggtttaaggatagcctgggaaacccaacccacatcctgagaatcggcgagagctataaggagaagcagcggaccatccaggccaagaaggaggtggagcagcggagagccggcggctacagccggaagtacgccagcaaagccaagaatctggcagacgatatggtgagaaacaccgctagagatctgctgtactacgccgtgacccaggatgccatgctgatcttcgccaacctgagccggggcttcggccggcagggcaagcggaccttcatggccgagagacagtacacacggatggaggactggctgaccgccaagctggcctacgagggcctgagcaagacctacctgtccaagacactggcccagtacacctccaagacatgcagcaactgtgggtttaccatcaccagcgccgactacgacagggtgctggagaagctgaagaagacagcaacaggctggatgaccacaattaacggcaaggagctgaaggtggagggccagattacctactacaacagatacaagagacagaacgtagtcaaggacctgtccgtcgagctggatagactgagcgaagaatctgtgaacaacgacatctcctcctggacaaagggcagaagcggagaagctctgagcctcctgaagaaaagattctcccatagacccgtgcaggagaagttcgtgtgcctgaactgcggcttcgagacacacgcagccgagcaagccgccctgaacatcgccagatcctggctgttcctgcggagccaggagtacaagaaataccagacaaacaagacaaccggcaacaccgataagagagccttcgtcgagacctggcagtccttttaccggaagaagcttaaggaggtgtggaaacctgccgtgcggtctggcggatctggcggaggctccaccagccccaagaaaaagagaaaagtctaagctgccttctgcggggcttgccttctggccatgcccttcttctctcccttgcacctgtacctcttggtctttgaataaagcctgagtaggaaggctagcaaaaaaaaaaaaaaaaaaaaaaaaaaaaaaaaaaaaaaaaaaaaaaaaaaaaaaaaaaaaaaaaaaaaaaaaaaaaaaaagcccagccggctccccaacctctaccgaggagggcacctctgagtccgccacccccgagagcggccctggcacctccaccgagcccagcgagggcagcgcacccggcagccctgccggcagccccacctccacagaggagggaaccagcaccgagcccagcgaaggcagcgccccaggcaccagcaccgagcctagtgagcaggagattaaacggatcaacaagatcagaagaagacttgtgaaagacagcaacaccaagaaggccggcaagacaggccccatgaaaaccctgctggttagagtgatgacacccgatctgagagagcggctggaaaacctgagaaagaagcctgaaaatatcccccagcccatcagcaatacatctagagccaacctgaataagctgctgaccgattacaccgaaatgaagaaggcgatcctgcatgtgtactgggaagagttccagaaggaccctgtgggcctgatgagccgggtggcccagcctgccagcaagaagatcgatcagaacaagctgaaacctgagatggacgagaagggcaacctgaccaccgccggctttgcctgctctcagtgtggccagcccctgttcgtgtacaagctggagcaggtgtctgagaagggcaaggcttacaccaactacttcggacggtgcaatgtggccgagcacgaaaagctgatcctgctggcccagctgaagcccgagaaggatagcgacgaagccgtgacatatagcctgggaaagtttgggcagagggccctggatttctacagcattcatgtgaccaaggagtccacccaccccgtgaagcccctggcccagatcgccggaaacagatacgcctccggacctgtgggaaaggccctgagcgacgcatgtatgggcacaatcgcctccttcctgtctaagtaccaggacatcatcatcgaacaccagaaggtggtgaagggcaaccagaagagactggagagcctgcgggagctggccggcaaggaaaacctggaataccctagcgtgaccctgccacctcagcctcacaccaaggagggcgttgatgcctacaacgaagtgatcgcccgggtgcgaatgtgggtgaacctgaacctgtggcagaagctgaagctaagcagagatgatgccaagcctctgctgagactgaagggattcccttcctttcctctggtcgagagacaggccaacgaagtggactggtgggacatggtgtgtaacgtgaagaagctgatcaacgagaaaaaggaggatggcaaggtgttttggcagaatctggctggctacaagagacaggaagccctgagaccatacctgagcagcgaggaagatcggaagaagggaaagaaattcgctcggtaccagctgggcgacctgctgctgcacctggaaaagaagcacggcgaggactggggaaaggtgtacgacgaggcctgggagcggattgacaagaaagtggaaggcctgagcaagcacatcaagctggaagaggaacggagaagcgaggacgcccagagcaaggccgccctgaccgactggctgcgggctaaggccagcttcgtgatcgagggcctgaaggaggccgacaaggacgagttctgcagatgcgagctgaagctgcagaagtggtacggggacctgcggggaaagcccttcgccatcgaagccgagaacagcatcctggacatcagcggcttcagcaagcagtacaactgtgccttcatctggcagaaggacggcgtgaagaagctgaacctgtacctgatcatcaactacttcaagggcggcaagctgcggttcaagaagatcaaacctgaagccttcgaagccaacagattctacaccgtgatcaacaaaaagagcggcgagatcgtgcccatggaggtgaacttcaacttcgacgaccccaacctgatcatcctgcctctggcctttggcaagagacagggcagagaattcatctggaacgacctgctgtccctggaaaccggcagcctgaagctggccaacggaagagtgatcgagaagacactgtacaacagaagaacccggcaggatgagcctgccctgttcgtggccctgaccttcgagcggcgggaggtcctggactcctccaatatcaaaccaatgaacctgatcggcgtggcaagaggcgaaaacatccccgccgtgatcgccctgaccgaccccgagggctgcccactgagccggtttaaggatagcctgggaaacccaacccacatcctgagaatcggcgagagctataaggagaagcagcggaccatccaggccaagaaggaggtggagcagcggagagccggcggctacagccggaagtacgccagcaaagccaagaatctggcagacgatatggtgagaaacaccgctagagatctgctgtactacgccgtgacccaggatgccatgctgatcttcgccaacctgagccggggcttcggccggcagggcaagcggaccttcatggccgagagacagtacacacggatggaggactggctgaccgccaagctggcctacgagggcctgagcaagacctacctgtccaagacactggcccagtacacctccaagacatgcagcaactgtgggtttaccatcaccagcgccgactacgacagggtgctggagaagctgaagaagacagcaacaggctggatgaccacaattaacggcaaggagctgaaggtggagggccagattacctactacaacagatacaagagacagaacgtagtcaaggacctgtccgtcgagctggatagactgagcgaagaatctgtgaacaacgacatctcctcctggacaaagggcagaagcggagaagctctgagcctcctgaagaaaagattctcccatagacccgtgcaggagaagttcgtgtgcctgaactgcggcttcgagacacacgcagccgagcaagccgccctgaacatcgccagatcctggctgttcctgcggagccaggagtacaagaaataccagacaaacaagacaaccggcaacaccgataagagagccttcgtcgagacctggcagtccttttaccggaagaagcttaaggaggtgtggaaacctgccgtgcggtctggcggatctggcggaggctccaccagccccaagaaaaagagaaaagtctaagctgccttctgcggggcttgccttctggccatgcccttcttctctcccttgcacctgtacctcttggtctttgaataaagcctgagtaggaaggctagcaaaaaaaaaaaaaaaaaaaaaaaaaaaaaaaaaaaaaaaaaaaaaaaaaaaaaaaaaaaaaaaaaaaaaaaaaaaaaaaa

SEQ ID NO: 10345 - RNA, 8787 nt, synthetic construct
  source 1..8787: mol_type = other RNA
aggaaataagagagaaaagaagagtaagaagaaatataagagccaccatggcccctaagaagaagcgtaaagtgagccggatgaaccacgaccaggagttcgacccccctaaggtgtaccctcccgtccccgccgagaagagaaagcccatccgggtcctgagcctgttcgatggcatcgccaccggtctgctggtgctgaaggacctgggcatccaggtggataggtacattgcctccgaggtgtgcgaggactccatcaccgtgggaatggtgcgtcatcagggcaagatcatgtacgtgggcgacgtgcggagcgtgacacagaagcatatccaggagtggggccctttcgacctggtgatcggcggcagcccttgcaatgacctgagcatcgtgaacccagcccggaagggcctgtacgagggaaccggcagactgttcttcgagttttacagactgctgcacgacgcccggcctaaggaaggcgacgaccggcccttcttttggctgttcgagaatgtggtggccatgggagtcagcgacaagcgggatattagccggttcctggagagcaaccccgtgatgatcgatgccaaggaagtgagcgccgcccaccgggccagatacttctggggcaatctgcctggcatgaacagacccctggccagcaccgtgaacgacaagctggagctgcaggagtgcctggagcacggccggatcgccaagttcagcaaggtgagaaccatcaccacccgaagcaacagcatcaaacaaggcaaggaccagcactttcctgtgttcatgaacgagaaggaggacatcctgtggtgtaccgagatggagagagtgttcgggttcccagtccactacacagatgtcagcaacatgtctagactggccagacagagactgctgggaagaagctggtccgtccctgtgatcagacacctgttcgcccctctgaaggagtacttcgcctgcgtgagcagcggcaacagcaacgccaacagccggggccccagcttctctagcggcctggtgccactgtccctgagagggagccacatgggccccatggagatctacaaaaccgtgagcgcctggaagcggcagcctgtgcgcgtgctgagcctgtttcggaatatcgataaagtcctgaaaagcctgggattcctggagagcggctctggctccggcggtggcaccctgaagtacgtggaggatgtgacaaacgtggtcagacgggatgtggagaagtggggccccttcgatctggtgtacggcagcacccaacccctgggcagctcttgtgaccggtgccctggctggtacatgtttcagttccaccggatcctgcagtacgccctgccgagacaggagtcccagcggccattcttttggattttcatggacaacttgctgctgaccgaggatgaccaggaaactaccactcggttcctgcagaccgaagccgtgaccctgcaggacgtgagaggccgggactaccagaacgccatgcgggtgtggtccaacatccctggactgaaaagcaagcacgcacctctgacccctaaagaagaggagtacctgcaggcccaggtgcggagcagaagcaagctggacgcccctaaggtggatctgctggtgaagaattgcctcctgcccctgagagagtacttcaagtatttcagccagaatagtctgcccctgggaggcagcggcggcggcgcccagggcctggtgctgttcgaggacgtgagcgtggacttcacccagaaggagtggcagctgctggacaggacccagaggctgctgtacagggacgtgatgctggagaactacggccacctggtgagcctgggccactgcgtgagcaagcccgagctgatcctgaagctggagcaggaggaggagccctggatcctgaagggccagctggccagcgagagccaccccgaggtgcagaggaccggcggcccaagcagcggcgcccctcctcccagcggcggcaggcggcccaagcagcggcgcccctcctcccagcggcggcagcccagccggctccccaacctctaccgaggagggcacctctgagtccgccacccccgagagcggccctggcacctccaccgagcccagcgagggcagcgcacccggcagccctgccggcagccccacctccacagaggagggaaccagcaccgagcccagcgaaggcagcgccccaggcaccagcaccgagcctagtgagcaggagattaaacggatcaacaagatcagaagaagacttgtgaaagacagcaacaccaagaaggccggcaagacaggccccatgaaaaccctgctggttagagtgatgacacccgatctgagagagcggctggaaaacctgagaaagaagcctgaaaatatcccccagcccatcagcaatacatctagagccaacctgaataagctgctgaccgattacaccgaaatgaagaaggcgatcctgcatgtgtactgggaagagttccagaaggaccctgtgggcctgatgagccgggtggcccagcctgccagcaagaagatcgatcagaacaagctgaaacctgagatggacgagaagggcaacctgaccaccgccggctttgcctgctctcagtgtggccagcccctgttcgtgtacaagctggagcaggtgtctgagaagggcaaggcttacaccaactacttcggacggtgcaatgtggccgagcacgaaaagctgatcctgctggcccagctgaagcccgagaaggatagcgacgaagccgtgacatatagcctgggaaagtttgggcagagggccctggatttctacagcattcatgtgaccaaggagtccacccaccccgtgaagcccctggcccagatcgccggaaacagatacgcctccggacctgtgggaaaggccctgagcgacgcatgtatgggcacaatcgcctccttcctgtctaagtaccaggacatcatcatcgaacaccagaaggtggtgaagggcaaccagaagagactggagagcctgcgggagctggccggcaaggaaaacctggaataccctagcgtgaccctgccacctcagcctcacaccaaggagggcgttgatgcctacaacgaagtgatcgcccgggtgcgaatgtgggtgaacctgaacctgtggcagaagctgaagctaagcagagatgatgccaagcctctgctgagactgaagggattcccttcctttcctctggtcgagagacaggccaacgaagtggactggtgggacatggtgtgtaacgtgaagaagctgatcaacgagaaaaaggaggatggcaaggtgttttggcagaatctggctggctacaagagacaggaagccctgagaccatacctgagcagcgaggaagatcggaagaagggaaagaaattcgctcggtaccagctgggcgacctgctgctgcacctggaaaagaagcacggcgaggactggggaaaggtgtacgacgaggcctgggagcggattgacaagaaagtggaaggcctgagcaagcacatcaagctggaagaggaacggagaagcgaggacgcccagagcaaggccgccctgaccgactggctgcgggctaaggccagcttcgtgatcgagggcctgaaggaggccgacaaggacgagttctgcagatgcgagctgaagctgcagaagtggtacggggacctgcggggaaagcccttcgccatcgaagccgagaacagcatcctggacatcagcggcttcagcaagcagtacaactgtgccttcatctggcagaaggacggcgtgaagaagctgaacctgtacctgatcatcaactacttcaagggcggcaagctgcggttcaagaagatcaaacctgaagccttcgaagccaacagattctacaccgtgatcaacaaaaagagcggcgagatcgtgcccatggaggtgaacttcaacttcgacgaccccaacctgatcatcctgcctctggcctttggcaagagacagggcagagaattcatctggaacgacctgctgtccctggaaaccggcagcctgaagctggccaacggaagagtgatcgagaagacactgtacaacagaagaacccggcaggatgagcctgccctgttcgtggccctgaccttcgagcggcgggaggtcctggactcctccaatatcaaaccaatgaacctgatcggcgtggcaagaggcgaaaacatccccgccgtgatcgccctgaccgaccccgagggctgcccactgagccggtttaaggatagcctgggaaacccaacccacatcctgagaatcggcgagagctataaggagaagcagcggaccatccaggccaagaaggaggtggagcagcggagagccggcggctacagccggaagtacgccagcaaagccaagaatctggcagacgatatggtgagaaacaccgctagagatctgctgtactacgccgtgacccaggatgccatgctgatcttcgccaacctgagccggggcttcggccggcagggcaagcggaccttcatggccgagagacagtacacacggatggaggactggctgaccgccaagctggcctacgagggcctgagcaagacctacctgtccaagacactggcccagtacacctccaagacatgcagcaactgtgggtttaccatcaccagcgccgactacgacagggtgctggagaagctgaagaagacagcaacaggctggatgaccacaattaacggcaaggagctgaaggtggagggccagattacctactacaacagatacaagagacagaacgtagtcaaggacctgtccgtcgagctggatagactgagcgaagaatctgtgaacaacgacatctcctcctggacaaagggcagaagcggagaagctctgagcctcctgaagaaaagattctcccatagacccgtgcaggagaagttcgtgtgcctgaactgcggcttcgagacacacgcagccgagcaagccgccctgaacatcgccagatcctggctgttcctgcggagccaggagtacaagaaataccagacaaacaagacaaccggcaacaccgataagagagccttcgtcgagacctggcagtccttttaccggaagaagcttaaggaggtgtggaaacctgccgtgcggtctggcggatctggcggaggctccaccagccccaagaaaaagagaaaagtctaagctgccttctgcggggcttgccttctggccatgcccttcttctctcccttgcacctgtacctcttggtctttgaataaagcctgagtaggaaggctagcaaaaaaaaaaaaaaaaaaaaaaaaaaaaaaaaaaaaaaaaaaaaaaaaaaaaaaaaaaaaaaaaaaaaaaaaaaaaaaaagcccagccggctccccaacctctaccgaggagggcacctctgagtccgccacccccgagagcggccctggcacctccaccgagcccagcgagggcagcgcacccggcagccctgccggcagccccacctccacagaggagggaaccagcaccgagcccagcgaaggcagcgccccaggcaccagcaccgagcctagtgagcaggagattaaacggatcaacaagatcagaagaagacttgtgaaagacagcaacaccaagaaggccggcaagacaggccccatgaaaaccctgctggttagagtgatgacacccgatctgagagagcggctggaaaacctgagaaagaagcctgaaaatatcccccagcccatcagcaatacatctagagccaacctgaataagctgctgaccgattacaccgaaatgaagaaggcgatcctgcatgtgtactgggaagagttccagaaggaccctgtgggcctgatgagccgggtggcccagcctgccagcaagaagatcgatcagaacaagctgaaacctgagatggacgagaagggcaacctgaccaccgccggctttgcctgctctcagtgtggccagcccctgttcgtgtacaagctggagcaggtgtctgagaagggcaaggcttacaccaactacttcggacggtgcaatgtggccgagcacgaaaagctgatcctgctggcccagctgaagcccgagaaggatagcgacgaagccgtgacatatagcctgggaaagtttgggcagagggccctggatttctacagcattcatgtgaccaaggagtccacccaccccgtgaagcccctggcccagatcgccggaaacagatacgcctccggacctgtgggaaaggccctgagcgacgcatgtatgggcacaatcgcctccttcctgtctaagtaccaggacatcatcatcgaacaccagaaggtggtgaagggcaaccagaagagactggagagcctgcgggagctggccggcaaggaaaacctggaataccctagcgtgaccctgccacctcagcctcacaccaaggagggcgttgatgcctacaacgaagtgatcgcccgggtgcgaatgtgggtgaacctgaacctgtggcagaagctgaagctaagcagagatgatgccaagcctctgctgagactgaagggattcccttcctttcctctggtcgagagacaggccaacgaagtggactggtgggacatggtgtgtaacgtgaagaagctgatcaacgagaaaaaggaggatggcaaggtgttttggcagaatctggctggctacaagagacaggaagccctgagaccatacctgagcagcgaggaagatcggaagaagggaaagaaattcgctcggtaccagctgggcgacctgctgctgcacctggaaaagaagcacggcgaggactggggaaaggtgtacgacgaggcctgggagcggattgacaagaaagtggaaggcctgagcaagcacatcaagctggaagaggaacggagaagcgaggacgcccagagcaaggccgccctgaccgactggctgcgggctaaggccagcttcgtgatcgagggcctgaaggaggccgacaaggacgagttctgcagatgcgagctgaagctgcagaagtggtacggggacctgcggggaaagcccttcgccatcgaagccgagaacagcatcctggacatcagcggcttcagcaagcagtacaactgtgccttcatctggcagaaggacggcgtgaagaagctgaacctgtacctgatcatcaactacttcaagggcggcaagctgcggttcaagaagatcaaacctgaagccttcgaagccaacagattctacaccgtgatcaacaaaaagagcggcgagatcgtgcccatggaggtgaacttcaacttcgacgaccccaacctgatcatcctgcctctggcctttggcaagagacagggcagagaattcatctggaacgacctgctgtccctggaaaccggcagcctgaagctggccaacggaagagtgatcgagaagacactgtacaacagaagaacccggcaggatgagcctgccctgttcgtggccctgaccttcgagcggcgggaggtcctggactcctccaatatcaaaccaatgaacctgatcggcgtggcaagaggcgaaaacatccccgccgtgatcgccctgaccgaccccgagggctgcccactgagccggtttaaggatagcctgggaaacccaacccacatcctgagaatcggcgagagctataaggagaagcagcggaccatccaggccaagaaggaggtggagcagcggagagccggcggctacagccggaagtacgccagcaaagccaagaatctggcagacgatatggtgagaaacaccgctagagatctgctgtactacgccgtgacccaggatgccatgctgatcttcgccaacctgagccggggcttcggccggcagggcaagcggaccttcatggccgagagacagtacacacggatggaggactggctgaccgccaagctggcctacgagggcctgagcaagacctacctgtccaagacactggcccagtacacctccaagacatgcagcaactgtgggtttaccatcaccagcgccgactacgacagggtgctggagaagctgaagaagacagcaacaggctggatgaccacaattaacggcaaggagctgaaggtggagggccagattacctactacaacagatacaagagacagaacgtagtcaaggacctgtccgtcgagctggatagactgagcgaagaatctgtgaacaacgacatctcctcctggacaaagggcagaagcggagaagctctgagcctcctgaagaaaagattctcccatagacccgtgcaggagaagttcgtgtgcctgaactgcggcttcgagacacacgcagccgagcaagccgccctgaacatcgccagatcctggctgttcctgcggagccaggagtacaagaaataccagacaaacaagacaaccggcaacaccgataagagagccttcgtcgagacctggcagtccttttaccggaagaagcttaaggaggtgtggaaacctgccgtgcggtctggcggatctggcggaggctccaccagccccaagaaaaagagaaaagtctaagctgccttctgcggggcttgccttctggccatgcccttcttctctcccttgcacctgtacctcttggtctttgaataaagcctgagtaggaaggctagcaaaaaaaaaaaaaaaaaaaaaaaaaaaaaaaaaaaaaaaaaaaaaaaaaaaaaaaaaaaaaaaaaaaaaaaaaaaaaaaa

SEQ ID NO: 10346 - RNA, 8787 nt, synthetic construct
  source 1..8787: mol_type = other RNA
aggaaataagagagaaaagaagagtaagaagaaatataagagccaccatggcccctaagaagaagcgtaaagtgagccggatgaaccacgaccaggagttcgacccccctaaggtgtaccctcccgtccccgccgagaagagaaagcccatccgggtcctgagcctgttcgatggcatcgccaccggtctgctggtgctgaaggacctgggcatccaggtggataggtacattgcctccgaggtgtgcgaggactccatcaccgtgggaatggtgcgtcatcagggcaagatcatgtacgtgggcgacgtgcggagcgtgacacagaagcatatccaggagtggggccctttcgacctggtgatcggcggcagcccttgcaatgacctgagcatcgtgaacccagcccggaagggcctgtacgagggaaccggcagactgttcttcgagttttacagactgctgcacgacgcccggcctaaggaaggcgacgaccggcccttcttttggctgttcgagaatgtggtggccatgggagtcagcgacaagcgggatattagccggttcctggagagcaaccccgtgatgatcgatgccaaggaagtgagcgccgcccaccgggccagatacttctggggcaatctgcctggcatgaacagacccctggccagcaccgtgaacgacaagctggagctgcaggagtgcctggagcacggccggatcgccaagttcagcaaggtgagaaccatcaccacccgaagcaacagcatcaaacaaggcaaggaccagcactttcctgtgttcatgaacgagaaggaggacatcctgtggtgtaccgagatggagagagtgttcgggttcccagtccactacacagatgtcagcaacatgtctagactggccagacagagactgctgggaagaagctggtccgtccctgtgatcagacacctgttcgcccctctgaaggagtacttcgcctgcgtgagcagcggcaacagcaacgccaacagccggggccccagcttctctagcggcctggtgccactgtccctgagagggagccacatgggccccatggagatctacaaaaccgtgagcgcctggaagcggcagcctgtgcgcgtgctgagcctgtttcggaatatcgataaagtcctgaaaagcctgggattcctggagagcggctctggctccggcggtggcaccctgaagtacgtggaggatgtgacaaacgtggtcagacgggatgtggagaagtggggccccttcgatctggtgtacggcagcacccaacccctgggcagctcttgtgaccggtgccctggctggtacatgtttcagttccaccggatcctgcagtacgccctgccgagacaggagtcccagcggccattcttttggattttcatggacaacttgctgctgaccgaggatgaccaggaaactaccactcggttcctgcagaccgaagccgtgaccctgcaggacgtgagaggccgggactaccagaacgccatgcgggtgtggtccaacatccctggactgaaaagcaagcacgcacctctgacccctaaagaagaggagtacctgcaggcccaggtgcggagcagaagcaagctggacgcccctaaggtggatctgctggtgaagaattgcctcctgcccctgagagagtacttcaagtatttcagccagaatagtctgcccctgggaggcagcggcggcggcacccagggcagcctgagcttcagggacgtgaccgtgggcttcacccaggaggagtggcagcacctggaccccgcccagaggagcctgtacagggacgtgatgctggagaactacagccacctggtgagcctgggctacagcatcagcaagcccgaggtgatcctgaagctggagcagggcgaggagccctggatcctggaggaggagttccccagccagagcgacctggagctgatcaagagcggcggcccaagcagcggcgcccctcctcccagcggcggcaggcggcccaagcagcggcgcccctcctcccagcggcggcagcccagccggctccccaacctctaccgaggagggcacctctgagtccgccacccccgagagcggccctggcacctccaccgagcccagcgagggcagcgcacccggcagccctgccggcagccccacctccacagaggagggaaccagcaccgagcccagcgaaggcagcgccccaggcaccagcaccgagcctagtgagcaggagattaaacggatcaacaagatcagaagaagacttgtgaaagacagcaacaccaagaaggccggcaagacaggccccatgaaaaccctgctggttagagtgatgacacccgatctgagagagcggctggaaaacctgagaaagaagcctgaaaatatcccccagcccatcagcaatacatctagagccaacctgaataagctgctgaccgattacaccgaaatgaagaaggcgatcctgcatgtgtactgggaagagttccagaaggaccctgtgggcctgatgagccgggtggcccagcctgccagcaagaagatcgatcagaacaagctgaaacctgagatggacgagaagggcaacctgaccaccgccggctttgcctgctctcagtgtggccagcccctgttcgtgtacaagctggagcaggtgtctgagaagggcaaggcttacaccaactacttcggacggtgcaatgtggccgagcacgaaaagctgatcctgctggcccagctgaagcccgagaaggatagcgacgaagccgtgacatatagcctgggaaagtttgggcagagggccctggatttctacagcattcatgtgaccaaggagtccacccaccccgtgaagcccctggcccagatcgccggaaacagatacgcctccggacctgtgggaaaggccctgagcgacgcatgtatgggcacaatcgcctccttcctgtctaagtaccaggacatcatcatcgaacaccagaaggtggtgaagggcaaccagaagagactggagagcctgcgggagctggccggcaaggaaaacctggaataccctagcgtgaccctgccacctcagcctcacaccaaggagggcgttgatgcctacaacgaagtgatcgcccgggtgcgaatgtgggtgaacctgaacctgtggcagaagctgaagctaagcagagatgatgccaagcctctgctgagactgaagggattcccttcctttcctctggtcgagagacaggccaacgaagtggactggtgggacatggtgtgtaacgtgaagaagctgatcaacgagaaaaaggaggatggcaaggtgttttggcagaatctggctggctacaagagacaggaagccctgagaccatacctgagcagcgaggaagatcggaagaagggaaagaaattcgctcggtaccagctgggcgacctgctgctgcacctggaaaagaagcacggcgaggactggggaaaggtgtacgacgaggcctgggagcggattgacaagaaagtggaaggcctgagcaagcacatcaagctggaagaggaacggagaagcgaggacgcccagagcaaggccgccctgaccgactggctgcgggctaaggccagcttcgtgatcgagggcctgaaggaggccgacaaggacgagttctgcagatgcgagctgaagctgcagaagtggtacggggacctgcggggaaagcccttcgccatcgaagccgagaacagcatcctggacatcagcggcttcagcaagcagtacaactgtgccttcatctggcagaaggacggcgtgaagaagctgaacctgtacctgatcatcaactacttcaagggcggcaagctgcggttcaagaagatcaaacctgaagccttcgaagccaacagattctacaccgtgatcaacaaaaagagcggcgagatcgtgcccatggaggtgaacttcaacttcgacgaccccaacctgatcatcctgcctctggcctttggcaagagacagggcagagaattcatctggaacgacctgctgtccctggaaaccggcagcctgaagctggccaacggaagagtgatcgagaagacactgtacaacagaagaacccggcaggatgagcctgccctgttcgtggccctgaccttcgagcggcgggaggtcctggactcctccaatatcaaaccaatgaacctgatcggcgtggcaagaggcgaaaacatccccgccgtgatcgccctgaccgaccccgagggctgcccactgagccggtttaaggatagcctgggaaacccaacccacatcctgagaatcggcgagagctataaggagaagcagcggaccatccaggccaagaaggaggtggagcagcggagagccggcggctacagccggaagtacgccagcaaagccaagaatctggcagacgatatggtgagaaacaccgctagagatctgctgtactacgccgtgacccaggatgccatgctgatcttcgccaacctgagccggggcttcggccggcagggcaagcggaccttcatggccgagagacagtacacacggatggaggactggctgaccgccaagctggcctacgagggcctgagcaagacctacctgtccaagacactggcccagtacacctccaagacatgcagcaactgtgggtttaccatcaccagcgccgactacgacagggtgctggagaagctgaagaagacagcaacaggctggatgaccacaattaacggcaaggagctgaaggtggagggccagattacctactacaacagatacaagagacagaacgtagtcaaggacctgtccgtcgagctggatagactgagcgaagaatctgtgaacaacgacatctcctcctggacaaagggcagaagcggagaagctctgagcctcctgaagaaaagattctcccatagacccgtgcaggagaagttcgtgtgcctgaactgcggcttcgagacacacgcagccgagcaagccgccctgaacatcgccagatcctggctgttcctgcggagccaggagtacaagaaataccagacaaacaagacaaccggcaacaccgataagagagccttcgtcgagacctggcagtccttttaccggaagaagcttaaggaggtgtggaaacctgccgtgcggtctggcggatctggcggaggctccaccagccccaagaaaaagagaaaagtctaagctgccttctgcggggcttgccttctggccatgcccttcttctctcccttgcacctgtacctcttggtctttgaataaagcctgagtaggaaggctagcaaaaaaaaaaaaaaaaaaaaaaaaaaaaaaaaaaaaaaaaaaaaaaaaaaaaaaaaaaaaaaaaaaaaaaaaaaaaaaaagcccagccggctccccaacctctaccgaggagggcacctctgagtccgccacccccgagagcggccctggcacctccaccgagcccagcgagggcagcgcacccggcagccctgccggcagccccacctccacagaggagggaaccagcaccgagcccagcgaaggcagcgccccaggcaccagcaccgagcctagtgagcaggagattaaacggatcaacaagatcagaagaagacttgtgaaagacagcaacaccaagaaggccggcaagacaggccccatgaaaaccctgctggttagagtgatgacacccgatctgagagagcggctggaaaacctgagaaagaagcctgaaaatatcccccagcccatcagcaatacatctagagccaacctgaataagctgctgaccgattacaccgaaatgaagaaggcgatcctgcatgtgtactgggaagagttccagaaggaccctgtgggcctgatgagccgggtggcccagcctgccagcaagaagatcgatcagaacaagctgaaacctgagatggacgagaagggcaacctgaccaccgccggctttgcctgctctcagtgtggccagcccctgttcgtgtacaagctggagcaggtgtctgagaagggcaaggcttacaccaactacttcggacggtgcaatgtggccgagcacgaaaagctgatcctgctggcccagctgaagcccgagaaggatagcgacgaagccgtgacatatagcctgggaaagtttgggcagagggccctggatttctacagcattcatgtgaccaaggagtccacccaccccgtgaagcccctggcccagatcgccggaaacagatacgcctccggacctgtgggaaaggccctgagcgacgcatgtatgggcacaatcgcctccttcctgtctaagtaccaggacatcatcatcgaacaccagaaggtggtgaagggcaaccagaagagactggagagcctgcgggagctggccggcaaggaaaacctggaataccctagcgtgaccctgccacctcagcctcacaccaaggagggcgttgatgcctacaacgaagtgatcgcccgggtgcgaatgtgggtgaacctgaacctgtggcagaagctgaagctaagcagagatgatgccaagcctctgctgagactgaagggattcccttcctttcctctggtcgagagacaggccaacgaagtggactggtgggacatggtgtgtaacgtgaagaagctgatcaacgagaaaaaggaggatggcaaggtgttttggcagaatctggctggctacaagagacaggaagccctgagaccatacctgagcagcgaggaagatcggaagaagggaaagaaattcgctcggtaccagctgggcgacctgctgctgcacctggaaaagaagcacggcgaggactggggaaaggtgtacgacgaggcctgggagcggattgacaagaaagtggaaggcctgagcaagcacatcaagctggaagaggaacggagaagcgaggacgcccagagcaaggccgccctgaccgactggctgcgggctaaggccagcttcgtgatcgagggcctgaaggaggccgacaaggacgagttctgcagatgcgagctgaagctgcagaagtggtacggggacctgcggggaaagcccttcgccatcgaagccgagaacagcatcctggacatcagcggcttcagcaagcagtacaactgtgccttcatctggcagaaggacggcgtgaagaagctgaacctgtacctgatcatcaactacttcaagggcggcaagctgcggttcaagaagatcaaacctgaagccttcgaagccaacagattctacaccgtgatcaacaaaaagagcggcgagatcgtgcccatggaggtgaacttcaacttcgacgaccccaacctgatcatcctgcctctggcctttggcaagagacagggcagagaattcatctggaacgacctgctgtccctggaaaccggcagcctgaagctggccaacggaagagtgatcgagaagacactgtacaacagaagaacccggcaggatgagcctgccctgttcgtggccctgaccttcgagcggcgggaggtcctggactcctccaatatcaaaccaatgaacctgatcggcgtggcaagaggcgaaaacatccccgccgtgatcgccctgaccgaccccgagggctgcccactgagccggtttaaggatagcctgggaaacccaacccacatcctgagaatcggcgagagctataaggagaagcagcggaccatccaggccaagaaggaggtggagcagcggagagccggcggctacagccggaagtacgccagcaaagccaagaatctggcagacgatatggtgagaaacaccgctagagatctgctgtactacgccgtgacccaggatgccatgctgatcttcgccaacctgagccggggcttcggccggcagggcaagcggaccttcatggccgagagacagtacacacggatggaggactggctgaccgccaagctggcctacgagggcctgagcaagacctacctgtccaagacactggcccagtacacctccaagacatgcagcaactgtgggtttaccatcaccagcgccgactacgacagggtgctggagaagctgaagaagacagcaacaggctggatgaccacaattaacggcaaggagctgaaggtggagggccagattacctactacaacagatacaagagacagaacgtagtcaaggacctgtccgtcgagctggatagactgagcgaagaatctgtgaacaacgacatctcctcctggacaaagggcagaagcggagaagctctgagcctcctgaagaaaagattctcccatagacccgtgcaggagaagttcgtgtgcctgaactgcggcttcgagacacacgcagccgagcaagccgccctgaacatcgccagatcctggctgttcctgcggagccaggagtacaagaaataccagacaaacaagacaaccggcaacaccgataagagagccttcgtcgagacctggcagtccttttaccggaagaagcttaaggaggtgtggaaacctgccgtgcggtctggcggatctggcggaggctccaccagccccaagaaaaagagaaaagtctaagctgccttctgcggggcttgccttctggccatgcccttcttctctcccttgcacctgtacctcttggtctttgaataaagcctgagtaggaaggctagcaaaaaaaaaaaaaaaaaaaaaaaaaaaaaaaaaaaaaaaaaaaaaaaaaaaaaaaaaaaaaaaaaaaaaaaaaaaaaaaa

SEQ ID NO: 10347 - RNA, 8787 nt, synthetic construct
  source 1..8787: mol_type = other RNA
aggaaataagagagaaaagaagagtaagaagaaatataagagccaccatggcccctaagaagaagcgtaaagtgagccggatgaaccacgaccaggagttcgacccccctaaggtgtaccctcccgtccccgccgagaagagaaagcccatccgggtcctgagcctgttcgatggcatcgccaccggtctgctggtgctgaaggacctgggcatccaggtggataggtacattgcctccgaggtgtgcgaggactccatcaccgtgggaatggtgcgtcatcagggcaagatcatgtacgtgggcgacgtgcggagcgtgacacagaagcatatccaggagtggggccctttcgacctggtgatcggcggcagcccttgcaatgacctgagcatcgtgaacccagcccggaagggcctgtacgagggaaccggcagactgttcttcgagttttacagactgctgcacgacgcccggcctaaggaaggcgacgaccggcccttcttttggctgttcgagaatgtggtggccatgggagtcagcgacaagcgggatattagccggttcctggagagcaaccccgtgatgatcgatgccaaggaagtgagcgccgcccaccgggccagatacttctggggcaatctgcctggcatgaacagacccctggccagcaccgtgaacgacaagctggagctgcaggagtgcctggagcacggccggatcgccaagttcagcaaggtgagaaccatcaccacccgaagcaacagcatcaaacaaggcaaggaccagcactttcctgtgttcatgaacgagaaggaggacatcctgtggtgtaccgagatggagagagtgttcgggttcccagtccactacacagatgtcagcaacatgtctagactggccagacagagactgctgggaagaagctggtccgtccctgtgatcagacacctgttcgcccctctgaaggagtacttcgcctgcgtgagcagcggcaacagcaacgccaacagccggggccccagcttctctagcggcctggtgccactgtccctgagagggagccacatgggccccatggagatctacaaaaccgtgagcgcctggaagcggcagcctgtgcgcgtgctgagcctgtttcggaatatcgataaagtcctgaaaagcctgggattcctggagagcggctctggctccggcggtggcaccctgaagtacgtggaggatgtgacaaacgtggtcagacgggatgtggagaagtggggccccttcgatctggtgtacggcagcacccaacccctgggcagctcttgtgaccggtgccctggctggtacatgtttcagttccaccggatcctgcagtacgccctgccgagacaggagtcccagcggccattcttttggattttcatggacaacttgctgctgaccgaggatgaccaggaaactaccactcggttcctgcagaccgaagccgtgaccctgcaggacgtgagaggccgggactaccagaacgccatgcgggtgtggtccaacatccctggactgaaaagcaagcacgcacctctgacccctaaagaagaggagtacctgcaggcccaggtgcggagcagaagcaagctggacgcccctaaggtggatctgctggtgaagaattgcctcctgcccctgagagagtacttcaagtatttcagccagaatagtctgcccctgggaggcagcggcggcggccaggccgagctgaccttcgaggacgtggccgtgttcctgagccaggaggagtggggcaggctggaccccgcccagaggggcctgtacagggacgtgatgctggagacctacaggaacctggtgagcctgggcgccggccccgccggccccaagcccggcgtgatcacccagctggagaggggcgacgagccctgggtgctggacacccagggcgtggagggcagggagaggcagaaggtggacggcggcccaagcagcggcgcccctcctcccagcggcggcaggcggcccaagcagcggcgcccctcctcccagcggcggcagcccagccggctccccaacctctaccgaggagggcacctctgagtccgccacccccgagagcggccctggcacctccaccgagcccagcgagggcagcgcacccggcagccctgccggcagccccacctccacagaggagggaaccagcaccgagcccagcgaaggcagcgccccaggcaccagcaccgagcctagtgagcaggagattaaacggatcaacaagatcagaagaagacttgtgaaagacagcaacaccaagaaggccggcaagacaggccccatgaaaaccctgctggttagagtgatgacacccgatctgagagagcggctggaaaacctgagaaagaagcctgaaaatatcccccagcccatcagcaatacatctagagccaacctgaataagctgctgaccgattacaccgaaatgaagaaggcgatcctgcatgtgtactgggaagagttccagaaggaccctgtgggcctgatgagccgggtggcccagcctgccagcaagaagatcgatcagaacaagctgaaacctgagatggacgagaagggcaacctgaccaccgccggctttgcctgctctcagtgtggccagcccctgttcgtgtacaagctggagcaggtgtctgagaagggcaaggcttacaccaactacttcggacggtgcaatgtggccgagcacgaaaagctgatcctgctggcccagctgaagcccgagaaggatagcgacgaagccgtgacatatagcctgggaaagtttgggcagagggccctggatttctacagcattcatgtgaccaaggagtccacccaccccgtgaagcccctggcccagatcgccggaaacagatacgcctccggacctgtgggaaaggccctgagcgacgcatgtatgggcacaatcgcctccttcctgtctaagtaccaggacatcatcatcgaacaccagaaggtggtgaagggcaaccagaagagactggagagcctgcgggagctggccggcaaggaaaacctggaataccctagcgtgaccctgccacctcagcctcacaccaaggagggcgttgatgcctacaacgaagtgatcgcccgggtgcgaatgtgggtgaacctgaacctgtggcagaagctgaagctaagcagagatgatgccaagcctctgctgagactgaagggattcccttcctttcctctggtcgagagacaggccaacgaagtggactggtgggacatggtgtgtaacgtgaagaagctgatcaacgagaaaaaggaggatggcaaggtgttttggcagaatctggctggctacaagagacaggaagccctgagaccatacctgagcagcgaggaagatcggaagaagggaaagaaattcgctcggtaccagctgggcgacctgctgctgcacctggaaaagaagcacggcgaggactggggaaaggtgtacgacgaggcctgggagcggattgacaagaaagtggaaggcctgagcaagcacatcaagctggaagaggaacggagaagcgaggacgcccagagcaaggccgccctgaccgactggctgcgggctaaggccagcttcgtgatcgagggcctgaaggaggccgacaaggacgagttctgcagatgcgagctgaagctgcagaagtggtacggggacctgcggggaaagcccttcgccatcgaagccgagaacagcatcctggacatcagcggcttcagcaagcagtacaactgtgccttcatctggcagaaggacggcgtgaagaagctgaacctgtacctgatcatcaactacttcaagggcggcaagctgcggttcaagaagatcaaacctgaagccttcgaagccaacagattctacaccgtgatcaacaaaaagagcggcgagatcgtgcccatggaggtgaacttcaacttcgacgaccccaacctgatcatcctgcctctggcctttggcaagagacagggcagagaattcatctggaacgacctgctgtccctggaaaccggcagcctgaagctggccaacggaagagtgatcgagaagacactgtacaacagaagaacccggcaggatgagcctgccctgttcgtggccctgaccttcgagcggcgggaggtcctggactcctccaatatcaaaccaatgaacctgatcggcgtggcaagaggcgaaaacatccccgccgtgatcgccctgaccgaccccgagggctgcccactgagccggtttaaggatagcctgggaaacccaacccacatcctgagaatcggcgagagctataaggagaagcagcggaccatccaggccaagaaggaggtggagcagcggagagccggcggctacagccggaagtacgccagcaaagccaagaatctggcagacgatatggtgagaaacaccgctagagatctgctgtactacgccgtgacccaggatgccatgctgatcttcgccaacctgagccggggcttcggccggcagggcaagcggaccttcatggccgagagacagtacacacggatggaggactggctgaccgccaagctggcctacgagggcctgagcaagacctacctgtccaagacactggcccagtacacctccaagacatgcagcaactgtgggtttaccatcaccagcgccgactacgacagggtgctggagaagctgaagaagacagcaacaggctggatgaccacaattaacggcaaggagctgaaggtggagggccagattacctactacaacagatacaagagacagaacgtagtcaaggacctgtccgtcgagctggatagactgagcgaagaatctgtgaacaacgacatctcctcctggacaaagggcagaagcggagaagctctgagcctcctgaagaaaagattctcccatagacccgtgcaggagaagttcgtgtgcctgaactgcggcttcgagacacacgcagccgagcaagccgccctgaacatcgccagatcctggctgttcctgcggagccaggagtacaagaaataccagacaaacaagacaaccggcaacaccgataagagagccttcgtcgagacctggcagtccttttaccggaagaagcttaaggaggtgtggaaacctgccgtgcggtctggcggatctggcggaggctccaccagccccaagaaaaagagaaaagtctaagctgccttctgcggggcttgccttctggccatgcccttcttctctcccttgcacctgtacctcttggtctttgaataaagcctgagtaggaaggctagcaaaaaaaaaaaaaaaaaaaaaaaaaaaaaaaaaaaaaaaaaaaaaaaaaaaaaaaaaaaaaaaaaaaaaaaaaaaaaaaagcccagccggctccccaacctctaccgaggagggcacctctgagtccgccacccccgagagcggccctggcacctccaccgagcccagcgagggcagcgcacccggcagccctgccggcagccccacctccacagaggagggaaccagcaccgagcccagcgaaggcagcgccccaggcaccagcaccgagcctagtgagcaggagattaaacggatcaacaagatcagaagaagacttgtgaaagacagcaacaccaagaaggccggcaagacaggccccatgaaaaccctgctggttagagtgatgacacccgatctgagagagcggctggaaaacctgagaaagaagcctgaaaatatcccccagcccatcagcaatacatctagagccaacctgaataagctgctgaccgattacaccgaaatgaagaaggcgatcctgcatgtgtactgggaagagttccagaaggaccctgtgggcctgatgagccgggtggcccagcctgccagcaagaagatcgatcagaacaagctgaaacctgagatggacgagaagggcaacctgaccaccgccggctttgcctgctctcagtgtggccagcccctgttcgtgtacaagctggagcaggtgtctgagaagggcaaggcttacaccaactacttcggacggtgcaatgtggccgagcacgaaaagctgatcctgctggcccagctgaagcccgagaaggatagcgacgaagccgtgacatatagcctgggaaagtttgggcagagggccctggatttctacagcattcatgtgaccaaggagtccacccaccccgtgaagcccctggcccagatcgccggaaacagatacgcctccggacctgtgggaaaggccctgagcgacgcatgtatgggcacaatcgcctccttcctgtctaagtaccaggacatcatcatcgaacaccagaaggtggtgaagggcaaccagaagagactggagagcctgcgggagctggccggcaaggaaaacctggaataccctagcgtgaccctgccacctcagcctcacaccaaggagggcgttgatgcctacaacgaagtgatcgcccgggtgcgaatgtgggtgaacctgaacctgtggcagaagctgaagctaagcagagatgatgccaagcctctgctgagactgaagggattcccttcctttcctctggtcgagagacaggccaacgaagtggactggtgggacatggtgtgtaacgtgaagaagctgatcaacgagaaaaaggaggatggcaaggtgttttggcagaatctggctggctacaagagacaggaagccctgagaccatacctgagcagcgaggaagatcggaagaagggaaagaaattcgctcggtaccagctgggcgacctgctgctgcacctggaaaagaagcacggcgaggactggggaaaggtgtacgacgaggcctgggagcggattgacaagaaagtggaaggcctgagcaagcacatcaagctggaagaggaacggagaagcgaggacgcccagagcaaggccgccctgaccgactggctgcgggctaaggccagcttcgtgatcgagggcctgaaggaggccgacaaggacgagttctgcagatgcgagctgaagctgcagaagtggtacggggacctgcggggaaagcccttcgccatcgaagccgagaacagcatcctggacatcagcggcttcagcaagcagtacaactgtgccttcatctggcagaaggacggcgtgaagaagctgaacctgtacctgatcatcaactacttcaagggcggcaagctgcggttcaagaagatcaaacctgaagccttcgaagccaacagattctacaccgtgatcaacaaaaagagcggcgagatcgtgcccatggaggtgaacttcaacttcgacgaccccaacctgatcatcctgcctctggcctttggcaagagacagggcagagaattcatctggaacgacctgctgtccctggaaaccggcagcctgaagctggccaacggaagagtgatcgagaagacactgtacaacagaagaacccggcaggatgagcctgccctgttcgtggccctgaccttcgagcggcgggaggtcctggactcctccaatatcaaaccaatgaacctgatcggcgtggcaagaggcgaaaacatccccgccgtgatcgccctgaccgaccccgagggctgcccactgagccggtttaaggatagcctgggaaacccaacccacatcctgagaatcggcgagagctataaggagaagcagcggaccatccaggccaagaaggaggtggagcagcggagagccggcggctacagccggaagtacgccagcaaagccaagaatctggcagacgatatggtgagaaacaccgctagagatctgctgtactacgccgtgacccaggatgccatgctgatcttcgccaacctgagccggggcttcggccggcagggcaagcggaccttcatggccgagagacagtacacacggatggaggactggctgaccgccaagctggcctacgagggcctgagcaagacctacctgtccaagacactggcccagtacacctccaagacatgcagcaactgtgggtttaccatcaccagcgccgactacgacagggtgctggagaagctgaagaagacagcaacaggctggatgaccacaattaacggcaaggagctgaaggtggagggccagattacctactacaacagatacaagagacagaacgtagtcaaggacctgtccgtcgagctggatagactgagcgaagaatctgtgaacaacgacatctcctcctggacaaagggcagaagcggagaagctctgagcctcctgaagaaaagattctcccatagacccgtgcaggagaagttcgtgtgcctgaactgcggcttcgagacacacgcagccgagcaagccgccctgaacatcgccagatcctggctgttcctgcggagccaggagtacaagaaataccagacaaacaagacaaccggcaacaccgataagagagccttcgtcgagacctggcagtccttttaccggaagaagcttaaggaggtgtggaaacctgccgtgcggtctggcggatctggcggaggctccaccagccccaagaaaaagagaaaagtctaagctgccttctgcggggcttgccttctggccatgcccttcttctctcccttgcacctgtacctcttggtctttgaataaagcctgagtaggaaggctagcaaaaaaaaaaaaaaaaaaaaaaaaaaaaaaaaaaaaaaaaaaaaaaaaaaaaaaaaaaaaaaaaaaaaaaaaaaaaaaaa

SEQ ID NO: 10348 - RNA, 8787 nt, synthetic construct
  source 1..8787: mol_type = other RNA
aggaaataagagagaaaagaagagtaagaagaaatataagagccaccatggcccctaagaagaagcgtaaagtgagccggatgaaccacgaccaggagttcgacccccctaaggtgtaccctcccgtccccgccgagaagagaaagcccatccgggtcctgagcctgttcgatggcatcgccaccggtctgctggtgctgaaggacctgggcatccaggtggataggtacattgcctccgaggtgtgcgaggactccatcaccgtgggaatggtgcgtcatcagggcaagatcatgtacgtgggcgacgtgcggagcgtgacacagaagcatatccaggagtggggccctttcgacctggtgatcggcggcagcccttgcaatgacctgagcatcgtgaacccagcccggaagggcctgtacgagggaaccggcagactgttcttcgagttttacagactgctgcacgacgcccggcctaaggaaggcgacgaccggcccttcttttggctgttcgagaatgtggtggccatgggagtcagcgacaagcgggatattagccggttcctggagagcaaccccgtgatgatcgatgccaaggaagtgagcgccgcccaccgggccagatacttctggggcaatctgcctggcatgaacagacccctggccagcaccgtgaacgacaagctggagctgcaggagtgcctggagcacggccggatcgccaagttcagcaaggtgagaaccatcaccacccgaagcaacagcatcaaacaaggcaaggaccagcactttcctgtgttcatgaacgagaaggaggacatcctgtggtgtaccgagatggagagagtgttcgggttcccagtccactacacagatgtcagcaacatgtctagactggccagacagagactgctgggaagaagctggtccgtccctgtgatcagacacctgttcgcccctctgaaggagtacttcgcctgcgtgagcagcggcaacagcaacgccaacagccggggccccagcttctctagcggcctggtgccactgtccctgagagggagccacatgggccccatggagatctacaaaaccgtgagcgcctggaagcggcagcctgtgcgcgtgctgagcctgtttcggaatatcgataaagtcctgaaaagcctgggattcctggagagcggctctggctccggcggtggcaccctgaagtacgtggaggatgtgacaaacgtggtcagacgggatgtggagaagtggggccccttcgatctggtgtacggcagcacccaacccctgggcagctcttgtgaccggtgccctggctggtacatgtttcagttccaccggatcctgcagtacgccctgccgagacaggagtcccagcggccattcttttggattttcatggacaacttgctgctgaccgaggatgaccaggaaactaccactcggttcctgcagaccgaagccgtgaccctgcaggacgtgagaggccgggactaccagaacgccatgcgggtgtggtccaacatccctggactgaaaagcaagcacgcacctctgacccctaaagaagaggagtacctgcaggcccaggtgcggagcagaagcaagctggacgcccctaaggtggatctgctggtgaagaattgcctcctgcccctgagagagtacttcaagtatttcagccagaatagtctgcccctgggaggcagcggcggcggcgcccaggtgcccgtgaccttcgaggacatcgccatctacttcagccaggaggagtgggagtacctggacgagggccagaaggccctgtacagggaggtgatgaaggagaactacgagaccctgctgctgctgggctgccccggcctgaagcccgtgatcatcagcagcatcgagcagggcgaggagccctgcgtgaggaagctgcaggagagggccgagctgtaccccaccgccggcgacgagggcggcccaagcagcggcgcccctcctcccagcggcggcaggcggcccaagcagcggcgcccctcctcccagcggcggcagcccagccggctccccaacctctaccgaggagggcacctctgagtccgccacccccgagagcggccctggcacctccaccgagcccagcgagggcagcgcacccggcagccctgccggcagccccacctccacagaggagggaaccagcaccgagcccagcgaaggcagcgccccaggcaccagcaccgagcctagtgagcaggagattaaacggatcaacaagatcagaagaagacttgtgaaagacagcaacaccaagaaggccggcaagacaggccccatgaaaaccctgctggttagagtgatgacacccgatctgagagagcggctggaaaacctgagaaagaagcctgaaaatatcccccagcccatcagcaatacatctagagccaacctgaataagctgctgaccgattacaccgaaatgaagaaggcgatcctgcatgtgtactgggaagagttccagaaggaccctgtgggcctgatgagccgggtggcccagcctgccagcaagaagatcgatcagaacaagctgaaacctgagatggacgagaagggcaacctgaccaccgccggctttgcctgctctcagtgtggccagcccctgttcgtgtacaagctggagcaggtgtctgagaagggcaaggcttacaccaactacttcggacggtgcaatgtggccgagcacgaaaagctgatcctgctggcccagctgaagcccgagaaggatagcgacgaagccgtgacatatagcctgggaaagtttgggcagagggccctggatttctacagcattcatgtgaccaaggagtccacccaccccgtgaagcccctggcccagatcgccggaaacagatacgcctccggacctgtgggaaaggccctgagcgacgcatgtatgggcacaatcgcctccttcctgtctaagtaccaggacatcatcatcgaacaccagaaggtggtgaagggcaaccagaagagactggagagcctgcgggagctggccggcaaggaaaacctggaataccctagcgtgaccctgccacctcagcctcacaccaaggagggcgttgatgcctacaacgaagtgatcgcccgggtgcgaatgtgggtgaacctgaacctgtggcagaagctgaagctaagcagagatgatgccaagcctctgctgagactgaagggattcccttcctttcctctggtcgagagacaggccaacgaagtggactggtgggacatggtgtgtaacgtgaagaagctgatcaacgagaaaaaggaggatggcaaggtgttttggcagaatctggctggctacaagagacaggaagccctgagaccatacctgagcagcgaggaagatcggaagaagggaaagaaattcgctcggtaccagctgggcgacctgctgctgcacctggaaaagaagcacggcgaggactggggaaaggtgtacgacgaggcctgggagcggattgacaagaaagtggaaggcctgagcaagcacatcaagctggaagaggaacggagaagcgaggacgcccagagcaaggccgccctgaccgactggctgcgggctaaggccagcttcgtgatcgagggcctgaaggaggccgacaaggacgagttctgcagatgcgagctgaagctgcagaagtggtacggggacctgcggggaaagcccttcgccatcgaagccgagaacagcatcctggacatcagcggcttcagcaagcagtacaactgtgccttcatctggcagaaggacggcgtgaagaagctgaacctgtacctgatcatcaactacttcaagggcggcaagctgcggttcaagaagatcaaacctgaagccttcgaagccaacagattctacaccgtgatcaacaaaaagagcggcgagatcgtgcccatggaggtgaacttcaacttcgacgaccccaacctgatcatcctgcctctggcctttggcaagagacagggcagagaattcatctggaacgacctgctgtccctggaaaccggcagcctgaagctggccaacggaagagtgatcgagaagacactgtacaacagaagaacccggcaggatgagcctgccctgttcgtggccctgaccttcgagcggcgggaggtcctggactcctccaatatcaaaccaatgaacctgatcggcgtggcaagaggcgaaaacatccccgccgtgatcgccctgaccgaccccgagggctgcccactgagccggtttaaggatagcctgggaaacccaacccacatcctgagaatcggcgagagctataaggagaagcagcggaccatccaggccaagaaggaggtggagcagcggagagccggcggctacagccggaagtacgccagcaaagccaagaatctggcagacgatatggtgagaaacaccgctagagatctgctgtactacgccgtgacccaggatgccatgctgatcttcgccaacctgagccggggcttcggccggcagggcaagcggaccttcatggccgagagacagtacacacggatggaggactggctgaccgccaagctggcctacgagggcctgagcaagacctacctgtccaagacactggcccagtacacctccaagacatgcagcaactgtgggtttaccatcaccagcgccgactacgacagggtgctggagaagctgaagaagacagcaacaggctggatgaccacaattaacggcaaggagctgaaggtggagggccagattacctactacaacagatacaagagacagaacgtagtcaaggacctgtccgtcgagctggatagactgagcgaagaatctgtgaacaacgacatctcctcctggacaaagggcagaagcggagaagctctgagcctcctgaagaaaagattctcccatagacccgtgcaggagaagttcgtgtgcctgaactgcggcttcgagacacacgcagccgagcaagccgccctgaacatcgccagatcctggctgttcctgcggagccaggagtacaagaaataccagacaaacaagacaaccggcaacaccgataagagagccttcgtcgagacctggcagtccttttaccggaagaagcttaaggaggtgtggaaacctgccgtgcggtctggcggatctggcggaggctccaccagccccaagaaaaagagaaaagtctaagctgccttctgcggggcttgccttctggccatgcccttcttctctcccttgcacctgtacctcttggtctttgaataaagcctgagtaggaaggctagcaaaaaaaaaaaaaaaaaaaaaaaaaaaaaaaaaaaaaaaaaaaaaaaaaaaaaaaaaaaaaaaaaaaaaaaaaaaaaaaagcccagccggctccccaacctctaccgaggagggcacctctgagtccgccacccccgagagcggccctggcacctccaccgagcccagcgagggcagcgcacccggcagccctgccggcagccccacctccacagaggagggaaccagcaccgagcccagcgaaggcagcgccccaggcaccagcaccgagcctagtgagcaggagattaaacggatcaacaagatcagaagaagacttgtgaaagacagcaacaccaagaaggccggcaagacaggccccatgaaaaccctgctggttagagtgatgacacccgatctgagagagcggctggaaaacctgagaaagaagcctgaaaatatcccccagcccatcagcaatacatctagagccaacctgaataagctgctgaccgattacaccgaaatgaagaaggcgatcctgcatgtgtactgggaagagttccagaaggaccctgtgggcctgatgagccgggtggcccagcctgccagcaagaagatcgatcagaacaagctgaaacctgagatggacgagaagggcaacctgaccaccgccggctttgcctgctctcagtgtggccagcccctgttcgtgtacaagctggagcaggtgtctgagaagggcaaggcttacaccaactacttcggacggtgcaatgtggccgagcacgaaaagctgatcctgctggcccagctgaagcccgagaaggatagcgacgaagccgtgacatatagcctgggaaagtttgggcagagggccctggatttctacagcattcatgtgaccaaggagtccacccaccccgtgaagcccctggcccagatcgccggaaacagatacgcctccggacctgtgggaaaggccctgagcgacgcatgtatgggcacaatcgcctccttcctgtctaagtaccaggacatcatcatcgaacaccagaaggtggtgaagggcaaccagaagagactggagagcctgcgggagctggccggcaaggaaaacctggaataccctagcgtgaccctgccacctcagcctcacaccaaggagggcgttgatgcctacaacgaagtgatcgcccgggtgcgaatgtgggtgaacctgaacctgtggcagaagctgaagctaagcagagatgatgccaagcctctgctgagactgaagggattcccttcctttcctctggtcgagagacaggccaacgaagtggactggtgggacatggtgtgtaacgtgaagaagctgatcaacgagaaaaaggaggatggcaaggtgttttggcagaatctggctggctacaagagacaggaagccctgagaccatacctgagcagcgaggaagatcggaagaagggaaagaaattcgctcggtaccagctgggcgacctgctgctgcacctggaaaagaagcacggcgaggactggggaaaggtgtacgacgaggcctgggagcggattgacaagaaagtggaaggcctgagcaagcacatcaagctggaagaggaacggagaagcgaggacgcccagagcaaggccgccctgaccgactggctgcgggctaaggccagcttcgtgatcgagggcctgaaggaggccgacaaggacgagttctgcagatgcgagctgaagctgcagaagtggtacggggacctgcggggaaagcccttcgccatcgaagccgagaacagcatcctggacatcagcggcttcagcaagcagtacaactgtgccttcatctggcagaaggacggcgtgaagaagctgaacctgtacctgatcatcaactacttcaagggcggcaagctgcggttcaagaagatcaaacctgaagccttcgaagccaacagattctacaccgtgatcaacaaaaagagcggcgagatcgtgcccatggaggtgaacttcaacttcgacgaccccaacctgatcatcctgcctctggcctttggcaagagacagggcagagaattcatctggaacgacctgctgtccctggaaaccggcagcctgaagctggccaacggaagagtgatcgagaagacactgtacaacagaagaacccggcaggatgagcctgccctgttcgtggccctgaccttcgagcggcgggaggtcctggactcctccaatatcaaaccaatgaacctgatcggcgtggcaagaggcgaaaacatccccgccgtgatcgccctgaccgaccccgagggctgcccactgagccggtttaaggatagcctgggaaacccaacccacatcctgagaatcggcgagagctataaggagaagcagcggaccatccaggccaagaaggaggtggagcagcggagagccggcggctacagccggaagtacgccagcaaagccaagaatctggcagacgatatggtgagaaacaccgctagagatctgctgtactacgccgtgacccaggatgccatgctgatcttcgccaacctgagccggggcttcggccggcagggcaagcggaccttcatggccgagagacagtacacacggatggaggactggctgaccgccaagctggcctacgagggcctgagcaagacctacctgtccaagacactggcccagtacacctccaagacatgcagcaactgtgggtttaccatcaccagcgccgactacgacagggtgctggagaagctgaagaagacagcaacaggctggatgaccacaattaacggcaaggagctgaaggtggagggccagattacctactacaacagatacaagagacagaacgtagtcaaggacctgtccgtcgagctggatagactgagcgaagaatctgtgaacaacgacatctcctcctggacaaagggcagaagcggagaagctctgagcctcctgaagaaaagattctcccatagacccgtgcaggagaagttcgtgtgcctgaactgcggcttcgagacacacgcagccgagcaagccgccctgaacatcgccagatcctggctgttcctgcggagccaggagtacaagaaataccagacaaacaagacaaccggcaacaccgataagagagccttcgtcgagacctggcagtccttttaccggaagaagcttaaggaggtgtggaaacctgccgtgcggtctggcggatctggcggaggctccaccagccccaagaaaaagagaaaagtctaagctgccttctgcggggcttgccttctggccatgcccttcttctctcccttgcacctgtacctcttggtctttgaataaagcctgagtaggaaggctagcaaaaaaaaaaaaaaaaaaaaaaaaaaaaaaaaaaaaaaaaaaaaaaaaaaaaaaaaaaaaaaaaaaaaaaaaaaaaaaaa
